United States Patent Application Publication US 2006/0048240 A1 - sequence listing, part 5

SEQ ID NO: 17469 - protein, 290 aa, Zea mays subsp. mays
  misc_feature (1)..(290): Ceres Seq. ID no. 12358549
MAGKEILHKVKDKVKDAFSSSGPETGKGKTKLSGKRVKHGYHLVKGKSNHPMEDYLVAEYRQVGEHDLGLFAIFDGHLGHTVPDFLSSHLFNNILSEPEFLSDPETAIRNAYQLTDQKILENAAELGRGGSTAVTAILIGSDKFVKLVVANVGDSRAVISKNGVAKQLSVDHEPNMERQTIEQKGGFVSNLPGDVPRVDGQLAVARAFGDRSLKKHLSSDPYVVEQTIDENTEFLILASDGLWKVMSNQEAVDEIKDCKDAQAAAKHLTEQAVNRKSKDDISVIVVKFMC

SEQ ID NO: 17470 - protein, 239 aa, Zea mays subsp. mays
  misc_feature (1)..(239): Ceres Seq. ID no. 12358550
MEDYLVAEYRQVGEHDLGLFAIFDGHLGHTVPDFLSSHLFNNILSEPEFLSDPETAIRNAYQLTDQKILENAAELGRGGSTAVTAILIGSDKFVKLVVANVGDSRAVISKNGVAKQLSVDHEPNMERQTIEQKGGFVSNLPGDVPRVDGQLAVARAFGDRSLKKHLSSDPYVVEQTIDENTEFLILASDGLWKVMSNQEAVDEIKDCKDAQAAAKHLTEQAVNRKSKDDISVIVVKFMC

SEQ ID NO: 17471 - DNA, 1899 bp, Zea mays subsp. mays
  misc_feature (1)..(1899): Ceres Seq. ID no. 12358625
ctccaccgcgcccacttcttatactgccagcgtctgctccctctcgcggaggcctcgctctggttggaaggtttggagaaactccccggctcgaggagatcgtgacattgagaggacgatgggagggcgcgcgctcctcctcctcctcctggtctcggcgttggtctttcagatccacgcctccgacccgctgctgtacgagccgttcgatgaggactttgaggggagatgggtcgtctccaagaaggatgaataccaaggtgtgtggaggcatgccaagagtgatggtcatgaggactatggcctccttgttagtgagaaggcaaggaaatacgccataatcaaggagcttgatgagccagttaccttgaaggatgggacagtggtcctgcagtttgaagtgagacttcagaatggccttgaatgcggaggtgcctacattaagtacatccgccctcaggatgctggatgggatgccaaggagtttgataatgagactccatacactattatgtttggtccagataagtgtggatcaaccaacaaggttcatttcatccttaagcacaagaatcctaagactggaaagtatgttgagcatcatctcaaattcccaccatctgtcccatatgacaagctctctcatgtctacacggctatcttgaagccagacaatgaggtcaaaattttggtagatggggaagaaaagaagaaggcgaacttcctttctgctgatgattttgagccagcacttatcccatccaagaccattcctgaccctgatgacaagaagccggaggactgggatgagagagctaaaattcctgatccagatgcagtaaagcctgatgactgggatgaggatgccccgatggaaattgtggatgatgaagccaccaagcctgagggatggttggatgatgaacctgaggagattgatgatcctgaggcagccaagcctgaggactgggacgatgaggaggatggtgaatgggaggcgccaaagattgacaaccccaagtgtgaagaggcacctggatgtggcgagtggaagaggccaatgaagcagaatcctgcttacaagggcaagtggcatgcacctatgattgacaaccccaactacaagggaatctggaagcctcaggagatccccaaccctgagtactttgagcttgacaagcctgactttgatccaattgctgctattgggattgagatctggacaatgcaggatggcatcctgtttgacaatatcttgattgctgacgatgagaaggttgccacctccattctggagaagacctggaagcccaagtatgatgttgagaaggaaaaggagaaggctgaggaggaggctgctgctggtgcagatggtctttctgagttccagaagaagatttttgacgtcctgtacaagattgctgatgttccgttcttggcaccctacaaaaccaagatcattgatgttatcgagaagggagagaagcagcccaacatcactattggcattctggtctccgttgtcgtcgtgttcgttaccgttctcttcaagatcctgtttggaggcaagaagccggtggcacctgtgaaacctgcagctgaggcgaagaagcccaaggccacagtgaccgacggtgctggaagcagtggcgacaaggatgagaaagaggacgaaaaggaggagacagcaggcccacgtcggaggacccgaagggagacatagagacctatttttgatgtgtttggatgttctggcgcctgcttattttgaggactcttaatatttctgagtgtataataggaacttgtgtcacctctgcggcttccctgctgcttatttgtttttacatggttagaccaggaaccttcacgagctgtagaatttagttcttgttggct

SEQ ID NO: 17472 - protein, 573 aa, Zea mays subsp. mays
  misc_feature (1)..(573): Ceres Seq. ID no. 12358626
STAPTSYTASVCSLSRRPRSGWKVWRNSPARGDRDIERTMGGRALLLLLLVSALVFQIHASDPLLYEPFDEDFEGRWVVSKKDEYQGVWRHAKSDGHEDYGLLVSEKARKYAIIKELDEPVTLKDGTVVLQFEVRLQNGLECGGAYIKYIRPQDAGWDAKEFDNETPYTIMFGPDKCGSTNKVHFILKHKNPKTGKYVEHHLKFPPSVPYDKLSHVYTAILKPDNEVKILVDGEEKKKANFLSADDFEPALIPSKTIPDPDDKKPEDWDERAKIPDPDAVKPDDWDEDAPMEIVDDEATKPEGWLDDEPEEIDDPEAAKPEDWDDEEDGEWEAPKIDNPKCEEAPGCGEWKRPMKQNPAYKGKWHAPMIDNPNYKGIWKPQEIPNPEYFELDKPDFDPIAAIGIEIWTMQDGILFDNILIADDEKVATSILEKTWKPKYDVEKEKEKAEEEAAAGADGLSEFQKKIFDVLYKIADVPFLAPYKTKIIDVIEKGEKQPNITIGILVSVVVVFVTVLFKILFGGKKPVAPVKPAAEAKKPKATVTDGAGSSGDKDEKEDEKEETAGPRRRTRRET

SEQ ID NO: 17473 - protein, 534 aa, Zea mays subsp. mays
  misc_feature (1)..(534): Ceres Seq. ID no. 12358627
MGGRALLLLLLVSALVFQIHASDPLLYEPFDEDFEGRWVVSKKDEYQGVWRHAKSDGHEDYGLLVSEKARKYAIIKELDEPVTLKDGTVVLQFEVRLQNGLECGGAYIKYIRPQDAGWDAKEFDNETPYTIMFGPDKCGSTNKVHFILKHKNPKTGKYVEHHLKFPPSVPYDKLSHVYTAILKPDNEVKILVDGEEKKKANFLSADDFEPALIPSKTIPDPDDKKPEDWDERAKIPDPDAVKPDDWDEDAPMEIVDDEATKPEGWLDDEPEEIDDPEAAKPEDWDDEEDGEWEAPKIDNPKCEEAPGCGEWKRPMKQNPAYKGKWHAPMIDNPNYKGIWKPQEIPNPEYFELDKPDFDPIAAIGIEIWTMQDGILFDNILIADDEKVATSILEKTWKPKYDVEKEKEKAEEEAAAGADGLSEFQKKIFDVLYKIADVPFLAPYKTKIIDVIEKGEKQPNITIGILVSVVVVFVTVLFKILFGGKKPVAPVKPAAEAKKPKATVTDGAGSSGDKDEKEDEKEETAGPRRRTRRET

SEQ ID NO: 17474 - protein, 403 aa, Zea mays subsp. mays
  misc_feature (1)..(403): Ceres Seq. ID no. 12358628
MFGPDKCGSTNKVHFILKHKNPKTGKYVEHHLKFPPSVPYDKLSHVYTAILKPDNEVKILVDGEEKKKANFLSADDFEPALIPSKTIPDPDDKKPEDWDERAKIPDPDAVKPDDWDEDAPMEIVDDEATKPEGWLDDEPEEIDDPEAAKPEDWDDEEDGEWEAPKIDNPKCEEAPGCGEWKRPMKQNPAYKGKWHAPMIDNPNYKGIWKPQEIPNPEYFELDKPDFDPIAAIGIEIWTMQDGILFDNILIADDEKVATSILEKTWKPKYDVEKEKEKAEEEAAAGADGLSEFQKKIFDVLYKIADVPFLAPYKTKIIDVIEKGEKQPNITIGILVSVVVVFVTVLFKILFGGKKPVAPVKPAAEAKKPKATVTDGAGSSGDKDEKEDEKEETAGPRRRTRRET

SEQ ID NO: 17475 - DNA, 1086 bp, Zea mays subsp. mays
  misc_feature (1)..(1086): Ceres Seq. ID no. 12358654
agtatctggaggaaggacaatgtctaggtcatctgactctgggaaaatgagtaatgatgagaaagaagactttgaagcaaatgaagatgactatatggatgtcgacaagggacatgctagtgacagtgatacagaaaaccgtatgtcagatactgactcagacaatgaaatacacagacctgaaacccctgaaagagagaaggcaccacacaggtgtatcaatatgcttcaagattgcagaagtgttgatgagtttgagaggctcaacaaaattaacgagggcacatatggtgttgtatacagagcaagggataagaagacaagtgagattgttgcattgaagaaggtaaagatggagaaggagcgagaaggtttcccattaacctctcttagggaaataaatatcctcttgtctttccacaatccttcaattgtggatgttaaggaagtagtagttggaagtagtctagatagtatttttatggttatggagtacatggaacatgatcttaaaggtgtcatggagaccatgaaacaaccatatacccaaagcgaggtaaagtgtttgatgcttcagctgctagaaggtgtaaaatatctacatgacaattgggtgcttcatagggatctgaagacctcaaatcttttttgaataaccgtggtgagttaaaaatatgtgattttggactgtctcgtcaatatggaagcccattaaaaccttatactcaactggttgtgactttgtggtacagggccccagaattgttgttaggaacaaaggagtattctactgctattgatatgtggtctgtgggctgtataatggctgagcttcttgccaaagaaccgttattcaatggaaaaacagagtttgaacagctagataagatttttagaacactcggcacacctaatgagaagatttggcctggctatgctaaattaccaggtgtgaaagtaaattttgttaaacaaccgtataatagactaagggataagttcccagccgcttctttttctgggcgaccaatcctgtctgaagctggttttgatctattgaacagactgctgacttatgaccctgat

SEQ ID NO: 17476 - protein, 216 aa, Zea mays subsp. mays
  misc_feature (1)..(216): Ceres Seq. ID no. 12358655
VSGGRTMSRSSDSGKMSNDEKEDFEANEDDYMDVDKGHASDSDTENRMSDTDSDNEIHRPETPEREKAPHRCINMLQDCRSVDEFERLNKINEGTYGVVYRARDKKTSEIVALKKVKMEKEREGFPLTSLREINILLSFHNPSIVDVKEVVVGSSLDSIFMVMEYMEHDLKGVMETMKQPYTQSEVKCLMLQLLEGVKYLHDNWVLHRDLKTSNLF

SEQ ID NO: 17477 - protein, 210 aa, Zea mays subsp. mays
  misc_feature (1)..(210): Ceres Seq. ID no. 12358656
MSRSSDSGKMSNDEKEDFEANEDDYMDVDKGHASDSDTENRMSDTDSDNEIHRPETPEREKAPHRCINMLQDCRSVDEFERLNKINEGTYGVVYRARDKKTSEIVALKKVKMEKEREGFPLTSLREINILLSFHNPSIVDVKEVVVGSSLDSIFMVMEYMEHDLKGVMETMKQPYTQSEVKCLMLQLLEGVKYLHDNWVLHRDLKTSNLF

SEQ ID NO: 17478 - protein, 201 aa, Zea mays subsp. mays
  misc_feature (1)..(201): Ceres Seq. ID no. 12358657
MSNDEKEDFEANEDDYMDVDKGHASDSDTENRMSDTDSDNEIHRPETPEREKAPHRCINMLQDCRSVDEFERLNKINEGTYGVVYRARDKKTSEIVALKKVKMEKEREGFPLTSLREINILLSFHNPSIVDVKEVVVGSSLDSIFMVMEYMEHDLKGVMETMKQPYTQSEVKCLMLQLLEGVKYLHDNWVLHRDLKTSNLF

SEQ ID NO: 17479 - DNA, 1799 bp, Zea mays subsp. mays
  misc_feature (1)..(1799): Ceres Seq. ID no. 12358658
ctataaataaataccgcccaccaacatctggtggtatcaaagaatctcctctgtatctctggcagccgcatcgtctcaatctcagtcactcccggacacgcgcacgagccaccccgcacccaactaaccaacccatggacgcgggcggaacgccgccgctgctgttcctcctggccgcggcggccgccctgctgggcgcggcgctcaggtggctgctcctggcctggcggtcggcggcgaggacggggcggctgccaccgggcagcacggggctgccgctcatcggggagacgctgcgcctcatcgcggcgtacaagacgccgaacccggagccgttcatcgacgagcgcgtggcgcggcacggcagcggggtgttcacgacgcacgtgttcggcgagcgcaccgtgttctccgcggacccggccttcaaccgcctgctcctggccgccgagggccgcgccgtcagctgcagctacccgtcgtccatcgccacgctgctgggcccgcgctcgctgctcctcaccgccggccccgcgcacaagcgcctccactcgctcacgctcgcccgcctcggccggccggcctcgccgccgctgctggcgcacatcgaccgcctcgtcctcgccaccctgcgggactggggccggccaggcgccggcgccgtcgtccgcctcctcgacgaggccaagaagatcaccttcaacctcactgtctggcagctcgtcagcatcgagcctgggccctggaccgagagcctccgccgcgagtacgtcaagctcgtcgacggcttcttctccatccccttccccttcgcctacctcctccctttcaccgcctacggccaggccctcaaggcgaggaagaaggtggctggagctcttcgggaggtgataaggaagaggatgggcgaggaggccggaactggccctggcgccggtagaaatggggagaagaaggacatggtggaggagcttctggaagcagagggtgggagcttctcggtggaggagatggtggatttctgcctgtctctgctggtgggctggctacgagaccacctccgtgctcatgacgctcgccgtcaagttcctcaccgagacgcccactgcactggcgcagctcaaggaagagcacgacagcatcagacacaggaaaggcaaggacgagcagcctctgcaatggagcgattacaagtcgatgccgtttacacaatgcgtgatcagtgagacgctgcgcgtggctaacttgatcagcggggtgttcaggcgggcgaacaccgacatccatttcaaagattacgttatcccaaagggctgcagaatcttcgcgtcgttccgagccgtgcacctgagccccgagcactacgagaacgctcgagccttcgacccctggagatggcagcagagcaagaaggagggagtactagtagtagggcaggacgcgcagcagggggcccagggccagcgtgttcactcccttcggcggggggcctcgcctgtgcccgggccacgagcttgcccgcgtcgtggtctccgttttcctccaccgcctggtgacgcgcttcagctgggaagaggctgaggaggacagggtcgtcttcttccccaccacccgcaccctcaaagggtaccccatcatcctgcggcggcgaccgggttgggatttctgacctagctcatcatgttacaatagagtcgatccatctatagttgttacactcatctctctctctctctctctctctgtctgtaataacactactgtctaatataaacaagcatctccgctctattctgttc

SEQ ID NO: 17480 - protein, 407 aa, Zea mays subsp. mays
  misc_feature (1)..(407): Ceres Seq. ID no. 12358659
INKYRPPTSGGIKESPLYLWQPHRLNLSHSRTRARATPHPTNQPMDAGGTPPLLFLLAAAAALLGAALRWLLLAWRSAARTGRLPPGSTGLPLIGETLRLIAAYKTPNPEPFIDERVARHGSGVFTTHVFGERTVFSADPAFNRLLLAAEGRAVSCSYPSSIATLLGPRSLLLTAGPAHKRLHSLTLARLGRPASPPLLAHIDRLVLATLRDWGRPGAGAVVRLLDEAKKITFNLTVWQLVSIEPGPWTESLRREYVKLVDGFFSIPFPFAYLLPFTAYGQALKARKKVAGALREVIRKRMGEEAGTGPGAGRNGEKKDMVEELLEAEGGSFSVEEMVDFCLSLLVGWLRDHLRAHDARRQVPHRDAHCTGAAQGRARQHQTQERQGRAASAMERLQVDAVYTMRDQ

SEQ ID NO: 17481 - protein, 363 aa, Zea mays subsp. mays
  misc_feature (1)..(363): Ceres Seq. ID no. 12358660
MDAGGTPPLLFLLAAAAALLGAALRWLLLAWRSAARTGRLPPGSTGLPLIGETLRLIAAYKTPNPEPFIDERVARHGSGVFTTHVFGERTVFSADPAFNRLLLAAEGRAVSCSYPSSIATLLGPRSLLLTAGPAHKRLHSLTLARLGRPASPPLLAHIDRLVLATLRDWGRPGAGAVVRLLDEAKKITFNLTVWQLVSIEPGPWTESLRREYVKLVDGFFSIPFPFAYLLPFTAYGQALKARKKVAGALREVIRKRMGEEAGTGPGAGRNGEKKDMVEELLEAEGGSFSVEEMVDFCLSLLVGWLRDHLRAHDARRQVPHRDAHCTGAAQGRARQHQTQERQGRAASAMERLQVDAVYTMRDQ

SEQ ID NO: 17482 - protein, 212 aa, Zea mays subsp. mays
  misc_feature (1)..(212): Ceres Seq. ID no. 12358661
MGRRRTWWRSFWKQRVGASRWRRWWISACLCWWAGYETTSVLMTLAVKFLTETPTALAQLKEEHDSIRHRKGKDEQPLQWSDYKSMPFTQCVISETLRVANLISGVFRRANTDIHFKDYVIPKGCRIFASFRAVHLSPEHYENARAFDPWRWQQSKKEGVLVVGQDAQQGAQGQRVHSLRRGASPVPGPRACPRRGLRFPPPPGDALQLGRG

SEQ ID NO: 17483 - DNA, 1635 bp, Zea mays subsp. mays
  misc_feature (1)..(1635): Ceres Seq. ID no. 12358682
aaggagatagagagagagggagtgagaagaaggagacgcgaggagagagagagagcggcaggcaggcaggcaggcaataaatggcagttttggtgcgcgcaggctgatggcggcgtggcaggtcctctctgtcgcctcaccgtcttaactccggccgcgcgccggcaccacaaaccacaccgctcggctgcgagcacgcgggttttaatccgtcgcagagcgcatgagcacgccgcccagagcgcagactacgacgagcagccgtctgtagagggggagggaccgagggagagatcagggcgtcaggccgttgtctctcagcttcaccttcaccttgccgggcacggcgaacggcacggcggcctatggatttggccacatggcggggttccctctaggtggaggaggccacagccgcgacgcccccgcgtcgtccgtcccgccggtgcacccctccgacgcagcgtccttcctctacgccgcgcgcgcgggagcgggcctgcagctatggcagcagcacgagcagcaacagcagcacccgttctacacctccaacatcatccgcttctccgatgacccgaccggcgccccgccctcgctcacgggcgccgcgtcgtcgtcgtcttcgcgcggcacgaggggccggcgcgggaagcggcggcggaggcggcggcggggtcagctgccaggactgcggcaaccaggccaagaaggactgcgtgcaccagcgctgccgcacctgctgcaagagccgcggcttcacctgcagcacccacgtcaagtccacctgggtccctgccgccaagagacgcgagcgccagcagcagctcgccgtgctagcggcctccgccgccgccacaaccgccggcgccggcccatcccgcgacccgaccaagcgccctcgcgcgcgcctctccgtcgccacccccgccacgtcctcggatggtcacggtcgcggagaggttcccacgggaggtgagctcggaggcggtgttccggtgcgtgcgcctggggccggtcgaccaggccgaggcggaggtcgcgtaccagaccaccgtcagcatcggcggccacgtgttcaagggcatccttcacgacgttggccctcacagcttgcctgccgctggagtcggaggcggcgccatcgagtaccacttccgccacgccggggacggattgccgccgagcacggcagccactggcgaagcaggcggcggtggcgtggggagtgtcgtcgtgtcatcggctgtggtgatggacccgtacccgacgcccggaccctacgccgccttccccgccggcgcgccgttcttccacggccacccgagacagtgaccgccggctcgctcgctcgccagcagccgtcccgctgtgtaacgacatcacgactcccatctctggctcgctcgatctgtcaatttcgttagcttcctaatttcttagcctcttgttgagatgcataaattcatgttccttctagagcctagctagctagcttaggcgcgggttagacttgtttgcttcttgagatcaattcatgaggtgagtagcaatatactcagtggctgcaagtggctaaaaatctgacatttaggaaccttgatgagacatttgagatggtttcttgcactgtgc

SEQ ID NO: 17484 - protein, 284 aa, Zea mays subsp. mays
  misc_feature (1)..(284): Ceres Seq. ID no. 12358683
MTRPAPRPRSRAPRRRRLRAARGAGAGSGGGGGGGVSCQDCGNQAKKDCVHQRCRTCCKSRGFTCSTHVKSTWVPAAKRRERQQQLAVLAASAAATTAGAGPSRDPTKRPRARLSVATPATSSDGHGRGEVPTGGELGGGVPVRAPGAGRPGRGGGRVPDHRQHRRPRVQGHPSRRWPSQLACRWSRRRRHRVPLPPRRGRIAAEHGSHWRSRRRWRGECRRVIGCGDGPVPDARTLRRLPRRRAVLPRPPETVTAGSLARQQPSRCVTTSRLPSLARSICQFR

SEQ ID NO: 17485 - protein, 199 aa, Zea mays subsp. mays
  misc_feature (1)..(199): Ceres Seq. ID no. 12358684
MAGFPLGGGGHSRDAPASSVPPVHPSDAASFLYAARAGAGLQLWQQHEQQQQHPFYTSNIIRFSDDPTGAPPSLTGAASSSSSRGTRGRRGKRRRRRRRGQLPGLRQPGQEGLRAPALPHLLQEPRLHLQHPRQVHLGPCRQETRAPAAARRASGLRRRHNRRRRPIPRPDQAPSRAPLRRHPRHVLGWSRSRRGSHGR

SEQ ID NO: 17486 - protein, 191 aa, Zea mays subsp. mays
  misc_feature (1)..(191): Ceres Seq. ID no. 12358685
KEIEREGVRRRRREERERAAGRQAGNKWQFWCAQADGGVAGPLCRLTVLTPAARRHHKPHRSAASTRVLIRRRAHEHAAQSADYDEQPSVEGEGPRERSGRQAVVSQLHLHLAGHGERHGGLWIWPHGGVPSRWRRPQPRRPRVVRPAGAPLRRSVLPLRRARGSGPAAMAAARAATAAPVLHLQHHPLLR

SEQ ID NO: 17487 - DNA, 1246 bp, Zea mays subsp. mays
  misc_feature (1)..(1246): Ceres Seq. ID no. 12358706
aaaaaaccctatttcatgtgacgtgaacccctttcgctcgctccgagtgcggaggaaggggagctcgacgcacccaagtcgcccgcccacggaacgcgccgccgccgccgccgccatcacatcacagaggcctcgccgtcgtctcggatattccccgccgtaggaccagtttccctccagctgccggagaccatgtcgggcggcctggacatgtccctggacgacctcatcaagcagtccaagtcccgacccaaggacagcccggcgtccttgtcggggcctgcccgccgcgcgccacaccccgcccgcgccgcgccctacccaccggccgctcccaaggcccgtgccgccgccgactcgccctacggggtctactccaagcacatcgccgcgatagcgccgcccccgctggccaaagcaaggtcgcttgagacgggaacgaagctgcacatctccaaccttgactccggcgtcaccatcgaggatgtccaggaactcttctcagaagttggggagctcaagcgttattctatgaattatgacaaggatgggagatctaaggggactgtggaagttgtctttgcaaggaaagtggatgctttggatgctatcaagagatacaatggtgttctacttgatgggaagccaatgaatctagagctcattggaaacaatgtcgaaccacctcccatgccaccagtaatacacagtcgtcctttgcagaactataatgatatccatagcagtatgcctcaatcccaaagaggtggtcagcgaagagtaccccaaggcaacggtcggggtggacgcagtagtcaaagcagtggtggccggggacaggggaaaggccgaggccaggaccggaatcgcaccaccatttctgctgcagatcttgacgccgaacttgacaagtaccatgcagcggcagtgaaggaggaatgaggctctggcgttctgtttactaaacagctggtaaggcgccgggacagtgtggccttctgctttagaagcatgaagtttgctatcttagtcctagtgttttatgctagaaattttttttggcccatgtacaaccgcgtctctgcgtcaagattcctggtgttttatgtgtagcatgaagttgtggtcctactttgcaggaactatcaatcatatttacagctctgcgggcacgattgagaacaattggaaactaaggggtgtttggtttgaagagtcaatccattctagatgagttggtgaaatc

SEQ ID NO: 17488 - protein, 249 aa, Zea mays subsp. mays
  misc_feature (1)..(249): Ceres Seq. ID no. 12358707
MSGGLDMSLDDLIKQSKSRPKDSPASLSGPARRAPHPARAAPYPPAAPKARAAADSPYGVYSKHIAAIAPPPLAKARSLETGTKLHISNLDSGVTIEDVQELFSEVGELKRYSMNYDKDGRSKGTVEVVFARKVDALDAIKRYNGVLLDGKPMNLELIGNNVEPPPMPPVIHSRPLQNYNDIHSSMPQSQRGGQRRVPQGNGRGGRSSQSSGGRGQGKGRGQDRNRTTISAADLDAELDKYHAAAVKEE

SEQ ID NO: 17489 - protein, 243 aa, Zea mays subsp. mays
  misc_feature (1)..(243): Ceres Seq. ID no. 12358708
MSLDDLIKQSKSRPKDSPASLSGPARRAPHPARAAPYPPAAPKARAAADSPYGVYSKHIAAIAPPPLAKARSLETGTKLHISNLDSGVTIEDVQELFSEVGELKRYSMNYDKDGRSKGTVEVVFARKVDALDAIKRYNGVLLDGKPMNLELIGNNVEPPPMPPVIHSRPLQNYNDIHSSMPQSQRGGQRRVPQGNGRGGRSSQSSGGRGQGKGRGQDRNRTTISAADLDAELDKYHAAAVKEE

SEQ ID NO: 17490 - protein, 136 aa, Zea mays subsp. mays
  misc_feature (1)..(136): Ceres Seq. ID no. 12358709
MNYDKDGRSKGTVEVVFARKVDALDAIKRYNGVLLDGKPMNLELIGNNVEPPPMPPVIHSRPLQNYNDIHSSMPQSQRGGQRRVPQGNGRGGRSSQSSGGRGQGKGRGQDRNRTTISAADLDAELDKYHAAAVKEE

SEQ ID NO: 17491 - DNA, 1986 bp, Zea mays subsp. mays
  misc_feature (1)..(1986): Ceres Seq. ID no. 12358713
attgggtgcagtcgagtagttgccacctaaccgtggcggaggcgcagtgctgttgcgagatgtggctgtgatcgagcgagataactaaaagcctccccacataaatgcaagggcgacgagacggcaagcaagcggacgcgaacaaacccccttattccatagcgagcgcgagcagcggcgccgggaggactgctgcgatggggggagacgccagcaccatcgaggggggcccgctcccgcatctcggcggccggccggcctcccgcgtgcccgacaccccgctggtgcgcacggcgggggacgccgcgcgcatggtctgggacgagtccaagcgcctctggggcatcgggctgcccatcggcgtgggcatgcctgagcatgtacgccatcagctccatcacccagatattcatcggccacctcggcaacctcccgctggccgccgcctccatcggcctctccgtgttcgccaccttcgcgctcggcttcctcctcggcatgggcagcgcgctcgagacgctctgcggccaggccttcggcgccggcgaggtcgccatgctcggcgtctacctgcagcggtcttggatcatcctcgtcgccgcctgcgtcgtcatgacgcccgtcttcgtcttcgccgagtcgctgctcctgctcatcggccaggacgccgacgtcgcgcgggagtccgccaggttcgccacctacatcgtcccctccatctacgccatgggcatcaacttcgccgccagcaagttcctccaggcgcagagcaaggtcaccgtacccgcctggatcggcttcggggcgctcctcgcctgtgccctcctcaactacctgttcgtcagcgtgctcggctggggcctccccggcgccgccgccgcctacgacatcgcgcactggatcatcgcgctcggccaggtcgtctacatcatcggatggtgcaaggacggatggaaaggatggtccgtagccgccttccacgaaatctggccattcgtcaggctctccctcgagtccgccgtcatgctctgcctcgaggtatggtacatgagcctgatcaccgtgctcaccggcgacctggaggacgcccagattgccgtggactcactaggcatatgcatgaacataaacggatgggaggccatgatcttcatcggcctcaatgccgctatcagtgtccgagtctccaacgagcttggctccggccgtccgagggccgcgtggaacgccgtcatggtcgtcgtcggcgaggcgctggtgatcgggattctgtgcatggcactcatcctcatcttcagagacagcttctccatcattttcaccagcgacaccaccctgcagcgagccgtcgccaggatcgccggcctgctcggcctcaccatggtgctcaacagcgtgcagcccgtggtttcaggggtcgcggttgggggcggatggcagggcctcgtcgcctacatcaacctcggctgctactatatcttcggcctgcccctgggctacttgctcggatacaagttcagctttggagttggggggatttggtccggcatgctttgtggtatcacccttcagacgctcatcttgctaggtgtggtttggaggacagattggaaagcagaggccgcacaagcttcaggccgtgtgcaaaagtggggcggcaaaggcaccgatgaagtcaagcctctcctggaatagaattagtgtagtactatcacgcacgaagctcgtttcatttgaataaacaactgggcaatacgccttatccctttcagaagcacagctcatttgctttcccatcgaatctgatagcttccctttcccctcctccgtgtagttaaattgatgtctctgtatgaacactgtttgaggcgactagtatgaaccctgtttgcggcgactagacgtattgaacatactttttttttcttccagttgactcagcatgacttgaacagtctcaaattgtgtgtaaaggatttactcgct

SEQ ID NO: 17492 - protein, 522 aa, Zea mays subsp. mays
  misc_feature (1)..(522): Ceres Seq. ID no. 12358714
MQGRRDGKQADANKPPYSIASASSGAGRTAAMGGDASTIEGGPLPHLGGRPASRVPDTPLVRTAGDAARMVWDESKRLWGIGLPIGVGMPEHVRHQLHHPDIHRPPRQPPAGRRLHRPLRVRHLRARLPPRHGQRARDALRPGLRRRRGRHARRLPAAVLDHPRRRLRRHDARLRLRRVAAPAHRPGRRRRAGVRQVRHLHRPLHLRHGHQLRRQQVPPGAEQGHRTRLDRLRGAPRLCPPQLPVRQRARLGPPRRRRRLRHRALDHRARPGRLHHRMVQGRMERMVRSRLPRNLAIRQALPRVRRHALPRGMVHEPDHRAHRRPGGRPDCRGLTRHMHEHKRMGGHDLHRPQCRYQCPSLQRAWLRPSEGRVERRHGRRRRGAGDRDSVHGTHPHLQRQLLHHFHQRHHPAASRRQDRRPARPHHGAQQRAARGFRGRGWGRMAGPRRLHQPRLLLYLRPAPGLLARIQVQLWSWGDLVRHALWYHPSDAHLARCGLEDRLESRGRTSFRPCAKVGRQRHR

SEQ ID NO: 17493 - protein, 491 aa, Zea mays subsp. mays
  misc_feature (1)..(491): Ceres Seq. ID no. 12358715
MGGDASTIEGGPLPHLGGRPASRVPDTPLVRTAGDAARMVWDESKRLWGIGLPIGVGMPEHVRHQLHHPDIHRPPRQPPAGRRLHRPLRVRHLRARLPPRHGQRARDALRPGLRRRRGRHARRLPAAVLDHPRRRLRRHDARLRLRRVAAPAHRPGRRRRAGVRQVRHLHRPLHLRHGHQLRRQQVPPGAEQGHRTRLDRLRGAPRLCPPQLPVRQRARLGPPRRRRRLRHRALDHRARPGRLHHRMVQGRMERMVRSRLPRNLAIRQALPRVRRHALPRGMVHEPDHRAHRRPGGRPDCRGLTRHMHEHKRMGGHDLHRPQCRYQCPSLQRAWLRPSEGRVERRHGRRRRGAGDRDSVHGTHPHLQRQLLHHFHQRHHPAASRRQDRRPARPHHGAQQRAARGFRGRGWGRMAGPRRLHQPRLLLYLRPAPGLLARIQVQLWSWGDLVRHALWYHPSDAHLARCGLEDRLESRGRTSFRPCAKVGRQRHR

SEQ ID NO: 17494 - protein, 453 aa, Zea mays subsp. mays
  misc_feature (1)..(453): Ceres Seq. ID no. 12358716
MVWDESKRLWGIGLPIGVGMPEHVRHQLHHPDIHRPPRQPPAGRRLHRPLRVRHLRARLPPRHGQRARDALRPGLRRRRGRHARRLPAAVLDHPRRRLRRHDARLRLRRVAAPAHRPGRRRRAGVRQVRHLHRPLHLRHGHQLRRQQVPPGAEQGHRTRLDRLRGAPRLCPPQLPVRQRARLGPPRRRRRLRHRALDHRARPGRLHHRMVQGRMERMVRSRLPRNLAIRQALPRVRRHALPRGMVHEPDHRAHRRPGGRPDCRGLTRHMHEHKRMGGHDLHRPQCRYQCPSLQRAWLRPSEGRVERRHGRRRRGAGDRDSVHGTHPHLQRQLLHHFHQRHHPAASRRQDRRPARPHHGAQQRAARGFRGRGWGRMAGPRRLHQPRLLLYLRPAPGLLARIQVQLWSWGDLVRHALWYHPSDAHLARCGLEDRLESRGRTSFRPCAKVGRQRHR

SEQ ID NO: 17495 - protein, 438 aa, Zea mays subsp. mays
  misc_feature (1)..(438): Ceres Seq. ID no. 12358717
MYAISSITQIFIGHLGNLPLAAASIGLSVFATFALGFLLGMGSALETLCGQAFGAGEVAMLGVYLQRSWIILVAACVVMTPVFVFAESLLLLIGQDADVARESARFATYIVPSIYAMGINFAASKFLQAQSKVTVPAWIGFGALLACALLNYLFVSVLGWGLPGAAAAYDIAHWIIALGQVVYIIGWCKDGWKGWSVAAFHEIWPFVRLSLESAVMLCLEVWYMSLITVLTGDLEDAQIAVDSLGICMNINGWEAMIFIGLNAAISVRVSNELGSGRPRAAWNAVMVVVGEALVIGILCMALILIFRDSFSIIFTSDTTLQRAVARIAGLLGLTMVLNSVQPVVSGVAVGGGWQGLVAYINLGCYYIFGLPLGYLLGYKFSFGVGGIWSGMLCGITLQTLILLGVVWRTDWKAEAAQASGRVQKWGGKGTDEVKPLLE

SEQ ID NO: 17496 - DNA, 1412 bp, Zea mays subsp. mays
  misc_feature (1)..(1412): Ceres Seq. ID no. 12358726
aaacaaatgatgatccatcgatagtggctgaggtgacagctctccaagtttcgtctgttcgctcgtggtggaaattccgctgagcgagcgagcgagcgaatcctcctcttcccagccccggcgtgaggagcgccggcgatgtcgaccggcggcaggaagatgaggacggcgtgcgtgaccggaggaaacgggtatatcgcctcggcgctcatcaaggtgctgctggagaagggctacgccgtcaagacgacggtcaggaaccctgatgacatggagaagaactcccacctcaaggacctgcaggcgctcgggtccttggaggtcttccgcgccgacctggacgaagacggcagcttcgatgacgccgtcgccggctgcgactacgccttcctggtcgccgctccggtgaacctccacacgaagaaccccgaggaagaaatgatcgagccggccgtcaggggaactctgaacgtgatgcggtcgtgcgtgaaggcgggcacggtgaggcgcgtggtcctgacctcgtcggcggccgcggtcaccaccaggccgcagctgcaaggcgatgggcacgtgctggacgaggagtcctggtccgacgtcgagtacctcagagcccacaagcctgcaggcccctgggggtacccggtgtccaaggtgctcctggagaaggaggcgagcaggttcgcggaggagcacggcatcggcctcgtcaccgtctgccccggcctcaccgtgggcgccgcgccgggccccgaccgcccgcaccaggcgtccccaactgcctctcccttctatccggcgacgaagccgcgttcgccgtgctggacgccatcgagagcgccaccgggtgcctgccgctggtccacgtcgacgacgtctgccgcgccgagctgttcgccgccgaggagggcgcggccgcgaggaggtacgtctgctgcggcctcaacacgaccgtcgccgagctcgcgcgtttcctggcggacaagtacccgcagtacggcgtcaaaacgaacctgctctccggcgagcggcttgagaagccgagagtgtgtctgtcgtccgcgaagctggtgaaggaaggtttcgagttcaggtacaggacgttggatgacatatacgacgacatggtcgagtacggcaaggccctgggaatcctgcccgacttgtgatgctgcttcctctgctctcgggccggcgatcaggagttcaggactggactttaaaccgtccgacaaaataagtctatttatgctgctactgtgcccaaccgtaattggaccttaaaaaatgtcattacaaacaatcaactgtgtcaagaaaaattgtctatgttttgctttttttttttggtctactcagaaccgtttgtctgactagtaatttctacctcaatcttccatcggaaaccc

SEQ ID NO: 17497 - protein, 312 aa, Zea mays subsp. mays
  misc_feature (1)..(312): Ceres Seq. ID no. 12358727
MSTGGRKMRTACVTGGNGYIASALIKVLLEKGYAVKTTVRNPDDMEKNSHLKDLQALGSLEVFRADLDEDGSFDDAVAGCDYAFLVAAPVNLHTKNPEEEMIEPAVRGTLNVMRSCVKAGTVRRVVLTSSAAAVTTRPQLQGDGHVLDEESWSDVEYLRAHKPAGPWGYPVSKVLLEKEASRFAEEHGIGLVTVCPGLTVGAAPGPDRPHQASPTASPFYPATKPRSPCWTPSRAPPGACRWSTSTTSAAPSCSPPRRARPRGGTSAAASTRPSPSSRVSWRTSTRSTASKRTCSPASGLRSRECVCRPRSW

SEQ ID NO: 17498 - protein, 305 aa, Zea mays subsp. mays
  misc_feature (1)..(305): Ceres Seq. ID no. 12358728
MRTACVTGGNGYIASALIKVLLEKGYAVKTTVRNPDDMEKNSHLKDLQALGSLEVFRADLDEDGSFDDAVAGCDYAFLVAAPVNLHTKNPEEEMIEPAVRGTLNVMRSCVKAGTVRRVVLTSSAAAVTTRPQLQGDGHVLDEESWSDVEYLRAHKPAGPWGYPVSKVLLEKEASRFAEEHGIGLVTVCPGLTVGAAPGPDRPHQASPTASPFYPATKPRSPCWTPSRAPPGACRWSTSTTSAAPSCSPPRRARPRGGTSAAASTRPSPSSRVSWRTSTRSTASKRTCSPASGLRSRECVCRPRSW

SEQ ID NO: 17499 - protein, 268 aa, Zea mays subsp. mays
  misc_feature (1)..(268): Ceres Seq. ID no. 12358729
MEKNSHLKDLQALGSLEVFRADLDEDGSFDDAVAGCDYAFLVAAPVNLHTKNPEEEMIEPAVRGTLNVMRSCVKAGTVRRVVLTSSAAAVTTRPQLQGDGHVLDEESWSDVEYLRAHKPAGPWGYPVSKVLLEKEASRFAEEHGIGLVTVCPGLTVGAAPGPDRPHQASPTASPFYPATKPRSPCWTPSRAPPGACRWSTSTTSAAPSCSPPRRARPRGGTSAAASTRPSPSSRVSWRTSTRSTASKRTCSPASGLRSRECVCRPRSW

SEQ ID NO: 17500 - DNA, 2011 bp, Zea mays subsp. mays
  misc_feature (1)..(2011): Ceres Seq. ID no. 12358730
ctctttcgatagctggcgaaggcgcggcgcgcagggccagtagcaaccctcccatggcctacgctgcgcctcccatggcgtcgtccctcaccgcctcccacccccctctttccccgtcccacctcataacccatccgcatcgctgccctgcgcgccccaaccccaccaccggcctcctccgcctcaccccgtctcgccgccgcggtcgtccccccgtggccgtccgcctcgcaatatctgcctcgtccacctcagccccgcccccgtcggcggatcggtcggaggccgcgtcgtcgctggagagatacctctcggcgacggtgacgggagcggtgatgggaacgggggcggccccaccagcttcggccccgccgcgcgccccgccggcgatgaaggggggacggaagcagtatagcgcgttgggggctgtcacgctcgagaaggccaagctcgatctctcccagcgccgcaagaatatcatgcccgagttggcgacaggtggtggtggtggagatattggaaaaaggatcggtcatggtgggggtgatggtggtgatgatgatggtgacgatgatgactactttgatgattttgatgagggagaggaagaaggtgggcttttcaggaggcgaattgttgtacaagagctattcaatagggagttcgtagaagctgtgttgcaagaatggtacaagacgatgagtgatttgcctaccggtcttcgccaagcttgtgagatgggtttggtgagttctgcacagatggtacgttacttgtcaatatttgcaagacctacaaacgctaggtccttctcaagagctcttccaggctggctttccagaggtcttgttggaaggacacttgcagatccatcattcccacataaaatgtctttggagtttatagctaccattgcgtcatctatttggtgtgaaatgaatattcgcaaagagaggtttaaacaagaatgggatttggtgattgttaatgctttgactgcagcttgttgcaacttgatggttcttggacttttagcaccatgccgttcatatgcgagtacatctcgatttgacttccaaaatgcaattgagaaacttccgaacaacatatttgagaagagctatcctttgagagagtttgatctagcaaaacgaatcagtgcattcttttataaagctgctgagcttagtctggtcgggtttgtagctggctctgtgcaagggggtatgtcaatagtcttgtccgcaagaaaagaaaggaggttatcggtgactattccctctatcagcaccaatgctcttggttatggagctttcctaggactctatgctaacttgcgttatcaattgctatgtggagtagaccaatatatggtcaagcgcttcgatgttttgggtgtggcaatcttcttcagcacagcagcaagactgatgaatattcagattggtgaggcatcaaggaggacttggcttggcgaggaagctgatccacagtactcagatcgactgttgagagcatacaagagacctgtggaggttgacgcggaccaatcaaggtggtttatatccaaggatgcaattgtatctggccttggtcttctaggtatcaagcagggtggacctgaggcaacattttctaagtctcgtcgaaagagagtcatccgcaaaaaggtcacttcaggttgagtttagtggatttggatagcaatgctggaacaattttgcttctgttccactatgccagagggaggtctacccaaattatggtaaatgagaaaaaggtatcaagtcaaccagcacgtggtctgtcggcgaagggatcaaagggtttgttactgggaagggttagttaaaaggtgccaattactattttataatttaattgcagttatttaaggtaagaaaatatgttgttttcttgtattgctgtgaggcaaatagacacgcttagtggtagttttgtaagattgttaatgtactgactttacatgagaaatggattctgcattttt

SEQ ID NO: 17501 - protein, 560 aa, Zea mays subsp. mays
  misc_feature (1)..(560): Ceres Seq. ID no. 12358731
LSIAGEGAARRASSNPPMAYAAPPMASSLTASHPPLSPSHLITHPHRCPARPNPTTGLLRLTPSRRRGRPPVAVRLAISASSTSAPPPSADRSEAASSLERYLSATVTGAVMGTGAAPPASAPPRAPPAMKGGRKQYSALGAVTLEKAKLDLSQRRKNIMPELATGGGGGDIGKRIGHGGGDGGDDDGDDDDYFDDFDEGEEEGGLFRRRIVVQELFNREFVEAVLQEWYKTMSDLPTGLRQACEMGLVSSAQMVRYLSIFARPTNARSFSRALPGWLSRGLVGRTLADPSFPHKMSLEFIATIASSIWCEMNIRKERFKQEWDLVIVNALTAACCNLMVLGLLAPCRSYASTSRFDFQNAIEKLPNNIFEKSYPLREFDLAKRISAFFYKAAELSLVGFVAGSVQGGMSIVLSARKERRLSVTIPSISTNALGYGAFLGLYANLRYQLLCGVDQYMVKRFDVLGVAIFFSTAARLMNIQIGEASRRTWLGEEADPQYSDRLLRAYKRPVEVDADQSRWFISKDAIVSGLGLLGIKQGGPEATFSKSRRKRVIRKKVTSG

SEQ ID NO: 17502 - protein, 543 aa, Zea mays subsp. mays
  misc_feature (1)..(543): Ceres Seq. ID no. 12358732
MAYAAPPMASSLTASHPPLSPSHLITHPHRCPARPNPTTGLLRLTPSRRRGRPPVAVRLAISASSTSAPPPSADRSEAASSLERYLSATVTGAVMGTGAAPPASAPPRAPPAMKGGRKQYSALGAVTLEKAKLDLSQRRKNIMPELATGGGGGDIGKRIGHGGGDGGDDDGDDDDYFDDFDEGEEEGGLFRRRIVVQELFNREFVEAVLQEWYKTMSDLPTGLRQACEMGLVSSAQMVRYLSIFARPTNARSFSRALPGWLSRGLVGRTLADPSFPHKMSLEFIATIASSIWCEMNIRKERFKQEWDLVIVNALTAACCNLMVLGLLAPCRSYASTSRFDFQNAIEKLPNNIFEKSYPLREFDLAKRISAFFYKAAELSLVGFVAGSVQGGMSIVLSARKERRLSVTIPSISTNALGYGAFLGLYANLRYQLLCGVDQYMVKRFDVLGVAIFFSTAARLMNIQIGEASRRTWLGEEADPQYSDRLLRAYKRPVEVDADQSRWFISKDAIVSGLGLLGIKQGGPEATFSKSRRKRVIRKKVTSG

SEQ ID NO: 17503 - protein, 536 aa, Zea mays subsp. mays
  misc_feature (1)..(536): Ceres Seq. ID no. 12358733
MASSLTASHPPLSPSHLITHPHRCPARPNPTTGLLRLTPSRRRGRPPVAVRLAISASSTSAPPPSADRSEAASSLERYLSATVTGAVMGTGAAPPASAPPRAPPAMKGGRKQYSALGAVTLEKAKLDLSQRRKNIMPELATGGGGGDIGKRIGHGGGDGGDDDGDDDDYFDDFDEGEEEGGLFRRRIVVQELFNREFVEAVLQEWYKTMSDLPTGLRQACEMGLVSSAQMVRYLSIFARPTNARSFSRALPGWLSRGLVGRTLADPSFPHKMSLEFIATIASSIWCEMNIRKERFKQEWDLVIVNALTAACCNLMVLGLLAPCRSYASTSRFDFQNAIEKLPNNIFEKSYPLREFDLAKRISAFFYKAAELSLVGFVAGSVQGGMSIVLSARKERRLSVTIPSISTNALGYGAFLGLYANLRYQLLCGVDQYMVKRFDVLGVAIFFSTAARLMNIQIGEASRRTWLGEEADPQYSDRLLRAYKRPVEVDADQSRWFISKDAIVSGLGLLGIKQGGPEATFSKSRRKRVIRKKVTSG

SEQ ID NO: 17504 - DNA, 1253 bp, Zea mays subsp. mays
  misc_feature (1)..(1253): Ceres Seq. ID no. 12358734
ctcacaccatcggaacacatagcagctggcaggaacgactgccaagcaagtccatcggtcgaggtcctagctagcgcaacgacgatggccaccgcgctctcctgcaaggccctcgcagtggccgcgctcctgtccgtggtgtccgtcgtcacctacggcgctcgcgcccagcagcagcccagccacaacgcctccgactccgagtcgtcgcaggacaggtccttgctgtcctacagcagtggctggctgcccgccaaggccacctggtacggcgcgcccaccggcgccggccccgacgacaacggtggtgcgtgcgggttcaagggcaccaaccagtacccgttctcgtccatgacgtcctgtggcaacgagcccatcttcaaggacggcaagggctgcggctcatgctatcagatacgggtgcctccggagcaaccacccggcctgctccggcgtgccgcagacggtgatcataaccgacatgaactactacccggtggccaagtaccacttcgacctgagcggcacggcgttcggcgccatggcgagttccggcctgaacgacaggctccggcacgccgggatcatcgacatgcagttccggagggtgccgtgcgacttcccgggcctgaccgtcaccttccgcgtgcagcacggctccaaccccatgtacctggccgtgctcatcgagcacgccaacatggacggcgacgtggtgcaggccgacatcatgcagaacaactccgggtactgggagcccttgcacgagtcctggggcgccgtctggcggatcgaccccagccgcccgctctgcggccccttctcggtgcgcatcaccaacgagtccggcaagcagctggtggcccagaacgtcatcccggccaactacatcgccgacgtcgactaccgctccttcgtccagtatacgaattaacccgaccggccgggcggggcgcccactgcatgagctagctcgatcggtcacctctgcgaccgtcgtacgtccgagatagctcgttgcttaagtgttcgtgtttagtggctgccgtcggcaaccgccggactgaggatttttaaacctcaattccggcgtggggtgtgtgttggtgtgtgtcttgaanatgtgtgggaaattagaggaggcgagcatcaatgcgctctcccgcccacggtcactctatcattaccggtgtgcggtgtgtaaccagcagaccatggatattggttaatactacatcagtgtgatgttgttt

SEQ ID NO: 17505 - protein, 323 aa, Zea mays subsp. mays
  misc_feature (1)..(323): Ceres Seq. ID no. 12358735
LTPSEHIAAGRNDCQASPSVEVLASATTMATALSCKALAVAALLSVVSVVTYGARAQQQPSHNASDSESSQDRSLLSYSSGWLPAKATWYGAPTGAGPDDNGGACGFKGTNQYPFSSMTSCGNEPIFKDGKGCGSCYQIRVPPEQPPGLLRRAADGDHNRHELLPGGQVPLRPERHGVRRHGEFRPERQAPARRDHRHAVPEGAVRLPGPDRHLPRAARLQPHVPGRAHRARQHGRRRGAGRHHAEQLRVLGALARVLGRRLADRPQPPALRPLLGAHHQRVRQAAGGPERHPGQLHRRRRLPLLRPVYELTRPAGRGAHCMS

SEQ ID NO: 17506 - protein, 295 aa, Zea mays subsp. mays
  misc_feature (1)..(295): Ceres Seq. ID no. 12358736
MATALSCKALAVAALLSVVSVVTYGARAQQQPSHNASDSESSQDRSLLSYSSGWLPAKATWYGAPTGAGPDDNGGACGFKGTNQYPFSSMTSCGNEPIFKDGKGCGSCYQIRVPPEQPPGLLRRAADGDHNRHELLPGGQVPLRPERHGVRRHGEFRPERQAPARRDHRHAVPEGAVRLPGPDRHLPRAARLQPHVPGRAHRARQHGRRRGAGRHHAEQLRVLGALARVLGRRLADRPQPPALRPLLGAHHQRVRQAAGGPERHPGQLHRRRRLPLLRPVYELTRPAGRGAHCMS

SEQ ID NO: 17507 - protein, 206 aa, Zea mays subsp. mays
  misc_feature (1)..(206): Ceres Seq. ID no. 12358737
MTSCGNEPIFKDGKGCGSCYQIRVPPEQPPGLLRRAADGDHNRHELLPGGQVPLRPERHGVRRHGEFRPERQAPARRDHRHAVPEGAVRLPGPDRHLPRAARLQPHVPGRAHRARQHGRRRGAGRHHAEQLRVLGALARVLGRRLADRPQPPALRPLLGAHHQRVRQAAGGPERHPGQLHRRRRLPLLRPVYELTRPAGRGAHCMS

SEQ ID NO: 17508 - DNA, 1189 bp, Zea mays subsp. mays
  misc_feature (1)..(1189): Ceres Seq. ID no. 12358770
actatatatacagacaccatgcatgtcatcgtctctcgatctattcgatcgacaagccgtgtgttgagtcatttcaaaacaaccagagaaacacatggccaacatccccaagtatcgctggacccaaaaccccttaatccttctatcttgcgctggtgcggtgctggcagtttctactctgatgctgccagtgcctgctgcatcccaaactataaatttcaagaatctttgcattggtgtccataagatcctagacgcatgtgtgggtgccaatgccgaactacgccaagtgtctatggccgccggtgcgaggaacgctagggcgctcctgcttaacagtcagggtatatctgggccacttcccacgggtttgggcgccttctccaacttgagttacgtcgccctcgccaacaacaagctcaccgggccaatcccaccatcagtcgggcacctgcaccactccctccgcgagattgtcttcctcaacaaccagctctccggctgcctccccggcgagctagggatgctcagcaaggcggtcgtcatggacgccggcatgaatcagctcaccggtccaatccctcctctcttttcctgcctcagcagagtcgagcagctcaacctggccgggaaccgcctctatggccatgttcccgacgctctctgcaggctcgcggggccggctggccgcctttccaatctaaccttgtctggcaactactttgtcgccgtcgggccggcatgcgcagcgctgatcaaagacggcgtcctggacgtgaagaacaactgcatttcgggctttgccaaccagaggcctccggcggagtgtgcagcgttccagagccagccaaagacgtgcccggaggaggcgagcactcaggtgtcatgcccagccgcagctaccatgcacatgaacgctgcgccgccgagggatcagcggaagaccaccagggactactacagctacgtgacgtacgctagcctgcgttagtgaggcgccacgtacggccatgcaatgacgcgccaccagtacctatagctggaacttggctatatgtgttatcttcttgtatcattattaattattttgtaccatgcatgtgttggtgtgctgcttgtgattgttgtttgttcgtttgtatcaggtgctactggcatatcttatatattacacgccacttgttagtgt

SEQ ID NO: 17509 - protein, 298 aa, Zea mays subsp. mays
  misc_feature (1)..(298): Ceres Seq. ID no. 12358771
MANIPKYRWTQNPLILLSCAGAVLAVSTLMLPVPAASQTINFKNLCIGVHKILDACVGANAELRQVSMAAGARNARALLLNSQGISGPLPTGLGAFSNLSYVALANNKLTGPIPPSVGHLHHSLREIVFLNNQLSGCLPGELGMLSKAVVMDAGMNQLTGPIPPLFSCLSRVEQLNLAGNRLYGHVPDALCRLAGPAGRLSNLTLSGNYFVAVGPACAALIKDGVLDVKNNCISGFANQRPPAECAAFQSQPKTCPEEASTQVSCPAAATMHMNAAPPRDQRKTTRDYYSYVTYASLR

SEQ ID NO: 17510 - protein, 269 aa, Zea mays subsp. mays
  misc_feature (1)..(269): Ceres Seq. ID no. 12358772
MLPVPAASQTINFKNLCIGVHKILDACVGANAELRQVSMAAGARNARALLLNSQGISGPLPTGLGAFSNLSYVALANNKLTGPIPPSVGHLHHSLREIVFLNNQLSGCLPGELGMLSKAVVMDAGMNQLTGPIPPLFSCLSRVEQLNLAGNRLYGHVPDALCRLAGPAGRLSNLTLSGNYFVAVGPACAALIKDGVLDVKNNCISGFANQRPPAECAAFQSQPKTCPEEASTQVSCPAAATMHMNAAPPRDQRKTTRDYYSYVTYASLR

SEQ ID NO: 17511 - protein, 231 aa, Zea mays subsp. mays
  misc_feature (1)..(231): Ceres Seq. ID no. 12358773
MAAGARNARALLLNSQGISGPLPTGLGAFSNLSYVALANNKLTGPIPPSVGHLHHSLREIVFLNNQLSGCLPGELGMLSKAVVMDAGMNQLTGPIPPLFSCLSRVEQLNLAGNRLYGHVPDALCRLAGPAGRLSNLTLSGNYFVAVGPACAALIKDGVLDVKNNCISGFANQRPPAECAAFQSQPKTCPEEASTQVSCPAAATMHMNAAPPRDQRKTTRDYYSYVTYASLR

SEQ ID NO: 17512 - DNA, 1292 bp, Zea mays subsp. mays
  misc_feature (1)..(1292): Ceres Seq. ID no. 12358774
ttgcacgacgtctccaccactacaccacacctcaagtccacaacaccaccagcctcgtctcagccgcttcagcataccacaccgcacgcaaacccaccgcgcgctacgaccaccaccgtcaccatggccgccgcgcgctacgacgtggagaagggcgggaggaataacggggatgggaagccttcgccgccgccgccgggccacctgtacccgcagcgcgacggggagagggagtggttgccgtggttggtgccgctcgtcgtggccgtcaacatcgtgctcttcgccgtggcgatgtacgtcaacaactgcccggcccacgccgcctcgtctcgccgcggcggcgccggatcatgcgtcgcccgcgggttcctccaccgcttctcgttccagccgctcagcgagaacccgctcctcgggccctcgtcggccacgctgcagaagctgggagcgcttgtatgggacaaagttgtgcgggagcaccaggggtggaggctcgtcacctgcatctggctgcacgccggtgttgcccacctcctggccaacatgatcagcctcgtgctcatcgggctcagactggagcaacagtttggatacgtgagagttggcatcatctaccttgtctctggcgtcggaggcagcgtgctttcgtctctgttcatcaggaacaacatctctgtcggcgcttccggagctctgttcgggctccttggggccatgctgtcggagctcttcaccaactggaccatctatgcaaacaaggctgcagccctggtgaccctgctggtcgtcatcgccatcaacctcgccatcggcatcctcccgcacgtcgacaacttcgcgcacatcggagggttcctcaccggcttcctcctcgggttcgtcttactgatgcgcccgcactacggctggatgcagcgctacgccctgccctccgacgtcaagtacaccaccaagaagtacctggcctaccagtgggctctgctggccgtggcctcggtcctcgctgtcatcgggttcgccgtagggctggggatgcttttcagaggagtgaacgcgaatgatcactgcggctggtgccactacctcagctgtgttccgacctccagatggagctgtgggaagtgaagatcggcgtgctgacaaaatggacttgaagccaggatagagcccatggccgcccatgggaccttttcgagcaagcatttccatgaatagatagatatacagctcgcagtcttactgtacataatgtcaccaggatgtggtttatatatgacattatttatgct

SEQ ID NO: 17513 - protein, 375 aa, Zea mays subsp. mays
  misc_feature (1)..(375): Ceres Seq. ID no. 12358775
LHDVSTTTPHLKSTTPPASSQPLQHTTPHANPPRATTTTVTMAAARYDVEKGGRNNGDGKPSPPPPGHLYPQRDGEREWLPWLVPLVVAVNIVLFAVAMYVNNCPAHAASSRRGGAGSCVARGFLHRFSFQPLSENPLLGPSSATLQKLGALVWDKVVREHQGWRLVTCIWLHAGVAHLLANMISLVLIGLRLEQQFGYVRVGIIYLVSGVGGSVLSSLFIRNNISVGASGALFGLLGAMLSELFTNWTIYANKAAALVTLLVVIAINLAIGILPHVDNFAHIGGFLTGFLLGFVLLMRPHYGWMQRYALPSDVKYTTKKYLAYQWALLAVASVLAVIGFAVGLGMLFRGVNANDHCGWCHYLSCVPTSRWSCGK

SEQ ID NO: 17514 - protein, 334 aa, Zea mays subsp. mays
  misc_feature (1)..(334): Ceres Seq. ID no. 12358776
MAAARYDVEKGGRNNGDGKPSPPPPGHLYPQRDGEREWLPWLVPLVVAVNIVLFAVAMYVNNCPAHAASSRRGGAGSCVARGFLHRFSFQPLSENPLLGPSSATLQKLGALVWDKVVREHQGWRLVTCIWLHAGVAHLLANMISLVLIGLRLEQQFGYVRVGIIYLVSGVGGSVLSSLFIRNNISVGASGALFGLLGAMLSELFTNWTIYANKAAALVTLLVVIAINLAIGILPHVDNFAHIGGFLTGFLLGFVLLMRPHYGWMQRYALPSDVKYTTKKYLAYQWALLAVASVLAVIGFAVGLGMLFRGVNANDHCGWCHYLSCVPTSRWSCGK

SEQ ID NO: 17515 - protein, 277 aa, Zea mays subsp. mays
  misc_feature (1)..(277): Ceres Seq. ID no. 12358777
MYVNNCPAHAASSRRGGAGSCVARGFLHRFSFQPLSENPLLGPSSATLQKLGALVWDKVVREHQGWRLVTCIWLHAGVAHLLANMISLVLIGLRLEQQFGYVRVGIIYLVSGVGGSVLSSLFIRNNISVGASGALFGLLGAMLSELFTNWTIYANKAAALVTLLVVIAINLAIGILPHVDNFAHIGGFLTGFLLGFVLLMRPHYGWMQRYALPSDVKYTTKKYLAYQWALLAVASVLAVIGFAVGLGMLFRGVNANDHCGWCHYLSCVPTSRWSCGK

SEQ ID NO: 17516 - DNA, 1310 bp, Zea mays subsp. mays
  misc_feature (1)..(1310): Ceres Seq. ID no. 12358780
atatcgatttccgccagcggttttcctcatttttttctctccctctcttgcccggtgatcggtcgggatcgattcgagcagatggcggcggcatgggcagtgctggcggcggtcctcgtcgcggcgcaggtggcgtctgcggcgccggtcacggcgccagcgttcctctgggcgcctaagaactacggattccgctctgatgatgctaaggaggtagtccattatcaaacaatctcaccaaagaacttagctaaatctgttcttgaggaaggtggctggtcaacctttatgtgttcaagggaggatactgagaagcatgttgatgttgccattgtttttattggctcaaagctacaatcatcagacatatcgaaagataagcaagttgatccagctttagcagatacattgaagctctccttcacagaatcagagttttctatggcattcccctacgtttccacatcagacgatgagaaactggaggagtcattgctatcaggcttcactgagaactgtaaaagtggttttggaagaaaccgtatcacctacacagacacgtgcgccgtgagtggccaagatctgaagacgtatcacaacatggatgctatcaatgacttggtagtgtcaggaagaaccaacccgagtggacagactgatgtaatcgtcttctgcagcggcgggttcgagaagttaggcaccacggaatcggaaggggagctgctttcccagcttgtcgacttgctgaagctgtctggggctagacacacgattctctacgcttcccagccatctggttatctactggagaacccttccggctcgccagtggctaggcaccttgcggagaggactaacggtacaaaaactggcctactgagcaaatgtgacggagagtgcctagtcaaatcaactcttcttgaaggaacctttgtcggaatagtgctccttatcatcttgatatcagggctcatgtgtatgatgggaatcgatactccctccaagtttgaagctccccaggagtcttgatctcccttcgaagcagaacccttgttttgttggtctgcactgtggatagatattattcagtttccccctttgaaagcgcctttcgtataattattattatttttttactgagccatctgttatttacgatgtgctcaaacttttgacaccaaacgaatgcatgtgtgtgaggcttgtgctgtgaccagacatagcattgcctccaggtgttttctgtgaataacctggaatttcaggtgggtactgtgcatcaaataaaaaagatgaaatcttgctgttgc

SEQ ID NO: 17517 - protein, 342 aa, Zea mays subsp. mays
  misc_feature (1)..(342): Ceres Seq. ID no. 12358781
ISISASGFPHFFLSLSCPVIGRDRFEQMAAAWAVLAAVLVAAQVASAAPVTAPAFLWAPKNYGFRSDDAKEVVHYQTISPKNLAKSVLEEGGWSTFMCSREDTEKHVDVAIVFIGSKLQSSDISKDKQVDPALADTLKLSFTESEFSMAFPYVSTSDDEKLEESLLSGFTENCKSGFGRNRITYTDTCAVSGQDLKTYHNMDAINDLVVSGRTNPSGQTDVIVFCSGGFEKLGTTESEGELLSQLVDLLKLSGARHTILYASQPSGYLLENPSGSPVARHLAERTNGTKTGLLSKCDGECLVKSTLLEGTFVGIVLLIILISGLMCMMGIDTPSKFEAPQES

SEQ ID NO: 17518 - protein, 315 aa, Zea mays subsp. mays
  misc_feature (1)..(315): Ceres Seq. ID no. 12358782
MAAAWAVLAAVLVAAQVASAAPVTAPAFLWAPKNYGFRSDDAKEVVHYQTISPKNLAKSVLEEGGWSTFMCSREDTEKHVDVAIVFIGSKLQSSDISKDKQVDPALADTLKLSFTESEFSMAFPYVSTSDDEKLEESLLSGFTENCKSGFGRNRITYTDTCAVSGQDLKTYHNMDAINDLVVSGRTNPSGQTDVIVFCSGGFEKLGTTESEGELLSQLVDLLKLSGARHTILYASQPSGYLLENPSGSPVARHLAERTNGTKTGLLSKCDGECLVKSTLLEGTFVGIVLLIILISGLMCMMGIDTPSKFEAPQES

SEQ ID NO: 17519 - protein, 246 aa, Zea mays subsp. mays
  misc_feature (1)..(246): Ceres Seq. ID no. 12358783
MCSREDTEKHVDVAIVFIGSKLQSSDISKDKQVDPALADTLKLSFTESEFSMAFPYVSTSDDEKLEESLLSGFTENCKSGFGRNRITYTDTCAVSGQDLKTYHNMDAINDLVVSGRTNPSGQTDVIVFCSGGFEKLGTTESEGELLSQLVDLLKLSGARHTILYASQPSGYLLENPSGSPVARHLAERTNGTKTGLLSKCDGECLVKSTLLEGTFVGIVLLIILISGLMCMMGIDTPSKFEAPQES

SEQ ID NO: 17520 - DNA, 1437 bp, Zea mays subsp. mays
  misc_feature (1)..(1437): Ceres Seq. ID no. 12358787
caaggtacattcaaatatttttcttcaagagtttgcaatgtgtctatctgtttatggcaagaatggaggcagtgattcagcaatgtgcagtgcagttggaccattttctatggatacacaaaagaagcaccttgaaagcactgcaaagttaacacacattgaaggtccagactctggtgttttcccgtcccacggatcattaacttgtataagttatactgcttcccttgtgacgaaggataaagcaaaaacatatttgttggagagccacaatgagtttgagtttgagattgggacgggtgctgttagtaatcagcttgaatcatgtgtaactcagctgtcagtgaatcaaactgcacgttttgtagctgaactgcctcctagggatttaatcatggctgcatcttgtgagttctcacatgacctctccaatgtatctagtgagagctgcttcctggagttctctgtaaaggttctgcaggtaactgaaccattagaagatagaatggagaaagccttgttcagtcctccattatctaaacaaagagtcgaatttgctgtacggcacatcaacgagctgcatgctaccacacttgttgattttggctgtggatctggtagccttcttgattcgttgttagagcatccaaccacgctggaaaagcttgttggcgttgatatttctcgaaaaggcctcacacgtgcagcaaagagccttcatcagaagctgagcaaaaaatcaacgatgcagacaaatgttccaactgctgtgctgtatgacggatcaataacggactacgattctcgcttatatgggtttgatattggcacttgccttgaggtgatcgagcacgtcgaggaggaccaggcgactttatttggcaacgtcgtcttgagctcattccgcccgaccgtgcttattgtttccacacccaactacgaatacaatcctatcctccgggggtctgctatgcccaacaaggacgacgaggcagacgaaagcactggtccctgcaagttccgcaatcacgaccacaagtttgagtggaccaggttacagttccagtgctgggctactggcctcgcggtgaagcatagctacagcgtggaattctccggcgtcggtggctcaggcgaggagccaggctacgcttcccagatcgctgttttcagaagactggtgcagggccaggaagcgatgtgcctggacaaggatggcgatcagccttacgaggttctctgggagtggcctaacgcgtgtgtgaactaggtaaattgcacgtctaatctctctagggcttggaactttgaatcgtgcccccggtttggaactgagtaatatatgtgtcaggaaagtgggcatccgacttgtggcaagaacacaaaaaattaacattgctgcatgcaagtgcagaaattcagtctgcttctaggtcc

SEQ ID NO: 17521 - protein, 422 aa, Zea mays subsp. mays
  misc_feature (1)..(422): Ceres Seq. ID no. 12358788
KVHSNIFLQEFAMCLSVYGKNGGSDSAMCSAVGPFSMDTQKKHLESTAKLTHIEGPDSGVFPSHGSLTCISYTASLVTKDKAKTYLLESHNEFEFEIGTGAVSNQLESCVTQLSVNQTARFVAELPPRDLIMAASCEFSHDLSNVSSESCFLEFSVKVLQVTEPLEDRMEKALFSPPLSKQRVEFAVRHINELHATTLVDFGCGSGSLLDSLLEHPTTLEKLVGVDISRKGLTRAAKSLHQKLSKKSTMQTNVPTAVLYDGSITDYDSRLYGFDIGTCLEVIEHVEEDQATLFGNVVLSSFRPTVLIVSTPNYEYNPILRGSAMPNKDDEADESTGPCKFRNHDHKFEWTRLQFQCWATGLAVKHSYSVEFSGVGGSGEEPGYASQIAVFRRLVQGQEAMCLDKDGDQPYEVLWEWPNACVN

SEQ ID NO: 17522 - protein, 410 aa, Zea mays subsp. mays
  misc_feature (1)..(410): Ceres Seq. ID no. 12358789
MCLSVYGKNGGSDSAMCSAVGPFSMDTQKKHLESTAKLTHIEGPDSGVFPSHGSLTCISYTASLVTKDKAKTYLLESHNEFEFEIGTGAVSNQLESCVTQLSVNQTARFVAELPPRDLIMAASCEFSHDLSNVSSESCFLEFSVKVLQVTEPLEDRMEKALFSPPLSKQRVEFAVRHINELHATTLVDFGCGSGSLLDSLLEHPTTLEKLVGVDISRKGLTRAAKSLHQKLSKKSTMQTNVPTAVLYDGSITDYDSRLYGFDIGTCLEVIEHVEEDQATLFGNVVLSSFRPTVLIVSTPNYEYNPILRGSAMPNKDDEADESTGPCKFRNHDHKFEWTRLQFQCWATGLAVKHSYSVEFSGVGGSGEEPGYASQIAVFRRLVQGQEAMCLDKDGDQPYEVLWEWPNACVN

SEQ ID NO: 17523 - protein, 395 aa, Zea mays subsp. mays
  misc_feature (1)..(395): Ceres Seq. ID no. 12358790
MCSAVGPFSMDTQKKHLESTAKLTHIEGPDSGVFPSHGSLTCISYTASLVTKDKAKTYLLESHNEFEFEIGTGAVSNQLESCVTQLSVNQTARFVAELPPRDLIMAASCEFSHDLSNVSSESCFLEFSVKVLQVTEPLEDRMEKALFSPPLSKQRVEFAVRHINELHATTLVDFGCGSGSLLDSLLEHPTTLEKLVGVDISRKGLTRAAKSLHQKLSKKSTMQTNVPTAVLYDGSITDYDSRLYGFDIGTCLEVIEHVEEDQATLFGNVVLSSFRPTVLIVSTPNYEYNPILRGSAMPNKDDEADESTGPCKFRNHDHKFEWTRLQFQCWATGLAVKHSYSVEFSGVGGSGEEPGYASQIAVFRRLVQGQEAMCLDKDGDQPYEVLWEWPNACVN

SEQ ID NO: 17524 - DNA, 1987 bp, Zea mays subsp. mays
  misc_feature (1)..(1987): Ceres Seq. ID no. 12358799
ctcgagtcgagcgaaccgaagccgaacatacccacccatcgtctcgtcgtctcgtcgcgcgtgggcgtggctctctctccccccacctcctcttttaagacgacgccatcgccagccggccctccctcgccgtccggcgccgtcctccttcgtccttccctctcatcacagtttccacctcgcgaggggctcgcgcgcgcgcccatcccggccgatcgactcacgaattcgcgcgcgatcatattcgtgcaagggcatccccgcacggccggaagcacggaatcacttccccgccccccaattcccgggctcctcggcgccgatccctcgccggtgttcgctttccggcggtttccgcggcgtgtcgcgggcaggcgcaggcggctcggctcggttgtttcctcctcgtgccatcatccatggaggcgaagcagcgcccgcggcacggcggggagaggaggccgccgccggcgacggacggcggcgaggagtacgacccgtggacggcgtggctctacaagccgcgcaccatctcggtgctcctcgtcggcgcctgccttctcatctgggcaagtggagcacttgatcctgaaggtactgccgctcacagtagcgtgacatcaatcaagaggggtgtctgggctatgattgcagtcttccttgcctactgcacgcttcaggcaccttcaacgatacttattaggccccatcctgctgtctggcgcctggtacatggactggctgtcgtttacctcgttgctcttacctttcttcttttccagaaccgtgacgatgctcgccagttcatgaaacaccttcacccagatcttggagttgaattgccggagagatcttatggagcagattgccgcttgtatgttccagaaaaccctaaaaacaagttcataaatatttatgagacattgtttgatgaatttgttgttgcccatatccttgggtggtggggcaaagctgtaatgatacgaaatcaacttctactttgggtcttgtcgattggctttgagctaatggagctaacgttcagacatatgctgccaaactttaatgagtgctggtgggatagcattatcttggacatattgatctgcaattggtttggtatttgggcaggaatgcacacagtccgtcactttgatggcaaaacttatgaatgggttggattgagccgccaacgaagtatcatgggtaaggtgaaaagatcgttgagccagttcactcctgctcaatgggacaaggatcagtggcatcctttcatggggccactgcggttcatccaagtgctgttcctctgcgttgtcttcatgaccgtggagcttaacacattcttccttaagttttgcctttggatccctccaaggaaccccttggtcgtgtacagattgatcctctggtggctgatcgccatcccaaccatccgcgagtacaactcctacctgcaagacaggaaaccggtgaagaaggttggagccttctgttggctctctctagctatatgcatagtggagctgcttatctgcatgaagtttgggcatgggctgtttcatgacccgatgcctacctggctgatcatcttttggagctcggtcgggactgcactcgtgattttcttgctttcgtggtcatggaggagtcaccaaaggttcaggagaaagcagctctgattgtttcagtttgctacttttctttttcgaattttatataggcgttgtacatatttgatatggtttgtgatgtaacttacgttttaggggtggccatttttctgctgcccctggcaggaacttggtttgtcacgatagatcatgcattgttgacaacatgagattgattaataaattgaaataaccgcgacatcataaccagttgtaattaattattaaagcaaggtcactgcatattttggttccaaactaattctgggccaacaatgcacagttctgtaatacgaatgaccaatcattatctt

SEQ ID NO: 17525 - protein, 420 aa, Zea mays subsp. mays
  misc_feature (1)..(420): Ceres Seq. ID no. 12358800
MEAKQRPRHGGERRPPPATDGGEEYDPWTAWLYKPRTISVLLVGACLLIWASGALDPEGTAAHSSVTSIKRGVWAMIAVFLAYCTLQAPSTILIRPHPAVWRLVHGLAVVYLVALTFLLFQNRDDARQFMKHLHPDLGVELPERSYGADCRLYVPENPKNKFINIYETLFDEFVVAHILGWWGKAVMIRNQLLLWVLSIGFELMELTFRHMLPNFNECWWDSIILDILICNWFGIWAGMHTVRHFDGKTYEWVGLSRQRSIMGKVKRSLSQFTPAQWDKDQWHPFMGPLRFIQVLFLCVVFMTVELNTFFLKFCLWIPPRNPLVVYRLILWWLIAIPTIREYNSYLQDRKPVKKVGAFCWLSLAICIVELLICMKFGHGLFHDPMPTWLIIFWSSVGTALVIFLLSWSWRSHQRFRRKQL

SEQ ID NO: 17526 - protein, 345 aa, Zea mays subsp. mays
  misc_feature (1)..(345): Ceres Seq. ID no. 12358801
MIAVFLAYCTLQAPSTILIRPHPAVWRLVHGLAVVYLVALTFLLFQNRDDARQFMKHLHPDLGVELPERSYGADCRLYVPENPKNKFINIYETLFDEFVVAHILGWWGKAVMIRNQLLLWVLSIGFELMELTFRHMLPNFNECWWDSIILDILICNWFGIWAGMHTVRHFDGKTYEWVGLSRQRSIMGKVKRSLSQFTPAQWDKDQWHPFMGPLRFIQVLFLCVVFMTVELNTFFLKFCLWIPPRNPLVVYRLILWWLIAIPTIREYNSYLQDRKPVKKVGAFCWLSLAICIVELLICMKFGHGLFHDPMPTWLIIFWSSVGTALVIFLLSWSWRSHQRFRRKQL

SEQ ID NO: 17527 - protein, 291 aa, Zea mays subsp. mays
  misc_feature (1)..(291): Ceres Seq. ID no. 12358802
MKHLHPDLGVELPERSYGADCRLYVPENPKNKFINIYETLFDEFVVAHILGWWGKAVMIRNQLLLWVLSIGFELMELTFRHMLPNFNECWWDSIILDILICNWFGIWAGMHTVRHFDGKTYEWVGLSRQRSIMGKVKRSLSQFTPAQWDKDQWHPFMGPLRFIQVLFLCVVFMTVELNTFFLKFCLWIPPRNPLVVYRLILWWLIAIPTIREYNSYLQDRKPVKKVGAFCWLSLAICIVELLICMKFGHGLFHDPMPTWLIIFWSSVGTALVIFLLSWSWRSHQRFRRKQL

SEQ ID NO: 17528 - DNA, 1426 bp, Zea mays subsp. mays
  misc_feature (1)..(1426): Ceres Seq. ID no. 12358815
aagacatcagcctctgttatcctggcccacacatcagcctccctggagtaagcgtggtagttgccactgccgtcccctccagaagtgcgatacagttcggattcagatcgcggccggtgcgaacccacgaaggcacgaacggtagaacccgaccgagcgcggcagcgcaaacctccgatccctgctgcgagcaagggatggcggcggcatgggcagtgctggcggcggtcctcgtcgcggcgcaggtggcgtctgcggcgccggtcacggcgccagcgttcctctgggcgcctaagaactacggattccgctctgatgatgctaaggaggtagtccattatcaaacaatctcaccaaagaacttagctaaatctgttcttgaggaaggtggctggtcaacctttatgtgttcaagggaggatactgagaagcatgttgatgttgccattgtttttattggctcaaagctacaatcatcagacatatcgaaagataagcaagttgatccagctttagcagatacattgaagctctccttcacagaatcagagttttctatggcattcccctacgtttccacatcagacgatgagaaactggaggagtcattgctatcaggcttcactgagaactgtaaaagtggttttggaagaaaccgtatcacctacacagacacgtgcgccgtgagtggccaagatctgaagacgtatcacaacatggatgctatcaatgacttggtagtgtcaggaagaaccaacccgagtggacagactgatgtaatcgtcttctgcagcggcgggttcgagaagttaggcaccacggaatcggaaggggagctgctttcccagcttgtcgacttgctgaagctgtctggggctagacacacgattctctacgcttcccagccatctggttatctactggagaacccttccggctcgccagtggctaggcaccttgcggagaggactaacggtacaaaaactggcctactgagcaaatgtgacggagagtgcctagtcaaatcaactcttcttgaaggaacctttgtcggaatagtgctccttatcatcttgatatcagggctcatgtgtatgatgggaatcgatactccctccaagtttgaagctccccaggagtcttgatctcccttcgaagcagaacccttgttttgttggtctgcactgtggatagatattattcagtttccccctttgaaagcgcctttcgtataattattattatttttttactgagccatctgttatttacgatgtgctcaaacttttgacaccaaacgaatgcatgtgtgtgaggcttgtgctgtgaccagacatagcattgcctccaggtgttttctgtgaataacctggaatttcaggtgggtactgtgcatcaaataaaaaagatgaaatcttgctgttgc

SEQ ID NO: 17529 - protein, 380 aa, Zea mays subsp. mays
  misc_feature (1)..(380): Ceres Seq. ID no. 12358816
DISLCYPGPHISLPGVSVVVATAVPSRSAIQFGFRSRPVRTHEGTNGRTRPSAAAQTSDPCCEQGMAAAWAVLAAVLVAAQVASAAPVTAPAFLWAPKNYGFRSDDAKEVVHYQTISPKNLAKSVLEEGGWSTFMCSREDTEKHVDVAIVFIGSKLQSSDISKDKQVDPALADTLKLSFTESEFSMAFPYVSTSDDEKLEESLLSGFTENCKSGFGRNRITYTDTCAVSGQDLKTYHNMDAINDLVVSGRTNPSGQTDVIVFCSGGFEKLGTTESEGELLSQLVDLLKLSGARHTILYASQPSGYLLENPSGSPVARHLAERTNGTKTGLLSKCDGECLVKSTLLEGTFVGIVLLIILISGLMCMMGIDTPSKFEAPQES

SEQ ID NO: 17530 - protein, 315 aa, Zea mays subsp. mays; identical to SEQ ID NO: 17518
  misc_feature (1)..(315): Ceres Seq. ID no. 12358817

SEQ ID NO: 17531 - protein, 246 aa, Zea mays subsp. mays; identical to SEQ ID NO: 17519
  misc_feature (1)..(246): Ceres Seq. ID no. 12358818

SEQ ID NO: 17532 - DNA, 1314 bp, Zea mays subsp. mays
  misc_feature (1)..(1314): Ceres Seq. ID no. 12358866
acctcacacaaacacataccgaatccagccccgcacccaccgttgcgcccgccgcccgagtcgccgtggccaccgcggcagcgccctcccggcggtgagcgcggcccagcgcgcgcgccgcggccaccgccgcgctcgaggcgcccagatctgggccctagcaccccctccctcctataggcctttccccgctgcatcgccatggcgcggcgactgctgtggtggacagcgctgctcctcccttccctcctcgccggcgttggtcccgccgccgccgccgccgccgcatccccgccccacgatgcgtgcctggtgcctaccatcgcggaatccgtccttaggactcccgacacgtgctcgacgctggatcgccgccttggcgacccggtcggcgtcatcgagggagatgaggtgacgttggcaagggcagttaatcttctacacgcaaacaaggatgactacattgccgtacttttctatgcctcgtggtgcccattctcacaggaatgcaaaccgaattttgagacactggcttacttattcccagctatccggcattttgcatttgaggaatctgcaattaggccaagcataatttcgagatacggcatccatggtttcccaacactctttctcttgaactcgaccatgagagtacgatatcatggaccaaggactgttaaatcacttgcagctttctacactgatgtctcaggtatcaatgcatcggtgaagtcaactgcaggggaggccatggtacatcccttggatgatattgagcataaaaaggacgctgaacaggaaaattgcccattctggtgggctcggtcaccagagaatatacttcagcaggatacttatctagcattggcgaccgtatttgtaattttgaggttgctgtatcgtatttttccaaagatagattcctttaccagatgggcatggaggaggcacaatatgtttgcaaaattgatgggagcacatgaatatttcctcacctaccttgagcaagcaagacagaagtttcataggctatacccttcaagttcaaagcgaggaaatctgcaggagggcgcaatgaacgctaccgcttgggcttccaaatcattagcatcagtttcaattggagaaccaagtgcaattggaaggacaaactctacaagtgagctaagatgaaatctgatcttttttgtccccagggattatatgtacagtacagtagagcgatcaggatatgaacacccagaaactgttgtaacggctatattactctttgtatcctccttagaataaatacatccatgatttggctcc

SEQ ID NO: 17533 - protein, 324 aa, Zea mays subsp. mays
  misc_feature (1)..(324): Ceres Seq. ID no. 12358867
MARRLLWWTALLLPSLLAGVGPAAAAAAASPPHDACLVPTIAESVLRTPDTCSTLDRRLGDPVGVIEGDEVTLARAVNLLHANKDDYIAVLFYASWCPFSQECKPNFETLAYLFPAIRHFAFEESAIRPSIISRYGIHGFPTLFLLNSTMRVRYHGPRTVKSLAAFYTDVSGINASVKSTAGEAMVHPLDDIEHKKDAEQENCPFWWARSPENILQQDTYLALATVFVILRLLYRIFPKIDSFTRWAWRRHNMFAKLMGAHEYFLTYLEQARQKFHRLYPSSSKRGNLQEGAMNATAWASKSLASVSIGEPSAIGRTNSTSELR

SEQ ID NO: 17534 - protein, 175 aa, Zea mays subsp. mays
  misc_feature (1)..(175): Ceres Seq. ID no. 12358868
MRVRYHGPRTVKSLAAFYTDVSGINASVKSTAGEAMVHPLDDIEHKKDAEQENCPFWWARSPENILQQDTYLALATVFVILRLLYRIFPKIDSFTRWAWRRHNMFAKLMGAHEYFLTYLEQARQKFHRLYPSSSKRGNLQEGAMNATAWASKSLASVSIGEPSAIGRTNSTSELR

SEQ ID NO: 17535 - DNA, 1505 bp, Zea mays subsp. mays
  misc_feature (1)..(1505): Ceres Seq. ID no. 12358876
aaaaaaaacacacggtacgcgcttctcctcctcgcttgccgccgccgccgccgccgcgatggaaaaggagaagctctcgttctccatatcctcctcgaagcagcggccccccaagcctcccgcacgacctgcggccgccgcagacgacgatgacctccgctccgcgcccgctccgggccagcagtacgtcaccgagttcgatccgtcccaaaccctagccgccgcctgcgcggcgcgcgccgtcatcgcgccgctccccaactccggcaacttcctcacccaccgcccacgcaaaccgtcctcgctccccacccctgaggaggaggccgccctcgccgcggaatccggcggctggggccccgccttcgtcctcgacacctcgaccgctcccgaagacccatcatccaaaatcggctacggcctcactcgccgcaacggcgccatcgacgctgctgctgccaaggaaccggagaaggcgccgccaccgtcaccgtcaccgcctcgggccactgatgctgcctccgctgccggcaacctcatgctgcagcggtacaaggaggacatggaaggccttccggagcaccgtggaatggacgagttcaatgagatacccgtggagggatttggcgcggctctccttgctggatacggctggacagaaggtaagggcattggtaggaacaataagatgggggataccaaagttcttgaataccaccgccgtgctggcacacaggggttagggtacaacccctctgaagcagaccctaggaagactcgttctggcgactggattgttggcaagaaggtgtcagagggcgggagtgcgaagagagatcgaggcagtagagataggatggaagagagcgattctagtgcccagaagaagagatataatgaggaaaggtctgagaaggagggccgtgaaaaggtgaggaatggccgtggtagccgagaaggcacaagtaatgcagcggtactcatagcaatgtactgtggttgcagagccatatcagggttcggattgttagtcagaaactaagcaagaggctatacttgatgaagggtaaggttgtcgatgtggtggggcctacaaaatgtgacatcatgatggatgatggatcagagttggtgcagggggtggagcaagatatgcttgaaactgtacttccacggacgaatgggcgggtgcttgtgctttatgggaagcacaagggtttatatgggcacctggtagagaagaattccaaagaagagatcggattggtggaggatgcagatacaaaagatattgtacgtgttagatatgatcagatggcagaatacactggagatccagagttgcttggctactgattaagtttttttgggggaggatatgcttaccgggagccttctgctatgcttggtattatatttttcttctttacaaactgtcaagaattgctgcaatgtaaaaccttgaacaaactggcggttgctatgcatttcttacttgtctttgc

SEQ ID NO: 17536 - protein, 346 aa, Zea mays subsp. mays
  misc_feature (1)..(346): Ceres Seq. ID no. 12358877
KKTHGTRFSSSLAAAAAAAMEKEKLSFSISSSKQRPPKPPARPAAAADDDDLRSAPAPGQQYVTEFDPSQTLAAACAARAVIAPLPNSGNFLTHRPRKPSSLPTPEEEAALAAESGGWGPAFVLDTSTAPEDPSSKIGYGLTRRNGAIDAAAAKEPEKAPPPSPSPPRATDAASAAGNLMLQRYKEDMEGLPEHRGMDEFNEIPVEGFGAALLAGYGWTEGKGIGRNNKMGDTKVLEYHRRAGTQGLGYNPSEADPRKTRSGDWIVGKKVSEGGSAKRDRGSRDRMEESDSSAQKKRYNEERSEKEGREKVRNGRGSREGTSNAAVLIAMYCGCRAISGFGLLVRN

SEQ ID NO: 17537 - protein, 327 aa, Zea mays subsp. mays
  misc_feature (1)..(327): Ceres Seq. ID no. 12358878
MEKEKLSFSISSSKQRPPKPPARPAAAADDDDLRSAPAPGQQYVTEFDPSQTLAAACAARAVIAPLPNSGNFLTHRPRKPSSLPTPEEEAALAAESGGWGPAFVLDTSTAPEDPSSKIGYGLTRRNGAIDAAAAKEPEKAPPPSPSPPRATDAASAAGNLMLQRYKEDMEGLPEHRGMDEFNEIPVEGFGAALLAGYGWTEGKGIGRNNKMGDTKVLEYHRRAGTQGLGYNPSEADPRKTRSGDWIVGKKVSEGGSAKRDRGSRDRMEESDSSAQKKRYNEERSEKEGREKVRNGRGSREGTSNAAVLIAMYCGCRAISGFGLLVRN

SEQ ID NO: 17538 - DNA, 1956 bp, Zea mays subsp. mays
  misc_feature (1)..(1956): Ceres Seq. ID no. 12358907
agctgtaattttttagagtccctctcaaactttgcttgcttgcgctctccatatatcctgtggaccggagaggatgctctgatctacctgtctgttcttcgatcgagtctgagagatttgggaggaggagggaaacaaagcgaaagagcccatcttttttgtctttttggttcggtttcgtggttgcttcttttggaccccgcggaggagcccaccgtttctacaaaaacccaatctttgctgccttctcagcggtcgagatcgataggtttccagatctgaggctccgtgttctggctgtgagatcggaggcgcagcaatccgagcacgcagctagtagggaaagtatccgagaaaagttgcagattttgctgggggcaacggagcgagaacaagttactgcagaaggaaagggcaaaggtgggggaggcgccggagatgagggatgctatcagctctgatggattatttgaaatcttgctggggtccggcatcaccggctgggcgtccccgcaaaggatcggatgccaccggccgccaggacgggctcctgtggtacaaggacggcgggcaggtcgtcgatggtgagttctccatggccgtggtccaggccaataacctattggaggaccatagccaggttgaatccgggccgcttagcacatcggagcctggactgcaaggcaccttcgtcggggtctacgatgggcacggtggcccggagacagcgcgttacatcaatgaccatctcttcaaccacttgaggagattcgcatctgagcacaagtgcatgtcagcggatgtgattcggaaggtattccgagcgactgaggagggtttcatttctgtggttagtaaccaatggtcattgagacctcaattagcagctgtaggctcttgctgtctagttggtgtggtttgcagcggaactctatatgttgcaaaccttggggactcccgtgctgttctggggagacttgtcaagggaactggggaggttttggcaatgcagctctcagcagaacacaatgcatcctatgtggaggttagacgagagctgcaggcatcacatcctgatgatccccatattgtggtcctaaaacacaatgtttggcgtgtaaagggtattatccagataacaaggtcaattggagatgtgtatctgaagaaaccagaatttaatagagaacctttgcacagcaagtttcgtcttcaggaaacttttaggagaccacttcttagttctgatccagcaattactgtccaccaaatacagccaactgataagttcatcatttttgcatctgatggactctgggaacatcttagtaatcaggaagtggttgacatggtccaaagtagcccgcgtaatggaatcgcacgaaagttagtaaagtctgcagtgcaggaagcagcgaagaagagggagatgcggtattcagacctcaagaaagttgatcggggggtgaggcggcacttccacgacgatataactgtcattgtggtatttttcgattcaaacgccatgacaactgctgcctggagcagaccctcggtctctctccgagggggtgggtttccaatccattcaaacacccttgctccattctcagttcctacagagctaaacaactactgaaaccacgcggtatgtgaaggagccaggcaagaggataaaaaaaaagtaaaggaaaaaggagaaggaaaaacagctgttgtgatcagttgtagtgtatttcaccgttcatgttcatgcaaaacattttttagattctcaagtctcaacctggtgaccagtgcactgatagcaaggtataagattagattattcttagcttttttatcctctttttctctctctcttccttaccctttagattcactcatgggatatcaggtgcttgtacattctttggttcaacttgtgataatagtccatcgcccccctctttcgtc

SEQ ID NO: 17539 - protein, 397 aa, Zea mays subsp. mays
  misc_feature (1)..(397): Ceres Seq. ID no. 12358908
MLSALMDYLKSCWGPASPAGRPRKGSDATGRQDGLLWYKDGGQVVDGEFSMAVVQANNLLEDHSQVESGPLSTSEPGLQGTFVGVYDGHGGPETARYINDHLFNHLRRFASEHKCMSADVIRKVFRATEEGFISVVSNQWSLRPQLAAVGSCCLVGVVCSGTLYVANLGDSRAVLGRLVKGTGEVLAMQLSAEHNASYVEVRRELQASHPDDPHIVVLKHNVWRVKGIIQITRSIGDVYLKKPEFNREPLHSKFRLQETFRRPLLSSDPAITVHQIQPTDKFIIFASDGLWEHLSNQEVVDMVQSSPRNGIARKLVKSAVQEAAKKREMRYSDLKKVDRGVRRHFHDDITVIVVFFDSNAMTTAAWSRPSVSLRGGGFPIHSNTLAPFSVPTELNNY

SEQ ID NO: 17540 - protein, 392 aa, Zea mays subsp. mays
  misc_feature (1)..(392): Ceres Seq. ID no. 12358909
MDYLKSCWGPASPAGRPRKGSDATGRQDGLLWYKDGGQVVDGEFSMAVVQANNLLEDHSQVESGPLSTSEPGLQGTFVGVYDGHGGPETARYINDHLFNHLRRFASEHKCMSADVIRKVFRATEEGFISVVSNQWSLRPQLAAVGSCCLVGVVCSGTLYVANLGDSRAVLGRLVKGTGEVLAMQLSAEHNASYVEVRRELQASHPDDPHIVVLKHNVWRVKGIIQITRSIGDVYLKKPEFNREPLHSKFRLQETFRRPLLSSDPAITVHQIQPTDKFIIFASDGLWEHLSNQEVVDMVQSSPRNGIARKLVKSAVQEAAKKREMRYSDLKKVDRGVRRHFHDDITVIVVFFDSNAMTTAAWSRPSVSLRGGGFPIHSNTLAPFSVPTELNNY

SEQ ID NO: 17541 - protein, 347 aa, Zea mays subsp. mays
  misc_feature (1)..(347): Ceres Seq. ID no. 12358910
MAVVQANNLLEDHSQVESGPLSTSEPGLQGTFVGVYDGHGGPETARYINDHLFNHLRRFASEHKCMSADVIRKVFRATEEGFISVVSNQWSLRPQLAAVGSCCLVGVVCSGTLYVANLGDSRAVLGRLVKGTGEVLAMQLSAEHNASYVEVRRELQASHPDDPHIVVLKHNVWRVKGIIQITRSIGDVYLKKPEFNREPLHSKFRLQETFRRPLLSSDPAITVHQIQPTDKFIIFASDGLWEHLSNQEVVDMVQSSPRNGIARKLVKSAVQEAAKKREMRYSDLKKVDRGVRRHFHDDITVIVVFFDSNAMTTAAWSRPSVSLRGGGFPIHSNTLAPFSVPTELNNY

SEQ ID NO: 17542 - DNA, 1684 bp, Zea mays subsp. mays
  misc_feature (1)..(1684): Ceres Seq. ID no. 12358911
aaggatcccaatgctatatgctactcgactacatactgctgagtacatcagtactcagatagcccgagtcggaccacactgcttgcacagtagaagatgataggcgatgaactggattccgatgtggttgtacgctacttcagaggcaagagcatcctgatcactggatcaacaggtttcctggggaaagtgctcgtggagaagatactgagggttcagccggacgtgaagaagctcttcctcctcgttcgagccgccgatgacgagtctgccaagcagagggtcgagaccgaggtgacaggaaaggagatctttcaggttctgaaagaaaagcacggtaacgggttcgaaggtttcgtccaagaaaaaatctgccctctgccaggagacgtcatgcacgagaacttgggcctaggccctgccaaactgagacaagtgtgcaaggaaatagacatcgttgtaaacggagctgcaactacgaatttctacgaaagatacgatgtggctttcgacacaaatgtcatgggagccaagcacatatgcgagttcgccaagaggtgcagcaaactcaagatgctgctacatgtttcaacagcttatgtagctggtgaacaggaaggggtggtgctggagaagccattccgtttgggcgaaaccctgagggaaggcacgcacctggacatcgagtccgaactaaacctgataaaagagacgaggagagaactgaaggccagccgttgttcagaaaaggctgagaggagaagcatgaaggagcttggcctcaagagggcaagggagttcgggtggcccaacacctatgtgttcaccaaggcaatgggggagatgctgctgggcgcccacctccggggagacgtgccggtcgtcatcgtccggcctagtatcataaccagcatcctcaaggagccattgcctggatggatggaagggatcaggacgattgactcgttcatcatcggctacgccaagcaggctctgtccatcttcttagttgacctcgacctgatcatggacgtgattcccggggacatggtggtgaacgccatgatggtggccatggcggcgcactcggaggagcgggggcagcagactagcatctaccacctgacgtcgtcggtgcggcacccggcgccctacgccgtcctcgcggagtgcggccgccgctacttcctccacaacccactcaggtccgggggcaagaacagcgagcccgtgcggcctagcaggatgcgcttcttccgcaccctccccgggttccgcgcctacatggccatcaagttcaggcttccccttgagatccttcgcctgctcaacattgtcctgtgcggtgctctctcccggcgccacgacgagctcagccgcaagtacagatacgtcatgcatatcgcagagctgtacgcgccttactccttgttcaaaggatgcttcgatgactccaacacggagaggctgagggcggcgatggcgaacaggagcagcggatatgacttgggtttcgatcccatgtgcgtagactgggacgactatttctacagggttcacatccccggtgttgtcaagtacctgtgtggttactaggttaatacatatttaagatccggagagagccaaatgtatcttcgcatgttttaatacacaaatatgtcgctgtagtttgcagattatt

SEQ ID NO: 17543 - protein, 499 aa, Zea mays subsp. mays
  misc_feature (1)..(499): Ceres Seq. ID no. 12358912
MIGDELDSDVVVRYFRGKSILITGSTGFLGKVLVEKILRVQPDVKKLFLLVRAADDESAKQRVETEVTGKEIFQVLKEKHGNGFEGFVQEKICPLPGDVMHENLGLGPAKLRQVCKEIDIVVNGAATTNFYERYDVAFDTNVMGAKHICEFAKRCSKLKMLLHVSTAYVAGEQEGVVLEKPFRLGETLREGTHLDIESELNLIKETRRELKASRCSEKAERRSMKELGLKRAREFGWPNTYVFTKAMGEMLLGAHLRGDVPVVIVRPSIITSILKEPLPGWMEGIRTIDSFIIGYAKQALSIFLVDLDLIMDVIPGDMVVNAMMVAMAAHSEERGQQTSIYHLTSSVRHPAPYAVLAECGRRYFLHNPLRSGGKNSEPVRPSRMRFFRTLPGFRAYMAIKFRLPLEILRLLNIVLCGALSRRHDELSRKYRYVMHIAELYAPYSLFKGCFDDSNTERLRAAMANRSSGYDLGFDPMCVDWDDYFYRVHIPGVVKYLCGY

SEQ ID NO: 17544 - protein, 400 aa, Zea mays subsp. mays
  misc_feature (1)..(400): Ceres Seq. ID no. 12358913
MHENLGLGPAKLRQVCKEIDIVVNGAATTNFYERYDVAFDTNVMGAKHICEFAKRCSKLKMLLHVSTAYVAGEQEGVVLEKPFRLGETLREGTHLDIESELNLIKETRRELKASRCSEKAERRSMKELGLKRAREFGWPNTYVFTKAMGEMLLGAHLRGDVPVVIVRPSIITSILKEPLPGWMEGIRTIDSFIIGYAKQALSIFLVDLDLIMDVIPGDMVVNAMMVAMAAHSEERGQQTSIYHLTSSVRHPAPYAVLAECGRRYFLHNPLRSGGKNSEPVRPSRMRFFRTLPGFRAYMAIKFRLPLEILRLLNIVLCGALSRRHDELSRKYRYVMHIAELYAPYSLFKGCFDDSNTERLRAAMANRSSGYDLGFDPMCVDWDDYFYRVHIPGVVKYLCGY

SEQ ID NO: 17545 - protein, 357 aa, Zea mays subsp. mays
  misc_feature (1)..(357): Ceres Seq. ID no. 12358914
MGAKHICEFAKRCSKLKMLLHVSTAYVAGEQEGVVLEKPFRLGETLREGTHLDIESELNLIKETRRELKASRCSEKAERRSMKELGLKRAREFGWPNTYVFTKAMGEMLLGAHLRGDVPVVIVRPSIITSILKEPLPGWMEGIRTIDSFIIGYAKQALSIFLVDLDLIMDVIPGDMVVNAMMVAMAAHSEERGQQTSIYHLTSSVRHPAPYAVLAECGRRYFLHNPLRSGGKNSEPVRPSRMRFFRTLPGFRAYMAIKFRLPLEILRLLNIVLCGALSRRHDELSRKYRYVMHIAELYAPYSLFKGCFDDSNTERLRAAMANRSSGYDLGFDPMCVDWDDYFYRVHIPGVVKYLCGY

SEQ ID NO: 17546 - DNA, 1264 bp, Zea mays subsp. mays
  misc_feature (1)..(1264): Ceres Seq. ID no. 12358919
acgtgcaagagacgagcgtagtaactgtgagcagctagcacatgcatggcgtcgtcgcagctggtcgtcgtgtgcctgtttgtagcgtcggcggtgactgtgacgatgaacggtggcgcgcaggcgcagccgattgtgccggcgatcatctcattcggcgactccaccgtcgacgtcggcaacaataactacctgccgggcgcggtgttcaaggccgactacgcgccgtacgggcagggcttcgcgcggcacaaggccaccggccgattctccgacggcaagatcgtcaccgacatcaccgccgaaacgctcggcttcgagagctacgcgccgccgtacctcagcccgcaggcgtcggggaagaacctgttcaccggcgccaacttcgcctccgcggcgtccagctactacgacgacacggcggccatgtatgacgcgatcacgctgacccagcagctcaagtactacaaggagtaccagtcgaagctggcggcggtggccgggcgcgctagggctcgcgccatccttggcgacgcgctctacgttgtcagcacgggcaccggcgacttcctccagaactactaccacaacgcctccctgtcccgccgctacgacgtcgaccagtacaccgacctcctcgtcggcatcttctccggcttcgccaacgagctgtacaggttgggggcgcggcggatcggcgtcacttccatgccgccgctgggctgcctgccggcgtccatcaggctgtacggcgacggcaagggagcgtgcgtgccgaggctcaaccgcgacgccgagaccttcaacgccaagctgaacccaccgtcagggcgctcaagcggcggcacgccgacctcaagctcgccatcctcgacatctacacgcccctccgcaaactcgcacaagaccccgcggcttacggcttcgccgacgctagagggacgtgctgccggacggggacggccaagacgagggtgtacctctgcaacccgacgacggccgggacgtgccggaacgccagcagctacgtgttcttcgacgccgtccacccgtctgaggctgccaacgtcttcatcgcggagtccacggtcgacgcgggcatcgagctggtcacctagctagtaggaataaaggagacgacacacatctgcagatctgctcacatgtttccggctccatcgaaacagaactacgtacagtgtctggaatattaatatatagccagtgaaattaaaaattgcaccgtcggccctgcccttttcgc

SEQ ID NO: 17547 - protein, 358 aa, Zea mays subsp. mays
  misc_feature (1)..(358): Ceres Seq. ID no. 12358920
MASSQLVVVCLFVASAVTVTMNGGAQAQPIVPAIISFGDSTVDVGNNNYLPGAVFKADYAPYGQGFARHKATGRFSDGKIVTDITAETLGFESYAPPYLSPQASGKNLFTGANFASAASSYYDDTAAMYDAITLTQQLKYYKEYQSKLAAVAGRARARAILGDALYVVSTGTGDFLQNYYHNASLSRRYDVDQYTDLLVGIFSGFANELYRLGARRIGVTSMPPLGCLPASIRLYGDGKGACVPRLNRDAETFNAKLNPPSGRSSGGTPTSSSPSSTSTRPSANSHKTPRLTASPTLEGRAAGRGRPRRGCTSATRRRPGRAGTPAATCSSTPSTRLRLPTSSSRSPRSTRASSWSPS

SEQ ID NO: 17548 - protein, 338 aa, Zea mays subsp. mays
  misc_feature (1)..(338): Ceres Seq. ID no. 12358921
MNGGAQAQPIVPAIISFGDSTVDVGNNNYLPGAVFKADYAPYGQGFARHKATGRFSDGKIVTDITAETLGFESYAPPYLSPQASGKNLFTGANFASAASSYYDDTAAMYDAITLTQQLKYYKEYQSKLAAVAGRARARAILGDALYVVSTGTGDFLQNYYHNASLSRRYDVDQYTDLLVGIFSGFANELYRLGARRIGVTSMPPLGCLPASIRLYGDGKGACVPRLNRDAETFNAKLNPPSGRSSGGTPTSSSPSSTSTRPSANSHKTPRLTASPTLEGRAAGRGRPRRGCTSATRRRPGRAGTPAATCSSTPSTRLRLPTSSSRSPRSTRASSWSPS

SEQ ID NO: 17549 - protein, 231 aa, Zea mays subsp. mays
  misc_feature (1)..(231): Ceres Seq. ID no. 12358922
MYDAITLTQQLKYYKEYQSKLAAVAGRARARAILGDALYVVSTGTGDFLQNYYHNASLSRRYDVDQYTDLLVGIFSGFANELYRLGARRIGVTSMPPLGCLPASIRLYGDGKGACVPRLNRDAETFNAKLNPPSGRSSGGTPTSSSPSSTSTRPSANSHKTPRLTASPTLEGRAAGRGRPRRGCTSATRRRPGRAGTPAATCSSTPSTRLRLPTSSSRSPRSTRASSWSPS

SEQ ID NO: 17550 - DNA, 992 bp, Zea mays subsp. mays
  misc_feature (1)..(992): Ceres Seq. ID no. 12358927
agtacaacgcgcgactccatacaacaatacaaacaaagctgtaacgtactgtaaaagtaagatatggaggccgccggcggcggcggcgaggttcacaaggctagcaacgacaaggaggagcatttcgtgctcgtgcacggcgccggccacggcgcctggtgctggttcaagctggcgtgcctgctccggggctccggccgccaccgcgtctcctgcgtcgacctcgccggggccgccggcagcctcgtcgacccggacgacgtccgctcgttcgacgagtacgacgcgccgctcctcgacttgatggccgccttgccggacgacggccgcaaggtggttctggtagggcatagcgcaggaggactgagcgtcacccacgcgatgcatctgttcagagacaagatcaagcaggccatcttcgtagcagcgaccatgctcccgttcgggtaccagtcggagcaagatatcaaagatggagcacctgatctatccgagttcggcgacgacgtttacgacctcaagttcagtctgggagacgaccgccctccgacgagcgtggcgctgagagaggagcaccagcgcgcgatcctgtaccagcaatgcacccacgaggactccacgctcgcatccattctgctgcgcccgtggccggcagctctgggcgccgccaggttcggcttcggccgcgccgacgacggcgccgtgaacactgtgcgtcgggtgtacgtgaagacggccaacgaccgcatgctgaagccggagcagcaggaggcgatggtccgccggtggccgccgagcgaggtggcggcgatggacaccgaccacagccccttcttctccgccccagagcgcctcttcgagctgatcatcaagtcattgtgaatctctcatctgtagtaatcgcttgtgttcttccagactccagtgcctggtgctgtcctgtatgccatgccaaccaataagttatcatttatttatcaataaattatctc

SEQ ID NO: 17551 - protein, 272 aa, Zea mays subsp. mays
  misc_feature (1)..(272): Ceres Seq. ID no. 12358928
MEAAGGGGEVHKASNDKEEHFVLVHGAGHGAWCWFKLACLLRGSGRHRVSCVDLAGAAGSLVDPDDVRSFDEYDAPLLDLMAALPDDGRKVVLVGHSAGGLSVTHAMHLFRDKIKQAIFVAATMLPFGYQSEQDIKDGAPDLSEFGDDVYDLKFSLGDDRPPTSVALREEHQRAILYQQCTHEDSTLASILLRPWPAALGAARFGFGRADDGAVNTVRRVYVKTANDRMLKPEQQEAMVRRWPPSEVAAMDTDHSPFFSAPERLFELIIKSL

SEQ ID NO: 17552 - protein, 192 aa, Zea mays subsp. mays
  misc_feature (1)..(192): Ceres Seq. ID no. 12358929
MAALPDDGRKVVLVGHSAGGLSVTHAMHLFRDKIKQAIFVAATMLPFGYQSEQDIKDGAPDLSEFGDDVYDLKFSLGDDRPPTSVALREEHQRAILYQQCTHEDSTLASILLRPWPAALGAARFGFGRADDGAVNTVRRVYVKTANDRMLKPEQQEAMVRRWPPSEVAAMDTDHSPFFSAPERLFELIIKSL

SEQ ID NO: 17553 - protein, 166 aa, Zea mays subsp. mays
  misc_feature (1)..(166): Ceres Seq. ID no. 12358930
MHLFRDKIKQAIFVAATMLPFGYQSEQDIKDGAPDLSEFGDDVYDLKFSLGDDRPPTSVALREEHQRAILYQQCTHEDSTLASILLRPWPAALGAARFGFGRADDGAVNTVRRVYVKTANDRMLKPEQQEAMVRRWPPSEVAAMDTDHSPFFSAPERLFELIIKSL

SEQ ID NO: 17554 - DNA, 1742 bp, Zea mays subsp. mays
  misc_feature (1)..(1742): Ceres Seq. ID no. 12358954
ctcctccattccccactgcatgcgcgctctgtcactgtcagtctcactctcgctcgctaccttggcgacgactggttgaccgccgctgccgctctagagcaggtgcccactgcccaggtcttcttctggtccttcgccggcgacaagcacaaccagggtgattcaagtactctgctttcaccaatatgtctgacggtcaggaaactgacaagaacattgagatttggaagatcaagaagttgatcaaggcattggaatctgctagaggcaatggcaccagcatgatctctctgattatgccaccacgtgaccaaatttcccgtgtgaccaagatgttgggtgatgaatatggtactgcttcaaatattaagagtagagtcaaccggcaatctgttttagcagccatcacctcagctcagcagaggctgaagctgtataacaaggttcccccaaatggacttgttctctacactggaacaattgttactgaagatggcaaggaaaagaaagtcactattgattttgagcccttcaagcctatcaatgcatccctgtacctttgtgacaataagttccacactgaagctttgaatgaactcttggaatctgatgacaagtttggtttcattgttatggatggtaatggaactctttttggtacactgagtggcaatactcgtgaagtgcttcacaaattcactgttgatctcccaaagaagcatggaagaggaggtcaatctgcccttcgctttgctcggcttcgaatggaaaaacgtcataattatgtccgaaagacagctgagcttgctacacaattttttatcaatccagctaccagtcagcctaatgttgctggacttatattggctggttctgctgattttaagacagaactgagccaatctgacatgtttgatcaacgtctccaggccaaaatacttaatgttgttgatgtttcatatggcggggagaacggttttaaccaagctattgagttgtcagctgaaattctagcaaatgtgaagttcatacaagagaaaaagctgattggaaagtattttgaagaaattagtcaagatacgggtaagtatgtgtttggtgttgatgacacactgaaagcccttgaaatgggcgctgtggaaacactgatagtgtgggaaaaccttgatgtcaacagatatgtgcttaagaatactgcaactggagaaactgttatcaaacatctgaataaagagcaagaagctgaccagagtcatttccgtgatccatctaccaatgctgagctggaggttcaggagaaaacttcgctcttggaatggtttgccaatgagtacaaaaaatttgggtgcacacttgagtttgttaccaacaaatctcaagaagggtctcagttttgcagaggatttggtggcattggtggcatgttgcgctatcaactggacatccgttctttcgacgagctttctgatgacgaaggtgtctatgaagattctgattaagcaaacgtcattcatatggctgtgctggaccctggattgatgcaattgctcgttttgttcttctattttttgcttgattagtcggtttttgaggagattaccacttgagacacttgctttgtttccttgccgcagcttacaattgcaatgtcaaccacatcattagaatctggttgatacctcatgtactgctgttatgttgacatcggctctgtccaatatttatcaagatttggtgtagcg

SEQ ID NO: 17555 - protein, 437 aa, Zea mays subsp. mays
  misc_feature (1)..(437): Ceres Seq. ID no. 12358955
MSDGQETDKNIEIWKIKKLIKALESARGNGTSMISLIMPPRDQISRVTKMLGDEYGTASNIKSRVNRQSVLAAITSAQQRLKLYNKVPPNGLVLYTGTIVTEDGKEKKVTIDFEPFKPINASLYLCDNKFHTEALNELLESDDKFGFIVMDGNGTLFGTLSGNTREVLHKFTVDLPKKHGRGGQSALRFARLRMEKRHNYVRKTAELATQFFINPATSQPNVAGLILAGSADFKTELSQSDMFDQRLQAKILNVVDVSYGGENGFNQAIELSAEILANVKFIQEKKLIGKYFEEISQDTGKYVFGVDDTLKALEMGAVETLIVWENLDVNRYVLKNTATGETVIKHLNKEQEADQSHFRDPSTNAELEVQEKTSLLEWFANEYKKFGCTLEFVTNKSQEGSQFCRGFGGIGGMLRYQLDIRSFDELSDDEGVYEDSD

SEQ ID NO: 17556 - protein, 405 aa, Zea mays subsp. mays
  misc_feature (1)..(405): Ceres Seq. ID no. 12358956
MISLIMPPRDQISRVTKMLGDEYGTASNIKSRVNRQSVLAAITSAQQRLKLYNKVPPNGLVLYTGTIVTEDGKEKKVTIDFEPFKPINASLYLCDNKFHTEALNELLESDDKFGFIVMDGNGTLFGTLSGNTREVLHKFTVDLPKKHGRGGQSALRFARLRMEKRHNYVRKTAELATQFFINPATSQPNVAGLILAGSADFKTELSQSDMFDQRLQAKILNVVDVSYGGENGFNQAIELSAEILANVKFIQEKKLIGKYFEEISQDTGKYVFGVDDTLKALEMGAVETLIVWENLDVNRYVLKNTATGETVIKHLNKEQEADQSHFRDPSTNAELEVQEKTSLLEWFANEYKKFGCTLEFVTNKSQEGSQFCRGFGGIGGMLRYQLDIRSFDELSDDEGVYEDSD

SEQ ID NO: 17557 - protein, 400 aa, Zea mays subsp. mays
  misc_feature (1)..(400): Ceres Seq. ID no. 12358957
MPPRDQISRVTKMLGDEYGTASNIKSRVNRQSVLAAITSAQQRLKLYNKVPPNGLVLYTGTIVTEDGKEKKVTIDFEPFKPINASLYLCDNKFHTEALNELLESDDKFGFIVMDGNGTLFGTLSGNTREVLHKFTVDLPKKHGRGGQSALRFARLRMEKRHNYVRKTAELATQFFINPATSQPNVAGLILAGSADFKTELSQSDMFDQRLQAKILNVVDVSYGGENGFNQAIELSAEILANVKFIQEKKLIGKYFEEISQDTGKYVFGVDDTLKALEMGAVETLIVWENLDVNRYVLKNTATGETVIKHLNKEQEADQSHFRDPSTNAELEVQEKTSLLEWFANEYKKFGCTLEFVTNKSQEGSQFCRGFGGIGGMLRYQLDIRSFDELSDDEGVYEDSD

SEQ ID NO: 17558 - DNA, 1271 bp, Zea mays subsp. mays
  misc_feature (1)..(1271): Ceres Seq. ID no. 12358974
aaagagaggtgccctagcttccctcccaatcccaccaggccgccgccaccacatcgcgccctcgcccgcttgccgccgaccctaaccggctgagcccctgaccagctcgtccaggcggacagcggcctgcggcaagccagcgcccagccaacagcgactgcctgactggtgagaggtgcgcatggtatggccggcctgatcagcttgcgcgccggtccgaggagttcaccgtcacttgcccggtcgtcgtccgcctgggcatcaccatcaccggcttcacaggtggcggttcgtttgccaagcccactgtttcgctgtgccaaacttcgtaggagccgtagtctactggcagcagcactggagatctctaaggacggttccgccgcggttctggccaacagcctgccttcccaaggggctatcgagacgctgcggaatgccgatgcagtatgtttcgacgttgacagcaccgtcatcctggacgagggcattgacgagcttgctgatttctgcggggcggggaaagctgttgctgaatggactgcaaaggccatgacagggactgttccgtttgaggaggcgctggcagccaggctgtctttaatcaagccatctctctcccaggtggaggagtgcctggagaagaggccaccaaggatttctcctggaatggctgatttggttaataagctaaaatccaataatattgacgtgttccttgtgtcaggaggcttccgacaaatgatcaagccagtagcatttgagcttggtattcctcctgaaaacatcactgcaaaccaattgttatttggcacattgggggagtacgccggatttgatcccacagagcccacttctngcagtgggggtaaagcaaaagcagtgcagcaaataaaacaggaccatggctacaagacagttgttatgattggtgatggtgcaactgatctggaggcccggcaacctggcggagcagacttgttcatatgttacgccggggttcanatgagagagccagtcgcagcacaagctgactgggtggtttttgattttcaagagctgatcactaagttgccatgaattcattacctaccgcaatttatgaacctttgcattgtcggctaaataattgcggccacattttaaagctgtagatttcactagcaattcttggagacaactgaattattacccggttgtaaagtattttttatttgttttcccgcattgtttgtatgatcctgaaccatgaatgcggaggttgtgttccg

SEQ ID NO: 17559 - protein, 297 aa, Zea mays subsp. mays
  misc_feature (1)..(297): Ceres Seq. ID no. 12358975
  misc_feature (225)..(225): Xaa is any aa, unknown or other
  misc_feature (273)..(273): Xaa is any aa, unknown or other
MAGLISLRAGPRSSPSLARSSSAWASPSPASQVAVRLPSPLFRCAKLRRSRSLLAAALEISKDGSAAVLANSLPSQGAIETLRNADAVCFDVDSTVILDEGIDELADFCGAGKAVAEWTAKAMTGTVPFEEALAARLSLIKPSLSQVEECLEKRPPRISPGMADLVNKLKSNNIDVFLVSGGFRQMIKPVAFELGIPPENITANQLLFGTLGEYAGFDPTEPTSXSGGKAKAVQQIKQDHGYKTVVMIGDGATDLEARQPGGADLFICYAGVXMREPVAAQADWVVFDFQELITKLP

SEQ ID NO: 17560 - protein, 175 aa, Zea mays subsp. mays
  misc_feature (1)..(175): Ceres Seq. ID no. 12358976
  misc_feature (103)..(103): Xaa is any aa, unknown or other
  misc_feature (151)..(151): Xaa is any aa, unknown or other
MTGTVPFEEALAARLSLIKPSLSQVEECLEKRPPRISPGMADLVNKLKSNNIDVFLVSGGFRQMIKPVAFELGIPPENITANQLLFGTLGEYAGFDPTEPTSXSGGKAKAVQQIKQDHGYKTVVMIGDGATDLEARQPGGADLFICYAGVXMREPVAAQADWVVFDFQELITKLP

SEQ ID NO: 17561 - DNA, 1615 bp, Zea mays subsp. mays
  misc_feature (1)..(1615): Ceres Seq. ID no. 12358993
acctcttctcgcgcacgtggtctgtgcccgtacgcggcggcgctgccgctcaccagaccggccgccgccacgtctgcttccgcgcctccccgcctcctcaccgtccgcccccttttacctgcctgatcattttattataaatgtggggcgagagaactcatcataagcactggcatcaaggtcatggtacctcggggaattccaacaacaaaaagcatgataagcggcagccaaaatttataccagacaattatagctccgtcgatgaggttactactgctctgcgagaagctggcctcgaatcgtcaaatctaatcctcggtattgatttcaccaaaagcaatgagtggtcaggcaggcattcctttagaagaaaatctctgcatgccattaatggcaccccaaatccatatgaacaagctatctctataatcgggcgaacgctgtcaccttttgacgatgataacttgataccatgttttggatttggcgatgcttctacacatgatcattctgtgttcagtttctacccagagaaccgaccctgtcgtggctttgaggaggttcttgtaaggtatcgacagattgtaccacatttgaacctttcaggaccaacttcttttgcacctcttatttatgcagcgatttctgttgttgaaaacagtaattggcagtaccatgtcctcgtgatcatagctgatggacgtgactgccgcgaatataaatgatggaagattaagtccacaggaacaagcaactatacaagcaattgtcgatgctagctactatcctctttcaatagtaatggttggggtgggtgatggaccatgggatgcgatgcagcattttgatgactgtatccctgaaagagcttttgacaattttcagtttgtgaacttcactggtattatgtcaacaagtaaggatatgtcaaagaaggaggctgcatttgcccttgcagctcttatggaaataccttctcagtataaagcaacgcaaggcctccgacctccagaaaagcaagcacaaaggattggctctcctaggattcttcctcctccaaataaagttcttgaaaatgataatgccgccgccgctgcttcgcaccctcctcaaactgcaagctcgaaatcaactggtattggcaaaagtgctgctgacgagcaggtatgccccatatgtctaaccaatccaaaggacatggcttttcagtgtggtcatctgacatgtaaggaatgtggcccaacactatcaacgtgcccattgtgccgcgctctaatcaccatgcgtgtgaggctctactcctaagtcggttggtgtctggagggatgggaccaaacagaaaggagcaagaactttggggcgcaaggactgcgctacgatcttgagatatggtccatatggatgtcatgataacgatgcatgtacagaaaccttgtccgtgcctattcagtaatgtcgttgatgagtatcttccatcaatcacatgtaaaatttctaatgttatcttgtattagtagcaggggattgcttgttgagtggaataccaccagttgttcagcaacagatagtaaactccatgtgcatttggaagtcacttttgtgatttgtgttc

SEQ ID NO: 17562 - protein, 202 aa, Zea mays subsp. mays
  misc_feature (1)..(202): Ceres Seq. ID no. 12358994
MDVTAANINDGRLSPQEQATIQAIVDASYYPLSIVMVGVGDGPWDAMQHFDDCIPERAFDNFQFVNFTGIMSTSKDMSKKEAAFALAALMEIPSQYKATQGLRPPEKQAQRIGSPRILPPPNKVLENDNAAAAASHPPQTASSKSTGIGKSAADEQVCPICLTNPKDMAFQCGHLTCKECGPTLSTCPLCRALITMRVRLYS

SEQ ID NO: 17563 - protein, 195 aa, Zea mays subsp. mays
  misc_feature (1)..(195): Ceres Seq. ID no. 12358995
MWGERTHHKHWHQGHGTSGNSNNKKHDKRQPKFIPDNYSSVDEVTTALREAGLESSNLILGIDFTKSNEWSGRHSFRRKSLHAINGTPNPYEQAISIIGRTLSPFDDDNLIPCFGFGDASTHDHSVFSFYPENRPCRGFEEVLVRYRQIVPHLNLSGPTSFAPLIYAAISVVENSNWQYHVLVIIADGRDCREYK

SEQ ID NO: 17564 - protein, 167 aa, Zea mays subsp. mays
  misc_feature (1)..(167): Ceres Seq. ID no. 12358996
MVGVGDGPWDAMQHFDDCIPERAFDNFQFVNFTGIMSTSKDMSKKEAAFALAALMEIPSQYKATQGLRPPEKQAQRIGSPRILPPPNKVLENDNAAAAASHPPQTASSKSTGIGKSAADEQVCPICLTNPKDMAFQCGHLTCKECGPTLSTCPLCRALITMRVRLYS

SEQ ID NO: 17565 - DNA, 1251 bp, Zea mays subsp. mays
  misc_feature (1)..(1251): Ceres Seq. ID no. 12359009
aaaattactgattgattgaattgcgaagcatatatatggcggccttctcctccagcaacggcgtgccgccgggcttccggttccacccgaccgacgaggagctgctgctatactacctcaagaagaaggtcggattcgagaagttcgaactcgaggtcatcagggaggtcgacctcaacaagatcgagccatgggagctgcaagagacgtgccggatcgggtcggcgccgcagaacgagtggtacttcttcagccacaaggaccgcaagtacccgacggggtcgaggacgaaccgcgccacgacggccggcttctggaaggccacgggccgggacaagtgcatccggaccagctaccgcaagatcggcatgcgaaagacgctcgtcttctaccgcggccgcgcccctcacggccagaagaccgactggatcatgcacgagtaccgcctcgaggacgccgacgacgacgcccagggcggcacccagcgaggacggatgggtggtgtgccgcgtgttcaagaagaagtgcttcttcaagattggcggaggcgaagggagcaccaccagcagccagggcgcggatgccggcggccacctggccaccatgtcgccgccgctcggcggacaccacgacctggcgtacatgcacccgcacccgtactaccaccacgccgcctcctactactcccagatgcagaccccggggccgcacgccaccgcatactcgcaccacgtgcaggtccaggacctcctcaccaaccaccgacccacggacgacgacggcgccggcaccggctacgacttctccggcctgcatgtcgagcatcaacccggtggcggccttgacgtcggcagcagcgatggcgtcgccacagacgacggtggccagctggccggcgaaaggagggatcagaccaccggtacagccgcagatcatcagtggcaggcgatggatggtttcagcaacggcgggagcgccgaggtgcagcaaatgaccggcgcccaacgaggcggggagatggatttgtggggttacggaaggtaaaaacttgatgaccaccacctatacgatcgaaaacatggacgtcaagtgagcatctttcatgcatacatgatcgaagatatggtgcaaattgatgcatgcgttcattgggagtttatatatagcttgatgacttgtttggactagttttggtgtttacgatgtgtttgtatatgttggttaatttgttggtacaataagagccaaagg

SEQ ID NO: 17566 - protein, 269 aa, Zea mays subsp. mays
  misc_feature (1)..(269): Ceres Seq. ID no. 12359010
MAAFSSSNGVPPGFRFHPTDEELLLYYLKKKVGFEKFELEVIREVDLNKIEPWELQETCRIGSAPQNEWYFFSHKDRKYPTGSRTNRATTAGFWKATGRDKCIRTSYRKIGMRKTLVFYRGRAPHGQKTDWIMHEYRLEDADDDAQGGTQRGRMGGVPRVQEEVLLQDWRRRREHHQQPGRGCRRPPGHHVAAARRTPRPGVHAPAPVLPPRRLLLLPDADPGAARHRILAPRAGPGPPHQPPTHGRRRRRHRLRLLRPACRASTRWRP

SEQ ID NO: 17567 - protein, 267 aa, Zea mays subsp. mays
  misc_feature (1)..(267): Ceres Seq. ID no. 12359011
MGAARDVPDRVGAAERVVLLQPQGPQVPDGVEDEPRHDGRLLEGHGPGQVHPDQLPQDRHAKDARLLPRPRPSRPEDRLDHARVPPRGRRRRRPGRHPARTDGWCAACSRRSASSRLAEAKGAPPAARARMPAATWPPCRRRSADTTTWRTCTRTRTTTTPPPTTPRCRPRGRTPPHTRTTCRSRTSSPTTDPRTTTAPAPATTSPACMSSINPVAALTSAAAMASPQTTVASWPAKGGIRPPVQPQIISGRRWMVSATAGAPRCSK

SEQ ID NO: 17568 - protein, 158 aa, Zea mays subsp. mays
  misc_feature (1)..(158): Ceres Seq. ID no. 12359012
MRKTLVFYRGRAPHGQKTDWIMHEYRLEDADDDAQGGTQRGRMGGVPRVQEEVLLQDWRRRREHHQQPGRGCRRPPGHHVAAARRTPRPGVHAPAPVLPPRRLLLLPDADPGAARHRILAPRAGPGPPHQPPTHGRRRRRHRLRLLRPACRASTRWRP

SEQ ID NO: 17569 - DNA, 1032 bp, Zea mays subsp. mays
  misc_feature (1)..(1032): Ceres Seq. ID no. 12359028
ctttacacctctacatgcctcatatctctctgtctgtccaacgatccctctcctttgtcatctccgtctccatctcccaagcaccggagaggagagctagcatgcctggatgtccacggagagggagagactcgatgagatcgggaagatcaagcgagagccggatacagccgccctcgctgtcgcttccgcatccgcctccaccgtgccggccgacaaccacatcccacgccgcctcggccacggcggtgccctcaacaccttgacgccgtgcgccgcgtgcaagctcctccgccgccgctgcgcgcaggaatgccccttcgccccttacttctcgccgcatgagccccacaaattcgccgccgtccacaaggtcttcggcgctagcaacgtctccaagatgctcttggaggtggtggagggggagagggcggacacagcgagcagcctggtgtacgaagcgaacctccggttgcgggatccggtgtacggatgcatgggcgccatctccattctccagcaacaggtgaacgcgctggaggccgagctggaggcagtgagggccgagatcctcaagcacaggtaccggcaggccaccggcaaccgtctcatggacgacgtgcgtgccacggccagcttcgtcttggctcctgcgtccgctccgatgcacgttaatgacgttgtatcagtggtggaggcaggccaagaggtcaccgccaccggcggcgcgtcgggggtgtacattgcggaagccgagcagccgtcaagtactaataactatgctcccttaacccaagtgagcatcctgcatactttggttgacaataagcatggatttatttaacattttggtgggatcacagtagtagaaagtttggatgaataaactgtgtgcaagtttaattatatatacaagttttctagaaataggttatagatgtggatatgtatattgggtgactaaaaagttcatccaatattatggaatatatgtaccattattttcttgtaatagcccattgcgtgttgttg

SEQ ID NO: 17570 - protein, 244 aa, Zea mays subsp. mays
  misc_feature (1)..(244): Ceres Seq. ID no. 12359029
MSTERERLDEIGKIKREPDTAALAVASASASTVPADNHIPRRLGHGGALNTLTPCAACKLLRRRCAQECPFAPYFSPHEPHKFAAVHKVFGASNVSKMLLEVVEGERADTASSLVYEANLRLRDPVYGCMGAISILQQQVNALEAELEAVRAEILKHRYRQATGNRLMDDVRATASFVLAPASAPMHVNDVVSVVEAGQEVTATGGASGVYIAEAEQPSSTNNYAPLTQVSILHTLVDNKHGFI

SEQ ID NO: 17571 - protein, 147 aa, Zea mays subsp. mays
  misc_feature (1)..(147): Ceres Seq. ID no. 12359030
MLLEVVEGERADTASSLVYEANLRLRDPVYGCMGAISILQQQVNALEAELEAVRAEILKHRYRQATGNRLMDDVRATASFVLAPASAPMHVNDVVSVVEAGQEVTATGGASGVYIAEAEQPSSTNNYAPLTQVSILHTLVDNKHGFI

SEQ ID NO: 17572 - DNA, 1121 bp, Zea mays subsp. mays
  misc_feature (1)..(1121): Ceres Seq. ID no. 12359075
accattgagccgagcatcctgcgagagcgagcaagagaatcacgacttataactagggttctccacaggtaccgagatacgaatagctagctaggatgatgctgcttgcactgcattctccatctaccggtaccgtcgcttggcgtcgtcgtcgtccggctccattacccgccatctcgcgccgcgctcgcattatccggccgtctccattcgctctgtccaccgcggcggccacggacacgagcaccggccatgccccggccacggccgatcgcgaggcgccgctactccagctcctccacagcggggtgcgggcagagtcgctgccgcggcacgtagggttggtgatcgatgggcacgcgagatgggcgcgcgccagggggctgtcggtgtcggagggccacgcggttgggcggcgcacggtggagcacacggtgcgactgtcgcgagcgtggggcatccgcgtgctcaccgtcttcgcctgctcccacgagaacatgacgacccgccccaaggcggagatggacttcttcatgcagctgtacgaggggtttatccgtgacaacgtcgaccagttctgcagggagggaatccggctgcatctcatcggcgactcgccgggattgccagcgtccctgctgcgcgcggcgagggaagccaaccagctggccacgcagagcgagtcggagatggtcctgatgctggccatgggctacagcgggcggcgggacatactgcgggcgtgccaagagctcgccacggaggtgcagcggaacctgctgaggccagaggacatcgacgaggcgctcatcgccgggaagctggggaccagtatcgccggcggcgagctctcttaccccgacctggtcatcaggaccagcggcgagctgcggctgagcaacttcctgctgtggcagtccgcattcgcggagctcttcttctctgacgtcatgtggccggattttggggaggacgagtacctcggggccttgcgttcctaccagaccagacaacggcgcttcggccaacgaaagtagagctcacttcttcttcttttttcctttcaaaatacaacaaacgaggaaataaaaagctacatcactactatatagatttgattc

SEQ ID NO: 17573 - protein, 313 aa, Zea mays subsp. mays
  misc_feature (1)..(313): Ceres Seq. ID no. 12359076
MMLLALHSPSTGTVAWRRRRPAPLPAISRRARIIRPSPFALSTAAATDTSTGHAPATADREAPLLQLLHSGVRAESLPRHVGLVIDGHARWARARGLSVSEGHAVGRRTVEHTVRLSRAWGIRVLTVFACSHENMTTRPKAEMDFFMQLYEGFIRDNVDQFCREGIRLHLIGDSPGLPASLLRAAREANQLATQSESEMVLMLAMGYSGRRDILRACQELATEVQRNLLRPEDIDEALIAGKLGTSIAGGELSYPDLVIRTSGELRLSNFLLWQSAFAELFFSDVMWPDFGEDEYLGALRSYQTRQRRFGQRK

SEQ ID NO: 17574 - protein, 312 aa, Zea mays subsp. mays
  misc_feature (1)..(312): Ceres Seq. ID no. 12359077
MLLALHSPSTGTVAWRRRRPAPLPAISRRARIIRPSPFALSTAAATDTSTGHAPATADREAPLLQLLHSGVRAESLPRHVGLVIDGHARWARARGLSVSEGHAVGRRTVEHTVRLSRAWGIRVLTVFACSHENMTTRPKAEMDFFMQLYEGFIRDNVDQFCREGIRLHLIGDSPGLPASLLRAAREANQLATQSESEMVLMLAMGYSGRRDILRACQELATEVQRNLLRPEDIDEALIAGKLGTSIAGGELSYPDLVIRTSGELRLSNFLLWQSAFAELFFSDVMWPDFGEDEYLGALRSYQTRQRRFGQRK

SEQ ID NO: 17575 - protein, 179 aa, Zea mays subsp. mays
  misc_feature (1)..(179): Ceres Seq. ID no. 12359078
MTTRPKAEMDFFMQLYEGFIRDNVDQFCREGIRLHLIGDSPGLPASLLRAAREANQLATQSESEMVLMLAMGYSGRRDILRACQELATEVQRNLLRPEDIDEALIAGKLGTSIAGGELSYPDLVIRTSGELRLSNFLLWQSAFAELFFSDVMWPDFGEDEYLGALRSYQTRQRRFGQRK

SEQ ID NO: 17576 - DNA, 1593 bp, Zea mays subsp. mays
  misc_feature (1)..(1593): Ceres Seq. ID no. 12359106
cttccctccccctccctgctcggtgctcgcacacgctggcgcggcttgcccccacgctgcgctcccaccaccaccactatataatccccgatcgcctcacgcacacgcaccgacccaccggccgacgaggggcgaccgccgcaacacaaatccacacgcccgccgccaccgccgccatacggacccactcctccttgccctggtgcgagcaggcttcggcagcaaaccccgcaggctgctcccggacgagggagaacgcgcggggctgggctagccgctagtcaggggaccgggggcggaggcagcgaggaggtacgtatggacaagtatgaggcggtgcgggacatcgggtcggggaacttcggggtggcgcggctgatgcgcaaccgcgagactcgagagctcgtcgccgtcaagtgcatcgagcgtggccaccggattgacgagaatgtgtacagggagatcatcaaccaccgctcgctgcgccatcccaacattattcgcttcaaggaggtgatacttacaccaacacatcttatgattctgatggagtttgcagcaggtggagagctttttgatcggatctgtgatcgtgggcggtttagtgaggatgaggcccggtatttctttcagcagttgatctgtggagtgagctattgccattacatgcaaatatgccatagagatctgaagctggagaagttctcttggatggcagcccagctccacggcttaagatctgcgattttggctattccaagtcatcagtgttgcattcaagacccaaatcagcagtaggaacgccagcatatattgcacctgaggtgctatcccgtcgcgagtatgatggaaagcttgcagacgtatggtcctgtggggtgactctttacgtcatgcttgtgggagcatacccatttgaagacccagatgaccccaagaatatacgcaagaccattcagcaaataatgcaagtgcaatacaagataccagatcatgtccacatatctacggaatgccagcaacttattgcccgtatctttgttgccaatccaatgaggagaatcacaatgaaggaaataaagagccatccatggtttttgaagaacctaccacgggaactcacggagactgcacaaggcatgtactacaggagggataacagggtcccttcttattcagaccaaacgtcggaagaaatcatgaagatagttcaagatgcaaggaccatgccgaaatcatccagatcaggctatgggtggagcagtgagtattcggatgaagaagaagagaaggaagaggaacacagaccagaggagcatgaggaagaggaagatgaatacgataggagggtgaaggaggtccatgcaagcggagaactccgtatggacgctcttcacatatgaaagctagtggaagagaaagttgcatgtagataactgggttgttgcggatctgaaggatccagtgggatgtatgcagttttggcttgagaatttgcttctgtttgtcaattttcatgtaacataatttaatacaccgagacaacagactaccatgttcttatattggtaaatatgaagcatgtaccttctg

SEQ ID NO: 17577 - protein, 169 aa, Zea mays subsp. mays
  misc_feature (1)..(169): Ceres Seq. ID no. 12359107
MLVGAYPFEDPDDPKNIRKTIQQIMQVQYKIPDHVHISTECQQLIARIFVANPMRRITMKEIKSHPWFLKNLPRELTETAQGMYYRRDNRVPSYSDQTSEEIMKIVQDARTMPKSSRSGYGWSSEYSDEEEEKEEEHRPEEHEEEEDEYDRRVKEVHASGELRMDALHI

SEQ ID NO: 17578 - protein, 159 aa, Zea mays subsp. mays
  misc_feature (1)..(159): Ceres Seq. ID no. 12359108
MDKYEAVRDIGSGNFGVARLMRNRETRELVAVKCIERGHRIDENVYREIINHRSLRHPNIIRFKEVILTPTHLMILMEFAAGGELFDRICDRGRFSEDEARYFFQQLICGVSYCHYMQICHRDLKLEKFSWMAAQLHGLRSAILAIPSHQCCIQDPNQQ

SEQ ID NO: 17579 - protein, 145 aa, Zea mays subsp. mays
  misc_feature (1)..(145): Ceres Seq. ID no. 12359109
MQVQYKIPDHVHISTECQQLIARIFVANPMRRITMKEIKSHPWFLKNLPRELTETAQGMYYRRDNRVPSYSDQTSEEIMKIVQDARTMPKSSRSGYGWSSEYSDEEEEKEEEHRPEEHEEEEDEYDRRVKEVHASGELRMDALHI

SEQ ID NO: 17580 - DNA, 1999 bp, Zea mays subsp. mays
  misc_feature (1)..(1999): Ceres Seq. ID no. 12359114
aactgaggcgagggagagagagagagagtgagtgagtgagtaatgggcggttcatcaggccttgtggactggagaggacggccggtgaacaccaagaagcatggaggagtgagagcttcaattttcattcatgcgctggtgctgctcagcaacgtagccaacattgccagtatactgaatcgtaagctatctgcgcgaggagatgcacatggatgtcgcgagggcgacgacgatggcgagcaatttctttgccgcgctgcaaatgttctccatcccagcagccttccttgctgactcctacatcaagcgtttctacactgtcctcatctttggcccaattgaaatactgggctacatcctgctcgcggtccaagcacatgtcccatccctgcacccaccaccgtgcgtccctggacaagagacaagtacgtgtgagtccgtgagcggttcgaacctgagcctgctcctcctgggtctctacctgatccccatcggcgatggggcggctcgggcatgcctcccggctctcggcggggagcagttcgacaggtcggatcccgtagagcagaggcaggagtcgagcttcttcaactggtacaccttctccgtctcgacgggtggcttcgtggggctggtcttcatcgtgtgggtggagaacagtaaaggctgggacgtaggcttcgccgtctgtgccttgtccgtgctcctcgggatgctgatatggattgctggcctcccgttatacaggaaccagctgccaactagtagccccatcacaagaatactgcaggttcttgtagctgcattcaagaaaagaaatgttgcattaccggccaaccccagtgagctaaagcaaataagtcaaggcgacgccggttccctcgagattctgcatagaaccgacggatttcgctgccttgacaaagcagcggtggacaccggaaggaccggtggctggattctctgcagcataacccaggtggaggagactaagatcattctccggatggtgcccatcttcctgagtgctgtcctaggctacattccggtgcctctcatcctcaatttcaccgtgcagcagggcaacacaatggacaccaggcttggcgcacttcacatctcacccgcgacgctattcatcatccctacgcttttccagatggtgatcctcgttgtttacgaccggttcattgtcccgttcctaagacggataaccgggtacgtgggcggtgtcacgcacctccagcgcatcggcatcggattcctttcaaccgtagtggccaccggcgttgcagcaatagtggaggccagtaggaaaaaggtggtacgagacagttgccttgtggatgctacagctggaattccaatatctgttttctggctgaccatacagttcttcctgctaggcattgtggatgtcacctcctttgtagggcttcttgagttcttctacagtgaggcgtccacggggatgaagtctattggaagctccatcttctactgcatccttggggtgtcagcttggttggggagcctgttgattcaagtggcaaaccgagttacaagacaccgcgatggcacaggaggctggcttgatgggaccaacttgaacaaggggaaacttgaacgattctattggttgctagcagttcttgagctggtgtcgctattagtctacgtcttcttcgcctccaggtatgtttacgggaatgaccaaagggttgtggctgacgaagataataatacggctccatctgatggtaccataaatgttatctgattgttagagcgtagtggtaacgagactgagagattgtgcaaatgacagagacagaatgacagttgtctttattgcaaggaagacaatgcttatatatacagacgaactagtgcctccccaaggggtgcgtcccttggggagaaactgtcgcaccccatggaggggattgaacacacatattgtaacactcccccttaatcaatctaagtccatttgatc

SEQ ID NO: 17581 - protein, 525 aa, Zea mays subsp. mays
  misc_feature (1)..(525): Ceres Seq. ID no. 12359115
MHMDVARATTMASNFFAALQMFSIPAAFLADSYIKRFYTVLIFGPIEILGYILLAVQAHVPSLHPPPCVPGQETSTCESVSGSNLSLLLLGLYLIPIGDGAARACLPALGGEQFDRSDPVEQRQESSFFNWYTFSVSTGGFVGLVFIVWVENSKGWDVGFAVCALSVLLGMLIWIAGLPLYRNQLPTSSPITRILQVLVAAFKKRNVALPANPSELKQISQGDAGSLEILHRTDGFRCLDKAAVDTGRTGGWILCSITQVEETKIILRMVPIFLSAVLGYIPVPLILNFTVQQGNTMDTRLGALHISPATLFIIPTLFQMVILVVYDRFIVPFLRRITGYVGGVTHLQRIGIGFLSTVVATGVAAIVEASRKKVVRDSCLVDATAGIPISVFWLTIQFFLLGIVDVTSFVGLLEFFYSEASTGMKSIGSSIFYCILGVSAWLGSLLIQVANRVTRHRDGTGGWLDGTNLNKGKLERFYWLLAVLELVSLLVYVFFASRYVYGNDQRVVADEDNNTAPSDGTINVI

SEQ ID NO: 17582 - protein, 523 aa, Zea mays subsp. mays
  misc_feature (1)..(523): Ceres Seq. ID no. 12359116
MDVARATTMASNFFAALQMFSIPAAFLADSYIKRFYTVLIFGPIEILGYILLAVQAHVPSLHPPPCVPGQETSTCESVSGSNLSLLLLGLYLIPIGDGAARACLPALGGEQFDRSDPVEQRQESSFFNWYTFSVSTGGFVGLVFIVWVENSKGWDVGFAVCALSVLLGMLIWIAGLPLYRNQLPTSSPITRILQVLVAAFKKRNVALPANPSELKQISQGDAGSLEILHRTDGFRCLDKAAVDTGRTGGWILCSITQVEETKIILRMVPIFLSAVLGYIPVPLILNFTVQQGNTMDTRLGALHISPATLFIIPTLFQMVILVVYDRFIVPFLRRITGYVGGVTHLQRIGIGFLSTVVATGVAAIVEASRKKVVRDSCLVDATAGIPISVFWLTIQFFLLGIVDVTSFVGLLEFFYSEASTGMKSIGSSIFYCILGVSAWLGSLLIQVANRVTRHRDGTGGWLDGTNLNKGKLERFYWLLAVLELVSLLVYVFFASRYVYGNDQRVVADEDNNTAPSDGTINVI

SEQ ID NO: 17583 - protein, 515 aa, Zea mays subsp. mays
  misc_feature (1)..(515): Ceres Seq. ID no. 12359117
MASNFFAALQMFSIPAAFLADSYIKRFYTVLIFGPIEILGYILLAVQAHVPSLHPPPCVPGQETSTCESVSGSNLSLLLLGLYLIPIGDGAARACLPALGGEQFDRSDPVEQRQESSFFNWYTFSVSTGGFVGLVFIVWVENSKGWDVGFAVCALSVLLGMLIWIAGLPLYRNQLPTSSPITRILQVLVAAFKKRNVALPANPSELKQISQGDAGSLEILHRTDGFRCLDKAAVDTGRTGGWILCSITQVEETKIILRMVPIFLSAVLGYIPVPLILNFTVQQGNTMDTRLGALHISPATLFIIPTLFQMVILVVYDRFIVPFLRRITGYVGGVTHLQRIGIGFLSTVVATGVAAIVEASRKKVVRDSCLVDATAGIPISVFWLTIQFFLLGIVDVTSFVGLLEFFYSEASTGMKSIGSSIFYCILGVSAWLGSLLIQVANRVTRHRDGTGGWLDGTNLNKGKLERFYWLLAVLELVSLLVYVFFASRYVYGNDQRVVADEDNNTAPSDGTINVI

SEQ ID NO: 17584 - DNA, 1424 bp, Zea mays subsp. mays
  misc_feature (1)..(1424): Ceres Seq. ID no. 12359128
ctcccgcgatcgccaccggggaaggggcaatagaataaagtgagggcagccaatgcaggccgccgtcaacaccaccactgtcggcgctcacccgcacccaacaaagtcctcgttcctccgtccgtcccctccttgccgcgtctacttccacgcttctccacgcccgaaccttagggcgatcgccatggccagcaagtcgcagctgcaggaccaactgatcatcactcgccccgacgactggcacctccatcttcgcgaaggcggtgtcctcgaggctgtagtgccacacagcgcgaggcattttgggagggccatcatcatgcccaacctgaagccgccggtgaccacaacggcacgggccgtggagtacagggaggagataatgagggcgctgccgccagggagtagcttcgagccgctcatgacactatacctcacagacaacacaagcccagaggagatcaagctcgcaagaaagagtggtataatttttgctgtgaagttgtatcctgctggagcaactaccaattcccaagatggtgtcactgatatatttgggaagtgcttgccggtcctcgaggagatggtcaggcaggaaatgccgttgcttgttcatggagaagtcacagatccacatgttgacacatttgaccgcgagaaggttttcattgacaaaatattagcaccacttgtacaaaaacttccgcagctgaaaattgtcatggaacatatcacaactatggatgcagtgaacttcatagaatcatgtgaagaaggtcatgttgctgcaacagtgactccccagcatctcctcctcaataggaatgctttatttcagggtggcttgcagccacacaattattgcttgccagtactgaaaagagagactcatagacaagctattgtgtctgctgtaacaaatgggagtagacggtacttccttggtactgacagcgctccccatgataaacggaacaaagagtgttcctgtggatgtgctggaatatatagcgctcctgttgccttgtctctttatgtgaaggtatttgaagaggctggtgcccttgataaactagaagcatttacaagcttcaatggccctgatttttatggcctcccaaggaacacttcaaagattatcttgagaaagaatgcctggaaagttcctgctacttataaacacagttcaggggagattgtgcctatgtttaatggcagcacccttgaatggcttccatctgatcagcctaaagagtaaacagtatacattattggacccagcacttgggggaatcaataggtggagttttctagttctttttcccgtttccactagaatcagcatagcgaaactattctgcttgttgaaagcaacggtggaggatctgcttgttgagttgttatatccatttgcattgcagtgc

SEQ ID NO: 17585 - protein, 401 aa, Zea mays subsp. mays
  misc_feature (1)..(401): Ceres Seq. ID no. 12359129
MQAAVNTTTVGAHPHPTKSSFLRPSPPCRVYFHASPRPNLRAIAMASKSQLQDQLIITRPDDWHLHLREGGVLEAVVPHSARHFGRAIIMPNLKPPVTTTARAVEYREEIMRALPPGSSFEPLMTLYLTDNTSPEEIKLARKSGIIFAVKLYPAGATTNSQDGVTDIFGKCLPVLEEMVRQEMPLLVHGEVTDPHVDTFDREKVFIDKILAPLVQKLPQLKIVMEHITTMDAVNFIESCEEGHVAATVTPQHLLLNRNALFQGGLQPHNYCLPVLKRETHRQAIVSAVTNGSRRYFLGTDSAPHDKRNKECSCGCAGIYSAPVALSLYVKVFEEAGALDKLEAFTSFNGPDFYGLPRNTSKIILRKNAWKVPATYKHSSGEIVPMFNGSTLEWLPSDQPKE

SEQ ID NO: 17586 - protein, 357 aa, Zea mays subsp. mays
  misc_feature (1)..(357): Ceres Seq. ID no. 12359130
MASKSQLQDQLIITRPDDWHLHLREGGVLEAVVPHSARHFGRAIIMPNLKPPVTTTARAVEYREEIMRALPPGSSFEPLMTLYLTDNTSPEEIKLARKSGIIFAVKLYPAGATTNSQDGVTDIFGKCLPVLEEMVRQEMPLLVHGEVTDPHVDTFDREKVFIDKILAPLVQKLPQLKIVMEHITTMDAVNFIESCEEGHVAATVTPQHLLLNRNALFQGGLQPHNYCLPVLKRETHRQAIVSAVTNGSRRYFLGTDSAPHDKRNKECSCGCAGIYSAPVALSLYVKVFEEAGALDKLEAFTSFNGPDFYGLPRNTSKIILRKNAWKVPATYKHSSGEIVPMFNGSTLEWLPSDQPKE

SEQ ID NO: 17587 - protein, 312 aa, Zea mays subsp. mays
  misc_feature (1)..(312): Ceres Seq. ID no. 12359131
MPNLKPPVTTTARAVEYREEIMRALPPGSSFEPLMTLYLTDNTSPEEIKLARKSGIIFAVKLYPAGATTNSQDGVTDIFGKCLPVLEEMVRQEMPLLVHGEVTDPHVDTFDREKVFIDKILAPLVQKLPQLKIVMEHITTMDAVNFIESCEEGHVAATVTPQHLLLNRNALFQGGLQPHNYCLPVLKRETHRQAIVSAVTNGSRRYFLGTDSAPHDKRNKECSCGCAGIYSAPVALSLYVKVFEEAGALDKLEAFTSFNGPDFYGLPRNTSKIILRKNAWKVPATYKHSSGEIVPMFNGSTLEWLPSDQPKE

SEQ ID NO: 17588 - DNA, 1883 bp, Zea mays subsp. mays
  misc_feature (1)..(1883): Ceres Seq. ID no. 12359147
aaaaaggagctagcactagccaggaaacacacagagagacgaaataagcagcgaggcaatgggcaacctgcttcaccaggaaatacgacgagcacgagcacgagataccaatcaccacggacccgccgcggcggacgtcgatgccggtgtaccggccgccccggccccgcgatgacaaggcgcaggaggtgccgctatactcgggctcggaccgccggccgtcctaccgtccgccgcggcttccggtcttcccgtcgggcccgggatcgacgggccggcggcggccgcccaccggccagacgggcacggtcctggaccggcacacggtggacgtgcggacgctgttccacctggagcggaagctggggagcgggcagttcggcaccacgtacctgtgcacggagcgcgcgacggggaagaagtacgcgtgcaagtcggtgtccaagcgcaagctggtgcggcgcgccgacatcgcggacatgcgccgggagatcaccatcctgcagcacctcagcggccagcccaacgtggcggagttcaagggcgcgttcgaggaccgcgacgacgtgcacgtcgtcatggagctctgctccggcggcgagctcttcgaccgcatcaccgccaaggggagctactccgagcgccaggccgccgccgtgtgccgcgacgtcctcaccgtcgtcaacgtctgccacttcatgggggtcatgcaccgcgacctcaagcccgagaacttcctgctcgccagccccgccgacgacgcgccgctcaaggccatcgacttcggcctgtccgtcttcatcgaagaaggcaaagtttacaaggacgtggtggggagcgcgtactacgtggcgcccgaggtgttgcgccggaactacggcagggagatcgacgtctggagtgctggcgtgatcctatacatccttctatgcgggtcgccgcctttctgggaagaaacgcagaaaggcatatttgacgcaatattggccgacgagctcgatctggtctcctccccgtggccctccatatctgaaagcgcgaaggatctcattagaaaaatgctgaacaaggaccctcagaggcgcattacggcttcacaggccctagaacatccatggctcaaaggtggtgcacctgacaggcctatcgacagcgcggtcctgtcaagaatgaagcagttcaaggcgatgaacaagctaaagcaacttgcactgaaggtaatcgcagagaacctaacagaggacgagatcaaggggctgaagcagatgttcaacaacatggatacagacaggagcggcacgatcacggtcgaggaactcaaggacgggctggcgaagctcgggtccaagattagcgaagcggaggttcagaagcttatggaagcagttgacgtggacaagagtggcagcattgactacaccgagttcctcactgccatgatgaacaggcataaactggagaaggaggaggatttgttccttgcttttcaacacttcgacaaagacgatagcgggtacataacaagagacgaactggaacaagccatggcggagtatggggtgggtgatgaagcaagcattaaggaagtgctggacgaagttgataaagacaaggatgggagaatcgactacgaagagtttgtagaaatgatgaggaagggaagttatacctgaggaagctctgttctcatggtgggagaggttgtgtatatatgtttcagcaaatgtgtcaagtacaagcaacgaagcaagtttaacttagaacaagttgcttctgcagctatggtccgaggcaagcatgtacagctatttatttattgaccgaatatgcaacgagagagaaaatgtccagtttacttgaaagaaaagttcagagttcgtgct

SEQ ID NO: 17589 - protein, 510 aa, Zea mays subsp. mays
  misc_feature (1)..(510): Ceres Seq. ID no. 12359148
MPVYRPPRPRDDKAQEVPLYSGSDRRPSYRPPRLPVFPSGPGSTGRRRPPTGQTGTVLDRHTVDVRTLFHLERKLGSGQFGTTYLCTERATGKKYACKSVSKRKLVRRADIADMRREITILQHLSGQPNVAEFKGAFEDRDDVHVVMELCSGGELFDRITAKGSYSERQAAAVCRDVLTVVNVCHFMGVMHRDLKPENFLLASPADDAPLKAIDFGLSVFIEEGKVYKDVVGSAYYVAPEVLRRNYGREIDVWSAGVILYILLCGSPPFWEETQKGIFDAILADELDLVSSPWPSISESAKDLIRKMLNKDPQRRITASQALEHPWLKGGAPDRPIDSAVLSRMKQFKAMNKLKQLALKVIAENLTEDEIKGLKQMFNNMDTDRSGTITVEELKDGLAKLGSKISEAEVQKLMEAVDVDKSGSIDYTEFLTAMMNRHKLEKEEDLFLAFQHFDKDDSGYITRDELEQAMAEYGVGDEASIKEVLDEVDKDKDGRIDYEEFVEMMRKGSYT

SEQ ID NO: 17590 - protein, 397 aa, Zea mays subsp. mays
  misc_feature (1)..(397): Ceres Seq. ID no. 12359149
MRREITILQHLSGQPNVAEFKGAFEDRDDVHVVMELCSGGELFDRITAKGSYSERQAAAVCRDVLTVVNVCHFMGVMHRDLKPENFLLASPADDAPLKAIDFGLSVFIEEGKVYKDVVGSAYYVAPEVLRRNYGREIDVWSAGVILYILLCGSPPFWEETQKGIFDAILADELDLVSSPWPSISESAKDLIRKMLNKDPQRRITASQALEHPWLKGGAPDRPIDSAVLSRMKQFKAMNKLKQLALKVIAENLTEDEIKGLKQMFNNMDTDRSGTITVEELKDGLAKLGSKISEAEVQKLMEAVDVDKSGSIDYTEFLTAMMNRHKLEKEEDLFLAFQHFDKDDSGYITRDELEQAMAEYGVGDEASIKEVLDEVDKDKDGRIDYEEFVEMMRKGSYT

SEQ ID NO: 17591 - protein, 364 aa, Zea mays subsp. mays
  misc_feature (1)..(364): Ceres Seq. ID no. 12359150
MELCSGGELFDRITAKGSYSERQAAAVCRDVLTVVNVCHFMGVMHRDLKPENFLLASPADDAPLKAIDFGLSVFIEEGKVYKDVVGSAYYVAPEVLRRNYGREIDVWSAGVILYILLCGSPPFWEETQKGIFDAILADELDLVSSPWPSISESAKDLIRKMLNKDPQRRITASQALEHPWLKGGAPDRPIDSAVLSRMKQFKAMNKLKQLALKVIAENLTEDEIKGLKQMFNNMDTDRSGTITVEELKDGLAKLGSKISEAEVQKLMEAVDVDKSGSIDYTEFLTAMMNRHKLEKEEDLFLAFQHFDKDDSGYITRDELEQAMAEYGVGDEASIKEVLDEVDKDKDGRIDYEEFVEMMRKGSYT

SEQ ID NO: 17592 - DNA, 1379 bp, Zea mays subsp. mays
  misc_feature (1)..(1379): Ceres Seq. ID no. 12359162
acaacactcgcctgccctgccctctcatctcgcttcgcttccattccatcgcgccagtcgccagactcaccagggagacagggagagtagggggaaatatcaattagaaacaacgaggaactagcaaagaaagaaggataactcccataagaaaaatcgccaaatacgccattcatcttctccgcccgggtttcagaacgtgcggcagtttagccaggatggtggcgatcgagaaccagaaccagagccaggccgcttcccgaacggccgcgtcgaggagttcatccacgcaaggacattgtcagctgccgaccttcgcgatcctgaaatttcagctctggtggcttccaagctgagggagttccacaaccttgacatgcctggtcccaaatctgtgctcatttgggacagacttaggaactggctcagaactgccaagagcttgtgtccacctgaagaagccaaggaatttcggttggacagtctggagaaccagattactgcattggagaacgagtgttcaggtgattaccagtggattggtttctgtcacaatgatcttcagtatggcaatatcatgattgatgaagagaccaacgtgctgaccatcattgattatgagtatgcaagcttcaacccagttgcatatgacattgctaaccatttctgtgagatggcagcagactatcattcatcaaagcctcatatactggactacagcagatatccagatgttgatgagcagaagcgttttgttaagacctacctgaacatttctggtgaggaacctgatgcggaagttgtggagaacctgctccaaagcattgagaagcacacgctcgccagccatctagtatggggcctctggggaataatttcggatcatgttaacgacattgacttcgactacaaggagtatgcgaggcagagattcgagcagtactggcacaagtctgcgatcttaacatcttgaacatgtgtataaacacccgtacgtggtctcaggaactccctgagggcctgtggctgcacacacgaaattgtgcagtgccactgacacatagataagctgtgaaagaagaaatactgacgacgacgacgaataatcccgttttgggctcgggaggttatttctccgcaactcgatgagcttcaggcttcagcttcaggaaggaaggaaggagctatggggatttggctgcccgcttatgctgtaccaatgcaattaaaagataaagatccggtccggtgttgcgtgtgctatgtttagttttggctagcaccgccgagagccgtggtcctgttgtggtgtttctagtttctgtatgcttgatgttgttagtgtgctggataatttggttttgtgcttggggagtcct

SEQ ID NO: 17593 - protein, 198 aa, Zea mays subsp. mays
  misc_feature (1)..(198): Ceres Seq. ID no. 12359163
MPGPKSVLIWDRLRNWLRTAKSLCPPEEAKEFRLDSLENQITALENECSGDYQWIGFCHNDLQYGNIMIDEETNVLTIIDYEYASFNPVAYDIANHFCEMAADYHSSKPHILDYSRYPDVDEQKRFVKTYLNISGEEPDAEVVENLLQSIEKHTLASHLVWGLWGIISDHVNDIDFDYKEYARQRFEQYWHKSAILTS

SEQ ID NO: 17594 - protein, 131 aa, Zea mays subsp. mays
  misc_feature (1)..(131): Ceres Seq. ID no. 12359164
MIDEETNVLTIIDYEYASFNPVAYDIANHFCEMAADYHSSKPHILDYSRYPDVDEQKRFVKTYLNISGEEPDAEVVENLLQSIEKHTLASHLVWGLWGIISDHVNDIDFDYKEYARQRFEQYWHKSAILTS

SEQ ID NO: 17595 - protein, 99 aa, Zea mays subsp. mays
  misc_feature (1)..(99): Ceres Seq. ID no. 12359165
MAADYHSSKPHILDYSRYPDVDEQKRFVKTYLNISGEEPDAEVVENLLQSIEKHTLASHLVWGLWGIISDHVNDIDFDYKEYARQRFEQYWHKSAILTS

SEQ ID NO: 17596 - DNA, 1137 bp, Zea mays subsp. mays
  misc_feature (1)..(1137): Ceres Seq. ID no. 12359166
accgcactccagcgttcagcattagacacgagagctcctagtagccagaccactagtcccgcgaccctgtcgagagaaacagacagagcaacatggcgcctgcattgtcattcccgatcatcgacatggggctgctcgccggggaggagaggccggcggcgatggagcggctgcaagatgcgtgcgagaactggggcttcttcgagattctgaaccacggcatctcgacggagctgatggacgaggtagagaagctgaccaaggagcactacaagcgggtgcgcgagcagaggttcctcgagttcgctagcaagacgctcggggacggccgcgtcaagatcccgatccagaaggacggcgagatccccatcccttacaagcccgacgtcgacgtggagaagatcaagttccaccacttctccttcgaggagaccaccgccacgctccacctcaagctcgagaacaagaacgacttcgacctcggcctcaacctgctcgagtacgagatgtggctcggcgacgacagcatcgcctccgccgagctcacgcagaccgccaagatcgagaagcaggggatcaccaggatgcaggtgccctttagcttcaggcccaaggacttcggatccgctgtctgggacatgatcagggggaggggcacgggatacaccatcaagggaaagatcgatgtcgacactcccttcggcaacatgaagctgcccataagcaaagagggtggaaccacccacctcaagaaggaggacgacgatgatgacgatgatgacaactgaaatgaggactgctggggggcgctgctgttacctttcacgaaacgcagtgaagcagaggatgcgggatcgtcgtcgtttgatctgatacccatacccttagcgctggttaatctcttgcctttagcttatggtgctctgttgttttgcattgtctgaacatcctctcacttcctgagtgtacgttcagtttgaggtttcctgtgttgtccgtctgaattccttcaaactttgcggttggaactggatgaagaataaaattccaacccgtcctggttcttttgtgggtctgtttggaatagatgctgcctgccaatggtcctgaaataagatttagtgaaaggctttattc

SEQ ID NO: 17597 - protein, 231 aa, Zea mays subsp. mays
  misc_feature (1)..(231): Ceres Seq. ID no. 12359167
MAPALSFPIIDMGLLAGEERPAAMERLQDACENWGFFEILNHGISTELMDEVEKLTKEHYKRVREQRFLEFASKTLGDGRVKIPIQKDGEIPIPYKPDVDVEKIKFHHFSFEETTATLHLKLENKNDFDLGLNLLEYEMWLGDDSIASAELTQTAKIEKQGITRMQVPFSFRPKDFGSAVWDMIRGRGTGYTIKGKIDVDTPFGNMKLPISKEGGTTHLKKEDDDDDDDDN

SEQ ID NO: 17598 - protein, 220 aa, Zea mays subsp. mays
  misc_feature (1)..(220): Ceres Seq. ID no. 12359168
MGLLAGEERPAAMERLQDACENWGFFEILNHGISTELMDEVEKLTKEHYKRVREQRFLEFASKTLGDGRVKIPIQKDGEIPIPYKPDVDVEKIKFHHFSFEETTATLHLKLENKNDFDLGLNLLEYEMWLGDDSIASAELTQTAKIEKQGITRMQVPFSFRPKDFGSAVWDMIRGRGTGYTIKGKIDVDTPFGNMKLPISKEGGTTHLKKEDDDDDDDDN

SEQ ID NO: 17599 - protein, 208 aa, Zea mays subsp. mays
  misc_feature (1)..(208): Ceres Seq. ID no. 12359169
MERLQDACENWGFFEILNHGISTELMDEVEKLTKEHYKRVREQRFLEFASKTLGDGRVKIPIQKDGEIPIPYKPDVDVEKIKFHHFSFEETTATLHLKLENKNDFDLGLNLLEYEMWLGDDSIASAELTQTAKIEKQGITRMQVPFSFRPKDFGSAVWDMIRGRGTGYTIKGKIDVDTPFGNMKLPISKEGGTTHLKKEDDDDDDDDN

SEQ ID NO: 17600 - DNA, 1175 bp, Zea mays subsp. mays
  misc_feature (1)..(1175): Ceres Seq. ID no. 12359182
ctattgatttgtgctttactccatttatcatcatttagttttgcatacatgttgagactgtgcacttgtcaaactacatgattgatattaataaagcttgggcggctaaactatgcctggatgttgggtgggggcagggatgcattttctgggggttgttattatttgtttgaaatctgattcaggtcccacattcaaccgggccttatgtgattagttgtaagctgacatgaagatgatgcttttgtaggttcatcctcccagcttcgttaattgctatcaatgatgttgctgcatatttctttgggttcttctttgggaaaacaccactgatcaagctctctccaaagaaaacatgggaaggctttataggtgcatcagtgacaacattgctttctgcatttgtggttgctaatttcatgggccatttccagtggttaacatgcccaagaaaggatctatcaactggatggctttattgtgacccaggtcccatgtttacaccagaaggttatgatctaccgggatggataccacaatggtttccatggcgagaaattgcaattatgcccgttcaatggcatgcattagctcttggcttgtttgcttcaataatagcaccatttggtggcttttttgcaagtggattcaagagggcattcaaatttaaggattttggggacagcatacctggtcatggtggatttacagataggatggactgccaaatggtcatggctgtttttgcgtacatctattaccaatcatttgtaatggtacaggacttatctgttgagacaatcctggagcagatactacgtaatctcacctttgaggagcagcgtgagctatatggacagctaggcaagttacttgtgagagcgaactgaagctaacagtggccgtggaagcacctaatccaaaaggataatgcgcaatgctttttcaggccttgcttttttgttaatcttcttgtacagccctagcacccctaaggatgaaacgaagaaccacaacgctgacagggatcgcatcgctgtatgacgttttggagcatacagctcctcccgtctttttcagagatttgtgtcacctttttgatttgcttctggtgctacgcttgttgccgcatcaaaaccagctaacgctgttttgtcgtgtcaatggtttatttg

SEQ ID NO: 17601 - protein, 156 aa, Zea mays subsp. mays
  misc_feature (1)..(156): Ceres Seq. ID no. 12359183
MGHFQWLTCPRKDLSTGWLYCDPGPMFTPEGYDLPGWIPQWFPWREIAIMPVQWHALALGLFASIIAPFGGFFASGFKRAFKFKDFGDSIPGHGGFTDRMDCQMVMAVFAYIYYQSFVMVQDLSVETILEQILRNLTFEEQRELYGQLGKLLVRAN

SEQ ID NO: 17602 - protein, 131 aa, Zea mays subsp. mays
  misc_feature (1)..(131): Ceres Seq. ID no. 12359184
MFTPEGYDLPGWIPQWFPWREIAIMPVQWHALALGLFASIIAPFGGFFASGFKRAFKFKDFGDSIPGHGGFTDRMDCQMVMAVFAYIYYQSFVMVQDLSVETILEQILRNLTFEEQRELYGQLGKLLVRAN

SEQ ID NO: 17603 - protein, 107 aa, Zea mays subsp. mays
  misc_feature (1)..(107): Ceres Seq. ID no. 12359185
MPVQWHALALGLFASIIAPFGGFFASGFKRAFKFKDFGDSIPGHGGFTDRMDCQMVMAVFAYIYYQSFVMVQDLSVETILEQILRNLTFEEQRELYGQLGKLLVRAN

SEQ ID NO: 17604 - DNA, 897 bp, Zea mays subsp. mays
  misc_feature (1)..(897): Ceres Seq. ID no. 12359231
ataaacccaaacctcctcgtcctctgtcagactaccactctctccctcgcggactcgcggttgattcctcgcggcggattcgcatcttccgcgtcagggacagggagagtactccgtcggacggttggaggagaacagggagaggagctctgagatggagacggccgcctcggcagcgcgcctggtgaactacccgctcgtcgcggcgcttctcgcgttcgccgtcgcgcagtcctccaagttcttcaccacctggttcaaagatggccggtgggatgccagacagtttatagcttctggagggatgccatcatcccactcagctacagtgacagcactcgcagtggctgtggcgatacaagaaggctttcatagtgcaacctttgcaactgcactagtctttgcatgcgtggttatgcatgatgcttttggagttcggttacatgccggaaagcaggcagaggtgctgaatcaaattgtctatgagctaccagaagaacacccattatcagagacaaagccattgcgtgaaatccttggacatactgttcctcaggttgtggccggttgcatccttggagttctcatggctgccgttatgcacctgtctctcgggagttcttagtcaactgttgttcatggatgtcatgacagatgatcacctaatgtctcgctggtgatggctataaagcatgaagcatgatctccgcatggatctggttgtccaagtgtttggtagtacgaagttctaaccgatttagttctggacagtaggatataggttgtgtagcttgaatcggttactgtaaatctgaaaggttttgctttcaactccaactaccaatcacggtgtaatggaagctttgttatacaatcaacagcagtaaattcattctg

SEQ ID NO: 17605 - protein, 156 aa, Zea mays subsp. mays
  misc_feature (1)..(156): Ceres Seq. ID no. 12359232
METAASAARLVNYPLVAALLAFAVAQSSKFFTTWFKDGRWDARQFIASGGMPSSHSATVTALAVAVAIQEGFHSATFATALVFACVVMHDAFGVRLHAGKQAEVLNQIVYELPEEHPLSETKPLREILGHTVPQVVAGCILGVLMAAVMHLSLGSS

SEQ ID NO: 17606 - protein, 106 aa, Zea mays subsp. mays
  misc_feature (1)..(106): Ceres Seq. ID no. 12359233
MPSSHSATVTALAVAVAIQEGFHSATFATALVFACVVMHDAFGVRLHAGKQAEVLNQIVYELPEEHPLSETKPLREILGHTVPQVVAGCILGVLMAAVMHLSLGSS

SEQ ID NO: 17607 - DNA, 693 bp, Zea mays subsp. mays
  misc_feature (1)..(693): Ceres Seq. ID no. 12359278
agcaaacaagagctaagctactagagacatggccgacaaccttatcaagcccgtggctttgctgctgctgctcctgaacctgtgcatgtacgtcatcctggccatcatcggcggctgggctctgaacgtggccatcgaccgcggcttcatcatcggcccggagctgcggcttcccgcgcatttccaccctatcttcttccccatcggcaacttcgccaccggcttcttcgtcctcttctccctcatagcgggcgtcgtcgggatcgcctccgccatggtgggcttcaaccacctccgcttctggaactacgaaagccagcagcccgcggcggcgttggggattgtggcgtgggcgctcacagtcctagccatgggcctagcttgtcaggaaatctctttcgaccgaagaaacgccaagctgggcaccatggagaccttcaccatcatcctaacagtgacgcagttcttctacgtgctcgcgatacgcgggggaaggcacggacccgtccacgtggagcgccgcggcaactttgcatgaaagaccaccgacaaatattcattcatttgtgcacgtaccgtccatggagaccttcactattaattcgtttgctggattcgttaattatttcattattgtttgacagtttcatatggatggaatggaatggactccaagattattggtttgattcc

SEQ ID NO: 17608 - protein, 169 aa, Zea mays subsp. mays
  misc_feature (1)..(169): Ceres Seq. ID no. 12359279
MADNLIKPVALLLLLLNLCMYVILAIIGGWALNVAIDRGFIIGPELRLPAHFHPIFFPIGNFATGFFVLFSLIAGVVGIASAMVGFNHLRFWNYESQQPAAALGIVAWALTVLAMGLACQEISFDRRNAKLGTMETFTIILTVTQFFYVLAIRGGRHGPVHVERRGNFA

SEQ ID NO: 17609 - protein, 150 aa, Zea mays subsp. mays
  misc_feature (1)..(150): Ceres Seq. ID no. 12359280
MYVILAIIGGWALNVAIDRGFIIGPELRLPAHFHPIFFPIGNFATGFFVLFSLIAGVVGIASAMVGFNHLRFWNYESQQPAAALGIVAWALTVLAMGLACQEISFDRRNAKLGTMETFTIILTVTQFFYVLAIRGGRHGPVHVERRGNFA

SEQ ID NO: 17610 - protein, 87 aa, Zea mays subsp. mays
  misc_feature (1)..(87): Ceres Seq. ID no. 12359281
MVGFNHLRFWNYESQQPAAALGIVAWALTVLAMGLACQEISFDRRNAKLGTMETFTIILTVTQFFYVLAIRGGRHGPVHVERRGNFA

SEQ ID NO: 17611 - DNA, 938 bp, Zea mays subsp. mays
  misc_feature (1)..(938): Ceres Seq. ID no. 12359282
acacttcactcacccatccaccgcaaacgccaaacggccggcacacaactacacaagccgctggcaaagatggcctcctccttggtcctcatcgcagcggccctgcttgcgctggcctcgtcgtggcagcaggccatcgcctacgatcctagccccctccaggacttctgtgtcgcagacaagaactcgcctgttcgcgtcaacgggttcccttgcaaggacccgatggcggtcaccccggacgacttcttcaacgcggcgatgatcatcgacaagcggagggacacgaacaacaaggtggggtccaacgtcaccaacgtgaacgtggagagcttcccggggctgaacacgctgggcatctcgctggcgcgcatcgactacgcgccgctcggggtgaacccgccgcacatccacccacgcgctaccgagctgctcaccgtgctcgagggcaccctctacctcggcttcgtcacgtccaaccccaaccgcctcttctccaaggtggtcaagaagggcgacgtcttcgtcttccccaaggccatgatccacttccagatgaacctggaccacgacaagcccgccgcggcgctctcgtcgctcagcagccagaaccctggcgtcatcaccatcgccagcgccgtcttcggctccaagccgcccatctcggacgacgtcttggccaaggcgttccaggtggagaagaaactcatcgactggctccagtctcagttctgggataccaactactagctgcctagctagctagtaatatacttgcttgcttatttgttgcatatacatgcaccaccaacacaagccttatattaattacgtacgtacatctatgtataatatcgaataaatggccggtatgcatttggaggagtgaaacttattactgtgcgtgattaataatatttaatgtaaacttttcattg

SEQ ID NO: 17612 - protein, 249 aa, Zea mays subsp. mays
  misc_feature (1)..(249): Ceres Seq. ID no. 12359283
TLHSPIHRKRQTAGTQLHKPLAKMASSLVLIAAALLALASSWQQAIAYDPSPLQDFCVADKNSPVRVNGFPCKDPMAVTPDDFFNAAMIIDKRRDTNNKVGSNVTNVNVESFPGLNTLGISLARIDYAPLGVNPPHIHPRATELLTVLEGTLYLGFVTSNPNRLFSKVVKKGDVFVFPKAMIHFQMNLDHDKPAAALSSLSSQNPGVITIASAVFGSKPPISDDVLAKAFQVEKKLIDWLQSQFWDTNY

SEQ ID NO: 17613 - protein, 226 aa, Zea mays subsp. mays
  misc_feature (1)..(226): Ceres Seq. ID no. 12359284
MASSLVLIAAALLALASSWQQAIAYDPSPLQDFCVADKNSPVRVNGFPCKDPMAVTPDDFFNAAMIIDKRRDTNNKVGSNVTNVNVESFPGLNTLGISLARIDYAPLGVNPPHIHPRATELLTVLEGTLYLGFVTSNPNRLFSKVVKKGDVFVFPKAMIHFQMNLDHDKPAAALSSLSSQNPGVITIASAVFGSKPPISDDVLAKAFQVEKKLIDWLQSQFWDTNY

SEQ ID NO: 17614 - protein, 174 aa, Zea mays subsp. mays
  misc_feature (1)..(174): Ceres Seq. ID no. 12359285
MAVTPDDFFNAAMIIDKRRDTNNKVGSNVTNVNVESFPGLNTLGISLARIDYAPLGVNPPHIHPRATELLTVLEGTLYLGFVTSNPNRLFSKVVKKGDVFVFPKAMIHFQMNLDHDKPAAALSSLSSQNPGVITIASAVFGSKPPISDDVLAKAFQVEKKLIDWLQSQFWDTNY

SEQ ID NO: 17615 - DNA, 1051 bp, Zea mays subsp. mays
  misc_feature (1)..(1051): Ceres Seq. ID no. 12359310
acacacacacgactagcaggcacagcagcaccgactagtcaatctctacttgcctacacagcagaaggaaccagacagggaagtagggaaccagagaaagcatagcaatggtgcggaagccgatccacgctgacgacgccggcgctaagagcacggaggcgagcaaggagaggaaggggttgtggtcgccggaggaggacgagcggctcttcacccacatcacctaccacgtcgtctccacctggagctccgtcgcgcagctagcaggcctgcggaggagcggcaagagctgccggctgcggtggctgaactacctgcgcccggacctcaagaaggagcccatctccaagcgcgaggaggagaccatcatctccctgcagcagtcgctcggcaaccggtggtcgactatcgcggcgaggatgccaggcaggacggacaacgagatcaagaactactggaactcccgcatcaggaagcgcctcaacgccgccgcctccagagctgcaggctgcggcgacggcggtgacagcgcggccgagccatcgggggccgcggccgcgggaggaaaggaggattcggccaacgctgcgccgccgccagcggcccagcctacgcccatcccggcgcggttcccggtcttcgggtgccagctgcccgacggagccggcggcggcatttcgtctcccggcagcggcaagagtccacagtcgtcgactactgcgagtatgcggcagaacgcgggtgacgagagcgatgcgagcgacggtggcggtggcgacagcgacatggtccatttcctctcgttcgatgatctggattatcccggggatttgctcattgatgtgccgggcgccatggacgcgtgggagagccaactgtgctatgcgaatccgatgatgagctcgctctgttgatccacactaccaattgcatatagcacagccattgtcttgttcccgctaatcatatataggttgtatgaattgtttatgtgaaatttcactgggttttttggagaaggaatgcatgatgacgtgtgggtattcctatt

SEQ ID NO: 17616 - protein, 268 aa, Zea mays subsp. mays
  misc_feature (1)..(268): Ceres Seq. ID no. 12359311
MVRKPIHADDAGAKSTEASKERKGLWSPEEDERLFTHITYHVVSTWSSVAQLAGLRRSGKSCRLRWLNYLRPDLKKEPISKREEETIISLQQSLGNRWSTIAARMPGRTDNEIKNYWNSRIRKRLNAAASRAAGCGDGGDSAAEPSGAAAAGGKEDSANAAPPPAAQPTPIPARFPVFGCQLPDGAGGGISSPGSGKSPQSSTTASMRQNAGDESDASDGGGGDSDMVHFLSFDDLDYPGDLLIDVPGAMDAWESQLCYANPMMSSLC

SEQ ID NO: 17617 - protein, 164 aa, Zea mays subsp. mays
  misc_feature (1)..(164): Ceres Seq. ID no. 12359312
MPGRTDNEIKNYWNSRIRKRLNAAASRAAGCGDGGDSAAEPSGAAAAGGKEDSANAAPPPAAQPTPIPARFPVFGCQLPDGAGGGISSPGSGKSPQSSTTASMRQNAGDESDASDGGGGDSDMVHFLSFDDLDYPGDLLIDVPGAMDAWESQLCYANPMMSSLC

SEQ ID NO: 17618 - DNA, 1182 bp, Zea mays subsp. mays
  misc_feature (1)..(1182): Ceres Seq. ID no. 12359313
acggactggggaccgtctctctcctgtcgagctcccacgtactcgtgcacacaacacagctgctgctcaaagagccacatgcctagtagactagtcttagtagctagcttagagagagggaggggagaggatcagaggaggcgaggggaaggaaggagaggagaagaagcaaccaaccaagaacaagagaaggtaagaaggcgttagctaggctaccggagaggaggagagccggcgcaccatggatcaacagcagcaccaggagcggccgtgggaggtgtaccgggagtgcatgcgcaaccacgcggcgaagctcgggacatacgcctccgacggatgctgcgagtacacccccgacgacggccagcccgcagcgatgctctgcgccgcctgcggctgccaccgcaacttccaccggaaggcgttcctcgccgacgctgcggcgggagcgcacggcggcgcgcacggggcaatgctgccctctcccggcgcgtccccgggctacggcatgcaccacatggcgattgctgcggccggcatgggcggtgacgccggcgcgcacggctcctgctccgggtccgggggcaggcgccggacgcggaccaagttcacggacgagcagaaggagcgcatggcgcggttggcggagcggctcggctggcggatgcccaagcgggagcccggccgcgcgctgggggacgacgaggtgggccgcttctgccgggagatcggggtcaccaggcaggtcttcaaggtatggatgcacaaccacaagtccggtggtggcggcagccagggcgagggcgccagcgctggcgctgccggagccgctcagacgacgtcgtcgtccacgacgcgtggcggcggcggcggcggcgttgttggaggaggcgggagcatgtccacggcgatgatgggcgccgacgtcgaggacgacgaggaggtgaggggcagcgagatgtgcatgtaggctgtagccgcgccccgcgttacgtacgtggcatgcgcggcggcaatggcacggcacggcattgcctcgcccttggctgcgatcgaggattaacatctccttttgctgctaattcctttgggtccttttgcttcgatgtgttgatgattgattgtttatgatgagatattcattgttatcacggctatgctaattaatgctgtgtcagtgtc

SEQ ID NO: 17619 - protein, 242 aa, Zea mays subsp. mays
  misc_feature (1)..(242): Ceres Seq. ID no. 12359314
MDQQQHQERPWEVYRECMRNHAAKLGTYASDGCCEYTPDDGQPAAMLCAACGCHRNFHRKAFLADAAAGAHGGAHGAMLPSPGASPGYGMHHMAIAAAGMGGDAGAHGSCSGSGGRRRTRTKFTDEQKERMARLAERLGWRMPKREPGRALGDDEVGRFCREIGVTRQVFKVWMHNHKSGGGGSQGEGASAGAAGAAQTTSSSTTRGGGGGGVVGGGGSMSTAMMGADVEDDEEVRGSEMCM

SEQ ID NO: 17620 - protein, 225 aa, Zea mays subsp. mays
  misc_feature (1)..(225): Ceres Seq. ID no. 12359315
MRNHAAKLGTYASDGCCEYTPDDGQPAAMLCAACGCHRNFHRKAFLADAAAGAHGGAHGAMLPSPGASPGYGMHHMAIAAAGMGGDAGAHGSCSGSGGRRRTRTKFTDEQKERMARLAERLGWRMPKREPGRALGDDEVGRFCREIGVTRQVFKVWMHNHKSGGGGSQGEGASAGAAGAAQTTSSSTTRGGGGGGVVGGGGSMSTAMMGADVEDDEEVRGSEMCM

SEQ ID NO: 17621 - protein, 197 aa, Zea mays subsp. mays
  misc_feature (1)..(197): Ceres Seq. ID no. 12359316
MLCAACGCHRNFHRKAFLADAAAGAHGGAHGAMLPSPGASPGYGMHHMAIAAAGMGGDAGAHGSCSGSGGRRRTRTKFTDEQKERMARLAERLGWRMPKREPGRALGDDEVGRFCREIGVTRQVFKVWMHNHKSGGGGSQGEGASAGAAGAAQTTSSSTTRGGGGGGVVGGGGSMSTAMMGADVEDDEEVRGSEMCM

SEQ ID NO: 17622 - DNA, 920 bp, Zea mays subsp. mays
  misc_feature (1)..(920): Ceres Seq. ID no. 12359483
gtttttcccctcctcttcctttcccccccacccccactactctctctcgccccaaaaccagatcgccacgaccaagggcagagggccccggaggggcgcgtagcaatggcggcaggctaccgggccgaggacgattacgattacctcttcaaggtggtcctgatcggcgactccggcgtcggcaagtccaacttgctctcacgcttcacgcgcaacgagttcagcctcgagtccaagtccacaatcggcgtcgagttcgccacccgctctctccaggtcgacggcaaggtcgtcaaggcccagatttgggacaccgccggccaggaacgataccgtgcaatcactagtgcgtattaccgaggcgctgttggggcgttgcttgtatatgacgtcactcgccactcaacctttgagaacgttgagcgttggctgaaggagctgagagaccacacagaccccaatatagttgttatgctggttggcaacaaatctgatctccgccatcttgtagcagttcaaaccgacgaaggaaaagcattcgcagagagggaatcgttgtacttcatggagacctctgcgcttgagtcgaccaacgttgagaatgcatttgcagaagtcctagctcagatctaccgtattgtgagcaagagagcagttgaagcaggtgaagatgcagcatctgggcctggcaggggcgagaagataaacattaaggatgacgtctcggcagtgaagaagggtggctgctgctctagctgagctgccgtgctgtaattttttttggggagttgtgggatgtagcttatgttatggcattttcagcgactggaaattggtagtggcatttagcagcctctattacctagagaggttattgtcaaactgaaaaaaaaaactgaaggttagatcagtttagagct

SEQ ID NO: 17623 - protein, 252 aa, Zea mays subsp. mays
  misc_feature (1)..(252): Ceres Seq. ID no. 12359484
VFPLLFLSPPPPLLSLAPKPDRHDQGQRAPEGRVAMAAGYRAEDDYDYLFKVVLIGDSGVGKSNLLSRFTRNEFSLESKSTIGVEFATRSLQVDGKVVKAQIWDTAGQERYRAITSAYYRGAVGALLVYDVTRHSTFENVERWLKELRDHTDPNIVVMLVGNKSDLRHLVAVQTDEGKAFAERESLYFMETSALESTNVENAFAEVLAQIYRIVSKRAVEAGEDAASGPGRGEKINIKDDVSAVKKGGCCSS

SEQ ID NO: 17624 - protein, 217 aa, Zea mays subsp. mays
  misc_feature (1)..(217): Ceres Seq. ID no. 12359485
MAAGYRAEDDYDYLFKVVLIGDSGVGKSNLLSRFTRNEFSLESKSTIGVEFATRSLQVDGKVVKAQIWDTAGQERYRAITSAYYRGAVGALLVYDVTRHSTFENVERWLKELRDHTDPNIVVMLVGNKSDLRHLVAVQTDEGKAFAERESLYFMETSALESTNVENAFAEVLAQIYRIVSKRAVEAGEDAASGPGRGEKINIKDDVSAVKKGGCCSS

SEQ ID NO: 17625 - DNA, 1094 bp, Zea mays subsp. mays
  misc_feature (1)..(1094): Ceres Seq. ID no. 12359506
agcaacctcccttcctttccctcccccacccctcctgctgcagtctctcctcctcagcggacccggtcctggatggccgccttcttcgctgctgctccgccgccggcggcgggtgctctcgcgtcgttccaccacgaggagcagcagcgtcaggacgccgccgaggagctgtaccacgtggacgacgacgtcggcggccagcaggggaagctgtgcgccaggggccactggcgccccgccgaggacgccaagctcaaggagctcgtcgcgcagtacgggccccagaactggaacctcatcgccgagaggctggacggcagatcagggaagagctgccgcctgcggtggttcaaccagctagacccgcggatcaaccgccgggccttctccggcgaggaggaggagcggctgctggcggcgcaccgcgcgtacggcaacaagtgggcgctcatcgcgcgcctcttccccggccgcaccgacaacgccgtcaagaaccactggcacgtcctcatggcgcgcaagcagcgggagcacaccggcgcgctccgccggcgcaagccctcgtcctcgccctcgccggacccggcgccgccgccgccgcaattggcgcccgtcgtcgtcctcctccaccaccaccagcagcaccacgccggctcgcctccgcgcgccgccgctcacgcgcagttacacggcagcggacacccgcgcgcacagcggcggcgagtccgacgagaccgcgtccacctgcaccaccgacctgtccctcggctccgccgccccccctgcttctaccagagtggctacgacgcggccccgcgcgccgcggccttcgcgccgagcgcgcgctccgccttctccgcgccgccggcgtcggcgcgccatggcgagccacgctccgacgacaaggtgtcgccgcccttcttcgacttcctcggcgtcggcgcggcatgatcggggagggggcccccgcggcggtgtacaggaggcgggccgaaagacgcgtagtttagctttagggtccagttaatgatcaagaacatggcctgagagaggagaaagaatggtgatgaactggtgtcgtggcactgcagagt

SEQ ID NO: 17626 - protein, 335 aa, Zea mays subsp. mays
  misc_feature (1)..(335): Ceres Seq. ID no. 12359507
QPPFLSLPHPSCCSLSSSADPVLDGRLLRCCSAAGGGCSRVVPPRGAAASGRRRGAVPRGRRRRRPAGEAVRQGPLAPRRGRQAQGARRAVRAPELEPHRREAGRQIREELPPAVVQPARPADQPPGLLRRGGGAAAGGAPRVRQQVGAHRAPLPRPHRQRRQEPLARPHGAQAAGAHRRAPPAQALVLALAGPGAAAAAIGARRRPPPPPPAAPRRLASARRRSRAVTRQRTPARTAAASPTRPRPPAPPTCPSAPPPPLLLPEWLRRGPARRGLRAERALRLLRAAGVGAPWRATLRRQGVAALLRLPRRRRGMIGEGAPAAVYRRRAERRVV

SEQ ID NO: 17627 - protein, 316 aa, Zea mays subsp. mays
  misc_feature (1)..(316): Ceres Seq. ID no. 12359508
SNLPSFPSPTPPAAVSPPQRTRSWMAAFFAAAPPPAAGALASFHHEEQQRQDAAEELYHVDDDVGGQQGKLCARGHWRPAEDAKLKELVAQYGPQNWNLIAERLDGRSGKSCRLRWFNQLDPRINRRAFSGEEEERLLAAHRAYGNKWALIARLFPGRTDNAVKNHWHVLMARKQREHTGALRRRKPSSSPSPDPAPPPPQLAPVVVLLHHHQQHHAGSPPRAAAHAQLHGSGHPRAQRRRVRRDRVHLHHRPVPRLRRPPCFYQSGYDAAPRAAAFAPSARSAFSAPPASARHGEPRSDDKVSPPFFDFLGVGAA

SEQ ID NO: 17628 - protein, 292 aa, Zea mays subsp. mays
  misc_feature (1)..(292): Ceres Seq. ID no. 12359509
MAAFFAAAPPPAAGALASFHHEEQQRQDAAEELYHVDDDVGGQQGKLCARGHWRPAEDAKLKELVAQYGPQNWNLIAERLDGRSGKSCRLRWFNQLDPRINRRAFSGEEEERLLAAHRAYGNKWALIARLFPGRTDNAVKNHWHVLMARKQREHTGALRRRKPSSSPSPDPAPPPPQLAPVVVLLHHHQQHHAGSPPRAAAHAQLHGSGHPRAQRRRVRRDRVHLHHRPVPRLRRPPCFYQSGYDAAPRAAAFAPSARSAFSAPPASARHGEPRSDDKVSPPFFDFLGVGAA

SEQ ID NO: 17629 - DNA, 1400 bp, Zea mays subsp. mays
  misc_feature (1)..(1400): Ceres Seq. ID no. 12359514
gtagccttccaaccaaaccaacccacgccatcatcttccgtcaatccatccatccgcttgtccctaccacctccaccaaccaaaacccccaaccgccgaggtcaccggcgactccgtcctcgccgcgccgcgccgcgccgtgaggatgtcgttccactaccacgaccacgggctgtccatggacgccgcggcgncggcggccgccgccgccgcgtcgtcgccgaaccctagcggcttctcccccggcatcggcggggagagggagaaggcggccatcgcggcgcacccgctgtacgagcgcctcctggaggcgcacgtcgcctgcctacgcgtcgccacccccgtcgaccagctcccccgcatcgacgcgcagatcgccgcgcgccccccgccgctcgccgcggccnnnnggnncgcggcngccggggccgcggccgcgggaggcccgtccggcggggaggagctcgacctcttcatgacgcactatgtattgctcctttgctcattcaaggaacagctgcagcagcatgtacgtgttcatgcaatggaagcagtgatgggttgctgggagcttgaacaatccttacaaagcctaacaggggcatctccgggtgaaggcactggaggaaccatgtctgacgatgaagataaccaggtggatagtgaagccaacatgttcgatggaaatgatggatcagacggtatgggctttggccccctgatactaacagagggtgaacggtccttagttgagcgtgtacggaaggagctgaagaacgagcttaagcagggttacaaggaaaagcttgtcgatatcagggaagagatcatgcgcaaacgcagggctgggaagcttcctggagataccgcatctgtactgaaagcttggtggcaagctcattccaagtggccgtacccaactgaagacgacaaggccagactggtgcaggaaacggggttgcagctaaagcaaatcaacaactggttcattaaccaacgcaagcggaactggcacagcaacccaacatcctcggctgaaaagaccaagaagaaaaggtgatgatggcccagagcaatcttggcaaaaagctagagatgtccactatactttattatggcgaagtacattctccctcacttcgtaggcaagagggaaaggtatcttgggtgacttgagtggccacctaatgcgcaagtttgacgacgtggtggggctggagttggtagtgacctcagcagtatagcattcgctaacgtgatgtgggtgaatcacgtgttgcagtagaaccggcgagcgggaggggggtaatttatgttgtattgtaattgtgttttttattaccttgtaatgatattttagggagaatcccaagattcatattcgcatgttttgtcgtccg

SEQ ID NO: 17630 - protein, 304 aa, Zea mays subsp. mays
  misc_feature (1)..(304): Ceres Seq. ID no. 12359515
  misc_feature (17)..(17): Xaa is any aa, unknown or other
  misc_feature (88)..(88): Xaa is any aa, unknown or other
  misc_feature (89)..(89): Xaa is any aa, unknown or other
  misc_feature (90)..(90): Xaa is any aa, unknown or other
  misc_feature (92)..(92): Xaa is any aa, unknown or other
MSFHYHDHGLSMDAAAXAAAAAASSPNPSGFSPGIGGEREKAAIAAHPLYERLLEAHVACLRVATPVDQLPRIDAQIAARPPPLAAAXXXAXAGAAAAGGPSGGEELDLFMTHYVLLLCSFKEQLQQHVRVHAMEAVMGCWELEQSLQSLTGASPGEGTGGTMSDDEDNQVDSEANMFDGNDGSDGMGFGPLILTEGERSLVERVRKELKNELKQGYKEKLVDIREEIMRKRRAGKLPGDTASVLKAWWQAHSKWPYPTEDDKARLVQETGLQLKQINNWFINQRKRNWHSNPTSSAEKTKKKR

SEQ ID NO: 17631 - protein, 293 aa, Zea mays subsp. mays
  misc_feature (1)..(293): Ceres Seq. ID no. 12359516
  misc_feature (6)..(6): Xaa is any aa, unknown or other
  misc_feature (77)..(77): Xaa is any aa, unknown or other
  misc_feature (78)..(78): Xaa is any aa, unknown or other
  misc_feature (79)..(79): Xaa is any aa, unknown or other
  misc_feature (81)..(81): Xaa is any aa, unknown or other
MDAAAXAAAAAASSPNPSGFSPGIGGEREKAAIAAHPLYERLLEAHVACLRVATPVDQLPRIDAQIAARPPPLAAAXXXAXAGAAAAGGPSGGEELDLFMTHYVLLLCSFKEQLQQHVRVHAMEAVMGCWELEQSLQSLTGASPGEGTGGTMSDDEDNQVDSEANMFDGNDGSDGMGFGPLILTEGERSLVERVRKELKNELKQGYKEKLVDIREEIMRKRRAGKLPGDTASVLKAWWQAHSKWPYPTEDDKARLVQETGLQLKQINNWFINQRKRNWHSNPTSSAEKTKKKR

SEQ ID NO: 17632 - protein, 194 aa, Zea mays subsp. mays
  misc_feature (1)..(194): Ceres Seq. ID no. 12359517
MTHYVLLLCSFKEQLQQHVRVHAMEAVMGCWELEQSLQSLTGASPGEGTGGTMSDDEDNQVDSEANMFDGNDGSDGMGFGPLILTEGERSLVERVRKELKNELKQGYKEKLVDIREEIMRKRRAGKLPGDTASVLKAWWQAHSKWPYPTEDDKARLVQETGLQLKQINNWFINQRKRNWHSNPTSSAEKTKKKR

SEQ ID NO: 17633 - DNA, 1326 bp, Zea mays subsp. mays
  misc_feature (1)..(1326): Ceres Seq. ID no. 12359521
gtcagtccctcccaacctccattccttcctcctttgccaatgcagctctgatctctcctacctgagaatgtcagtgtgagtggccattccatctgcacaacatcctcctccacgcacgcacgcaaaacatacaaaaaggcagaagcggaggagatgaaggcaatggccgggccaaagctgctcgtcgtccacgcgtcgtcgaacaaggccctgaacgggatggcgcccacgtcgccgccgtcgcccggctggtcccggtgcctgtggctggtggtgttcctggccttgttcacctgcgtgtccctcctgaccgtgctctccacggcgcgcgcctcggccggggcgccggcgtgccaggcggcgtcgctcacggccagcgctgccggcgccacggaggccggcctgccgcggcacgtgttcgacgcgctggtgcagtacgcggcggcggcagggaacttgtcgtcgagcatgccggagccggacgtgcgcgcgatcgcgtcggtgctccggcggcgcgcgccgtgcaacctgctggtgttcgggctgggcgcggagacgccgctgtggcgcgcgctcaaccacggcgggcgcacggtgttcctggacgagaacccgtactacgtggcccacctggagggcaagcacccggggctggaggcctacgacgtggcctacgccacggcggtgcgcgagctccccgacctcctcgacgccgcccgtgccgcgcgcgccgccgagtgccgccccgtccagaacctgctcttctccgagtgccgcctcgccatcaacgacctccccaaccagctctacgacgtcgcctgggacgtcatcctcgtcgacggcccgcgcgggttcatggaggggtcgccggggaggatgtcggcgatctactcggctgcggtgatggcgcggaccaagggcgcggagacggaggtgatggtgcacgactacgagcgggaggtggagcgcgcgtgcggccgggagttcctgtgcgacgagaaccgggtcacggcgaccagcacgccgtcgctcggccacgtcgtcgtgcgcgacggcnccgccgccaaccgggaagccttctgcgggccgcccgccggcgccgctcagaaatcgaaaccgagctaagcgagtcgtagtcgttacttctccttcaaacaaatcatgtaattaactcaaggaagtataggtcagtggttcctcgtatttttttcgaacaaatcctgtgggtggtggtggtccaatgatttctcccttcaaacatactgtaatgcctgacgtgccaacacatttgacacgtttaagagaaattttgcatttacaactctt

SEQ ID NO: 17634 - protein, 323 aa, Zea mays subsp. mays
  misc_feature (1)..(323): Ceres Seq. ID no. 12359522
  misc_feature (302)..(302): Xaa is any aa, unknown or other
MKAMAGPKLLVVHASSNKALNGMAPTSPPSPGWSRCLWLVVFLALFTCVSLLTVLSTARASAGAPACQAASLTASAAGATEAGLPRHVFDALVQYAAAAGNLSSSMPEPDVRAIASVLRRRAPCNLLVFGLGAETPLWRALNHGGRTVFLDENPYYVAHLEGKHPGLEAYDVAYATAVRELPDLLDAARAARAAECRPVQNLLFSECRLAINDLPNQLYDVAWDVILVDGPRGFMEGSPGRMSAIYSAAVMARTKGAETEVMVHDYEREVERACGREFLCDENRVTATSTPSLGHVVVRDGXAANREAFCGPPAGAAQKSKPS

SEQ ID NO: 17635 - protein, 320 aa, Zea mays subsp. mays
  misc_feature (1)..(320): Ceres Seq. ID no. 12359523
  misc_feature (299)..(299): Xaa is any aa, unknown or other
MAGPKLLVVHASSNKALNGMAPTSPPSPGWSRCLWLVVFLALFTCVSLLTVLSTARASAGAPACQAASLTASAAGATEAGLPRHVFDALVQYAAAAGNLSSSMPEPDVRAIASVLRRRAPCNLLVFGLGAETPLWRALNHGGRTVFLDENPYYVAHLEGKHPGLEAYDVAYATAVRELPDLLDAARAARAAECRPVQNLLFSECRLAINDLPNQLYDVAWDVILVDGPRGFMEGSPGRMSAIYSAAVMARTKGAETEVMVHDYEREVERACGREFLCDENRVTATSTPSLGHVVVRDGXAANREAFCGPPAGAAQKSKPS

SEQ ID NO: 17636 - protein, 301 aa, Zea mays subsp. mays
  misc_feature (1)..(301): Ceres Seq. ID no. 12359524
  misc_feature (280)..(280): Xaa is any aa, unknown or other
MAPTSPPSPGWSRCLWLVVFLALFTCVSLLTVLSTARASAGAPACQAASLTASAAGATEAGLPRHVFDALVQYAAAAGNLSSSMPEPDVRAIASVLRRRAPCNLLVFGLGAETPLWRALNHGGRTVFLDENPYYVAHLEGKHPGLEAYDVAYATAVRELPDLLDAARAARAAECRPVQNLLFSECRLAINDLPNQLYDVAWDVILVDGPRGFMEGSPGRMSAIYSAAVMARTKGAETEVMVHDYEREVERACGREFLCDENRVTATSTPSLGHVVVRDGXAANREAFCGPPAGAAQKSKPS

SEQ ID NO: 17637 - DNA, 1566 bp, Zea mays subsp. mays
  misc_feature (1)..(1566): Ceres Seq. ID no. 12359525
ctctccctcgttgtccatggccctcgagtcatggctcaccaaggtccgctcggccatgtcctctgcctctggaggttcgggggcgccatcgaggccccggaagcagagcaccgtcggcatcctcgccttcgaggtcgccagcctcatgtccaagcttctccagctgtggcgagccgtgggtgacgctgccgtcgcacgcctccgccacgagaccatgaacctccacggcgtccgcaagatggtctccgacgacgacgacttccttgtcggcctcgcccgcgccgagctcgtggacacgctcagggccgcatccgactccgtggccgcgctcgccgcgcggtgcgcggaccccagcctccgcgacttcagggacgccttcctggagctggccgacaccggccgcgaccggcaccgctggacggcgcccagctggaaggagatggacgcgagggcgagcaggatggggaagcaggtggccaccaccgccgcgctccggagggccatggaggagctggccgaggccgagcacggcctccggaagcttgtcgtcctccagtgcgccgccagcagcctttcggcgagcaagatctcggcggcgtcggagcagcagcaggtggtcttctccaagaggcaggaggtgaagcacctgaagcagacgtccctctggggctccaccttcgacgctgccgtcgcgtcgctggcacgggcggcgttcaccaccctcgcgcgcatcaaggccgtcttcggcgccggccgggagcagcgccacccgccgctgtaccgcagcctgacactctcctcggcggtgcacccgtcaggcgacgcgcggtccccgccatcgcgcaagtccatgtcaatggaggaggtgctgctgttcgacgtggacgaccagccgtcgttcgctccgaaacggcaggtgcggggcggcgggttcctggaggacagctcggcggcactgacgcccccggcggggacgctgggcgcggcggcgctggcgccgcgctacgccgggctggtgatctcgatcgagcggatggcgcggtcgccgctgctggtgggccccgaggagcgggacgagctgtacgggatgctgacggcgagcgtgcgcgcgcagctccgggcgcggctgcgcggcgcggtgcccgcggcggacccggggctcgcagggcagtggtgcgcggcgctcgctgggatcctggagtggctggcgccgatggcgcacgcgacggtgcggtggcaggcggagcgcagcctggagcagcggggcgggagcggcaacggcagcgtgctgctgctgcagacactgcagttcgcggagcgcgacaaggtggacgcggcggtggtggagctcctggtggggctcaactacgtgtggcggttcgagaaggagatgagctgccgcgctatgctcgcctcgcccgcccgcccgcccgtccgatgacgatgcatccatggattatggatggtggtggtgatacgaatgatgcaagcacatctgcatctgcatctgtttgttgctcattctggatggatctgttgacgacgaataaatctctactacttatt

SEQ ID NO: 17638 - protein, 479 aa, Zea mays subsp. mays
  misc_feature (1)..(479): Ceres Seq. ID no. 12359526
SPSLSMALESWLTKVRSAMSSASGGSGAPSRPRKQSTVGILAFEVASLMSKLLQLWRAVGDAAVARLRHETMNLHGVRKMVSDDDDFLVGLARAELVDTLRAASDSVAALAARCADPSLRDFRDAFLELADTGRDRHRWTAPSWKEMDARASRMGKQVATTAALRRAMEELAEAEHGLRKLVVLQCAASSLSASKISAASEQQQVVFSKRQEVKHLKQTSLWGSTFDAAVASLARAAFTTLARIKAVFGAGREQRHPPLYRSLTLSSAVHPSGDARSPPSRKSMSMEEVLLFDVDDQPSFAPKRQVRGGGFLEDSSAALTPPAGTLGAAALAPRYAGLVISIERMARSPLLVGPEERDELYGMLTASVRAQLRARLRGAVPAADPGLAGQWCAALAGILEWLAPMAHATVRWQAERSLEQRGGSGNGSVLLLQTLQFAERDKVDAAVVELLVGLNYVWRFEKEMSCRAMLASPARPPVR

SEQ ID NO: 17639 - protein, 474 aa, Zea mays subsp. mays
  misc_feature (1)..(474): Ceres Seq. ID no. 12359527
MALESWLTKVRSAMSSASGGSGAPSRPRKQSTVGILAFEVASLMSKLLQLWRAVGDAAVARLRHETMNLHGVRKMVSDDDDFLVGLARAELVDTLRAASDSVAALAARCADPSLRDFRDAFLELADTGRDRHRWTAPSWKEMDARASRMGKQVATTAALRRAMEELAEAEHGLRKLVVLQCAASSLSASKISAASEQQQVVFSKRQEVKHLKQTSLWGSTFDAAVASLARAAFTTLARIKAVFGAGREQRHPPLYRSLTLSSAVHPSGDARSPPSRKSMSMEEVLLFDVDDQPSFAPKRQVRGGGFLEDSSAALTPPAGTLGAAALAPRYAGLVISIERMARSPLLVGPEERDELYGMLTASVRAQLRARLRGAVPAADPGLAGQWCAALAGILEWLAPMAHATVRWQAERSLEQRGGSGNGSVLLLQTLQFAERDKVDAAVVELLVGLNYVWRFEKEMSCRAMLASPARPPVR

SEQ ID NO: 17640 - protein, 461 aa, Zea mays subsp. mays
  misc_feature (1)..(461): Ceres Seq. ID no. 12359528
MSSASGGSGAPSRPRKQSTVGILAFEVASLMSKLLQLWRAVGDAAVARLRHETMNLHGVRKMVSDDDDFLVGLARAELVDTLRAASDSVAALAARCADPSLRDFRDAFLELADTGRDRHRWTAPSWKEMDARASRMGKQVATTAALRRAMEELAEAEHGLRKLVVLQCAASSLSASKISAASEQQQVVFSKRQEVKHLKQTSLWGSTFDAAVASLARAAFTTLARIKAVFGAGREQRHPPLYRSLTLSSAVHPSGDARSPPSRKSMSMEEVLLFDVDDQPSFAPKRQVRGGGFLEDSSAALTPPAGTLGAAALAPRYAGLVISIERMARSPLLVGPEERDELYGMLTASVRAQLRARLRGAVPAADPGLAGQWCAALAGILEWLAPMAHATVRWQAERSLEQRGGSGNGSVLLLQTLQFAERDKVDAAVVELLVGLNYVWRFEKEMSCRAMLASPARPPVR

SEQ ID NO: 17641 - DNA, 795 bp, Zea mays subsp. mays
  misc_feature (1)..(795): Ceres Seq. ID no. 12359553
acgcgctcttcggcggcaactactgttggatcgtagggcgaaggaaggaaggaaggggagccatgggaaacgcgtcgtccatgctgacccagtacgacatcgaggaggtgcaggagcactgcagctacctcttctcgcagcaggagatcgtgtcgctgtacgagcgcttctgccagttggaccgcagcgccaagggcttcatctccgaggacgagttcctctccatccccgagttctccctcaacccgctctccaagaggttgctccgtatggttgatggattgaacttcaaggattttgttgcgtttctttctaccttcagtgcaaaggccagccttcgtcagaagatcgagtttatattcaaggtttatgacatcgatggcaagggaaaaattaccttcaaggatctgctagaggttttacgggacctaacagggtcattcatgtccgaggaacaaagagagcaagtggtaactgaagttctggaagaagcagggtacacgagggattacgcattctcgcttgaagattttatccagatcatcgaccatcctggccttaagatggaggtggaagtgccaatcgactagtgaaatgtggaaaacaagcttccggttttgtctgcagaacatggttagtgtcatgtagcagggcaatgaccgttcactttcgtcatcttatttgtttccggtccacttgcctaaacttttgtaatctttgttggcttggccttttcgaatatatccaaaacaaaaaaaaatgtcctgcgatgagattttcgtcggttctatgctg

SEQ ID NO: 17642 - protein, 195 aa, Zea mays subsp. mays
  misc_feature (1)..(195): Ceres Seq. ID no. 12359554
ALFGGNYCWIVGRRKEGRGAMGNASSMLTQYDIEEVQEHCSYLFSQQEIVSLYERFCQLDRSAKGFISEDEFLSIPEFSLNPLSKRLLRMVDGLNFKDFVAFLSTFSAKASLRQKIEFIFKVYDIDGKGKITFKDLLEVLRDLTGSFMSEEQREQVVTEVLEEAGYTRDYAFSLEDFIQIIDHPGLKMEVEVPID

SEQ ID NO: 17643 - protein, 175 aa, Zea mays subsp. mays
  misc_feature (1)..(175): Ceres Seq. ID no. 12359555
MGNASSMLTQYDIEEVQEHCSYLFSQQEIVSLYERFCQLDRSAKGFISEDEFLSIPEFSLNPLSKRLLRMVDGLNFKDFVAFLSTFSAKASLRQKIEFIFKVYDIDGKGKITFKDLLEVLRDLTGSFMSEEQREQVVTEVLEEAGYTRDYAFSLEDFIQIIDHPGLKMEVEVPID

SEQ ID NO: 17644 - protein, 169 aa, Zea mays subsp. mays
  misc_feature (1)..(169): Ceres Seq. ID no. 12359556
MLTQYDIEEVQEHCSYLFSQQEIVSLYERFCQLDRSAKGFISEDEFLSIPEFSLNPLSKRLLRMVDGLNFKDFVAFLSTFSAKASLRQKIEFIFKVYDIDGKGKITFKDLLEVLRDLTGSFMSEEQREQVVTEVLEEAGYTRDYAFSLEDFIQIIDHPGLKMEVEVPID

SEQ ID NO: 17645 - DNA, 1175 bp, Zea mays subsp. mays
  misc_feature (1)..(1175): Ceres Seq. ID no. 12359591
taatcgaaaatcacactgtggcaactacggccacaactccaggacctgcgggagagaaaccatgctctgcgaagctggccgacaacggcggccatggcggcctaaggctcttcggagtgcaggtccgtatcggcggcggcggcgcaggctcggcgtccatgaagaagagctacagcatggactgcctgcagctcgcggctcctggttgttccctcgtctcgccgtcgacgtcctcctcgttgtcgtcgctgctgctgatgtcgattgaggagggatcggagaggggggcgccaaatgggtacctttctgacggacctcatggcagagctgtgcaggagaggaaaaaaggagttccatgaagcgaggaggagcacaggcagttcctttccggcctggagaagctgggcaagggcgactggcgaggcatctccaggagctacgtgccgacgaggaccccgacgcaggtcgccagccatgcacagaagttcttcctcaggcagagcagcttggggaagaagaagcgccgctccagcctctttgacatggtgccgatttgcgagaacagtgcgagcatctccgatccgctgggcagcgaaggggcctcaacctctctgtcgctgaacgtgccacgccacggcgtcacctccgtctccgagggggcggccttggacctgaattcgacggaggaagacgacagcagggcggacgcgtcgtcggcatcggcatcaggtgcagggaccagaccaccgttcccggcagcgcagacggagccgctgctgcagccttcgtcgcttggccatgggcgcggtcaccactgctctcctttggacctggagctggccatgtcgctgcctgccccatccatcggaacatgacgcgccgccgccgccgtacttatcgccatggaatcccacgcaggtcgcgccataattcgtcagcgcaggttgccaaggccgaggccgtgcgtgcctcgcacaaacgtctcacgtgtaatcagaatcgggttcctgagtatgactatgccatgttccaggttacgctagttgctagctagcttttttttttaagctctgttaatgatattgttacgaaaaatagattctaacataggttcactgttatatatgttatgtagaccatatatttactttgatattaaatttgttttttatggc

SEQ ID NO: 17646 - protein, 118 aa, Zea mays subsp. mays
  misc_feature (1)..(118): Ceres Seq. ID no. 12359592
IENHTVATTATTPGPAGEKPCSAKLADNGGHGGLRLFGVQVRIGGGGAGSASMKKSYSMDCLQLAAPGCSLVSPSTSSSLSSLLLMSIEEGSERGAPNGYLSDGPHGRAVQERKKGVP

SEQ ID NO: 17647 - protein, 110 aa, Zea mays subsp. mays
  misc_feature (1)..(110): Ceres Seq. ID no. 12359593
MVPICENSASISDPLGSEGASTSLSLNVPRHGVTSVSEGAALDLNSTEEDDSRADASSASASGAGTRPPFPAAQTEPLLQPSSLGHGRGHHCSPLDLELAMSLPAPSIGT

SEQ ID NO: 17648 - protein, 108 aa, Zea mays subsp. mays
  misc_feature (1)..(108): Ceres Seq. ID no. 12359594
MGTFLTDLMAELCRRGKKEFHEARRSTGSSFPAWRSWARATGEASPGATCRRGPRRRSPAMHRSSSSGRAAWGRRSAAPASLTWCRFARTVRASPIRWAAKGPQPLCR

SEQ ID NO: 17649 - protein, 66 aa, Zea mays subsp. mays
  misc_feature (1)..(66): Ceres Seq. ID no. 12359595
MKKSYSMDCLQLAAPGCSLVSPSTSSSLSSLLLMSIEEGSERGAPNGYLSDGPHGRAVQERKKGVP

SEQ ID NO: 17650 - DNA, 1452 bp, Zea mays subsp. mays
  misc_feature (1)..(1452): Ceres Seq. ID no. 12359603
aggcagccaggcacccaatcaacggacggccagccggcagccgtcgtagcgggagccgggagaatagtaaaggacaaatcagacgaggaggagcgtggagcggggacagcctgcgctgcgctgccttgctccggccggccggccccccaccttagcccttgtcccggttccctcctccaccattcaaatctcctggcttcgtttcagttcgatttgaagcggggcggcagaggaggcagggggattgggtccggggacgacatttggcggcatcaaccacacagcacaggcacagcgcagcaccatgacgatggagggggcggtttccgacaacaccaagggcctggcgctcgccgtcgcctccagcgccttcatcggcgccagcttcatcctcaagaagatcggcctcctgcgagcagccaagtgcggcgaccgcgcaggtggcggaggacacacttacctctccgagcctctatggtgggcgggaatgaccacaatgctgcttggggaggtcgcaaacttcattgcttacatatttgcgcccggctgtactcgtgactccacttggggcgttaagcataatcgtaagttcagtgttggcgcactttgtgctcaaggagcggcttgagaagctcggggtccttggctgtgtgtcgtgcatagtaggttcagttgttgttgtcatgcatgctcctgaagagcatatgcctaactctgtcaaggaaatctggaacctagctactcaaccagggtttctagcatatgtggtgacagcattgttacttgtgggagcgctagtactcttctttgaacctcgatacggtcagactaacatcctgatatatctgggtatctgctcttcaatgggatcgctaacggtcgttagcatcaaagccattggtgttgccataaagcttacgttggatggggtgaatcaggctgcttatccatacacatggctttttcttatggttgcaattgtttgtggggtttctcaaataaattacctgaacaaggcattggatacctttaatctggctattgtctctcctatatattatgtaatgtttactacccttacaatagtggcaagtggaattatgtttaaggactgggctggtcaaagcttaagtagtattgcttgtgaattatgcggcctgataaccatcctttctgggacaattttgttgcacacagcagaggagggagccaacaattctgcagctttgttgccttggcctttggataaagggtctatatcatggtgtatcaacttaagcagtgacaatcttctaaagaatgtcgaagaggactacttcacagctctgcaaagttcacctgccccagtataatgaagaaactgataaatatctaaaagggaacatgcaaatcaaggtgtaaatcttaacagtgccagaaacctggcagttttgggtgaggngattgtacctg

SEQ ID NO: 17651 - protein, 222 aa, Zea mays subsp. mays
  misc_feature (1)..(222): Ceres Seq. ID no. 12359604
MHAPEEHMPNSVKEIWNLATQPGFLAYVVTALLLVGALVLFFEPRYGQTNILIYLGICSSMGSLTVVSIKAIGVAIKLTLDGVNQAAYPYTWLFLMVAIVCGVSQINYLNKALDTFNLAIVSPIYYVMFTTLTIVASGIMFKDWAGQSLSSIACELCGLITILSGTILLHTAEEGANNSAALLPWPLDKGSISWCINLSSDNLLKNVEEDYFTALQSSPAPV

SEQ ID NO: 17652 - protein, 215 aa, Zea mays subsp. mays
  misc_feature (1)..(215): Ceres Seq. ID no. 12359605
MPNSVKEIWNLATQPGFLAYVVTALLLVGALVLFFEPRYGQTNILIYLGICSSMGSLTVVSIKAIGVAIKLTLDGVNQAAYPYTWLFLMVAIVCGVSQINYLNKALDTFNLAIVSPIYYVMFTTLTIVASGIMFKDWAGQSLSSIACELCGLITILSGTILLHTAEEGANNSAALLPWPLDKGSISWCINLSSDNLLKNVEEDYFTALQSSPAPV

SEQ ID NO: 17653 - protein, 185 aa, Zea mays subsp. mays
  misc_feature (1)..(185): Ceres Seq. ID no. 12359606
RQPGTQSTDGQPAAVVAGAGRIVKDKSDEEERGAGTACAALPCSGRPAPHLSPCPGSLLHHSNLLASFQFDLKRGGRGGRGIGSGDDIWRHQPHSTGTAQHHDDGGGGFRQHQGPGARRRLQRLHRRQLHPQEDRPPASSQVRRPRRWRRTHLPLRASMVGGNDHNAAWGGRKLHCLHICARLYS

SEQ ID NO: 17654 - DNA, 894 bp, Zea mays subsp. mays
  misc_feature (1)..(894): Ceres Seq. ID no. 12359615
acgaagcggatgacggcaggcgcgccccgtctcctcctcgtgacgtctttgaccatgacaagtgcgggtacctcggctggctggacaccaagccggccaattcggtggtgtacatctccttcggcagctcgtcggttatgtgcaaggaccaggtcgcggagatcaccgacgccatggcgcaggtgaagaggccgttcctcttggtcctgaggaaggacaaccgcaagggccacgacgacgacgcggcggcggcggccgatgcggacagcgccggcgggatggtgctggagtggtgcgaccaggcgcgcgtgctgtcgcacccggcggtcgcatgcttcgtgacgcattgcgggtggaactcgaccctggagagcgcggcgtgcggcgtgccgaccgtcgcggttccgcggtactcggaccagggcacggccgcgtggctcgtggcggagcggatgggcaccggcgtccgcgcggcggcgcgcgcggacggcgtcgtggaggcccaggagntgaggcggtgngtggagnnccgcgnngnngggggcggtgncggcgcgcgccgcggcgtggaagcggaatgcgtgggntnccgtggccgacggcgggagctcgcaccagaacctgacggggttcctgaggcagatcgcccacggccgcggcgactaaaccggagacgacgtcgtattgtattgtatcacctcgttgtggtggcgttgcagccagctgccagcgtgcatttctagcgaaaccatggatacagttgattgcaatttgagcgaggacgcaatccatgtctggtttntgaagtctggcaacgtattcccttcggctcgacgtccatctgaatatctgatggttccaacttccaaaaccaaaagtgctcgcctgtgcctt

SEQ ID NO: 17655 - protein, 246 aa, Zea mays subsp. mays
  misc_feature (1)..(246): Ceres Seq. ID no. 12359616
  misc_feature (170)..(170): Xaa is any aa, unknown or other
  misc_feature (173)..(173): Xaa is any aa, unknown or other
  misc_feature (176)..(176): Xaa is any aa, unknown or other
  misc_feature (178)..(178): Xaa is any aa, unknown or other
  misc_feature (179)..(179): Xaa is any aa, unknown or other
  misc_feature (183)..(183): Xaa is any aa, unknown or other
  misc_feature (195)..(195): Xaa is any aa, unknown or other
  misc_feature (196)..(196): Xaa is any aa, unknown or other
EADDGRRAPSPPRDVFDHDKCGYLGWLDTKPANSVVYISFGSSSVMCKDQVAEITDAMAQVKRPFLLVLRKDNRKGHDDDAAAAADADSAGGMVLEWCDQARVLSHPAVACFVTHCGWNSTLESAACGVPTVAVPRYSDQGTAAWLVAERMGTGVRAAARADGVVEAQEXRRXVEXRXXGGGXGARRGVEAECVXXRGRRRELAPEPDGVPEADRPRPRRLNRRRRRIVLYHLVVVALQPAASVHF

SEQ ID NO: 17656 - protein, 201 aa, Zea mays subsp. mays
  misc_feature (1)..(201): Ceres Seq. ID no. 12359617
  misc_feature (125)..(125): Xaa is any aa, unknown or other
  misc_feature (128)..(128): Xaa is any aa, unknown or other
  misc_feature (131)..(131): Xaa is any aa, unknown or other
  misc_feature (133)..(133): Xaa is any aa, unknown or other
  misc_feature (134)..(134): Xaa is any aa, unknown or other
  misc_feature (138)..(138): Xaa is any aa, unknown or other
  misc_feature (150)..(150): Xaa is any aa, unknown or other
  misc_feature (151)..(151): Xaa is any aa, unknown or other
MCKDQVAEITDAMAQVKRPFLLVLRKDNRKGHDDDAAAAADADSAGGMVLEWCDQARVLSHPAVACFVTHCGWNSTLESAACGVPTVAVPRYSDQGTAAWLVAERMGTGVRAAARADGVVEAQEXRRXVEXRXXGGGXGARRGVEAECVXXRGRRRELAPEPDGVPEADRPRPRRLNRRRRRIVLYHLVVVALQPAASVHF

SEQ ID NO: 17657 - protein, 189 aa, Zea mays subsp. mays
  misc_feature (1)..(189): Ceres Seq. ID no. 12359618
  misc_feature (113)..(113): Xaa is any aa, unknown or other
  misc_feature (116)..(116): Xaa is any aa, unknown or other
  misc_feature (119)..(119): Xaa is any aa, unknown or other
  misc_feature (121)..(121): Xaa is any aa, unknown or other
  misc_feature (122)..(122): Xaa is any aa, unknown or other
  misc_feature (126)..(126): Xaa is any aa, unknown or other
  misc_feature (138)..(138): Xaa is any aa, unknown or other
  misc_feature (139)..(139): Xaa is any aa, unknown or other
MAQVKRPFLLVLRKDNRKGHDDDAAAAADADSAGGMVLEWCDQARVLSHPAVACFVTHCGWNSTLESAACGVPTVAVPRYSDQGTAAWLVAERMGTGVRAAARADGVVEAQEXRRXVEXRXXGGGXGARRGVEAECVXXRGRRRELAPEPDGVPEADRPRPRRLNRRRRRIVLYHLVVVALQPAASVHF

SEQ ID NO: 17658 - DNA, 3391 bp, Zea mays subsp. mays
  misc_feature (1)..(3391): Ceres Seq. ID no. 12359662
aatcattcccctctgcagccgccggccctcagcaagcaagcaagggacagacgcggcggggatgggcagcggggtccgggcgctgatgcgccggaagcaggtagactccgagcggacgcgcgccgccggcagcgcccaccagctccgcaaggagctctccgtcacccagctcgtcgccatcggtgttgggtcgacgattggagctggcgtctacgtccttgttggcacagttgcgcgggagcattccgggccggcattgacgctttcatttctgatagccggaatagcagctgcgctttcagccttctgctatgcggagctggctagccgttgcccttcggcaggaagcgcctatcattattcgtacatctgcgttggcgaaggagttgcatggttgattggctgggctttgatacttgaatacacgattggtggatcagccgttgcccgtggcatttctcctaatctagccttattttttggaggacaggatagtctgccatggattttagcacgacatgagatcccatggcttgatgtcgttgtagatccttgtgcttctttcctcgttttcgtcgtcactggccttctctgtgtggggataaaagagagttcatttgtgcaaggagttgtgacggtcttaaattgctttgtgatgttatttgttatcatagccggtagctacatcggcttccaaacaggatgggttggctacaaggttgctggcggatttttcccttatggagcgaatggaatgcttgccgggtcagcaactgtcttcttcgcctacataggatttgattcagttgccagcacggctgaggaggtgaaaaatccacaacgagatctgccactgggaatcggaacagcattgtcgatttgctgttccttgtacatgttggtttcagttgttattgttggtctggtaccatactttgctatggacccagacacccctatttcatctgcttttgccaaacatgggatgcactgggcaatgtatcttgtaacaactggtgctgttcttgctctctgctcaaccttgatgggatctatattgccacagccaagaatattgatggccatggcacgagatggcctgctaccatcattcttctctgatgtccataagacgacacaagttccagtcaaaagcacagtagtgactggcatctgtgcagctgctcttgctttcttcatggatgtctctcaactggctggaatggttagtgtaggcacgctactcgcgttcactatagttgctgtgtccatcttgattcttagatacgttcctccagatgaggtacccctcccatcttccctgcaagcatcattccgcttgagccaagaaaatgacgaggaaaagctgaggggtacccttggagatgatgatcatgagcaaggctcagctgaaataagtgatgttgtagtaaaaccaatcactgaccccctgatcgagaagcagctatacgcaagcaatttgagtgaggcaaaacggcgtaagaccgcggcatgcagcatcacatctgtttgcataggggttctgatcctcacgacgtcagcctcggcaacattcttgcccttcccggtgagatgctccgtttgtgttttgggtggcatgctcctcctagctggtctgggcatgctctgctggattgaccaagatgatgggaggcactcctttggccactccggaggattcatctgtccgtttgttcccttgctgccggtaatgtgtatcctcataaatacatacttgttaataaatcttggtggcggcacgtggatgcgagtgggggtgtggctagtgatgggggtgttcgtctacattttctatggccgcacccacagctcgttgacggatgtcgtgtatgtccctgtggccgaggcgaatgagatatacgggtcatcctcttcgttagggtttgtggcgtaaagagagatggaaggagatgtttgttgaagcctatcttgagccagtcatggtacttctcacaaaaacctcaaagatcctgactggagcaggtacctgcttgagctattgtgttgcaggcatgggtttgaagaattcttcgacgttctgcacaagcttgttttcgtcatcttcgacaacagagccatgccgtcaaatgggcactttacctttcctgcctcacccccctaagtgtgagcagcaggtttcagctggtcactcatcgagctcctctctgcttttaagtggtgataccggtttagatgtggctgaacagtcagatgatctgaacgacttgctcaatctttcgggagatgcttctgatggcagcttccatggagaaaacaatgccttagcttttgacgaacagatggaatttcagttcctgtctgagcagctagaaattgccatcactgacaatgagaagaatcctcatttagatgacatatacggcacaccaccacagctgtcatcacttccagtatcatcttgctccaatcagaatctagggtcaccagttaaagtccagcttagctcatctcagtcatcttctagctctgcaacagctaacaagtcaagattgaggtggacacttgagcttcatgagcgttttgtggaggccgtgaaaaagcttgaaggtcctgaaaaagcaactcccaaaggtgtgctgaaactaatgaaggtagaaggtctaacaatttatcatgtgaagagccatctgcagaagtatcggcttgcaaaatatattcctgagcctaaagacgataagaaggcttcctcggaggataaaaaagcacaattaggaaagggcagcattgattcaagcaaaaacaagaatttacaagtggcagaagctctaaggatgcaaatagaggttcagaaacagcttcatgaacaattagaggtgcaaaggcagttgcagctacggatagaggaacatgcaagatacttgcagaaaatactagaagagcagcagaaggccggcaatgtgccactaaaagctccaaccaaagcacaagcaacaaagtcgtcacctgaatcgacgtcagacgagagaactgaatccgaggtagacaccatttctccgcggccacccaagaacaggaacccgggtgtagacgcagaatgcaaatcgccgggaaggatcaagcgaacgaaggttcaggctgatcttgaaaacgagggcctgtgttcatagcgagggctcatgttcgtagctgtgcgggctcgccagtgattttctgaacatttgcacttcccgttttagttcaggagctatttgttactgtttgtaacttgaacagccgtagtatctccagcgatctgttgatatcttggcgtgaattggacttgacatcttagccattgtattatatagtaattcgcctttggaatggaaatggaataggtttatgtttg

SEQ ID NO: 17659 - protein, 644 aa, Zea mays subsp. mays
  misc_feature (1)..(644): Ceres Seq. ID no. 12359663
IIPLCSRRPSASKQGTDAAGMGSGVRALMRRKQVDSERTRAAGSAHQLRKELSVTQLVAIGVGSTIGAGVYVLVGTVAREHSGPALTLSFLIAGIAAALSAFCYAELASRCPSAGSAYHYSYICVGEGVAWLIGWALILEYTIGGSAVARGISPNLALFFGGQDSLPWILARHEIPWLDVVVDPCASFLVFVVTGLLCVGIKESSFVQGVVTVLNCFVMLFVIIAGSYIGFQTGWVGYKVAGGFFPYGANGMLAGSATVFFAYIGFDSVASTAEEVKNPQRDLPLGIGTALSICCSLYMLVSVVIVGLVPYFAMDPDTPISSAFAKHGMHWAMYLVTTGAVLALCSTLMGSILPQPRILMAMARDGLLPSFFSDVHKTTQVPVKSTVVTGICAAALAFFMDVSQLAGMVSVGTLLAFTIVAVSILILRYVPPDEVPLPSSLQASFRLSQENDEEKLRGTLGDDDHEQGSAEISDVVVKPITDPLIEKQLYASNLSEAKRRKTAACSITSVCIGVLILTTSASATFLPFPVRCSVCVLGGMLLLAGLGMLCWIDQDDGRHSFGHSGGFICPFVPLLPVMCILINTYLLINLGGGTWMRVGVWLVMGVFVYIFYGRTHSSLTDVVYVPVAEANEIYGSSSSLGFVA

SEQ ID NO: 17660 - protein, 624 aa, Zea mays subsp. mays
  misc_feature (1)..(624): Ceres Seq. ID no. 12359664
MGSGVRALMRRKQVDSERTRAAGSAHQLRKELSVTQLVAIGVGSTIGAGVYVLVGTVAREHSGPALTLSFLIAGIAAALSAFCYAELASRCPSAGSAYHYSYICVGEGVAWLIGWALILEYTIGGSAVARGISPNLALFFGGQDSLPWILARHEIPWLDVVVDPCASFLVFVVTGLLCVGIKESSFVQGVVTVLNCFVMLFVIIAGSYIGFQTGWVGYKVAGGFFPYGANGMLAGSATVFFAYIGFDSVASTAEEVKNPQRDLPLGIGTALSICCSLYMLVSVVIVGLVPYFAMDPDTPISSAFAKHGMHWAMYLVTTGAVLALCSTLMGSILPQPRILMAMARDGLLPSFFSDVHKTTQVPVKSTVVTGICAAALAFFMDVSQLAGMVSVGTLLAFTIVAVSILILRYVPPDEVPLPSSLQASFRLSQENDEEKLRGTLGDDDHEQGSAEISDVVVKPITDPLIEKQLYASNLSEAKRRKTAACSITSVCIGVLILTTSASATFLPFPVRCSVCVLGGMLLLAGLGMLCWIDQDDGRHSFGHSGGFICPFVPLLPVMCILINTYLLINLGGGTWMRVGVWLVMGVFVYIFYGRTHSSLTDVVYVPVAEANEIYGSSSSLGFVA

SEQ ID NO: 17661 - protein, 616 aa, Zea mays subsp. mays
  misc_feature (1)..(616): Ceres Seq. ID no. 12359665
MRRKQVDSERTRAAGSAHQLRKELSVTQLVAIGVGSTIGAGVYVLVGTVAREHSGPALTLSFLIAGIAAALSAFCYAELASRCPSAGSAYHYSYICVGEGVAWLIGWALILEYTIGGSAVARGISPNLALFFGGQDSLPWILARHEIPWLDVVVDPCASFLVFVVTGLLCVGIKESSFVQGVVTVLNCFVMLFVIIAGSYIGFQTGWVGYKVAGGFFPYGANGMLAGSATVFFAYIGFDSVASTAEEVKNPQRDLPLGIGTALSICCSLYMLVSVVIVGLVPYFAMDPDTPISSAFAKHGMHWAMYLVTTGAVLALCSTLMGSILPQPRILMAMARDGLLPSFFSDVHKTTQVPVKSTVVTGICAAALAFFMDVSQLAGMVSVGTLLAFTIVAVSILILRYVPPDEVPLPSSLQASFRLSQENDEEKLRGTLGDDDHEQGSAEISDVVVKPITDPLIEKQLYASNLSEAKRRKTAACSITSVCIGVLILTTSASATFLPFPVRCSVCVLGGMLLLAGLGMLCWIDQDDGRHSFGHSGGFICPFVPLLPVMCILINTYLLINLGGGTWMRVGVWLVMGVFVYIFYGRTHSSLTDVVYVPVAEANEIYGSSSSLGFVA

SEQ ID NO: 17662 - DNA, 1434 bp, Zea mays subsp. mays
  misc_feature (1)..(1434): Ceres Seq. ID no. 12359666
agcgccaccaagagttgatccacccaggccagccacccgcccgtcccccggcggcggagatggcgaggaacgaggcggcggccgcggccgcgccgggcgtcgacttccaccttcccgacgagatcctggccgtgatccccaccgacccgtacgagcagctggacgtggcgcgcaagatcacctccatggccatcgcctcccgcgtctcccgcctcgaggccgacgctgcgcgcctccgccgtgacctcgccgaccgtgaccgcgccgaggccgacctccgcgcctgcctcgccgactccgacgcgcgcctgccgccgctctcgacgagaacgcgaagctggcgaaggaaagggactcgctcgcggcgacggtcaaaaagctgaccaggaatttggcgaagttggaggcttttaagaaacaattgatgaaatcattaagtgaagataatctattgcaactgtctgaaaccagtcaagatcacaacgcagaagatttgacagctcgagtcccattttggaaagatgaagtttcgagcagtaacacttcttcagatgcctccagcagatctacaatgactgaatccgtccatggcggaggataccagttctcgatcacaccatatatgcctccaaaattaactcctggctcaacaactatgatttcgtcctctagtggttctccccgagcttattcaactggcccaccctctcccaagttcttatctggtccgacatcacctgcaaaagctcgatctgagggccaattggcattttcatcatggcaaggatcatcaagtcatcagtattcagcacctacctctcctccccaacgccactcattcacagagcggccacgtatagatgggaaggaattcttccgacaagcacggacaagactttcgtatgagcaatttggagcatttttggccaatatcaaggagttcaatgctcagaaacaatcacgggaggacaccctgtcaaaagcagaagagatttttggaacagaacacaatgatctgtacatttctttccagaatatgcttagccgaaactaatcatgaaaatttgtcagaagtagtattttctctcaaaatcaagcagggtaggttctgttggaataaacgatgtccttccgtaggttctcaaagatcacattgtagagatatgtatataggccaccttaattcgaggtgttcgttctcaataatttggagctgtgacttaaaagcggaaatctcatagcatacattcactcattccctgaaattcaaggcttcctgcttgtctttctgctgtaaatccggatgcagatctcttgagctattaaggtgccttccctagttccctttgtagaaagctgtataaaactgccctttgccgttcttctaactgccaagggtacacggaatggatatgatcacggtgcattcgttgt

SEQ ID NO: 17663 - protein, 209 aa, Zea mays subsp. mays
  misc_feature (1)..(209): Ceres Seq. ID no. 12359667
MKSLSEDNLLQLSETSQDHNAEDLTARVPFWKDEVSSSNTSSDASSRSTMTESVHGGGYQFSITPYMPPKLTPGSTTMISSSSGSPRAYSTGPPSPKFLSGPTSPAKARSEGQLAFSSWQGSSSHQYSAPTSPPQRHSFTERPRIDGKEFFRQARTRLSYEQFGAFLANIKEFNAQKQSREDTLSKAEEIFGTEHNDLYISFQNMLSRN

SEQ ID NO: 17664 - protein, 160 aa, Zea mays subsp. mays
  misc_feature (1)..(160): Ceres Seq. ID no. 12359668
MTESVHGGGYQFSITPYMPPKLTPGSTTMISSSSGSPRAYSTGPPSPKFLSGPTSPAKARSEGQLAFSSWQGSSSHQYSAPTSPPQRHSFTERPRIDGKEFFRQARTRLSYEQFGAFLANIKEFNAQKQSREDTLSKAEEIFGTEHNDLYISFQNMLSRN

SEQ ID NO: 17665 - protein, 143 aa, Zea mays subsp. mays
  misc_feature (1)..(143): Ceres Seq. ID no. 12359669
MPPKLTPGSTTMISSSSGSPRAYSTGPPSPKFLSGPTSPAKARSEGQLAFSSWQGSSSHQYSAPTSPPQRHSFTERPRIDGKEFFRQARTRLSYEQFGAFLANIKEFNAQKQSREDTLSKAEEIFGTEHNDLYISFQNMLSRN

SEQ ID NO: 17666 - DNA, 2019 bp, Zea mays subsp. mays
  misc_feature (1)..(2019): Ceres Seq. ID no. 12359674
acccgcgatctccgcgaccgcaagcagctcggcaggcaggcctccaccgctccaccacctccactcggtctacgtgctccgtcaccaaacccacccgggccaacgccgaagcaaccccccctccgtccccagatccggcgccgcctccgccctcacttacactagcacgcacggcggacacgtcgcctcccccgcgcgatctgatgcaggcgcacgcggtggccagcggcgatgcggtggaagcttaactcctccgtctacaagcgcgtgccgtccagggaaaccgccatggaacccgacgtcgagacgccaatgagaatgacggacggcggcggcagcggcgcggggccgtcgtggcgcatgtcgttgccgcatgtctgtgtcgccacgctcacctcgttcctctttggataccactccggggtggtgaacgagcccttggaggtcatctccgctgaccttggcttcgccggcaacactcttgctgaagggctcgtggtgagtatctgtttgggaggagcttttgttgggtgcctcttcagcggctccatcgcagatggtattgggcgacgccgtgcgttccagctcagtgcgctgcctatgattattggtgctgccataagtgctctctccaatagtttggagggtatgctccttggaagatttttggtaggaacagggatgggattgggtccaccagtagcttcactttatataacggaggtttctccttctacagtgaggggtacatatggtagctttgttcagattgcaacctgccttggaattatagtatcactactcattggtacacctgtcaaagatattgatagatggtggagagtgtgtttctgggttgccgttatcccagcaactttacaagctctcggtatggagttttgtgctgagagccctcagtggctttataagtgtggaaaaataagtgaagcagagatgcaatttgaaaagcttttaggtccccttcatgtaaaatctgccatggcagaactttctagatatgaaagagtagatgatggagaaagtgtcaagtactcagagttgttctatggtcgccacttcaatgttgtttttattggcacaacgctctttgctttacaacagttatccggcataaattctgtgttctatttctcatcaactgtattcagaagtgtgggggtgccctctaaccttgccaacatatgcatggggatttctaatctatcaggatcaattgtagcaatgcttctaatggacaagctaggtagaaaagtgcttctttcagggagttttcttgggatggcttttgcaatggggcttcaggctgttggagcaaaccgtcagtatcttggttctgcatgtgtatatctttcagttggtggcattctgttgtttgtcttgtcattttcactaggagcaggccctgtcccaggacttcttttgcctgagattttccctaataaaatccgagctaaggctatggctctctgcatgtctgtacattggatcgtgaacttctttgttagtttgatgttcttgcgtcttctggagcaacttggtccacagcttctctacacaatattttcgtcagtctgtgtggtagcctcaatatttgtgaggcgccatgtgttggagacgaagggaaagactttacaagagatagaggtttcactcctgcaaccacaataaaggtacatatttgacgtggctggaaccttgggcaggctgtttgctgaacagaaacaagctggccctgcagaagttgattcctgaagtcatcggcaacgccctacaaatggtctcagggaagttccagatatgcgcctgcgacagctagggcggtgtttccatagagcatcatgtactgaagttatgcctgtatcgcccgccctagataggatattttcatacttgtgttgtcatctgttctatctatgagtcgtaatatcagaaaaaaaaggtactactgttttaccgttgatgagcacagttgaaaaaaggaactatcatcttcatttt

SEQ ID NO: 17667 - protein, 485 aa, Zea mays subsp. mays
  misc_feature (1)..(485): Ceres Seq. ID no. 12359675
MRWKLNSSVYKRVPSRETAMEPDVETPMRMTDGGGSGAGPSWRMSLPHVCVATLTSFLFGYHSGVVNEPLEVISADLGFAGNTLAEGLVVSICLGGAFVGCLFSGSIADGIGRRRAFQLSALPMIIGAAISALSNSLEGMLLGRFLVGTGMGLGPPVASLYITEVSPSTVRGTYGSFVQIATCLGIIVSLLIGTPVKDIDRWWRVCFWVAVIPATLQALGMEFCAESPQWLYKCGKISEAEMQFEKLLGPLHVKSAMAELSRYERVDDGESVKYSELFYGRHFNVVFIGTTLFALQQLSGINSVFYFSSTVFRSVGVPSNLANICMGISNLSGSIVAMLLMDKLGRKVLLSGSFLGMAFAMGLQAVGANRQYLGSACVYLSVGGILLFVLSFSLGAGPVPGLLLPEIFPNKIRAKAMALCMSVHWIVNFFVSLMFLRLLEQLGPQLLYTIFSSVCVVASIFVRRHVLETKGKTLQEIEVSLLQPQ

SEQ ID NO: 17668 - protein, 466 aa, Zea mays subsp. mays
  misc_feature (1)..(466): Ceres Seq. ID no. 12359676
MEPDVETPMRMTDGGGSGAGPSWRMSLPHVCVATLTSFLFGYHSGVVNEPLEVISADLGFAGNTLAEGLVVSICLGGAFVGCLFSGSIADGIGRRRAFQLSALPMIIGAAISALSNSLEGMLLGRFLVGTGMGLGPPVASLYITEVSPSTVRGTYGSFVQIATCLGIIVSLLIGTPVKDIDRWWRVCFWVAVIPATLQALGMEFCAESPQWLYKCGKISEAEMQFEKLLGPLHVKSAMAELSRYERVDDGESVKYSELFYGRHFNVVFIGTTLFALQQLSGINSVFYFSSTVFRSVGVPSNLANICMGISNLSGSIVAMLLMDKLGRKVLLSGSFLGMAFAMGLQAVGANRQYLGSACVYLSVGGILLFVLSFSLGAGPVPGLLLPEIFPNKIRAKAMALCMSVHWIVNFFVSLMFLRLLEQLGPQLLYTIFSSVCVVASIFVRRHVLETKGKTLQEIEVSLLQPQ

SEQ ID NO: 17669 - protein, 458 aa, Zea mays subsp. mays
  misc_feature (1)..(458): Ceres Seq. ID no. 12359677
MRMTDGGGSGAGPSWRMSLPHVCVATLTSFLFGYHSGVVNEPLEVISADLGFAGNTLAEGLVVSICLGGAFVGCLFSGSIADGIGRRRAFQLSALPMIIGAAISALSNSLEGMLLGRFLVGTGMGLGPPVASLYITEVSPSTVRGTYGSFVQIATCLGIIVSLLIGTPVKDIDRWWRVCFWVAVIPATLQALGMEFCAESPQWLYKCGKISEAEMQFEKLLGPLHVKSAMAELSRYERVDDGESVKYSELFYGRHFNVVFIGTTLFALQQLSGINSVFYFSSTVFRSVGVPSNLANICMGISNLSGSIVAMLLMDKLGRKVLLSGSFLGMAFAMGLQAVGANRQYLGSACVYLSVGGILLFVLSFSLGAGPVPGLLLPEIFPNKIRAKAMALCMSVHWIVNFFVSLMFLRLLEQLGPQLLYTIFSSVCVVASIFVRRHVLETKGKTLQEIEVSLLQPQ

SEQ ID NO: 17670 - DNA, 1370 bp, Zea mays subsp. mays
  misc_feature (1)..(1370): Ceres Seq. ID no. 12359684
gagcgagcccccgcacgtcgccacttcaccgcccccacccaaaatcgtctcgatggaaccgctgcggcgcgtgctgcgcctccgactcggacggcctctcgctataaaccccgcccactgaatacggccgttccatttttgactctattccccgcttcccgattcaagtcagcggtttttagggttcgagatctcggcatcgtgtcgcggaagccatggcgacaagcatgcttagtaccgtgaaggtgagcaatgtatcactgaaagcagcacaacgtgatataaaggaattcttttccttttctggtgacattgtgcatgttgaaatgcagagtttcgatgagctttctcaagttgcctacattacttttaaagacaaacaaggagcagagacggcaatgcttctcacgggggccaccatagttgatatggctgtaatcgtcacaccagcaaatgattatgagctaccatcttctgttttagctgctcttgagcccaaagacacaaaaccttctgcccttcaaaaggccgaggacattgttgggaccatgctggcaaagggatttatcctcggtagggatgcactggacaaagcgaaagctttggatgagaagcatcagctgacgtcgactgccacagctagagtatcttccttcgacaagagaatcggtctaagtgagaagatcagtgttggcacttcagttgtaaacgataaagtgaaggaaatggatcagaaataccaagtctctgagaagacaaagtcagcactggcagctgctgaacatagtgtctcgactgctggatctgctatcatgaagaacaggtatgtgctaaccggagctgcatgggtaactggtgctttcagcaaggtcaccagtgcagccaacgaggccggtgcaaaggctaaggaaaaaatagcagtcgagcaggagcacaagaatgctgagggtggacctgcacaagcgaacatctcagagacccatgaagcgcacaggggtttggacggcggattctcaaggctacatgactctgaaacccctgaagatatccccatctctactgcgagtgtcccagctgttacggatgaggagcccagcaaggcttctccaccagctggtgttcctgaaaagccagaagctgcgcacgaattggtactataattgatgcggttttgcttcatacatgcatgtaaatagacatgaaatgggatagccctggaactcattctgtggtcttgtggttggcatcttcagattgaaaacctctttgaaggttgaaagttattgggatctaaaggagtttgcaatttgtacctggtctttttgatcaattagtaatcagtattacccggcagtggggaaatgaacttc

SEQ ID NO: 17671 - protein, 314 aa, Zea mays subsp. mays
  misc_feature (1)..(314): Ceres Seq. ID no. 12359685
MATSMLSTVKVSNVSLKAAQRDIKEFFSFSGDIVHVEMQSFDELSQVAYITFKDKQGAETAMLLTGATIVDMAVIVTPANDYELPSSVLAALEPKDTKPSALQKAEDIVGTMLAKGFILGRDALDKAKALDEKHQLTSTATARVSSFDKRIGLSEKISVGTSVVNDKVKEMDQKYQVSEKTKSALAAAEHSVSTAGSAIMKNRYVLTGAAWVTGAFSKVTSAANEAGAKAKEKIAVEQEHKNAEGGPAQANISETHEAHRGLDGGFSRLHDSETPEDIPISTASVPAVTDEEPSKASPPAGVPEKPEAAHELVL

SEQ ID NO: 17672 - protein, 310 aa, Zea mays subsp. mays
  misc_feature (1)..(310): Ceres Seq. ID no. 12359686
MLSTVKVSNVSLKAAQRDIKEFFSFSGDIVHVEMQSFDELSQVAYITFKDKQGAETAMLLTGATIVDMAVIVTPANDYELPSSVLAALEPKDTKPSALQKAEDIVGTMLAKGFILGRDALDKAKALDEKHQLTSTATARVSSFDKRIGLSEKISVGTSVVNDKVKEMDQKYQVSEKTKSALAAAEHSVSTAGSAIMKNRYVLTGAAWVTGAFSKVTSAANEAGAKAKEKIAVEQEHKNAEGGPAQANISETHEAHRGLDGGFSRLHDSETPEDIPISTASVPAVTDEEPSKASPPAGVPEKPEAAHELVL

SEQ ID NO: 17673 - protein, 277 aa, Zea mays subsp. mays
  misc_feature (1)..(277): Ceres Seq. ID no. 12359687
MQSFDELSQVAYITFKDKQGAETAMLLTGATIVDMAVIVTPANDYELPSSVLAALEPKDTKPSALQKAEDIVGTMLAKGFILGRDALDKAKALDEKHQLTSTATARVSSFDKRIGLSEKISVGTSVVNDKVKEMDQKYQVSEKTKSALAAAEHSVSTAGSAIMKNRYVLTGAAWVTGAFSKVTSAANEAGAKAKEKIAVEQEHKNAEGGPAQANISETHEAHRGLDGGFSRLHDSETPEDIPISTASVPAVTDEEPSKASPPAGVPEKPEAAHELVL

SEQ ID NO: 17674 - DNA, 1137 bp, Zea mays subsp. mays
  misc_feature (1)..(1137): Ceres Seq. ID no. 12359692
acccagcaccgcagagctctcatctcctctctctctctctctctctctctctctcgcgctcgctttgcttcctcgtcgaggtccagttcctgcattgatggcgaccgaggtggctgagactcccgcgccgttggcggaggcggtccccgagacccccgcggaggcaccggcggcgcccgccgccgaggcgaattctaccaaggccaagaaggcctctgcgcccaagaagcgtgccaacccgacccacccgccgtacgccgagatgatctcggaggctgtcacgtcgctcaaggagcggacggggtccagccagtacgcgatcgccaagttcgtcgaggacaagcacaaggacaagctcccgcccaacttccgcaagctcctgctcggccagctcaagaagctcgtcgccgccggcaagctcaccaaggtgaagaactcctacaagctgcccgcacgcgccccggccgccgccaagccgaagcccaagtccaagaccgctgtgaagaagcccaaggccggggcgaagaagcccaaggccgccaccaagcccaagcccaaggccaaggccaagtcccccgctaaggcgaagcccgctgcaaagcccaaggcagccgcgaagccgaaacccgcagcagccaagcccaaggcggccgccaagccgaaggccaagccagctgccaaggctaagccgaaggctgtcgctgccaagccgaagccagctgccaagaaggccggccgccctgccaaggccgccaagacgtcagccaaggacacgcccgggaagaaagcggcgcccgccaagaagcccgctgctgcggccaagaaggcccctgccaagaaggccgccccagccaagaaggctcccaccccgtcgcggaaggtgccgtcgcgtaaggcgaagaagtagagcggtggtcttggcaggaatctagggtttcatgctccttcgattttagatgtttactcgtttttgctctagttgtgggtggtgtgcggggtgggttactaggttgtaaatttgatgccggaggctggggtacacatgggcattctgtaccagcggtggaagggcggaggcgccggcgacgatgacgaaccagtgtgtgttattattagaagacgaagttgtatttctgc

SEQ ID NO: 17675 - protein, 301 aa, Zea mays subsp. mays
  misc_feature (1)..(301): Ceres Seq. ID no. 12359693
PSTAELSSPLSLSLSLSLALALLPRRGPVPALMATEVAETPAPLAEAVPETPAEAPAAPAAEANSTKAKKASAPKKRANPTHPPYAEMISEAVTSLKERTGSSQYAIAKFVEDKHKDKLPPNFRKLLLGQLKKLVAAGKLTKVKNSYKLPARAPAAAKPKPKSKTAVKKPKAGAKKPKAATKPKPKAKAKSPAKAKPAAKPKAAAKPKPAAAKPKAAAKPKAKPAAKAKPKAVAAKPKPAAKKAGRPAKAAKTSAKDTPGKKAAPAKKPAAAAKKAPAKKAAPAKKAPTPSRKVPSRKAKK

SEQ ID NO: 17676 - protein, 269 aa, Zea mays subsp. mays
  misc_feature (1)..(269): Ceres Seq. ID no. 12359694
MATEVAETPAPLAEAVPETPAEAPAAPAAEANSTKAKKASAPKKRANPTHPPYAEMISEAVTSLKERTGSSQYAIAKFVEDKHKDKLPPNFRKLLLGQLKKLVAAGKLTKVKNSYKLPARAPAAAKPKPKSKTAVKKPKAGAKKPKAATKPKPKAKAKSPAKAKPAAKPKAAAKPKPAAAKPKAAAKPKAKPAAKAKPKAVAAKPKPAAKKAGRPAKAAKTSAKDTPGKKAAPAKKPAAAAKKAPAKKAAPAKKAPTPSRKVPSRKAKK

SEQ ID NO: 17677 - protein, 214 aa, Zea mays subsp. mays
  misc_feature (1)..(214): Ceres Seq. ID no. 12359695
MISEAVTSLKERTGSSQYAIAKFVEDKHKDKLPPNFRKLLLGQLKKLVAAGKLTKVKNSYKLPARAPAAAKPKPKSKTAVKKPKAGAKKPKAATKPKPKAKAKSPAKAKPAAKPKAAAKPKPAAAKPKAAAKPKAKPAAKAKPKAVAAKPKPAAKKAGRPAKAAKTSAKDTPGKKAAPAKKPAAAAKKAPAKKAAPAKKAPTPSRKVPSRKAKK

SEQ ID NO: 17678 - DNA, 1435 bp, Zea mays subsp. mays
  misc_feature (1)..(1435): Ceres Seq. ID no. 12359747
ctttctatccctccactccctcttatctgctgcgccatcctccccggcctccaccatggccacagccgccgcggccaccgcctcctcctccctcctcgcgccggcggccagcagcacggcgccggcctcgtcaaacgcgctgctgttcccctcctccgtgccgtcgctgcgtgcgtacccgcggctcctcctcgcgttccgccgccccgccgcggccgccgtcgccgacccgcagggggccgtgctcgaagaggaggcggaggtcgaccagcagggccagtacgacgacgacgacgggtatgagggcgggcgcggccccgcgttcacggcccccacgcgcccgcgcaccggcaaggccgcgctactgcttaagcgcgaccgcacgaggtcgaagaggttcctcgagatacagaagctgcgggagagcaagaaggactacgacgtgcccaccgccatctcgttgatgaagcagatgtccagtgccaagtttgttgagtcagcggaggcgcacttccgcatgaacctcgaccccaagtacaatgaccagcagctccgggccacggtgaatttgcccaagggaacaggccagtcggtgaagattgcggttctcacacaaggtgagaagatagatgaagctagagctgcaggagctgatatcgtaggtggagaagatttgattgaacaaataaaaggaggatttatggagtttgacaaattgattgcatcacctgatatgatgcctaaggttgcgggcttaggtaagattctaggaccaagaggactgatgcctaaccccaaagctggcactgtttcttcaaatattactcaggctatagaagagttcaagaaagggaaggttgaatacagagttgataaatcaggaattgtccatattccctttggcaaggttgactttccagaggaagatctcattgcaaacttcatgtctgttgttcgttctgttgagaggaacaagccatctggtgctaaggggatatactggaaaacggcgtacttgtgctcatccatgggaccttctatcaagctaaacataaaagaaatgcttgactatggtttggaatcatctgactagatgtgaccacaggcaccagttaagtcagctggcatcgttatcaccttcacagattaactatttgccccttgcgacaaatgagcagaaacatggttggtgtatggcaagcaggtgcttaggtacagttttctcagtttttatggcacatcatcagagcagctaaagtcacccagattgacaaagagatggtttgttggtcatgtatttatgagaaaattatgcacggtttcatagatgtctgtctctgagacgtttgttgtaatgtttcatattttgtcaatagtcatccttgagcttaagccaacaatttgttttcacctgtcattaatttaattacctttc

SEQ ID NO: 17679 - protein, 363 aa, Zea mays subsp. mays
  misc_feature (1)..(363): Ceres Seq. ID no. 12359748
FLSLHSLLSAAPSSPASTMATAAAATASSSLLAPAASSTAPASSNALLFPSSVPSLRAYPRLLLAFRRPAAAAVADPQGAVLEEEAEVDQQGQYDDDDGYEGGRGPAFTAPTRPRTGKAALLLKRDRTRSKRFLEIQKLRESKKDYDVPTAISLMKQMSSAKFVESAEAHFRMNLDPKYNDQQLRATVNLPKGTGQSVKIAVLTQGEKIDEARAAGADIVGGEDLIEQIKGGFMEFDKLIASPDMMPKVAGLGKILGPRGLMPNPKAGTVSSNITQAIEEFKKGKVEYRVDKSGIVHIPFGKVDFPEEDLIANFMSVVRSVERNKPSGAKGIYWKTAYLCSSMGPSIKLNIKEMLDYGLESSD

SEQ ID NO: 17680 - protein, 345 aa, Zea mays subsp. mays
  misc_feature (1)..(345): Ceres Seq. ID no. 12359749
MATAAAATASSSLLAPAASSTAPASSNALLFPSSVPSLRAYPRLLLAFRRPAAAAVADPQGAVLEEEAEVDQQGQYDDDDGYEGGRGPAFTAPTRPRTGKAALLLKRDRTRSKRFLEIQKLRESKKDYDVPTAISLMKQMSSAKFVESAEAHFRMNLDPKYNDQQLRATVNLPKGTGQSVKIAVLTQGEKIDEARAAGADIVGGEDLIEQIKGGFMEFDKLIASPDMMPKVAGLGKILGPRGLMPNPKAGTVSSNITQAIEEFKKGKVEYRVDKSGIVHIPFGKVDFPEEDLIANFMSVVRSVERNKPSGAKGIYWKTAYLCSSMGPSIKLNIKEMLDYGLESSD

SEQ ID NO: 17681 - protein, 209 aa, Zea mays subsp. mays
  misc_feature (1)..(209): Ceres Seq. ID no. 12359750
MKQMSSAKFVESAEAHFRMNLDPKYNDQQLRATVNLPKGTGQSVKIAVLTQGEKIDEARAAGADIVGGEDLIEQIKGGFMEFDKLIASPDMMPKVAGLGKILGPRGLMPNPKAGTVSSNITQAIEEFKKGKVEYRVDKSGIVHIPFGKVDFPEEDLIANFMSVVRSVERNKPSGAKGIYWKTAYLCSSMGPSIKLNIKEMLDYGLESSD

SEQ ID NO: 17682 - DNA, 2092 bp, Zea mays subsp. mays
  misc_feature (1)..(2092): Ceres Seq. ID no. 12359759
aaaaaagtgtgggccgagaaacatgtcgtctcacctcgccgcggccgcttccgcccttcctctccctcttcctccgccggcggtcgccgcgccttcccgcgccctccgagctctaatcctgtcccggggcggcgccgccgccgtatgctccagtctgcgccgcggcggcacgccggcatgcctcgtgcgtcgcctgtgctcccaccactccgccgcggcggcggcaacggcgttggaggaggcgcggcgcgggcggaagcagctcggaatgacgcctgcgctctacgactacctcctcgccaacgtccgcgagcaccccattctccgggagcttcgcgaggagaccgcggctatgagagggagccagatgcaggtttctcccgctcaggctcagctgttgtcaatgcttgtgcaaatccttggggcgcgccgttgcattgaagttggtgtgtttactgggtattcatcattagctgttgcactggcccttcctgaatctggtcacttggttgcttgtgagagggatgacagatgcctagaagttgccaagaagtactaccaacgtgctggtgttgcacataagattgatgtgaaacatgctttggctgcggattctctaagatcacttcttgattgcggcgaagcttccagctatgacttcgcatttgttgatgctgacaagagaatgtatgaggaatattatgaacttctactgaagctagtaagagttggtggtttaattgtaatggacaatgtcctttggtatggaagggttgccgatctactggttgatgatcaaaagacgatcagtataaggaacttcaataagaaagttttagaggacaagcgtgttgatatcagcatggtgccaattggagatgggatgacaatttgccggaagctagtagatacttgaattcaatatccatgatatcatcagtatatttgctatggttcgcaaaggttacaagaataacaacattgccaagctttgcgaggatcttgggcttgcagacagggccacaggtttaattgactatatgattggaaatgggcagcatcccgaagtttttcatttggtacaaaattttaatttggaggacaagtatcctccattttctcttctgaagggatacattcagaaggccaagcagacttttgtggagatgtttaaaaagagtcaaacacacgagtccttgaactgggctataccaaaggaactatggattgcacattatctagctgagcagaaactcactgattctaagcaacgcagtgctatcatggcagaaattaaatatttgatgagtggatatgaaaagaaacaaaggtcagaaaatctctcaacatgggcttcacagcatccgccaacggaatctaaaaggaggaacaggaagcgcaaggaggaggagcaggagcaccatgaagcacaatacaaccagcagcagcaggaacagaatgaaaacaagttaattcaaggaaagcggcatcagctgcatcaagaagaaaatatggcgcaagtgacacagcagcagcatatgcaaccgacaacaaggccagctactcttaagcttccgacgcctgctattcctctggttctgaatgcagctcagatccaaaactttgcgcgtccagcttacgccgctgtgcctggagttcacaattaccctgcccagccaggttggcctgcagctcaaggaagtccattcgtaccacagttcatgtcaccgcagtatatgggtctgccatttaatccctttggccttcatcctacttgctatcccagacgcagatagcgtagagagttctggcgttccgcgtccatttgctgagtgaaactgtggtgaagcgtacaagttatatgaaacagaccggtatcggttaactggttttgtgttcgtttgttatgctgtctgatggttccttttcgcgacatggtgatcactttgcattgatttgttgttcagccaagtggtggaatgcttggtgcttgcaatctgaaatgtacgcacggtaacaggaattgtagtacttttcaatcaattacataatggcatttcacaaatacctgaacggtgaacatcaatccctg

SEQ ID NO: 17683 - protein, 304 aa, Zea mays subsp. mays
  misc_feature (1)..(304): Ceres Seq. ID no. 12359760
KKCGPRNMSSHLAAAASALPLPLPPPAVAAPSRALRALILSRGGAAAVCSSLRRGGTPACLVRRLCSHHSAAAAATALEEARRGRKQLGMTPALYDYLLANVREHPILRELREETAAMRGSQMQVSPAQAQLLSMLVQILGARRCIEVGVFTGYSSLAVALALPESGHLVACERDDRCLEVAKKYYQRAGVAHKIDVKHALAADSLRSLLDCGEASSYDFAFVDADKRMYEEYYELLLKLVRVGGLIVMDNVLWYGRVADLLVDDQKTISIRNFNKKVLEDKRVDISMVPIGDGMTICRKLVDT

SEQ ID NO: 17684 - protein, 297 aa, Zea mays subsp. mays
  misc_feature (1)..(297): Ceres Seq. ID no. 12359761
MSSHLAAAASALPLPLPPPAVAAPSRALRALILSRGGAAAVCSSLRRGGTPACLVRRLCSHHSAAAAATALEEARRGRKQLGMTPALYDYLLANVREHPILRELREETAAMRGSQMQVSPAQAQLLSMLVQILGARRCIEVGVFTGYSSLAVALALPESGHLVACERDDRCLEVAKKYYQRAGVAHKIDVKHALAADSLRSLLDCGEASSYDFAFVDADKRMYEEYYELLLKLVRVGGLIVMDNVLWYGRVADLLVDDQKTISIRNFNKKVLEDKRVDISMVPIGDGMTICRKLVDT

SEQ ID NO: 17685 - protein, 281 aa, Zea mays subsp. mays
  misc_feature (1)..(281): Ceres Seq. ID no. 12359762
MVRKGYKNNNIAKLCEDLGLADRATGLIDYMIGNGQHPEVFHLVQNFNLEDKYPPFSLLKGYIQKAKQTFVEMFKKSQTHESLNWAIPKELWIAHYLAEQKLTDSKQRSAIMAEIKYLMSGYEKKQRSENLSTWASQHPPTESKRRNRKRKEEEQEHHEAQYNQQQQEQNENKLIQGKRHQLHQEENMAQVTQQQHMQPTTRPATLKLPTPAIPLVLNAAQIQNFARPAYAAVPGVHNYPAQPGWPAAQGSPFVPQFMSPQYMGLPFNPFGLHPTCYPRRR

SEQ ID NO: 17686 - DNA, 1296 bp, Zea mays subsp. mays
  misc_feature (1)..(1296): Ceres Seq. ID no. 12359791
ctctgcttgcttcgcctcgtctgccctacccctgccctgtccacattttcttccattccggttgctcaacaaacaaaatatatatatcctcgctttccttcccgtcgccgcctgaaaccgctgcgctctcggcttggatagcaagggtctcagtctctcagagggagcaagaagaggatctgagggtgagatggcgatcgaccacgagtcccagttcaaggagctccgcctcaagaaccgaaggatcatgggcggcggcggccctgaccctgagccggaggaggagggcgccacggcggcgtacgcggagcggtggccgcggtggctgcagccgctgctgtccgcgcgcttcttcgcgcagtgcaggacgcacagctactccaaccgcagcggcgaatgcaacatgttctgcctggactgctcggccaccggggggcacgggcgcgggcgcgctctgctcgctgtgcctggcgcagcacgggcaccgcgaccaccacaccatccagatccggcgctcctcctaccacgacgtcatccgggtctcggacatccagcgcttcatggacatcgccggcgtgcagacctacgtcatcaacagcgcccgcgtcgtcttcctcaacgagcggccgcagcagcagaagccgggtggcggcaaggccgcgtcgtcgtcgtcggcctccgccaacctctgcgaggtctgcgcccgcagcctcctcgacaacttccgcttctgctccctcggctgcaaggtcgtcggctgctcccccgacgccgccaaggccaggaactggctcctccgggccgccgacggcgacggttccaccacatcctcctcggccccgcgcaacgccgacaggaagctgagcttcacgccgcccacgccgcagccgaccctgccgacgaagcgccgcaagggcatcccgcaccgcgccccgttcggcagcctcatcgtcgagtactagaatctccttctcccccagccatcgctgtccacgtccgttgcttctgcattggcagttggcactacacgcgcgcggtagagtggaagtactcttcaaacgacggaatggaatcgcacagtgagccagtgaatccagattacaggcaagccaataggttggccaccacttgggtggcctggcccgcctttctttgccacggcacttcggttggtgggtgcttatcgagatggatgccatttgctcgctggcttcgctttccagaaaggggagggaggagaaaggaaggtggatggattggatcggacatcggaggaagaatcaaaaccagcttttc

SEQ ID NO: 17687 - protein, 368 aa, Zea mays subsp. mays
  misc_feature (1)..(368): Ceres Seq. ID no. 12359792
MAIDHESQFKELRLKNRRIMGGGGPDPEPEEEGATAAYAERWPRWLQPLLSARFFAQCRTHSYSNRSGECNMFCLDCSATGGHGRGRALLAVPGAARAPRPPHHPDPALLLPRRHPGLGHPALHGHRRRADLRHQQRPRRLPQRAAAAAEAGWRQGRVVVVGLRQPLRGLRPQPPRQLPLLLPRLQGRRLLPRRRQGQELAPPGRRRRRFHHILLGPAQRRQEAELHAAHAAADPADEAPQGHPAPRPVRQPHRRVLESPSPPAIAVHVRCFCIGSWHYTRAVEWKYSSNDGMESHSEPVNPDYRQANRLATTWVAWPAFLCHGTSVGGCLSRWMPFARWLRFPERGGRRKEGGWIGSDIGGRIKTSF

SEQ ID NO: 17688 - protein, 349 aa, Zea mays subsp. mays
  misc_feature (1)..(349): Ceres Seq. ID no. 12359793
MGGGGPDPEPEEEGATAAYAERWPRWLQPLLSARFFAQCRTHSYSNRSGECNMFCLDCSATGGHGRGRALLAVPGAARAPRPPHHPDPALLLPRRHPGLGHPALHGHRRRADLRHQQRPRRLPQRAAAAAEAGWRQGRVVVVGLRQPLRGLRPQPPRQLPLLLPRLQGRRLLPRRRQGQELAPPGRRRRRFHHILLGPAQRRQEAELHAAHAAADPADEAPQGHPAPRPVRQPHRRVLESPSPPAIAVHVRCFCIGSWHYTRAVEWKYSSNDGMESHSEPVNPDYRQANRLATTWVAWPAFLCHGTSVGGCLSRWMPFARWLRFPERGGRRKEGGWIGSDIGGRIKTSF

SEQ ID NO: 17689 - protein, 319 aa, Zea mays subsp. mays
  misc_feature (1)..(319): Ceres Seq. ID no. 12359794
LLASPRLPYPCPVHIFFHSGCSTNKIYISSLSFPSPPETAALSAWIARVSVSQREQEEDLRVRWRSTTSPSSRSSASRTEGSWAAAALTLSRRRRAPRRRTRSGGRGGCSRCCPRASSRSAGRTATPTAAANATCSAWTARPPGGTGAGALCSLCLAQHGHRDHHTIQIRRSSYHDVIRVSDIQRFMDIAGVQTYVINSARVVFLNERPQQQKPGGGKAASSSSASANLCEVCARSLLDNFRFCSLGCKVVGCSPDAAKARNWLLRAADGDGSTTSSSAPRNADRKLSFTPPTPQPTLPTKRRKGIPHRAPFGSLIVEY

SEQ ID NO: 17690 - DNA, 2058 bp, Zea mays subsp. mays
  misc_feature (1)..(2058): Ceres Seq. ID no. 12359829
ttcctcctttcctactcccacactcccccaccctccactagtactagtactagtaccacaaccaccccaccgggaaaaaacccaacaaggggtagggccgccgccgccgccagcgccgccgtgcagatcgcggccggatctacggcgctggggcacgggggtccccggatcgacgacgcctcccccgcgggttcggatggctatgcgaaaagaaaaccctgtgcttaatgcttgtcaagcatccaatggccggatcacgcgagctcaagctgctgcaaatcgccgaagctttggagctttcccttctgttccattgcctgcaaaaaccgaacgaaaacagactgcacaagggaaggcaaaacgaggttcttcatatgacaacaccagtgcaagtgttgcactttcaggcccccagcctaaaaggcgcacagtactcagggatgtgaccaatttgagcaatgctaactctaacaaaagttttgctgctgcaccgaagcttcagacaaagccctctctaaggactggaagaaccgtgagcaaaagcaagccgtgcgcaaaaaagattcctaaaaaaccaccaccagctggtaatggaagtgcattgactaatgttttgaacattgctgaagaaacacaagcggagaagattttggcagagagagtggaacccgttctgttgcttgagaacagggggccactgtcattgcagaatgttgaaaggaacagggacagtgcttgtcatgaggtattctttgaggaaagaaacctcagggataaatgtgaaccttctgtgtcaaagaatggggactcttatgtgttagacattgtagatatcgacaaagataatggcaatcctcaaatgtgtgcttcctacgttgtggagatatactcaaacctaatggcttcagagcttatgagaagaccaagtccaaattacatggagggtttgcaacgggacatcacaaagggcatgagagaaatactcattgattggcttgtggaggtttctgaagaatacaagcttgttccagacacgctgtacctaactgtataccttattgaccggtttctttctcggaactacattgaaagacagagactacaacttgtgggaataacaagcatgcttgttgcctcgaaatatgaagagatatgtgctcctcgagtagaagagttctgtttcataaccgacaatacatacacaaaagcagaggtgctgaaaatggagagccagctgcttaatgacctgggatttaacctttctgttccaacaacaaaaacatttctcaggagattccttagagcggcacaagcatctcgtaaaactccttctatgactttaggatttctggccaattatctcgcggagttgactttgaccgaatatgagttcttgaaatttcttccgtcgttggtggcagcatcggccgtgtttcttgctagatggacgcttgaccaatccgatctcccatggaaccagactctagagcactacacgtcttacaaatgctctgacattcaattgtgtgtctgtgctctacgggaactccagcataacaccagtaactgccctcttaacgccatccgcgagaagtacaggcatcaaaagtttgaatgcgtagcgaacctaacttcaccggagttccctcggtcgttcttcagctgacacgccaatggcaccgattgatgagcaacgttagcagcagccgtagcgcaggttgcgttaacattattgtagcatccccttttaccccccaatgtctgatttggatgtgtttgttatcgagctgctgtgtcccggcctggcctttttcgagtcgcaagtgagatgaagaaggacagagagatggctccttggcttttcttttgtttgtttgacgtaaaaggttcacccggttgtaaacaacactgtgtgtagggctctttgcttgggctgttgttaattaactgtaaggggagatggtccggctggcttgtatgacgacaaacgacgggatgatgtttttgttgacacaattcgttcattggtagcttcggaatggaaattagtttattgcc

SEQ ID NO: 17691 - protein, 554 aa, Zea mays subsp. mays
  misc_feature (1)..(554): Ceres Seq. ID no. 12359830
SSFPTPTLPHPPLVLVLVPQPPHREKTQQGVGPPPPPAPPCRSRPDLRRWGTGVPGSTTPPPRVRMAMRKENPVLNACQASNGRITRAQAAANRRSFGAFPSVPLPAKTERKQTAQGKAKRGSSYDNTSASVALSGPQPKRRTVLRDVTNLSNANSNKSFAAAPKLQTKPSLRTGRTVSKSKPCAKKIPKKPPPAGNGSALTNVLNIAEETQAEKILAERVEPVLLLENRGPLSLQNVERNRDSACHEVFFEERNLRDKCEPSVSKNGDSYVLDIVDIDKDNGNPQMCASYVVEIYSNLMASELMRRPSPNYMEGLQRDITKGMREILIDWLVEVSEEYKLVPDTLYLTVYLIDRFLSRNYIERQRLQLVGITSMLVASKYEEICAPRVEEFCFITDNTYTKAEVLKMESQLLNDLGFNLSVPTTKTFLRRFLRAAQASRKTPSMTLGFLANYLAELTLTEYEFLKFLPSLVAASAVFLARWTLDQSDLPWNQTLEHYTSYKCSDIQLCVCALRELQHNTSNCPLNAIREKYRHQKFECVANLTSPEFPRSFFS

SEQ ID NO: 17692 - protein, 489 aa, Zea mays subsp. mays
  misc_feature (1)..(489): Ceres Seq. ID no. 12359831
MAMRKENPVLNACQASNGRITRAQAAANRRSFGAFPSVPLPAKTERKQTAQGKAKRGSSYDNTSASVALSGPQPKRRTVLRDVTNLSNANSNKSFAAAPKLQTKPSLRTGRTVSKSKPCAKKIPKKPPPAGNGSALTNVLNIAEETQAEKILAERVEPVLLLENRGPLSLQNVERNRDSACHEVFFEERNLRDKCEPSVSKNGDSYVLDIVDIDKDNGNPQMCASYVVEIYSNLMASELMRRPSPNYMEGLQRDITKGMREILIDWLVEVSEEYKLVPDTLYLTVYLIDRFLSRNYIERQRLQLVGITSMLVASKYEEICAPRVEEFCFITDNTYTKAEVLKMESQLLNDLGFNLSVPTTKTFLRRFLRAAQASRKTPSMTLGFLANYLAELTLTEYEFLKFLPSLVAASAVFLARWTLDQSDLPWNQTLEHYTSYKCSDIQLCVCALRELQHNTSNCPLNAIREKYRHQKFECVANLTSPEFPRSFFS

SEQ ID NO: 17693 - protein, 487 aa, Zea mays subsp. mays
  misc_feature (1)..(487): Ceres Seq. ID no. 12359832
MRKENPVLNACQASNGRITRAQAAANRRSFGAFPSVPLPAKTERKQTAQGKAKRGSSYDNTSASVALSGPQPKRRTVLRDVTNLSNANSNKSFAAAPKLQTKPSLRTGRTVSKSKPCAKKIPKKPPPAGNGSALTNVLNIAEETQAEKILAERVEPVLLLENRGPLSLQNVERNRDSACHEVFFEERNLRDKCEPSVSKNGDSYVLDIVDIDKDNGNPQMCASYVVEIYSNLMASELMRRPSPNYMEGLQRDITKGMREILIDWLVEVSEEYKLVPDTLYLTVYLIDRFLSRNYIERQRLQLVGITSMLVASKYEEICAPRVEEFCFITDNTYTKAEVLKMESQLLNDLGFNLSVPTTKTFLRRFLRAAQASRKTPSMTLGFLANYLAELTLTEYEFLKFLPSLVAASAVFLARWTLDQSDLPWNQTLEHYTSYKCSDIQLCVCALRELQHNTSNCPLNAIREKYRHQKFECVANLTSPEFPRSFFS

SEQ ID NO: 17694 - DNA, 991 bp, Zea mays subsp. mays
  misc_feature (1)..(991): Ceres Seq. ID no. 12359848
gtccgcccctgcggtgcgggtgctttctccagcgacagcgacagcgagaggggaggggaaccagcaagctcctcctcctctacccctcgcctcgtccgcgccagatctatctgtcccttcctcttgtagttgcaggcagacgcgccatgcggatgcgggtgcttcccgcgtcctggtcatcttcctccgccaagcatagcagcggcagctccgagtcgcaggagcacccttcttcctcctctgctacggccgcggtgtacctcaacatctacgacatctcccccctcaaccactacctctactggttcggactcggcatcttccactccgggatccaagtccatggcatggagtatggctttggagctcatgaataccccaccagcggagtcttccaagtagaacccaaaagctgccccgggtttatcttcaggcgctctgtgtgtgtgggtgtaactcacatgtcccgttcccaagtccgcacttccatagaggatctcgccgaggattatcatggggacacttatcatttgattctcaagaactgcaatcatttcacagcagatgtctgcgagcgtttgaccgggaagccagtacctggatgggtgaatcgactcgccagattaggttccttcttcaattgtgtattgcctgacagcatcaaggtttcagcagtcagagatgtaaatgcacatccagatttttctgatgatggcttggggtccaatgcctcgatccttgagggaagtgatgacgatgatttagaccaactcctaagaacacctaacagcgacactgtgtcttcaagggacaagacattaactcctggcagggatagtctctaattgttctcctttgatagcaaaatagaggcaagtgctttgatgttcacgtctcatggtggtatggggttggcctgatcatatcatcatctgctgtcaaaatttggtggcgcgctagtctggggtgatgaangattgtttgatattgt

SEQ ID NO: 17695 - protein, 280 aa, Zea mays subsp. mays
  misc_feature (1)..(280): Ceres Seq. ID no. 12359849
PPLRCGCFLQRQRQREGRGTSKLLLLYPSPRPRQIYLSLPLVVAGRRAMRMRVLPASWSSSSAKHSSGSSESQEHPSSSSATAAVYLNIYDISPLNHYLYWFGLGIFHSGIQVHGMEYGFGAHEYPTSGVFQVEPKSCPGFIFRRSVCVGVTHMSRSQVRTSIEDLAEDYHGDTYHLILKNCNHFTADVCERLTGKPVPGWVNRLARLGSFFNCVLPDSIKVSAVRDVNAHPDFSDDGLGSNASILEGSDDDDLDQLLRTPNSDTVSSRDKTLTPGRDSL

SEQ ID NO: 17696 - protein, 232 aa, Zea mays subsp. mays
  misc_feature (1)..(232): Ceres Seq. ID no. 12359850
MRMRVLPASWSSSSAKHSSGSSESQEHPSSSSATAAVYLNIYDISPLNHYLYWFGLGIFHSGIQVHGMEYGFGAHEYPTSGVFQVEPKSCPGFIFRRSVCVGVTHMSRSQVRTSIEDLAEDYHGDTYHLILKNCNHFTADVCERLTGKPVPGWVNRLARLGSFFNCVLPDSIKVSAVRDVNAHPDFSDDGLGSNASILEGSDDDDLDQLLRTPNSDTVSSRDKTLTPGRDSL

SEQ ID NO: 17697 - protein, 230 aa, Zea mays subsp. mays
  misc_feature (1)..(230): Ceres Seq. ID no. 12359851
MRVLPASWSSSSAKHSSGSSESQEHPSSSSATAAVYLNIYDISPLNHYLYWFGLGIFHSGIQVHGMEYGFGAHEYPTSGVFQVEPKSCPGFIFRRSVCVGVTHMSRSQVRTSIEDLAEDYHGDTYHLILKNCNHFTADVCERLTGKPVPGWVNRLARLGSFFNCVLPDSIKVSAVRDVNAHPDFSDDGLGSNASILEGSDDDDLDQLLRTPNSDTVSSRDKTLTPGRDSL

SEQ ID NO: 17698 - DNA, 1522 bp, Zea mays subsp. mays
  misc_feature (1)..(1522): Ceres Seq. ID no. 12359886
ataaccgaatagaaatagctttggtgcaaacaagcaagcagcagagcagatcaagtaaaggtagcaatttgagtagtgtgcaagctaagatggggcaacaagaaaaggaagtgatcccgctgatgaccccgtacaagatgggacagctggagctctcccaccgcgtggtgctggcgccgatgacgcggtgccgcgccatcggggacgtgccgcagccgcacgccgccgtgtactactcgcagcgcgccagcaggggcggcgtgctcatcaccgagggcacgggggtgtccgccaccgcgcagggcttcccggggtcccccggcatctggacgcaggagcaggtggcggcgtggaagccccatcgtcgacgccgtccaccgcaagggcgcgctcttcttctgccagatcgcgcacgtcggaagggcatccaccaacgatttccagccggacggccaggcgccggtctcgagcacggacgcgcagctcccacccgacgccgagtccggcacggtgttctccaggccacgccggctgcgggccgacgagatcccggggatcgtcgacgacttcaggcgcgccgcgcgcaacgcgatcgaggccgggttcgacggcgtggagatccacggagcgcacgggttcctcctggagcagttcatgaaggacggcgccaacgaccgcgccgacgagtacggcggcagcgtcgagaaccggtgccgcttcgtggtcgaggtcgtggacgctctggtccgtgaagtcggcgcgagccgggttggcatcaggctctccccgttcgcggactacttggactgtgcggattccaaccccttggcgctaggtcactacatggtggaacagctcaacaggcacgaggggtttctgtactgccacatggtggagcctcgaatggccatcgtcgacgaccgcaggcagattccgcatcgactcctgccgttcaaggcggcgttcaatggcaccttcatcgcccgcgggcgggtacgacagggaggaagggaacaaggtggtcgccgaaggctacgcggaccttgtcgcatacggaaggctgttcttggccaacccagacctgcctaaaaggttcgaggtagacgagatcctgaacaagtatgatcgttccaccttttatacacaagaccctgttgttggctatacagattaccctttccttagggaggacagcgaagacttagctgctcaagcttaatggcgtggatgatcgatgtaatcacggttactgcacgatcgagatcgatactacatccatttgaatatatatatgtctaagatgcattgtttttgttttaagttagttttttttatatttgaccaaatttatgtaaaagatatatgtgctaaactagttgagtataccggtgtgttgcaacgacaaacgctagtctgtatcaaatgattttattaaactttactatagccagacttacaacaccatatcttgtacatgtgtgtatttgttcaagtaaaaatatataatggtggacttggaggc

SEQ ID NO: 17699 - protein, 249 aa, Zea mays subsp. mays
  misc_feature (1)..(249): Ceres Seq. ID no. 12359887
NRIEIALVQTSKQQSRSSKGSNLSSVQAKMGQQEKEVIPLMTPYKMGQLELSHRVVLAPMTRCRAIGDVPQPHAAVYYSQRASRGGVLITEGTGVSATAQGFPGSPGIWTQEQVAAWKPHRRRRPPQGRALLLPDRARRKGIHQRFPAGRPGAGLEHGRAAPTRRRVRHGVLQATPAAGRRDPGDRRRLQARRAQRDRGRVRRRGDPRSARVPPGAVHEGRRQRPRRRVRRQRREPVPLRGRGRGRSGP

SEQ ID NO: 17700 - protein, 220 aa, Zea mays subsp. mays
  misc_feature (1)..(220): Ceres Seq. ID no. 12359888
MGQQEKEVIPLMTPYKMGQLELSHRVVLAPMTRCRAIGDVPQPHAAVYYSQRASRGGVLITEGTGVSATAQGFPGSPGIWTQEQVAAWKPHRRRRPPQGRALLLPDRARRKGIHQRFPAGRPGAGLEHGRAAPTRRRVRHGVLQATPAAGRRDPGDRRRLQARRAQRDRGRVRRRGDPRSARVPPGAVHEGRRQRPRRRVRRQRREPVPLRGRGRGRSGP

SEQ ID NO: 17701 - protein, 209 aa, Zea mays subsp. mays
  misc_feature (1)..(209): Ceres Seq. ID no. 12359889
MTPYKMGQLELSHRVVLAPMTRCRAIGDVPQPHAAVYYSQRASRGGVLITEGTGVSATAQGFPGSPGIWTQEQVAAWKPHRRRRPPQGRALLLPDRARRKGIHQRFPAGRPGAGLEHGRAAPTRRRVRHGVLQATPAAGRRDPGDRRRLQARRAQRDRGRVRRRGDPRSARVPPGAVHEGRRQRPRRRVRRQRREPVPLRGRGRGRSGP

SEQ ID NO: 17702 - DNA, 1724 bp, Zea mays subsp. mays
  misc_feature (1)..(1724): Ceres Seq. ID no. 12359928
acgcgtttgcttcttcaagcattgaccccttccgccccgtccgtcatcttccccacctctctccgcactgcaggagcttgcgggcgtggcggcggccgtgaccggcgctggagatcttggacgcgcgcgacatcctggtctccgctctgtgcctctggtctccgaaggcgccgccaccctatttttttttaaaaaaaatcctaagatagtttcttcagtccgacaccgcttctagcttcccctcggcgatctgtgaagctatgaagccacctctcgagaggaacccgactaagaagcgccactcgtggtggtgggacagtcacattagccctaagaactcgaaatggctcgccgaaaatctcgaagaaatggacaagcaagtgaaggaaatgctccagctgatcgaggaggacggcgactccttcgctaagaaagcgcaaatgtattaccagaggcgtccgatgctcgtcacccacgtcgagaacttctaccgtatgtatcgtgctctagccgagcgctatgacaatgtaaccggcgagctgcgcaagaacatccctacaaggctgcagacaaccggatttttaaccagttcagagtacggttctgagctgcagaggtcgccctcaccgtctcctgagccgttacagaggtcgtggacaagggagcagagccctagggccgctggcttcgacttcttcctgagcaataggagcaatgactcgccacctgtctacaggaaggaacccgaggacgcggcatcgcagtcggagtctgacgcgaagtctgcagacggtgaggatgatggcatcgcctacacgctgcaccagagagttcttgagctagaggacgagctcaatgcgacaaaccagaaactacaagatgcaaacgagaagcttgaggttctggaggagaagagcttgaggtgccattgtgattataaagagaatggaaacggtgctcagcgaactacagaagtttcaggcaaagagggggagctggaagccgaaatcgtcaatctccaggaggaagcggactcggcaagaaggcgattcgaagaggcattgtctgaacgagatggagaaatcagcaagctaaagcaagagcttgctggtgcttctgagaagctgcagcgagagaagtacgccaatggcgtgcaggtatctgagctgcagcgatcggttgaacacatcaggtccgaactagagagagtttctgaagagaaactactgtccgagaacaagatcaaggagctggaggcagcaaacgctgaagccggtaagtacggccacgagctcacgcgagctgccgagaagatttccgaggagaagttcgcgctcgaagctgagatcctcacgatgcggcagaacattgaagatctgaaatccaggatcgagagcctcgctcgagagaagtccctgctcaaatcatggtttgaggacttggagcaagttgtggggcgaggaaggggcatcttcgccgattaaccgagtttctatccagaacatcatcggtagctagaatttagcaagttagcaacattttgttttgttttctggtactggtacccataccatcttgcgaaattgagatacgtcagtgtacttcctttttgttggctgaatcttaaacttagacgtgatggatggtggtgatgtactggcaatatatgaaatattatactgaaccgcgctcgacgtcaataataagattcctatggtgcatcc

SEQ ID NO: 17703 - protein, 407 aa, Zea mays subsp. mays
  misc_feature (1)..(407): Ceres Seq. ID no. 12359929
MKPPLERNPTKKRHSWWWDSHISPKNSKWLAENLEEMDKQVKEMLQLIEEDGDSFAKKAQMYYQRRPMLVTHVENFYRMYRALAERYDNVTGELRKNIPTRLQTTGFLTSSEYGSELQRSPSPSPEPLQRSWTREQSPRAAGFDFFLSNRSNDSPPVYRKEPEDAASQSESDAKSADGEDDGIAYTLHQRVLELEDELNATNQKLQDANEKLEVLEEKSLRCHCDYKENGNGAQRTTEVSGKEGELEAEIVNLQEEADSARRRFEEALSERDGEISKLKQELAGASEKLQREKYANGVQVSELQRSVEHIRSELERVSEEKLLSENKIKELEAANAEAGKYGHELTRAAEKISEEKFALEAEILTMRQNIEDLKSRIESLAREKSLLKSWFEDLEQVVGRGRGIFAD

SEQ ID NO: 17704 - protein, 371 aa, Zea mays subsp. mays
  misc_feature (1)..(371): Ceres Seq. ID no. 12359930
MDKQVKEMLQLIEEDGDSFAKKAQMYYQRRPMLVTHVENFYRMYRALAERYDNVTGELRKNIPTRLQTTGFLTSSEYGSELQRSPSPSPEPLQRSWTREQSPRAAGFDFFLSNRSNDSPPVYRKEPEDAASQSESDAKSADGEDDGIAYTLHQRVLELEDELNATNQKLQDANEKLEVLEEKSLRCHCDYKENGNGAQRTTEVSGKEGELEAEIVNLQEEADSARRRFEEALSERDGEISKLKQELAGASEKLQREKYANGVQVSELQRSVEHIRSELERVSEEKLLSENKIKELEAANAEAGKYGHELTRAAEKISEEKFALEAEILTMRQNIEDLKSRIESLAREKSLLKSWFEDLEQVVGRGRGIFAD

SEQ ID NO: 17705 - protein, 364 aa, Zea mays subsp. mays
  misc_feature (1)..(364): Ceres Seq. ID no. 12359931
MLQLIEEDGDSFAKKAQMYYQRRPMLVTHVENFYRMYRALAERYDNVTGELRKNIPTRLQTTGFLTSSEYGSELQRSPSPSPEPLQRSWTREQSPRAAGFDFFLSNRSNDSPPVYRKEPEDAASQSESDAKSADGEDDGIAYTLHQRVLELEDELNATNQKLQDANEKLEVLEEKSLRCHCDYKENGNGAQRTTEVSGKEGELEAEIVNLQEEADSARRRFEEALSERDGEISKLKQELAGASEKLQREKYANGVQVSELQRSVEHIRSELERVSEEKLLSENKIKELEAANAEAGKYGHELTRAAEKISEEKFALEAEILTMRQNIEDLKSRIESLAREKSLLKSWFEDLEQVVGRGRGIFAD

SEQ ID NO: 17706 - DNA, 1214 bp, Zea mays subsp. mays
  misc_feature (1)..(1214): Ceres Seq. ID no. 12359952
agcggcggcttggccacctctgagcctcaagccctcaacctccctcttcggcgcgtaacgtcagtcctcaggtattggcagcataaagtgttagatttgtccttgattgaggtaccccttcaaaggtcaagatgttgtggcgcgcagtacgcagtatggatgtaataatgcattcttcgagtttccttcttccgaaactgtatcaacctgtcaacaaaccagtcaagaactatgctttagttgttctaaaccagcatcttccacgattcatgcctcgactctgggatcatgcaaacttgaagatctgcgctgatggaggagctaatcatatttttgatgagatgtatcagataaccaatgatgaagacaaaaaaagcaccagaaataagtatgttccagaaataattgaaggggacatggattctataagacctgaagtaaaactgttctactctagtcagggatccaaaatttctgataagtcacataaccaggagacaacagatctacacaaatgtatttctcgaatccatcattgtacgcctgatgatgaaaaaccaaatctctgtgtacttgttactggagcactaggtggaaggtttgatcacgaggcggcaaatatcaatgttctgtatctgttttcggacatgaggattgtcctcctatcagacgattgcttgatccgacttcttccgagaacacatcgccatgagctttatattgagtcgtctgttgaaggaccccattgtgggcttttccctgttggagcaccatcaacaagcacaacaactactggcctgaaatggaatctaagtgaatcaaagatgagatttgggagcatgataagcacatccaacattgtgcagtcggagaaagtaactgtagaatctgatgcagatctcttgtggacaatttctctgcgaaatctgacataagcagttcctagtttgttatcttttttcttctctttcctgtcaagtggcaaccaagctcttgtacagccacttttgtgtttatgagttgtgtgtctggtaaataaataccatctgatgacaaatcgatgaggtctcatcattagacaggatgtctaccacgatcttgaactgctgatgaattatgtgaataacacgagcaggcatgatggttgtatcctctctagttgtataactgtattgttgtacttgcaacggggtttcttgtataaaattgttctc

SEQ ID NO: 17707 - protein, 267 aa, Zea mays subsp. mays
  misc_feature (1)..(267): Ceres Seq. ID no. 12359953
MLWRAVRSMDVIMHSSSFLLPKLYQPVNKPVKNYALVVLNQHLPRFMPRLWDHANLKICADGGANHIFDEMYQITNDEDKKSTRNKYVPEIIEGDMDSIRPEVKLFYSSQGSKISDKSHNQETTDLHKCISRIHHCTPDDEKPNLCVLVTGALGGRFDHEAANINVLYLFSDMRIVLLSDDCLIRLLPRTHRHELYIESSVEGPHCGLFPVGAPSTSTTTTGLKWNLSESKMRFGSMISTSNIVQSEKVTVESDADLLWTISLRNLT

SEQ ID NO: 17708 - protein, 259 aa, Zea mays subsp. mays
  misc_feature (1)..(259): Ceres Seq. ID no. 12359954
MDVIMHSSSFLLPKLYQPVNKPVKNYALVVLNQHLPRFMPRLWDHANLKICADGGANHIFDEMYQITNDEDKKSTRNKYVPEIIEGDMDSIRPEVKLFYSSQGSKISDKSHNQETTDLHKCISRIHHCTPDDEKPNLCVLVTGALGGRFDHEAANINVLYLFSDMRIVLLSDDCLIRLLPRTHRHELYIESSVEGPHCGLFPVGAPSTSTTTTGLKWNLSESKMRFGSMISTSNIVQSEKVTVESDADLLWTISLRNLT

SEQ ID NO: 17709 - protein, 255 aa, Zea mays subsp. mays
  misc_feature (1)..(255): Ceres Seq. ID no. 12359955
MHSSSFLLPKLYQPVNKPVKNYALVVLNQHLPRFMPRLWDHANLKICADGGANHIFDEMYQITNDEDKKSTRNKYVPEIIEGDMDSIRPEVKLFYSSQGSKISDKSHNQETTDLHKCISRIHHCTPDDEKPNLCVLVTGALGGRFDHEAANINVLYLFSDMRIVLLSDDCLIRLLPRTHRHELYIESSVEGPHCGLFPVGAPSTSTTTTGLKWNLSESKMRFGSMISTSNIVQSEKVTVESDADLLWTISLRNLT

SEQ ID NO: 17710 - DNA, 818 bp, Zea mays subsp. mays
  misc_feature (1)..(818): Ceres Seq. ID no. 12359956
ctgaccacaaatccgatccgtagccgcggtgcctcgctttcgagtacgagcggctactcccagcggctgcggcggcggcggcgatgagcgcggtgaacatcaccaacgtggcggtgctggataaccccaccgccttcctcaatcccttccagtttgagatctcctacgagtgcctcgtgcccctcgacgacgatctggagtggaagcttatatatgttggatcagctgaagatgaaaactacgatcaacagcttgagagcgtgcttgttggccctgtcaatgttgggacctaccgttttgtccttcaggctgacccaccggatccctcaaagatccgtgaggaagacataattggtgtgactgtgctgctattgacatgctcttacatgggccaggagttcatgagagtaggctactacgtgaacaatgattatgacgatgaacaattgagagaagagcctccagcaaaggtgctaattgaccgggtgcaaagaaatatcttggccgacaagccccgagtcaccaagttccctatcaacttccatcctgaacccagtacaggcccggggcagcagcagcagcagcaggaaccccagacgacctcgccagaaaaccacacaggcaatggcgaggccaatggtagcaagcctgaggctgaccaatgaacacagttggcttcagatattttgatgcgtgccccttacaggttgtgctgtaatattacaaacgggattagtggttgtgcattgccctgggatcctgaactctgttctgtaacttgagatgcaaatgctgggtacctggatgttttcttaggc

SEQ ID NO: 17711 - protein, 193 aa, Zea mays subsp. mays
  misc_feature (1)..(193): Ceres Seq. ID no. 12359957
MSAVNITNVAVLDNPTAFLNPFQFEISYECLVPLDDDLEWKLIYVGSAEDENYDQQLESVLVGPVNVGTYRFVLQADPPDPSKIREEDIIGVTVLLLTCSYMGQEFMRVGYYVNNDYDDEQLREEPPAKVLIDRVQRNILADKPRVTKFPINFHPEPSTGPGQQQQQQEPQTTSPENHTGNGEANGSKPEADQ

SEQ ID NO: 17712 - DNA, 1393 bp, Zea mays subsp. mays
  misc_feature (1)..(1393): Ceres Seq. ID no. 12359989
aatcctaccaggcaccactcgcatcgtgtgctcagtcagatccccgtcccgcatttcctaaggccagctgctggtgtgcagatggtggctgcacgcccttgcatttcggcctcgccaggaattcttaccgcacgggtagcagtttctaggactgattgcatgctcagttaccactgctacattccccaaaatcagctgctcctggcctctaaggtttaagcgcaatgatgttgttgtaagagcaatatcggaagagtgtggcccgcaggggcttcccattgatctcagaggtaaaagggcattcattgctggagttgctgatgataatggctatggatgggcaattgcgaaggcacttgctgcggctggtgctgaaattcttgtgggtacatgggtgccggcacttaacatatttgagacaagtctgaggcgtggaaagtttgatgaatcacggaagctgccagatggatctcttatggatattgttaaagtctatccacttgatgctgtctacgattcccctgatgatgttcctgaagatgtcaaatcgaacaaaagatatgcaggggcatcaaactggacagtaaaggaagttgttgaatcagtgaggaatgattttggcagcattgacatactagtgcattctcttgctaatggcccagaggtaacgaagcctttgttggaaacctcaagaagaggctatcttgcggcaatttctgcatccagttactcctatgtttcattgcttcagcacttccttcctataatgaatcccggtggtgctagcatctctctaacatacattgcatctgaaagggcgattcctgggtatggtggtgggatgagttctgctaaagcagctcttgagagtgatacacgggtgcttgcattcgaagctgggcgaaaaggcaaaatcagagttaacaccatatcagcaggccctcttgggagccgagctgctaaggcaattggatttattgagaagatgatagagtactcatatgttaatgcaccattgcagaaggagctgttggctgatgaggtggggaacacagctgcattcctggtttcttcattggcttctgccatcaccggctcgactgtttatgttgacaatgggctcaatacaatggggcttgcaattgacagccctaccataacgtcatagatgtggttgtggtagatagacgacctttcctgctgcattgcggtatcatccttgaataaagatcatagttagttattagtatgagaggtaagggcaggaaagggggaaaattatgaactggtcttttgcgctttctttgctggagaggaacattagagcgatttccagaatgatgggatgctattatgtgatttcatatgattcagaagcagtacaataactccc

SEQ ID NO: 17713 - protein, 230 aa, Zea mays subsp. mays
  misc_feature (1)..(230): Ceres Seq. ID no. 12359990
MDIVKVYPLDAVYDSPDDVPEDVKSNKRYAGASNWTVKEVVESVRNDFGSIDILVHSLANGPEVTKPLLETSRRGYLAAISASSYSYVSLLQHFLPIMNPGGASISLTYIASERAIPGYGGGMSSAKAALESDTRVLAFEAGRKGKIRVNTISAGPLGSRAAKAIGFIEKMIEYSYVNAPLQKELLADEVGNTAAFLVSSLASAITGSTVYVDNGLNTMGLAIDSPTITS

SEQ ID NO: 17714 - protein, 133 aa, Zea mays subsp. mays
  misc_feature (1)..(133): Ceres Seq. ID no. 12359991
MNPGGASISLTYIASERAIPGYGGGMSSAKAALESDTRVLAFEAGRKGKIRVNTISAGPLGSRAAKAIGFIEKMIEYSYVNAPLQKELLADEVGNTAAFLVSSLASAITGSTVYVDNGLNTMGLAIDSPTITS

SEQ ID NO: 17715 - DNA, 1212 bp, Zea mays subsp. mays
  misc_feature (1)..(1212): Ceres Seq. ID no. 12359992
agaacttctccctcagtttccctttatgatccagtccgtccccacgtttgatctcggcgtactgttgtgggagacgcttgcggcgacgatttcccccggtttttatttgaatttctcgggcgctgttatgtgcggcggctagatctgcttgtcgctggtgcagtaggagtttctcgctcggttccgatcctgagaacccgaccgcgcgggtatctgtattccttgatcaacatgtcgcgggaggagaatgtttatatggccaagctggctgagcaagcagaacggtacgaggaaatggttgaatacatggagaaggtggctaagaccacagatgtgcaagagctcactgttgaggagcgtaaccttctatctgttgccttcaagaatgtgattgcggccccccgtgcctcatggcgcattatctcctccatcgagcagaaagaggagtcccgtaagaatgaggaacatgttgcacagatcaaggaataccgtggcaagattgaggctgaattgagcaacatttgtgatggtatcctaaagctgcttgacacgcaccttgtgccttcctccactgccacagagtcgaaggtgttttacctcaagatgaagggtgattatcacaggtaccttgctgagtttaagactggtgctgagaggaaggaatctgcagagagcacaatggtagcttataaggcagctcaggatattgcattggctgaactgccacctattcatcccataaggcttggacttgcacttaacttctcagttttctattacgagattcagaactctccagacaaagcttgcaatcttgccaaggaggcgtttgatgaagctatttctcagttggacatgcttggtgaggattcctacaaagatagcaacttgattatgcagctcctgagggacaacttgaccctctggacggaggacggcattgaggagggcttagaatcctcgaagggcgatgctggtgagggtcagtagcctggtaaacttagattgatggttcgacgtgtttctcaagcacatcgtgttggacgcccagtgctgacagaaggcttttgctgctccatgcattccaagcttctgccctttcgttcgcaccctcttcatgttgttggctggtagtggtcagatttagtcccattggtttagttggccctgggtccatctgaactgatgtattgttactgctaggaagtcaag

SEQ ID NO: 17716 - protein, 252 aa, Zea mays subsp. mays
  misc_feature (1)..(252): Ceres Seq. ID no. 12359993
MSREENVYMAKLAEQAERYEEMVEYMEKVAKTTDVQELTVEERNLLSVAFKNVIAAPRASWRIISSIEQKEESRKNEEHVAQIKEYRGKIEAELSNICDGILKLLDTHLVPSSTATESKVFYLKMKGDYHRYLAEFKTGAERKESAESTMVAYKAAQDIALAELPPIHPIRLGLALNFSVFYYEIQNSPDKACNLAKEAFDEAISQLDMLGEDSYKDSNLIMQLLRDNLTLWTEDGIEEGLESSKGDAGEGQ

SEQ ID NO: 17717 - protein, 244 aa, Zea mays subsp. mays
  misc_feature (1)..(244): Ceres Seq. ID no. 12359994
MAKLAEQAERYEEMVEYMEKVAKTTDVQELTVEERNLLSVAFKNVIAAPRASWRIISSIEQKEESRKNEEHVAQIKEYRGKIEAELSNICDGILKLLDTHLVPSSTATESKVFYLKMKGDYHRYLAEFKTGAERKESAESTMVAYKAAQDIALAELPPIHPIRLGLALNFSVFYYEIQNSPDKACNLAKEAFDEAISQLDMLGEDSYKDSNLIMQLLRDNLTLWTEDGIEEGLESSKGDAGEGQ

SEQ ID NO: 17718 - protein, 231 aa, Zea mays subsp. mays
  misc_feature (1)..(231): Ceres Seq. ID no. 12359995
MVEYMEKVAKTTDVQELTVEERNLLSVAFKNVIAAPRASWRIISSIEQKEESRKNEEHVAQIKEYRGKIEAELSNICDGILKLLDTHLVPSSTATESKVFYLKMKGDYHRYLAEFKTGAERKESAESTMVAYKAAQDIALAELPPIHPIRLGLALNFSVFYYEIQNSPDKACNLAKEAFDEAISQLDMLGEDSYKDSNLIMQLLRDNLTLWTEDGIEEGLESSKGDAGEGQ

SEQ ID NO: 17719 - DNA, 1317 bp, Zea mays subsp. mays
  misc_feature (1)..(1317): Ceres Seq. ID no. 12360003
attcagcccatcgctagctctcgcgtctcgcctgtctcctctagtagcacaagaccacgagggattaagcgatgacaacctctaagctcgctgtcctcactctgtttgccctgctcggctccgtgtcatgccagtccggtggctactacttctacccaaccccgcagcaaccatctccaacacccagccctccttctagtccgcaactcatggtcggatactacaaggacaagtgtgccgcttacgtggatgttgaagctattgtcaagaagcacgtcaaggccaccgatgctggcatgcaggccgggcttgtccgtctcttattccacgactgcttcgtccgtggatgcgacggctccgtcctcctcgacacgttcagcaacgacaccagcctgaccccagagaagttcggcgtgcccaacttccccagcctgcggggcttcgaggtgatcgacgcggccaaggccgagatcgaggcggcgtgccccggcacggtctcgtgcgcggacatcgtcgcgttcgccgcccgcgacgcgtcctacttcctcagcggcggcggcatcagcttcgccatgcccgcggggcgctacgacgggaacgtctccctcgccagcgagaccctccccaacctgccctcgccgttcaccggcttcgaccagctcgtcaaggtgttcgccgacaaagggctcgacgccttcgacatgatcacgctctccggcgcgcacagcatcggccgctcccactgctcctccttcaccagggaccgcctgccgcccagcaacaccaccgacatagatccagcgttcgccgccacgctgcaggctagctgcgcttcgcccaacggcaccgacaacacggtcatgcaggacttcaagacccccgacgtcctggacaaccagtactacaagaacgtgctggcccacaaggttctcttcacgtcggacgccgcgctcaccaccaacttcacgtccaacaacctggtgcgcgcctacgcggacttcgtgccctatctgtggcagcagaagttcgccaaagccatggtgaagatggccggcgtcgagatcaaaaccgccgccaacggagagatcaggaagacatgccgcaaggtcaacagcaggtcctgatcagatggcgtaccggcgggcttccaatttcctaagttttgcctttacatacattcccctgatctcccctaatatctgcctttatgctgtatacattctttgtttcgttttccagctgtatgcctgcttttatgctgtataatttaaatttgattgaatattacatcttttgaaatccaagcaaattttcatc

SEQ ID NO: 17720 - protein, 350 aa, Zea mays subsp. mays
  misc_feature (1)..(350): Ceres Seq. ID no. 12360004
MTTSKLAVLTLFALLGSVSCQSGGYYFYPTPQQPSPTPSPPSSPQLMVGYYKDKCAAYVDVEAIVKKHVKATDAGMQAGLVRLLFHDCFVRGCDGSVLLDTFSNDTSLTPEKFGVPNFPSLRGFEVIDAAKAEIEAACPGTVSCADIVAFAARDASYFLSGGGISFAMPAGRYDGNVSLASETLPNLPSPFTGFDQLVKVFADKGLDAFDMITLSGAHSIGRSHCSSFTRDRLPPSNTTDIDPAFAATLQASCASPNGTDNTVMQDFKTPDVLDNQYYKNVLAHKVLFTSDAALTTNFTSNNLVRAYADFVPYLWQQKFAKAMVKMAGVEIKTAANGEIRKTCRKVNSRS

SEQ ID NO: 17721 - protein, 304 aa, Zea mays subsp. mays
  misc_feature (1)..(304): Ceres Seq. ID no. 12360005
MVGYYKDKCAAYVDVEAIVKKHVKATDAGMQAGLVRLLFHDCFVRGCDGSVLLDTFSNDTSLTPEKFGVPNFPSLRGFEVIDAAKAEIEAACPGTVSCADIVAFAARDASYFLSGGGISFAMPAGRYDGNVSLASETLPNLPSPFTGFDQLVKVFADKGLDAFDMITLSGAHSIGRSHCSSFTRDRLPPSNTTDIDPAFAATLQASCASPNGTDNTVMQDFKTPDVLDNQYYKNVLAHKVLFTSDAALTTNFTSNNLVRAYADFVPYLWQQKFAKAMVKMAGVEIKTAANGEIRKTCRKVNSRS

SEQ ID NO: 17722 - protein, 275 aa, Zea mays subsp. mays
  misc_feature (1)..(275): Ceres Seq. ID no. 12360006
MQAGLVRLLFHDCFVRGCDGSVLLDTFSNDTSLTPEKFGVPNFPSLRGFEVIDAAKAEIEAACPGTVSCADIVAFAARDASYFLSGGGISFAMPAGRYDGNVSLASETLPNLPSPFTGFDQLVKVFADKGLDAFDMITLSGAHSIGRSHCSSFTRDRLPPSNTTDIDPAFAATLQASCASPNGTDNTVMQDFKTPDVLDNQYYKNVLAHKVLFTSDAALTTNFTSNNLVRAYADFVPYLWQQKFAKAMVKMAGVEIKTAANGEIRKTCRKVNSRS

SEQ ID NO: 17723 - DNA, 1122 bp, Zea mays subsp. mays
  misc_feature (1)..(1122): Ceres Seq. ID no. 12360011
atcccccgcaccgcacgtctcagcccacctcctcctaccaccctcgccgcggccgcgccacacaaaagcgtcacgccgtctgacagcggggaaaaaaaaggaggccatggaggagaacattcctcacccgagggaggcacaagggcccaccgtcgcccaaccggccccggcggtcgtcacgccccgcgacgacgctctagctcccgtagcccagctgctgtcgtcctcgggcgacgatgagtcgtccgacgacgagggggagctcgagctggaggtcgagttcgagttcccgttcgtctgcagggactcccccgcgggcacggccgccccggccgacgagctcttcgcggacggccggatcagggccttctacccggtgttcggccgcggcacggccgggtgcgtcccccgtggcggcggcggcggcggcagcggcagctgctgcacggcgctgccggccgctccgccgcgggtgaggggccagctgggacgcctgttccaggaggagacacgggagcgcagcacctccgccagctttacggcgtcgttcgggcccgccacggacgaggacggcggcctggatggcgcggcgccggggagctactgcgtgtggcgcccgggtccgtccgcgtccgcgtcgccctccccgccgccgcccaggaagagtgggtccacggggtccatggcgcggtggcgccgcatcagcgacctcgtcgtgggccgcagccacagcgacggcagggacaagttcctcttcctcgccgccgcgcccaggagggggcccaaggacaaggagcctgccgccactgccccgcccgcggtcgccgcccaccagatggcggcgtacctcgccaggggcgtcccaccgcggcgcacgttcctgccgtaccgcgaggagctcgtgggcttcttcgccaacgtgaacggcatcagtcggagccaccaccgtccgccgttctgacgtcttgtcagtggcctatgccatcggttaattaccctgattaattattcggtaatgtgattagcacttttcttagcagtagtggataagtaggcggtttgtataggtaatgattttgggtggatcacgcgacgcgatgaatggagaggcgttttctgtcg

SEQ ID NO: 17724 - protein, 319 aa, Zea mays subsp. mays
  misc_feature (1)..(319): Ceres Seq. ID no. 12360012
SPAPHVSAHLLLPPSPRPRHTKASRRLTAGKKKEAMEENIPHPREAQGPTVAQPAPAVVTPRDDALAPVAQLLSSSGDDESSDDEGELELEVEFEFPFVCRDSPAGTAAPADELFADGRIRAFYPVFGRGTAGCVPRGGGGGGSGSCCTALPAAPPRVRGQLGRLFQEETRERSTSASFTASFGPATDEDGGLDGAAPGSYCVWRPGPSASASPSPPPPRKSGSTGSMARWRRISDLVVGRSHSDGRDKFLFLAAAPRRGPKDKEPAATAPPAVAAHQMAAYLARGVPPRRTFLPYREELVGFFANVNGISRSHHRPPF

SEQ ID NO: 17725 - protein, 284 aa, Zea mays subsp. mays
  misc_feature (1)..(284): Ceres Seq. ID no. 12360013
MEENIPHPREAQGPTVAQPAPAVVTPRDDALAPVAQLLSSSGDDESSDDEGELELEVEFEFPFVCRDSPAGTAAPADELFADGRIRAFYPVFGRGTAGCVPRGGGGGGSGSCCTALPAAPPRVRGQLGRLFQEETRERSTSASFTASFGPATDEDGGLDGAAPGSYCVWRPGPSASASPSPPPPRKSGSTGSMARWRRISDLVVGRSHSDGRDKFLFLAAAPRRGPKDKEPAATAPPAVAAHQMAAYLARGVPPRRTFLPYREELVGFFANVNGISRSHHRPPF

SEQ ID NO: 17726 - DNA, 1436 bp, Zea mays subsp. mays
  misc_feature (1)..(1436): Ceres Seq. ID no. 12360026
aaccaggtgtctgttcagttcgtgtccgccgtcctctgttcaagtgcaagcgagcgaagaaacgaagcaccaggaggcgggaacaagaaggaatttgcgcagcaagcaaaggtcccgagttgcaaacttgcaacccaagaagagcgttggacatgcagatggaggggagggagggtatcgcggtggtggccgcaggcggcggccatggatccgggcagcacggcatgttcggagcggcagacatcgccatggcagaggcgcaggaggcagcggctaaggggtaccagtaccagtcctccccctcgtcgccgtnngacgtccctcacgccgtcgccgccgccggctgcggctggcnnctgnnggggangccaccgcggcgccacttgcctggagcctgggcggcgggatgccgagcgaggccgcgggggacagcggcgtgcgggcggccgggcatagccagagcgagcacgccaacaacatgagctccgagcgccgccgcggccgcccgcgcggctccggcaggcgccagatcctggccactctcggtgaatggtacgcgctgtcagccggcgggagcttcacgcctcacgtcatcatcgtgggtactggggaggatgtggcggcgcgcgtcatgtcgttttcgcagaaaggcccacgctcggtctgcatcctctccgccaacgggacaatctctaacgtgacgctgaggcagccgggttcatctggtagcaccttcacctacgagggccgtttcgagatcctgcagctgatgggctcaatcacaatggctgaggaaggtcgtaagaggacaggcggcctcagcgtctctctcgctggcccagacggccgtgtggtcggcggcgtagtggctgggatgctgcgtgccgcaagtcctatacaggtgatcgtgggaagcttcctgcccaacagcctgaagcagcaccagaggcggatgagcgcgcagcagcagctctccccggttccggcactgccagaacctgaggcgcccccacccgtgctcaccgcagccaccccgatctctctggcaggtcctggggacgggttccatgatgcgccgccaccctccgccgcacctccccagccccacgccagcgccatgaacctgaacgcgacgggcttccccgtggctggctggcccgcaagctcgccgcagcccatggtgtacagggcttcccctgacatcaacgtcagcttgactccccaggagtaggatcgttgggctcgtcgtcgtcttcttctcttttctttccgtcgcctctacgctgatacattttgggagagagagaggaagtgagctaggatcatgaacccatgtcgaggataggcaatatactgaatgagaatgaactgatctgtaggtggcgccaaccatgactgtgggctgtggcagttgatttagtcccttctcctttttc

SEQ ID NO: 17727 - protein, 274 aa, Zea mays subsp. mays
  misc_feature (1)..(274): Ceres Seq. ID no. 12360027
MPSEAAGDSGVRAAGHSQSEHANNMSSERRRGRPRGSGRRQILATLGEWYALSAGGSFTPHVIIVGTGEDVAARVMSFSQKGPRSVCILSANGTISNVTLRQPGSSGSTFTYEGRFEILQLMGSITMAEEGRKRTGGLSVSLAGPDGRVVGGVVAGMLRAASPIQVIVGSFLPNSLKQHQRRMSAQQQLSPVPALPEPEAPPPVLTAATPISLAGPGDGFHDAPPPSAAPPQPHASAMNLNATGFPVAGWPASSPQPMVYRASPDINVSLTPQE

SEQ ID NO: 17728 - protein, 250 aa, Zea mays subsp. mays
  misc_feature (1)..(250): Ceres Seq. ID no. 12360028
MSSERRRGRPRGSGRRQILATLGEWYALSAGGSFTPHVIIVGTGEDVAARVMSFSQKGPRSVCILSANGTISNVTLRQPGSSGSTFTYEGRFEILQLMGSITMAEEGRKRTGGLSVSLAGPDGRVVGGVVAGMLRAASPIQVIVGSFLPNSLKQHQRRMSAQQQLSPVPALPEPEAPPPVLTAATPISLAGPGDGFHDAPPPSAAPPQPHASAMNLNATGFPVAGWPASSPQPMVYRASPDINVSLTPQE

SEQ ID NO: 17729 - protein, 199 aa, Zea mays subsp. mays
  misc_feature (1)..(199): Ceres Seq. ID no. 12360029
MSFSQKGPRSVCILSANGTISNVTLRQPGSSGSTFTYEGRFEILQLMGSITMAEEGRKRTGGLSVSLAGPDGRVVGGVVAGMLRAASPIQVIVGSFLPNSLKQHQRRMSAQQQLSPVPALPEPEAPPPVLTAATPISLAGPGDGFHDAPPPSAAPPQPHASAMNLNATGFPVAGWPASSPQPMVYRASPDINVSLTPQE

SEQ ID NO: 17730 - DNA, 1874 bp, Zea mays subsp. mays
  misc_feature (1)..(1874): Ceres Seq. ID no. 12360030
aaccccaccagaccttcaaccgctacatttccgtcactaccggagccgccactccgacgaacgcgggcggcggagcggaagcgaaccagagcaccggtaaaaagaaaaggatgaggcttgggagtataaacggcttgcggttcacgcagcttaaacttgtcatccttgcgttcttcatgttgtttgttctctggaaatgggagaagggctcgtcatactacgattccgaaatcctccagccagatccgttggttctgactcatccagctaactcgaagtttgtagaccagcatacatccccagaagaagactttccaagtgcagatcgatcacaccggtcagtaggtaaagtagaaaagccggttactagtgcgctgccaccattgtctacgataggctattctgttgatgttgcagatgggaatgaagtgccacctcctgagaagaaagaatgcgagtacaggaatgggaagtgggtttctgacaatcgtagaccactatactcagggtttggttgtaagcaatggctttcagagagttggtcctgcagactaacccagcgaaaagatttcgcgtatgaaaaattcagatggcagcctgaagcttgtgagatgccagagtttgaggcctcccacttcttgagaagaatgcaggataaaaccatcgcttacgtgggcgattctctagggaggcagatgtttcagtcgatgatgtgtatggtcactggtggaaaggagaggctggatgtagaagatattggcgcagagtatggctttgtgttagcgccgggtgcaaaaaggccagacggctgggcctaccggttcccgagcaccaacacaacaattctataccactggtcatcaacgctctgtgatttggagcccctgaacccatcagaccgagcgaccagttattccatgcacctggaccgcccgcctgcttttctgaagagcaacctccacaggctccatgtcctggtcctcaacaccggccaccactggaaccgggggaagctgagggcgaacaggtgggagatgtatctcggcggagcgccgaacaacgacaggaacaccgccgtcatttggaaggccaagaacttcaccgtccacaacgtcgtcaggtgggtggacgcgcagctcccccgccaccccaagctgaaggcgttctacaggtcgatatcgccccggcacttcttcaacggtgactgggacaccggaggcagctgcgacaacaccagccctctggccaagggagggagcggcgtccacctcgaccgttcggaggacgccgacgccgagggcgccgtgaggggcaccggggtcaggctcctggacgtcactgccctatcgcggctgagggacgaagggcatatttcgcggtacagcatcaaggccacttctggcgttcaggattgcctgcactggtgccttcccggcgtgcctgacacctggaacgagatccttgcggcccagctatagcctgtagctgaatttgaagatgccaagggctacatcgaattgtttatgggtgaagctcgtatatacagtaactaccacggagtactacgtcgttgccggagacccaatgctgctggtagtgaaacactgagctgcagtacattctttagggaccgtgcttaactgtagaaaatacagggcctttttttgtgtaagtacatgttgtgtttgcctactattacctatgtacgccagttgttaattggagaactggattgatagatagtttggaagtgttgcctgagaggtagggcaacgtatcttgcagcatccagtcctttgagaactcatctgttatgtaccaaacacgaacagagagcatcatgcattgctgatccatgtgatgtggttgttggt

SEQ ID NO: 17731 - protein, 491 aa, Zea mays subsp. mays
  misc_feature (1)..(491): Ceres Seq. ID no. 12360031
PHQTFNRYISVTTGAATPTNAGGGAEANQSTGKKKRMRLGSINGLRFTQLKLVILAFFMLFVLWKWEKGSSYYDSEILQPDPLVLTHPANSKFVDQHTSPEEDFPSADRSHRSVGKVEKPVTSALPPLSTIGYSVDVADGNEVPPPEKKECEYRNGKWVSDNRRPLYSGFGCKQWLSESWSCRLTQRKDFAYEKFRWQPEACEMPEFEASHFLRRMQDKTIAYVGDSLGRQMFQSMMCMVTGGKERLDVEDIGAEYGFVLAPGAKRPDGWAYRFPSTNTTILYHWSSTLCDLEPLNPSDRATSYSMHLDRPPAFLKSNLHRLHVLVLNTGHHWNRGKLRANRWEMYLGGAPNNDRNTAVIWKAKNFTVHNVVRWVDAQLPRHPKLKAFYRSISPRHFFNGDWDTGGSCDNTSPLAKGGSGVHLDRSEDADAEGAVRGTGVRLLDVTALSRLRDEGHISRYSIKATSGVQDCLHWCLPGVPDTWNEILAAQL

SEQ ID NO: 17732 - protein, 455 aa, Zea mays subsp. mays
  misc_feature (1)..(455): Ceres Seq. ID no. 12360032
MRLGSINGLRFTQLKLVILAFFMLFVLWKWEKGSSYYDSEILQPDPLVLTHPANSKFVDQHTSPEEDFPSADRSHRSVGKVEKPVTSALPPLSTIGYSVDVADGNEVPPPEKKECEYRNGKWVSDNRRPLYSGFGCKQWLSESWSCRLTQRKDFAYEKFRWQPEACEMPEFEASHFLRRMQDKTIAYVGDSLGRQMFQSMMCMVTGGKERLDVEDIGAEYGFVLAPGAKRPDGWAYRFPSTNTTILYHWSSTLCDLEPLNPSDRATSYSMHLDRPPAFLKSNLHRLHVLVLNTGHHWNRGKLRANRWEMYLGGAPNNDRNTAVIWKAKNFTVHNVVRWVDAQLPRHPKLKAFYRSISPRHFFNGDWDTGGSCDNTSPLAKGGSGVHLDRSEDADAEGAVRGTGVRLLDVTALSRLRDEGHISRYSIKATSGVQDCLHWCLPGVPDTWNEILAAQL

SEQ ID NO: 17733 - protein, 433 aa, Zea mays subsp. mays
  misc_feature (1)..(433): Ceres Seq. ID no. 12360033
MLFVLWKWEKGSSYYDSEILQPDPLVLTHPANSKFVDQHTSPEEDFPSADRSHRSVGKVEKPVTSALPPLSTIGYSVDVADGNEVPPPEKKECEYRNGKWVSDNRRPLYSGFGCKQWLSESWSCRLTQRKDFAYEKFRWQPEACEMPEFEASHFLRRMQDKTIAYVGDSLGRQMFQSMMCMVTGGKERLDVEDIGAEYGFVLAPGAKRPDGWAYRFPSTNTTILYHWSSTLCDLEPLNPSDRATSYSMHLDRPPAFLKSNLHRLHVLVLNTGHHWNRGKLRANRWEMYLGGAPNNDRNTAVIWKAKNFTVHNVVRWVDAQLPRHPKLKAFYRSISPRHFFNGDWDTGGSCDNTSPLAKGGSGVHLDRSEDADAEGAVRGTGVRLLDVTALSRLRDEGHISRYSIKATSGVQDCLHWCLPGVPDTWNEILAAQL

SEQ ID NO: 17734 - DNA, 777 bp, Zea mays subsp. mays
  misc_feature (1)..(777): Ceres Seq. ID no. 12360038
aaaacgcaaccgcagccgcagccacagcacagcacaacacgtcggcatgtatccgcccaaggccagcgatccggccgccggggcggcgccggtgactggcttccccgtcggcgggcctgccgcctcctcccagtggtcatccggcctgttggactgcttcgacgactgcggcctctgctgcctgacgtgctggtgcccgtgcatcacgttcgggcgcgtggcggagatcgtggaccgcggcgcgacgtcgtgcggcacggcgggggcgctgtacgcggtgctggcctacttcacgggctgccagtggatctactcgtgcacgtaccgcgccaagatgcgcgcccagctcggcctccccgagaccccctgctgcgactgcctcgtccacttctgctgcgagccgtgcgcgctctgccagcagtacaaggagctcaaggcccgcggcttcgaccccgacctcggctgggaacgcaacgccactatcactatgctgcctccgtccgcacaggggatggggcgctgaccgctgaccggccggccagcctctgcgtaaataaataattaatgcttatatatgtatgtacgtgtttctttcagccggaacaaaatctctatatatatgtcgtgtcaagatcagcatcgggccgtacgttcgtttttgtactgtgttccttgtgtcctccgttccgaataaacaataatatatatatatatatatatatatatatatgacatgtaatatttatatattgcttgcattggtggtgcaccaccttt

SEQ ID NO: 17735 - protein, 186 aa, Zea mays subsp. mays
  misc_feature (1)..(186): Ceres Seq. ID no. 12360039
KTQPQPQPQHSTTRRHVSAQGQRSGRRGGAGDWLPRRRACRLLPVVIRPVGLLRRLRPLLPDVLVPVHHVRARGGDRGPRRDVVRHGGGAVRGAGLLHGLPVDLLVHVPRQDARPARPPRDPLLRLPRPLLLRAVRALPAVQGAQGPRLRPRPRLGTQRHYHYAASVRTGDGALTADRPASLCVNK

SEQ ID NO: 17736 - protein, 173 aa, Zea mays subsp. mays
  misc_feature (1)..(173): Ceres Seq. ID no. 12360040
KRNRSRSHSTAQHVGMYPPKASDPAAGAAPVTGFPVGGPAASSQWSSGLLDCFDDCGLCCLTCWCPCITFGRVAEIVDRGATSCGTAGALYAVLAYFTGCQWIYSCTYRAKMRAQLGLPETPCCDCLVHFCCEPCALCQQYKELKARGFDPDLGWERNATITMLPPSAQGMGR

SEQ ID NO: 17737 - protein, 158 aa, Zea mays subsp. mays
  misc_feature (1)..(158): Ceres Seq. ID no. 12360041
MYPPKASDPAAGAAPVTGFPVGGPAASSQWSSGLLDCFDDCGLCCLTCWCPCITFGRVAEIVDRGATSCGTAGALYAVLAYFTGCQWIYSCTYRAKMRAQLGLPETPCCDCLVHFCCEPCALCQQYKELKARGFDPDLGWERNATITMLPPSAQGMGR

SEQ ID NO: 17738 - DNA, 1393 bp, Zea mays subsp. mays
  misc_feature (1)..(1393): Ceres Seq. ID no. 12360042
ccaggacaaacaccgcgcacgcaccgccttctccactacttacccgaatcctaacgctattccactgcattctgctccgaaatggccctcgccaccaacgccgccgccgcagccgccatctccggagggtccgcctcacagccccgccgcgcgtcgccgtcgctgctcctgctcaggcgccgctgcgccgtcggcgccgtacacgccgcggagccgtcgaagaaccccggcgtcgtcccggccgccgcgaaggcctcgacgccgacggtcgtgcccgagaacgacaccgtcccggccccgtcccttggcccgaacgcgtcgttgcgcgcgaggtgggcggtggacagctggaggacgaagaaggccctgcagcagccagaatacccgaaccagacagagctcgaggaggcggtcaacacgatcgagaagtctccgccgatcgtctttgccggggaggcgcgtcacctggaggagcgcctcgccgacgccgccgtcggccgcgcattcctcctccagggcggcgactgcgccgaaagttttaaagagttcctgagggggatcgccaacccccttggcatcaaggtgagcgacaagatggagcccggcgagctggtgaagctgatcgacatactgaacccgacgaacaagcccgggaggatcaccgtcatcacaaggatgggggcagagaacatcagggtcaagttacctcaccttatccgcgcggtccgccaggctggacagagtgtcacctggatcactgacccgatgcacgggaacaccatcaagactccttgcggacgaaagactcggccatttgactccattctggccgaggtacgcccttcttcgatgtgcacgaccaagagggaagccagcctggaggtgtccaccttgagatgaccggtcagaacgtgaccgaatgcacgggcgggtcaagcaacgtcaccttcgacaacctgagagaccgctaccacacgcaatgcgaccccaggctgaacgcgtcccagtccctggagctcgccttcatactcgccgagaagcttaggaagcggaggatgcggcggtcgtcggtggcgtctgggctcggcggcagcatcttgcccttgccgccctttggcttttgatgtcttgcacgctggctgtgtgcatgcagggtgcagtgcaggggtgtggtaggagaatcttacgttgtcgtttgccttgctatgtagtatgtaatgctttaatttactgcattctacgtcgttttttcccttcttcttctatttgtttctttttgtacgtagctgcagctcataagagattgaataatactattgctgccacatatatagacggagttggctttgtgaattaataaagtccattgctgctgtcgtcaactgtttccttc

SEQ ID NO: 17739 - protein, 272 aa, Zea mays subsp. mays
  misc_feature (1)..(272): Ceres Seq. ID no. 12360043
MALATNAAAAAAISGGSASQPRRASPSLLLLRRRCAVGAVHAAEPSKNPGVVPAAAKASTPTVVPENDTVPAPSLGPNASLRARWAVDSWRTKKALQQPEYPNQTELEEAVNTIEKSPPIVFAGEARHLEERLADAAVGRAFLLQGGDCAESFKEFLRGIANPLGIKVSDKMEPGELVKLIDILNPTNKPGRITVITRMGAENIRVKLPHLIRAVRQAGQSVTWITDPMHGNTIKTPCGRKTRPFDSILAEVRPSSMCTTKREASLEVSTLR

SEQ ID NO: 17740 - protein, 183 aa, Zea mays subsp. mays
  misc_feature (1)..(183): Ceres Seq. ID no. 12360044
QDKHRARTAFSTTYPNPNAIPLHSAPKWPSPPTPPPQPPSPEGPPHSPAARRRRCSCSGAAAPSAPYTPRSRRRTPASSRPPRRPRRRRSCPRTTPSRPRPLARTRRCARGGRWTAGGRRRPCSSQNTRTRQSSRRRSTRSRSLRRSSLPGRRVTWRSASPTPPSAAHSSSRAATAPKVLKSS

SEQ ID NO: 17741 - protein, 179 aa, Zea mays subsp. mays
  misc_feature (1)..(179): Ceres Seq. ID no. 12360045
RTNTAHAPPSPLLTRILTLFHCILLRNGPRHQRRRRSRHLRRVRLTAPPRVAVAAPAQAPLRRRRRTRRGAVEEPRRRPGRREGLDADGRARERHRPGPVPWPERVVAREVGGGQLEDEEGPAAARIPEPDRARGGGQHDREVSADRLCRGGASPGGAPRRRRRRPRIPPPGRRLRRKF

SEQ ID NO: 17742 - DNA, 988 bp, Zea mays subsp. mays
  misc_feature (1)..(988): Ceres Seq. ID no. 12360539
gcacgagaccattacctagaacatcctaatcgaaaacaaggactacccttacgccgtggacgggctggtcatctggtgggcgatcgagcggtgggtcaaggagtacctggacgtctactaccccaacgacggcgagctccagcgcgacgtggagctgcaggcgtggtggaaggaggtgcgcgaggaggcgcacggcgacctcaaggaccgagactggtggcccaggatggacgccgtccagcggctggccagggcgtgcacgaccgtcatctgggtagcgtccgcgctgcacgcggccgtcaacttcgggcagtacccgtacgccgggtacctgccgaaccggccgaccgtgagccggcggccgatgccggagccgggcagcgacgactacaagaagctggaggcggggcagaaggaggcggacgcggtgttcatccgcaccatcaccagccagttccagaccatcctgggcatctcgctcatcgagatcctctccaagcactcctccgacgaggtgtacctcggccagcgcgacgagcctgagcgctggacgtcggacgccagggcgctggacgcgttcagaaggttcggaagccggctggtggagatcgagaagcggatcaggacgatgaacgacagcccgacgttgaagaaccggaaggggccggtggagatgccgtacatgctgctgtaccccaacacgtcggatgtcaccggcgagaagggcgaggggctcactgccatgggcattcccaacagcatctccatatgagcctcctcactgcctgagcggatggtttgtagatgttctgttacgctgtgtgtaatgtgtcgtttattcgttggttttgtcagtctcagggtagggaatggagatgttgattggatccatgatctgtagggttgagagaggagtcacgtctggagaatgttgtcaatgtgtgtttctttcttgttaagaataaaagttcgtcagctcatttatctc

SEQ ID NO: 17743 - protein, 181 aa, Zea mays subsp. mays
  misc_feature (1)..(181): Ceres Seq. ID no. 12360540
MDAVQRLARACTTVIWVASALHAAVNFGQYPYAGYLPNRPTVSRRPMPEPGSDDYKKLEAGQKEADAVFIRTITSQFQTILGISLIEILSKHSSDEVYLGQRDEPERWTSDARALDAFRRFGSRLVEIEKRIRTMNDSPTLKNRKGPVEMPYMLLYPNTSDVTGEKGEGLTAMGIPNSISI

SEQ ID NO: 17744 - protein, 180 aa, Zea mays subsp. mays
  misc_feature (1)..(180): Ceres Seq. ID no. 12360541
ARDHYLEHPNRKQGLPLRRGRAGHLVGDRAVGQGVPGRLLPQRRRAPARRGAAGVVEGGARGGARRPQGPRLVAQDGRRPAAGQGVHDRHLGSVRAARGRQLRAVPVRRVPAEPADREPAADAGAGQRRLQEAGGGAEGGGRGVHPHHHQPVPDHPGHLAHRDPLQALLRRGVPRPARRA

SEQ ID NO: 17745 - protein, 135 aa, Zea mays subsp. mays
  misc_feature (1)..(135): Ceres Seq. ID no. 12360542
MPEPGSDDYKKLEAGQKEADAVFIRTITSQFQTILGISLIEILSKHSSDEVYLGQRDEPERWTSDARALDAFRRFGSRLVEIEKRIRTMNDSPTLKNRKGPVEMPYMLLYPNTSDVTGEKGEGLTAMGIPNSISI

SEQ ID NO: 17746 - DNA, 1528 bp, Zea mays subsp. mays
  misc_feature (1)..(1528): Ceres Seq. ID no. 12360551
gcacgagaccattacctagaacatcctaatcaaaagttttctcttgatcgctttgtcacttgaatccgtgcctgctctaacagagagcggagacgaccacgacgacggcgaggccaggctctgcgatggagcaggagccgcaccggcccatggagctgcccccgggcttccgcttccacccgaccgacgaggagctcatcacgcactacctggcccgcaaggccgccgacgcccgcttcgccgcgcttgccgtcgccgaggccgacctcaacaagtgcgagccctgggacctgccatcgctggcgaggatgggggagaaggagtggtacttcttctgcctcaaggaccgcaagtacccgacggggctgaggaccaaccgggccacggaggccgggtactggaaggccacgggcaaggacagggacgtcttcaggggcaaggcgctcgtcggttccaagaagacgctcgtcttctacacggggagggcgcccaggggcgagaagtccggatgggtcatgcacgagtaccgcctccacgccaagctccacggccacggccacggccaaggcgcagccgtcgtcgtcgtccccaaggccgccgggtccaagaacgagtgggtgctgtgcagggtgttcaagaagagcctggtcgtaggtggtgcagctgcagcagcagcaccaaccgcaggcaagaggggcggcacggagacgtcgtccaactacaagacgggcgacgtagaggccatcgcccacctccctccgctgatggacgtgtccggctccggctccggcgccggcgccgccgccgcggcggcggcacacgtgacctgcttctccgacgcgctggagggccagttcttggaccagacgacgaccacgccgccgccagaagccgccaccgccgccacggacgacgacggccacctcggcgccctcggcgcctcctcctcgcccttccagctgcccggcttcgcgcactactactacggcggcgggccgccgcacctgcaccagcaccacggcgccgccagcctggtgcagctcctggagggcagcgtgccgccgtgcaataagggcggcgagcgggagcgggagcggctgagcgcgtcgcaggacacggggctcacctccgacgtcaaccccgagatctcctcctcctccggccaacgcttcgaccacgaccacgaccatgaccaccacctctgctgctggggctactgatcgtcgattcgatgagcctacgacgactaccgagcgcgcatcatgcatgcgtcgcgttattactagcgattagtgtatagcacactgctgtaaataaaacatctactagtactacatctgcgtgaggtcgacgatcggccgtgtggtggtggtggtgcgtggcatgcatgcgtcgagctgcctacgtttcattatctgctcgtgtgatttgttactgtagacgagtgtgggggtgtgtaattagcattgttgatgtattattattcacgatttggtggaataatatctccttggttaatgacgccgcc

SEQ ID NO: 17747 - protein, 364 aa, Zea mays subsp. mays
  misc_feature (1)..(364): Ceres Seq. ID no. 12360552
MEQEPHRPMELPPGFRFHPTDEELITHYLARKAADARFAALAVAEADLNKCEPWDLPSLARMGEKEWYFFCLKDRKYPTGLRTNRATEAGYWKATGKDRDVFRGKALVGSKKTLVFYTGRAPRGEKSGWVMHEYRLHAKLHGHGHGQGAAVVVVPKAAGSKNEWVLCRVFKKSLVVGGAAAAAAPTAGKRGGTETSSNYKTGDVEAIAHLPPLMDVSGSGSGAGAAAAAAAHVTCFSDALEGQFLDQTTTTPPPEAATAATDDDGHLGALGASSSPFQLPGFAHYYYGGGPPHLHQHHGAASLVQLLEGSVPPCNKGGERERERLSASQDTGLTSDVNPEISSSSGQRFDHDHDHDHHLCCWGY

SEQ ID NO: 17748 - protein, 356 aa, Zea mays subsp. mays
  misc_feature (1)..(356): Ceres Seq. ID no. 12360553
MELPPGFRFHPTDEELITHYLARKAADARFAALAVAEADLNKCEPWDLPSLARMGEKEWYFFCLKDRKYPTGLRTNRATEAGYWKATGKDRDVFRGKALVGSKKTLVFYTGRAPRGEKSGWVMHEYRLHAKLHGHGHGQGAAVVVVPKAAGSKNEWVLCRVFKKSLVVGGAAAAAAPTAGKRGGTETSSNYKTGDVEAIAHLPPLMDVSGSGSGAGAAAAAAAHVTCFSDALEGQFLDQTTTTPPPEAATAATDDDGHLGALGASSSPFQLPGFAHYYYGGGPPHLHQHHGAASLVQLLEGSVPPCNKGGERERERLSASQDTGLTSDVNPEISSSSGQRFDHDHDHDHHLCCWGY

SEQ ID NO: 17749 - protein, 303 aa, Zea mays subsp. mays
  misc_feature (1)..(303): Ceres Seq. ID no. 12360554
MGEKEWYFFCLKDRKYPTGLRTNRATEAGYWKATGKDRDVFRGKALVGSKKTLVFYTGRAPRGEKSGWVMHEYRLHAKLHGHGHGQGAAVVVVPKAAGSKNEWVLCRVFKKSLVVGGAAAAAAPTAGKRGGTETSSNYKTGDVEAIAHLPPLMDVSGSGSGAGAAAAAAAHVTCFSDALEGQFLDQTTTTPPPEAATAATDDDGHLGALGASSSPFQLPGFAHYYYGGGPPHLHQHHGAASLVQLLEGSVPPCNKGGERERERLSASQDTGLTSDVNPEISSSSGQRFDHDHDHDHHLCCWGY

SEQ ID NO: 17750 - DNA, 2068 bp, Zea mays subsp. mays
  misc_feature (1)..(2068): Ceres Seq. ID no. 12360559
gaaccaagcggcgatcgatcgaaacgaggcgtcgcgtggctgccggagatgtcgcagaagaggcagccggaggagggcgacgtcccgcggcgcgccgccgatgccggcggcggcggcggaggaggagacgagcccggtgggagctcgtcgcgctcctctctgccccagcgccacggcgagccgaagcgacagaggatcgcccttcgcgatgtgatcacggaggtgatgcggaacaccagcatcgagaagtttctaatcgcgctcgagcccctcatcaggagagtggtaaaagaagaaattgagtcggcttttgcaaaccatgcctctatgatggcaaggagtgtcacagacagtgttccatctgtgtcaaagaatttgcagctgcagttcatgaccagactttctcttccaatatttactggatccaagattgaaggagagggctcccttgagtataactattgctctagtcgacgctttgacaagacaaattgtagcaccaggcaaagagttccagataaaggttgagattgtagttctggagggggattttgaaagtggagaagatgatgactggacagctcaggagtttaacaataacattgttaaagaaagagaaggcaaaaggcccttgatttctggggatgcatccattgccctcgtcgatggcattggaacagtaggggaactttcattcacagataactccagctggacacggagccgaaagttcaggctaggagcaagaacagaggatggttctttcaatggtgtaagagtacgggaagcaaaaactgaatcatttgtggttaaggatcatcgaggagaattgtacaagaagcaccacccaccatttcttgaagatgaagtctggcgcctagagaaaattggcaaggaaggtgcttttcacaagcgtttgaatagggagaacatttgcactgtcaaagattttctcaccttgttaaatcttgatgcttctaggcttcgaaagatattaggtagtggcatgtcaacaaagatgtgggaggccactgtggaacatgcaaaaacatgtgttctaactgacaaagtgcatcactactatcctgatggtctaaacaaagctggtgttgtattcaatgtagttggagaagtaagagggttaatatctgataaatatgtttttgttgatgactttactgaaaaggagaaggccgaagcacgtgcagcagtgaagcaagcatatgaacactggaaggatgtccatacttgtgacaatgaaacgcttgtggaaaacccttcacatccattcaatttgggatctccatctttgcatgaaaatcagtataaccagttgcctacacaagtttctactgatggttttagtttgagcaattcggccatactgtcacccaacattttctcaatggagccatcgagtgctttagacccttgtagtatattggagactgaagaaagcagtgctaatcaatttcagtcggtgttgcccccagttgggggccatgaagtgcctcgagaacctcagacgctggataagttctccaactcgttggtatatgatgactgcagcgcccatccctcattcagtgaaagctattacagcagtgtagatcccagcatgtccttcgacacacaagatcttggagctgcactgaaaggcttcattgcaaccatatcgaagcctaaggcggcatatagaggatggagaacattgtcttatgtgctaggatggattttctataccaagagaattgttgcaaggagaaagaaacatgggaaataagtgaacacaagtctttgtgtagttaaatgcgaatataagcttagaaaatgagaaattatgtacattagtttgtttcttgtcacagctggtaagctctgctggtttcttcagctgtaaatggtcatgttctcagctatggttcgctatgcggctgtaaataatcaaatgaagtttgtacagggtgagggatgcgcatagcatttctgatgttttggatggatgccggagcttgctttttgatgcggcccgtgtattatctatgtagtagtatgcagtatgctgctg

SEQ ID NO: 17751 - protein, 258 aa, Zea mays subsp. mays
  misc_feature (1)..(258): Ceres Seq. ID no. 12360560
MSTKMWEATVEHAKTCVLTDKVHHYYPDGLNKAGVVFNVVGEVRGLISDKYVFVDDFTEKEKAEARAAVKQAYEHWKDVHTCDNETLVENPSHPFNLGSPSLHENQYNQLPTQVSTDGFSLSNSAILSPNIFSMEPSSALDPCSILETEESSANQFQSVLPPVGGHEVPREPQTLDKFSNSLVYDDCSAHPSFSESYYSSVDPSMSFDTQDLGAALKGFIATISKPKAAYRGWRTLSYVLGWIFYTKRIVARRKKHGK

SEQ ID NO: 17752 - protein, 254 aa, Zea mays subsp. mays
  misc_feature (1)..(254): Ceres Seq. ID no. 12360561
MWEATVEHAKTCVLTDKVHHYYPDGLNKAGVVFNVVGEVRGLISDKYVFVDDFTEKEKAEARAAVKQAYEHWKDVHTCDNETLVENPSHPFNLGSPSLHENQYNQLPTQVSTDGFSLSNSAILSPNIFSMEPSSALDPCSILETEESSANQFQSVLPPVGGHEVPREPQTLDKFSNSLVYDDCSAHPSFSESYYSSVDPSMSFDTQDLGAALKGFIATISKPKAAYRGWRTLSYVLGWIFYTKRIVARRKKHGK

SEQ ID NO: 17753 - protein, 175 aa, Zea mays subsp. mays
  misc_feature (1)..(175): Ceres Seq. ID no. 12360562
EPSGDRSKRGVAWLPEMSQKRQPEEGDVPRRAADAGGGGGGGDEPGGSSSRSSLPQRHGEPKRQRIALRDVITEVMRNTSIEKFLIALEPLIRRVVKEEIESAFANHASMMARSVTDSVPSVSKNLQLQFMTRLSLPIFTGSKIEGEGSLEYNYCSSRRFDKTNCSTRQRVPDKG

SEQ ID NO: 17754 - DNA, 1230 bp, Zea mays subsp. mays
  misc_feature (1)..(1230): Ceres Seq. ID no. 12360571
gcacgagaccattacctagaacatcctaatcgaaaagggaactagaattcgacgccgctgtggactggtcatggcgtgctaccgcgcatccacggcgccgacggcccaccgaggtctaggaaaaatagaatggttggtatggtagggtaggtgaaccggtgaagattagagggactgagggagagggaccgtgacaccgtgtctagccagccaacctgctgctctagcccacctgcatggcggtgtcagcgccggtcactctctgcccctcggattctcgctccctctcttccgcgctcgtttcttcccgatccaacaagccttcttcacttgatgctgttcggtcacggcggttgaatttgggagattcagctatgccaacgcagatctccacaaggcagtctcttcggtttgctttaccttcgaacaatgcacgtccaatatcgactgcagcaagaatgacatgttttgctaagaagcaacatattgctgccgtgcccttatgtactttggaggccaaaaggtatgaacctatagtcaaaatgtgtggcattacatctgccttcgatgctgagatggctttgaaggctggagctaaattaattgggatgattctttggcccaagtccaaacgctctatcccattgtctgaagctaaagagatatccagagtggccaaatcttacggggctgaatcagtgggtgtgtttgtggatgatgatagtagtactatcttgacagcatctgattcatgcaacctcgatcttatccagcttcatggagatagctcccgagaactacttcctctgctttggaagaacaacaggattatatatgtgctaaatgctgatgaggatggtaaacttatcaatgctcctccaagtgaggaatatgttcttgattggtttttggtggacagtgcaaaaggtggaagttgcaaagggttcaactgggaaaaattccaaatgccaactgttaaaagcaagaacgggtggttattagcaggaggccttcatgcagataatgttcacgaagccgcttctgctctaaagccaaatggcctggatgttagcagtggcatatgttttcctgacggtttacggaaagacccgaagagaatgtgttccttcatgagcagtgtaaaaactttgaatctcctctaacatactagtgctttattggtcgtagtttcttggtgcagtatgtggaaactgaataaatggcagtcct

SEQ ID NO: 17755 - protein, 308 aa, Zea mays subsp. mays
  misc_feature (1)..(308): Ceres Seq. ID no. 12360572
MAVSAPVTLCPSDSRSLSSALVSSRSNKPSSLDAVRSRRLNLGDSAMPTQISTRQSLRFALPSNNARPISTAARMTCFAKKQHIAAVPLCTLEAKRYEPIVKMCGITSAFDAEMALKAGAKLIGMILWPKSKRSIPLSEAKEISRVAKSYGAESVGVFVDDDSSTILTASDSCNLDLIQLHGDSSRELLPLLWKNNRIIYVLNADEDGKLINAPPSEEYVLDWFLVDSAKGGSCKGFNWEKFQMPTVKSKNGWLLAGGLHADNVHEAASALKPNGLDVSSGICFPDGLRKDPKRMCSFMSSVKTLNLL

SEQ ID NO: 17756 - protein, 262 aa, Zea mays subsp. mays
  misc_feature (1)..(262): Ceres Seq. ID no. 12360573
MPTQISTRQSLRFALPSNNARPISTAARMTCFAKKQHIAAVPLCTLEAKRYEPIVKMCGITSAFDAEMALKAGAKLIGMILWPKSKRSIPLSEAKEISRVAKSYGAESVGVFVDDDSSTILTASDSCNLDLIQLHGDSSRELLPLLWKNNRIIYVLNADEDGKLINAPPSEEYVLDWFLVDSAKGGSCKGFNWEKFQMPTVKSKNGWLLAGGLHADNVHEAASALKPNGLDVSSGICFPDGLRKDPKRMCSFMSSVKTLNLL

SEQ ID NO: 17757 - protein, 234 aa, Zea mays subsp. mays
  misc_feature (1)..(234): Ceres Seq. ID no. 12360574
MTCFAKKQHIAAVPLCTLEAKRYEPIVKMCGITSAFDAEMALKAGAKLIGMILWPKSKRSIPLSEAKEISRVAKSYGAESVGVFVDDDSSTILTASDSCNLDLIQLHGDSSRELLPLLWKNNRIIYVLNADEDGKLINAPPSEEYVLDWFLVDSAKGGSCKGFNWEKFQMPTVKSKNGWLLAGGLHADNVHEAASALKPNGLDVSSGICFPDGLRKDPKRMCSFMSSVKTLNLL

SEQ ID NO: 17758 - DNA, 1680 bp, Zea mays subsp. mays
  misc_feature (1)..(1680): Ceres Seq. ID no. 12360613
  misc_feature (1019)..(1019): n is a, c, t, g, unknown, or other
aaggcctccactcattcctgcccccgacactcccactgccaccagtcctctcaccgccaggcgccagccacagcggcacaatgcagccgcctactacccttctcccgctaggcgccgtcgtggtcgccatcctcctgctcgccaccgccccgagccccgccgtctcccgccaccgccactcgtccgccgcggacacggagacgctcgatgtagccgcctcgctctcccgcgcccgcgccgcgctctccaccgacgccgtctcgctgcaccagtccgcggccgccgccgccgccggggcgaagcgctccccgcgagcgcgggagggcggcctcacgttgcggctccactcccgggacttcctgcccgaggagcaggggcggcacgagacgtaccgctcgctcctgctctcccgcctccgccgcgactcggcgcgcgccgcggcggtgtcggcccgcgcgacgctggcggcggacgccgtgacccggctggacctgcgccccgcgaacgggtcggcggtgttcgcggcgtccgcggcgatccagggccccgtggtgtccggcgtcgggcagggcagcggcgagtacttctcccgcgtgggcatcggcagccccgcgcggcagctgtacatggtgctggacaccggcagcgacgtcacctgggtgcagtgccagccctgcgccgactgctaccagcagtccgacccggtgttcgacccgtccctctccgcctcctacgccgccgtctcctgcgactcccagcgctgccgggacctggacaccgcggcgtgccgcaacgccacgggcgcctgcctctacgaggtggcctacggcgacggctcctacaccgttgggcgacttcgccaccgagacgctcacgctgggggactccaccccggtcggcaacgtcgccatcgggtgcggccacgacaacgagggccttttcgtcggcgccgcggggctgctggcgctgggcggcgggccgctctccttcccgtcccagatctccgcgtccaccttctnctactgcctcgtggaccgcgactccccggccgcgtccacgctccagttcggcgacggcgccgccgaggcgggcaccgtgacggcgcctctcgtgcgcagcccgcgcacgagcaccttctactacgtggcgctgtcgggcatctcggtgggcgggcagccgctgtccatcccggcatccgccttcgccatggacgccacgtcgggctcgggcggcgtcatcgtggactccggcaccaccgtgacgcggctccagtccgccgcctacgcggcgctccgcgacgccttcgtccagggcgcgccgtcgctgccccggacctccggggtgtcgctgttcgacacgtgctacgacctgtcggaccggacgagcgtggaggtgcccgcggtgtcgctgcggttcgagggcggcggcgcgctgcggctgccggcgaagaactacctgatccccgtggacggagccggcacctactgcctggccttcgcgccgacgaacgcggccgtgtccatcatcgggaacgtgcagcagcagggcacccgcgtcagcttcgacaccgccaggggcgccgtcggcttcacccccaacaagtgctagcctagcctagcctaagcctgccttctggccctgttagccacggttgtcagtagtaatgacaagccggtgttt

SEQ ID NO: 17759 - protein, 536 aa, Zea mays subsp. mays
  misc_feature (1)..(536): Ceres Seq. ID no. 12360614
  misc_feature (339)..(339): Xaa is any aa, unknown or other
GLHSFLPPTLPLPPVLSPPGASHSGTMQPPTTLLPLGAVVVAILLLATAPSPAVSRHRHSSAADTETLDVAASLSRARAALSTDAVSLHQSAAAAAAGAKRSPRAREGGLTLRLHSRDFLPEEQGRHETYRSLLLSRLRRDSARAAAVSARATLAADAVTRLDLRPANGSAVFAASAAIQGPVVSGVGQGSGEYFSRVGIGSPARQLYMVLDTGSDVTWVQCQPCADCYQQSDPVFDPSLSASYAAVSCDSQRCRDLDTAACRNATGACLYEVAYGDGSYTVGRLRHRDAHAGGLHPGRQRRHRVRPRQRGPFRRRRGAAGAGRRAALLPVPDLRVHLXLLPRGPRLPGRVHAPVRRRRRRGGHRDGASRAQPAHEHLLLRGAVGHLGGRAAAVHPGIRLRHGRHVGLGRRHRGLRHHRDAAPVRRLRGAPRRLRPGRAVAAPDLRGVAVRHVLRPVGPDERGGARGVAAVRGRRRAAAAGEELPDPRGRSRHLLPGLRADERGRVHHRERAAAGHPRQLRHRQGRRRLHPQQVLA

SEQ ID NO: 17760 - protein, 510 aa, Zea mays subsp. mays
  misc_feature (1)..(510): Ceres Seq. ID no. 12360615
  misc_feature (313)..(313): Xaa is any aa, unknown or other
MQPPTTLLPLGAVVVAILLLATAPSPAVSRHRHSSAADTETLDVAASLSRARAALSTDAVSLHQSAAAAAAGAKRSPRAREGGLTLRLHSRDFLPEEQGRHETYRSLLLSRLRRDSARAAAVSARATLAADAVTRLDLRPANGSAVFAASAAIQGPVVSGVGQGSGEYFSRVGIGSPARQLYMVLDTGSDVTWVQCQPCADCYQQSDPVFDPSLSASYAAVSCDSQRCRDLDTAACRNATGACLYEVAYGDGSYTVGRLRHRDAHAGGLHPGRQRRHRVRPRQRGPFRRRRGAAGAGRRAALLPVPDLRVHLXLLPRGPRLPGRVHAPVRRRRRRGGHRDGASRAQPAHEHLLLRGAVGHLGGRAAAVHPGIRLRHGRHVGLGRRHRGLRHHRDAAPVRRLRGAPRRLRPGRAVAAPDLRGVAVRHVLRPVGPDERGGARGVAAVRGRRRAAAAGEELPDPRGRSRHLLPGLRADERGRVHHRERAAAGHPRQLRHRQGRRRLHPQQVLA

SEQ ID NO: 17761 - protein, 365 aa, Zea mays subsp. mays
  misc_feature (1)..(365): Ceres Seq. ID no. 12360616
  misc_feature (340)..(340): Xaa is any aa, unknown or other
RPPLIPAPDTPTATSPLTARRQPQRHNAAAYYPSPARRRRGRHPPARHRPEPRRLPPPPLVRRGHGDARCSRLALPRPRRALHRRRLAAPVRGRRRRRGEALPASAGGRPHVAAPLPGLPARGAGAARDVPLAPALPPPPRLGARRGGVGPRDAGGGRRDPAGPAPRERVGGVRGVRGDPGPRGVRRRAGQRRVLLPRGHRQPRAAAVHGAGHRQRRHLGAVPALRRLLPAVRPGVRPVPLRLLRRRLLRLPALPGPGHRGVPQRHGRLPLRGGLRRRLLHRWATSPPRRSRWGTPPRSATSPSGAATTTRAFSSAPRGCWRWAAGRSPSRPRSPRPPSXTASWTATPRPRPRSSSATAPPRRAP

SEQ ID NO: 17762 - DNA, 1288 bp, Zea mays subsp. mays
  misc_feature (1)..(1288): Ceres Seq. ID no. 12360617
gcacgagaccattacctagaacatcctaatcgaaaaaagctctctcatccagctaactaatggaagtagctagcaaacgtacgtattcttcttcaccatctgtttcttggggaaattaaaccccagtacgcgtacgtcacaatcgcgcgcaatggagaaggagaaggagaagtccagggccaggccgtcgaggggccactggcggcccggcgaggacgacaagctgcggcagctcgtcgacaagtacggcccgcggaactggaactccattgctgagagtctggaggggagatcaggcaagagctgccggctacgatggttcaaccagcttgacccgcggatcaaccggcggcccttcacggtggcggaggaggagctgctcctgcgggcgcaccgcgcccacggcaaccgctgggcgatcatctcccgcctcttcccgggccgcaccgacaacgccgtcaagaaccactggcacgtcgtcatggcgcgccgccgccgccgtaccctcgtcggcgaggccgcagccatcggctctgtcgttgtaccgcctcgtcatcagtacttccattttggaagctgctcgccgccgccgccgacccgctcgctgtgcttcgcggtgcctgcaggtttcggtccgctcggactcagcagaccagctgcaagttgcggtgtcaggaactgcaatgtgcccactgccgtcgcattactggacgacggccatcgtcatgacatgagcaaagaccttggtggcgacgatgacaatggcggtgatgcgcttgcaaagaggaaggacgtgcaattcttcgacttcttgggcgtcgggatctaaagcaaaataatgatgctactaatggtacattaattagtacactacatttcaacgatacactattggggtcttcttttccgtcgaagattcttttaaaaaacatcttcgacaaaatgatacaaaggatcaccgaagccaccttcagtctcgatttatctcctcaagacgaagactctgtatagagccgacagtgcaagatgccgaagctcaatggcctcagcccacatcaagcaaggaaggaaaaaggactagataggccttattggttttaattacttgtaaacaagtgttcaagggcatggatgtaattttaccgggctgcgtcccgtgactataaatagatgaacagtaccccgaccgtactattcacgctggattgtaatcactctcgcatcatcctcgttctctcaccttttggcaagccgaaagtaccaatataatatgaatattgttgatgtt

SEQ ID NO: 17763 - protein, 225 aa, Zea mays subsp. mays
  misc_feature (1)..(225): Ceres Seq. ID no. 12360618
MEKEKEKSRARPSRGHWRPGEDDKLRQLVDKYGPRNWNSIAESLEGRSGKSCRLRWFNQLDPRINRRPFTVAEEELLLRAHRAHGNRWAIISRLFPGRTDNAVKNHWHVVMARRRRRTLVGEAAAIGSVVVPPRHQYFHFGSCSPPPPTRSLCFAVPAGFGPLGLSRPAASCGVRNCNVPTAVALLDDGHRHDMSKDLGGDDDNGGDALAKRKDVQFFDFLGVGI

SEQ ID NO: 17764 - protein, 115 aa, Zea mays subsp. mays
  misc_feature (1)..(115): Ceres Seq. ID no. 12360619
MARRRRRTLVGEAAAIGSVVVPPRHQYFHFGSCSPPPPTRSLCFAVPAGFGPLGLSRPAASCGVRNCNVPTAVALLDDGHRHDMSKDLGGDDDNGGDALAKRKDVQFFDFLGVGI

SEQ ID NO: 17765 - DNA, 1058 bp, Zea mays subsp. mays
  misc_feature (1)..(1058): Ceres Seq. ID no. 12360632
aaaccctcacatacagatacagtacagttcacacactctcctgtctcctatccagccaccgaacgaagctagccaagatgtctcagttgctgcacctgccggacctcgcggcgccgcggaccaggatgggctcggcgctgccggcgggggcccgcgtcaagcagggggaggcggggacggcgagggggaggcgggtgctcaggctcgccgaccccgtgcggcgggagtgccgggtgccggtcccgctgccgccgccgccgctcctcgccgcggggaggcgcggagacgacgacgacgacgacggcgtcgacgaggataggcagaggtactacctcaacctgggctacgcgatccggacgctcagggaggagctccccgacgtgctctgcaaggaccacagcttcgacatctacagagaagacattgtcttcagagaccctctgaacacattcaagggcctgggaaactacaagaggctcttctgggcgctgcgcctcaccggccgggtcttcttcagggcgtcgtgggttgaagtggtcagcatatggcagcccgccgagaacagcatcctgcttcgctggaccgcccacggcgtccctcgggtgccctggggctggtgggacgccgcccacgcccgcttcgacggcgcgtccgtgtacaagctcgacaggaacggcaagatctacgagcacacggtgcacaacgtcgctacgaacccgccggccaagtccaaggtcctgccggtccacgagctggtcaggtcactcggttgcccctccactgccgaacccacctgttctgacttctgaagctttcgtcgtcgcagtgccatcttattattcgagaattaattatctgggagaaggataggcgtgggtttaacatggtacctccgaattttgcgttttttcagtgtgatttgatagcacacaaagttactgagtactcttggagttcagtgtgatttgatagcacacaaagttactgagtactcttggagttgtatatatgtatgtacagtgatagtttataaaataaaggcctgtcatttaaggtgt

SEQ ID NO: 17766 - protein, 268 aa, Zea mays subsp. mays
  misc_feature (1)..(268): Ceres Seq. ID no. 12360633
TLTYRYSTVHTLSCLLSSHRTKLAKMSQLLHLPDLAAPRTRMGSALPAGARVKQGEAGTARGRRVLRLADPVRRECRVPVPLPPPPLLAAGRRGDDDDDDGVDEDRQRYYLNLGYAIRTLREELPDVLCKDHSFDIYREDIVFRDPLNTFKGLGNYKRLFWALRLTGRVFFRASWVEVVSIWQPAENSILLRWTAHGVPRVPWGWWDAAHARFDGASVYKLDRNGKIYEHTVHNVATNPPAKSKVLPVHELVRSLGCPSTAEPTCSDF

SEQ ID NO: 17767 - protein, 243 aa, Zea mays subsp. mays
  misc_feature (1)..(243): Ceres Seq. ID no. 12360634
MSQLLHLPDLAAPRTRMGSALPAGARVKQGEAGTARGRRVLRLADPVRRECRVPVPLPPPPLLAAGRRGDDDDDDGVDEDRQRYYLNLGYAIRTLREELPDVLCKDHSFDIYREDIVFRDPLNTFKGLGNYKRLFWALRLTGRVFFRASWVEVVSIWQPAENSILLRWTAHGVPRVPWGWWDAAHARFDGASVYKLDRNGKIYEHTVHNVATNPPAKSKVLPVHELVRSLGCPSTAEPTCSDF

SEQ ID NO: 17768 - protein, 227 aa, Zea mays subsp. mays
  misc_feature (1)..(227): Ceres Seq. ID no. 12360635
MGSALPAGARVKQGEAGTARGRRVLRLADPVRRECRVPVPLPPPPLLAAGRRGDDDDDDGVDEDRQRYYLNLGYAIRTLREELPDVLCKDHSFDIYREDIVFRDPLNTFKGLGNYKRLFWALRLTGRVFFRASWVEVVSIWQPAENSILLRWTAHGVPRVPWGWWDAAHARFDGASVYKLDRNGKIYEHTVHNVATNPPAKSKVLPVHELVRSLGCPSTAEPTCSDF

SEQ ID NO: 17769 - DNA, 1027 bp, Zea mays subsp. mays
  misc_feature (1)..(1027): Ceres Seq. ID no. 12360663
aactttggttaaccacccgactccgcctaatatagccttccttttccgtccatggccgcgcaaccctaacggcgcccttcccgtgccgcgcgcatggcggaccccggcggctgcctcgaggtccggctcttctacgtgcgcgtctcgccgcacggcggcgcggcccctcccccgcgcctcgcgctcgacctccgccccgcgggcggcgaggcggcccccgtcccgctgcgcctcgaccgccacgacgccgcctcgggcgaggccacctacgtctccaccgcggccgcgcggctgcccccgccatccgcggccttcgatgtggccgaccaccgcggcgtcgcgctgctccggggctcgcttcggtggtgtcccggcgccaagggcggttcccacgcctgggaaattgattgcgtccccgccgctgcggcggccgcctcggcctcggccttcgaggtgtacgtcgccgggtgctacgccggcgagcccgcggtgctcacgcacgccctgcggctagccaccccggaggaagctgctgctgcgttggttcggcgccgatcgggggcattgccggctgctagggatgaaggcgacaatgatatgaacactggtagcacncaataccctgaaggttggtactcanacgatgacgacgggcagctctcatggttcaacgctggggtcagagttggcgtaggcatcggcctgggagtctgtgttggtgtaggcataggcgtcgggctcctcctgcgctcctaccaagcaacaaccagaagcttgaagaggcggttcttctgacagttgcagctggtgtagctaccaatgatgaccagagcagagttctgcctcacatacttgtatagttcatgtgtttgttgtgcaggagttttgttttgtttttaggggaaagtgtagatgctgtgttaatgtggttgtgtacatggctctcgccgtttcttgtatggcatggcatgcatgtaaactgtgaagttggtcctcggacatgtgaaggaaatggtttctagttttg

SEQ ID NO: 17770 - protein, 233 aa, Zea mays subsp. mays
  misc_feature (1)..(233): Ceres Seq. ID no. 12360664
  misc_feature (174)..(174): Xaa is any aa, unknown or other
  misc_feature (183)..(183): Xaa is any aa, unknown or other
MADPGGCLEVRLFYVRVSPHGGAAPPPRLALDLRPAGGEAAPVPLRLDRHDAASGEATYVSTAAARLPPPSAAFDVADHRGVALLRGSLRWCPGAKGGSHAWEIDCVPAAAAAASASAFEVYVAGCYAGEPAVLTHALRLATPEEAAAALVRRRSGALPAARDEGDNDMNTGSXQYPEGWYSXDDDGQLSWFNAGVRVGVGIGLGVCVGVGIGVGLLLRSYQATTRSLKRRFF

SEQ ID NO: 17771 - protein, 170 aa, Zea mays subsp. mays
  misc_feature (1)..(170): Ceres Seq. ID no. 12360665
TLVNHPTPPNIAFLFRPWPRNPNGALPVPRAWRTPAAASRSGSSTCASRRTAARPLPRASRSTSAPRAARRPPSRCASTATTPPRARPPTSPPRPRGCPRHPRPSMWPTTAASRCSGARFGGVPAPRAVPTPGKLIASPPLRRPPRPRPSRCTSPGATPASPRCSRTPCG

SEQ ID NO: 17772 - DNA, 884 bp, Zea mays subsp. mays
  misc_feature (1)..(884): Ceres Seq. ID no. 12360748
cacaggagaatatacgacaatcggcctagtatgaattgttctgacgagagcaaaggacctccatgtacagggtgggtagagggcatggcaccagttttttctcgcactgcttggaaatgtgtatggcatctaattcagaatgatcttattcatggatggggtcttgacatgaagcttggatattgcgctcagggtgatcgaacagagaaagttggtgttattgacagtgagtatgtagttcatcaagggataccatcattaggagggccatcacttagcagcaagacacctcgaagatcattggatttgaggacccacatacgaagacaatcatcggctgagctggagaagttcaaggagaggtggaacagggctgtaagggaagatgaaggatggagggatccttttgattcttgattacttggaaagcagagtgtgacacttcataacaaaactggccagtggccacagtcacagcagtagagtttggaagcggagagcatcttctgcttcatgtcaaaaacacttgtttggttataggatgacgagacggttggttggttataggatgatgacttacatacacacacacacatcataactttatccacatgagttaaaagcgggaacattatcgtcaatacaaggagctgatggagaagttgaaactaacaaagtaacagggggtttccgaaagtgctgtaattttccgttggaaatatctgttcgggagagttgtatagtgtcatgatatacacacttgtgcagttatttgatgaggaaacttacatagcctagagcagatgtgtttcctatattattattgccttgtacaatgtaagatgaattccatgagtcagaaatagcatcaggtctctatgctt

SEQ ID NO: 17773 - protein, 138 aa, Zea mays subsp. mays
  misc_feature (1)..(138): Ceres Seq. ID no. 12360749
HRRIYDNRPSMNCSDESKGPPCTGWVEGMAPVFSRTAWKCVWHLIQNDLIHGWGLDMKLGYCAQGDRTEKVGVIDSEYVVHQGIPSLGGPSLSSKTPRRSLDLRTHIRRQSSAELEKFKERWNRAVREDEGWRDPFDS

SEQ ID NO: 17774 - protein, 128 aa, Zea mays subsp. mays
  misc_feature (1)..(128): Ceres Seq. ID no. 12360750
MNCSDESKGPPCTGWVEGMAPVFSRTAWKCVWHLIQNDLIHGWGLDMKLGYCAQGDRTEKVGVIDSEYVVHQGIPSLGGPSLSSKTPRRSLDLRTHIRRQSSAELEKFKERWNRAVREDEGWRDPFDS

SEQ ID NO: 17775 - protein, 110 aa, Zea mays subsp. mays
  misc_feature (1)..(110): Ceres Seq. ID no. 12360751
MAPVFSRTAWKCVWHLIQNDLIHGWGLDMKLGYCAQGDRTEKVGVIDSEYVVHQGIPSLGGPSLSSKTPRRSLDLRTHIRRQSSAELEKFKERWNRAVREDEGWRDPFDS

SEQ ID NO: 17776 - DNA, 1321 bp, Zea mays subsp. mays
  misc_feature (1)..(1321): Ceres Seq. ID no. 12360757
gcacgagaccattacctagaacatcctaacaaaatcttttttttttgttcctgtgatgaactgagagagttggtttttgagttctgcaggctattgaagtttcgaagcgccaaatgaaactaagagaggcgtctggaaatagtgatatggtttcaaggctagaagcagctgagtcaaagctgcaagagttgaaatcgaatatgggggtattgggcaaagaagctgttgcagcaatgactgccgttgaggcccaacagcaaagattgaccttgcagcgtcttattgcattggtacattatttgtctagttgggtgatttgggccacttgactttttgtttgtttgtcttgaagttgtctattgtgtctcataacatttgtggacttaattgaaggttgaatcagagagaaactaccaccaaaaggtcctacaaattcttgatcaacttgagagagaggtctgatggtttcacatccacatcctttccatccttgcccattgtgctaaagaaagtttacaacttcaagaaaaatctggtcggttatgttatcttgattgagctttcttattttttttctagatggtatctgagcgccaaagaatcgaaggagcacctccggtggttgagagttccatgcctccaccgcctgcatatgaagaagtcaatggtatattcatgagaaatacagttgcagaattggtcgagactgtggagtatttcttggctgaggcaatccagtcataccaagccgaaagcgataccgagctcaacctttcaactggtgactacatagtggtccgaaaggtagtgctttcagatttctcttacacgtcatttacgaattgctcatgtagtcatgttatgctgcggccagcttcacacatattggttgcccatttcatgagtatctcaatcacatttcacattgtacccgaacttgattaccgaatttacataaaaaaccctttcctaatcaggtgtcgaacaatggatgggccgaaggtgaatgcagggggaaagctggttggttcccctacgactacatcgagaaacgggagcgtgtgcttgcaagtaaagtcggccaagttttctaagtcttccgctgagccatgtagtatatccccggggttgtacactgtgtgttgtttatgcttgtcatcttcagagaatcagaggagatctgtaattttgctgaaagctgcctgttgggtggtttgtttctgcctggccgccttaattgttcaaattcatgtggcaggaactgaatatattcattcttcagttatcctgtcaatatatataatttttttgtttgaagcac

SEQ ID NO: 17777 - protein, 247 aa, Zea mays subsp. mays
  misc_feature (1)..(247): Ceres Seq. ID no. 12360758
MVSERQRIEGAPPVVESSMPPPPAYEEVNGIFMRNTVAELVETVEYFLAEAIQSYQAESDTELNLSTGDYIVVRKVVLSDFSYTSFTNCSCSHVMLRPASHILVAHFMSISITFHIVPELDYRIYIKNPFLIRCRTMDGPKVNAGGKLVGSPTTTSRNGSVCLQVKSAKFSKSSAEPCSISPGLYTVCCLCLSSSENQRRSVILLKAACWVVCFCLAALIVQIHVAGTEYIHSSVILSIYIIFLFEA

SEQ ID NO: 17778 - protein, 229 aa, Zea mays subsp. mays
  misc_feature (1)..(229): Ceres Seq. ID no. 12360759
MPPPPAYEEVNGIFMRNTVAELVETVEYFLAEAIQSYQAESDTELNLSTGDYIVVRKVVLSDFSYTSFTNCSCSHVMLRPASHILVAHFMSISITFHIVPELDYRIYIKNPFLIRCRTMDGPKVNAGGKLVGSPTTTSRNGSVCLQVKSAKFSKSSAEPCSISPGLYTVCCLCLSSSENQRRSVILLKAACWVVCFCLAALIVQIHVAGTEYIHSSVILSIYIIFLFEA

SEQ ID NO: 17779 - protein, 215 aa, Zea mays subsp. mays
  misc_feature (1)..(215): Ceres Seq. ID no. 12360760
MRNTVAELVETVEYFLAEAIQSYQAESDTELNLSTGDYIVVRKVVLSDFSYTSFTNCSCSHVMLRPASHILVAHFMSISITFHIVPELDYRIYIKNPFLIRCRTMDGPKVNAGGKLVGSPTTTSRNGSVCLQVKSAKFSKSSAEPCSISPGLYTVCCLCLSSSENQRRSVILLKAACWVVCFCLAALIVQIHVAGTEYIHSSVILSIYIIFLFEA

SEQ ID NO: 17780 - DNA, 1296 bp, Zea mays subsp. mays
  misc_feature (1)..(1296): Ceres Seq. ID no. 12360769
gcacgagaccattacctagaacatcctaatcgaaaaagtcctctaatcctctctcgctcgctctctagtctcttttcttctctggtctcgcgttctccctcctctgttcgccgctttataccgcccgcccgcccaccagaacgacatacatcctcctcccccgtcccctccaatggggaacccgccggagctgtaccacaagatcctcaacatccccaaggacacctctccgcaggaactccgcgccgcgtacaagagcctcgtcaagaaatggcaccccgacaagcacccgccgtcgtccaggccggaggccgaggcgcgcttcaaggccatcagcgaggcctacgaggcgctcctggaccagcaagagaacagggccgtgttcgggccgtgcaacggcgaccgggcgggtggaggcgccggggcgcgcgtggagaggacgcgcagtgacggtttctgcgcgaggagcgcgcccggcaccccggccagggagttgaagaaggtgtacagcgccggcaaccccggcgggcgccccgccttcgccgagttctccagttccatcgtgcgcaaggcgccgccgctggagcgcaggctcgagtgcaccctcgaggagctctgccgcggatgcagcaaggaggtcacgttcacccgcgacgtcgtcaccaggaacgggtcgatcgtgaagaaggaggtgacgcagacggtgcaggtgaagccagggtggaggaaagggaagcaggtggtgctggaaggcatgggggacgagcggccggggtgcctgccgggcgacgccgtcctgacggtgtccgagaggaggcacccggcgttcaagcgggtgggcgacgacctggtgctcagggcggaggtgccgctggcgggcgcgctcaccggctggtccctctcgttccggctcctcggcggccggaaggtgacctgctcgttcgaggacgaggtcatccgccccgggcacgagagggtgatccgcggcgagggcatgccggtccccgggcggaaggacggcgcgcgcggcgacctcagggtgaagctcgaggtcgtgttccccacggagctctccgacgagcagcgcgccggcctcgccgagatcctcagagggtcctgctgatcggtcggtgtcgccgtcggtccaattaagtcctatcgtatcaagttttcttgggcgtgtgaccgtgtccgatgagtaactgagtacataaagagagatggtcgacgttcgttgtacatacgggttgtctatgtatatgtcgatatatatgaaacgtgaggcaagccttgtgc

SEQ ID NO: 17781 - protein, 316 aa, Zea mays subsp. mays
  misc_feature (1)..(316): Ceres Seq. ID no. 12360770
MGNPPELYHKILNIPKDTSPQELRAAYKSLVKKWHPDKHPPSSRPEAEARFKAISEAYEALLDQQENRAVFGPCNGDRAGGGAGARVERTRSDGFCARSAPGTPARELKKVYSAGNPGGRPAFAEFSSSIVRKAPPLERRLECTLEELCRGCSKEVTFTRDVVTRNGSIVKKEVTQTVQVKPGWRKGKQVVLEGMGDERPGCLPGDAVLTVSERRHPAFKRVGDDLVLRAEVPLAGALTGWSLSFRLLGGRKVTCSFEDEVIRPGHERVIRGEGMPVPGRKDGARGDLRVKLEVVFPTELSDEQRAGLAEILRGSC

SEQ ID NO: 17782 - protein, 175 aa, Zea mays subsp. mays
  misc_feature (1)..(175): Ceres Seq. ID no. 12360771
MQQGGHVHPRRRHQERVDREEGGDADGAGEARVEEREAGGAGRHGGRAAGVPAGRRRPDGVREEAPGVQAGGRRPGAQGGGAAGGRAHRLVPLVPAPRRPEGDLLVRGRGHPPRAREGDPRRGHAGPRAEGRRARRPQGEARGRVPHGALRRAARRPRRDPQRVLLIGRCRRRSN

SEQ ID NO: 17783 - DNA, 1252 bp, Zea mays subsp. mays
  misc_feature (1)..(1252): Ceres Seq. ID no. 12360776
gcacgagaccattacctagaacatcctaatcgaaaaaggtacaccaatcgcttcgtccccgcgtctcgccgcgtagcggcgtaggcgccacagaaactcgcacgccgctccccgccgtccggcccgagtcgccgtcgctgccgaatccaatccatggctccgcccgccgcacccaccgcgctgcaccaccgcacgcccctcctcctcccccgccgcaccgtcgccttgggtgccaccgccaccgcgcgcgccgccagggccgcttctctcgccgtcagggcccagccggacaccaccgccgcagccgtctccacctccgcgcctgagccggcgcccgagttcaagcctccgccggggttcaaggcgcccgagcccaagaggtacgaggtcaagtccggccaggtgggcagcgtcctcggcgcctcgctcgccatcccccttcgcctcggcaccggcgtcttcgtcctcgggtactcgccatctcttgtttctccatcagagataccatcagaccagtatgcactggaatttggagcttggaaggtgaaagaggaatcaaaaataggacagtgcaaacgaccagaaaagcctatcgagatatatgaatttgaaggttgtccattttgtcggaaggtcagagagatggtaacagtcttggacctagatgtattattttacccctgtcctcaaaaaggcccaacattccgacctaaagtcctcgaaatgggtggaaagaaacaattcccttacatggtagatccaaacacaggggtcgccatgtatgaatccgatgacatcataaaatatctagctgatacatatggcgatggaactgttccaattatgctatcacttggtctgttgacagcaattacagcagggcttgctactcttggtcgtattggaaagggaaattcctacattgcttcaaaagtcccaccgcagcccatagagatatgggcatgtgagggatctcccttctgtaaattagtacgagagacacttgtcgagttggaattgccacatctgctacacagctgcgcacgaggcagccccaaacgacaagaatttttcaagaaaaaggggcttttccaggcgccgtacatcgaagatcctaacacgggagtccagatgtttgaaagcgctgaaatcatagactacctgaaggcaacatatgccctgtacccaagctcgtagtgatgtatcagaaatggtcattgtaatgttgcgtgtagattcagttcttcccggt

SEQ ID NO: 17784 - protein, 347 aa, Zea mays subsp. mays
  misc_feature (1)..(347): Ceres Seq. ID no. 12360777
MAPPAAPTALHHRTPLLLPRRTVALGATATARAARAASLAVRAQPDTTAAAVSTSAPEPAPEFKPPPGFKAPEPKRYEVKSGQVGSVLGASLAIPLRLGTGVFVLGYSPSLVSPSEIPSDQYALEFGAWKVKEESKIGQCKRPEKPIEIYEFEGCPFCRKVREMVTVLDLDVLFYPCPQKGPTFRPKVLEMGGKKQFPYMVDPNTGVAMYESDDIIKYLADTYGDGTVPIMLSLGLLTAITAGLATLGRIGKGNSYIASKVPPQPIEIWACEGSPFCKLVRETLVELELPHLLHSCARGSPKRQEFFKKKGLFQAPYIEDPNTGVQMFESAEIIDYLKATYALYPSS

SEQ ID NO: 17785 - protein, 184 aa, Zea mays subsp. mays
  misc_feature (1)..(184): Ceres Seq. ID no. 12360778
MVTVLDLDVLFYPCPQKGPTFRPKVLEMGGKKQFPYMVDPNTGVAMYESDDIIKYLADTYGDGTVPIMLSLGLLTAITAGLATLGRIGKGNSYIASKVPPQPIEIWACEGSPFCKLVRETLVELELPHLLHSCARGSPKRQEFFKKKGLFQAPYIEDPNTGVQMFESAEIIDYLKATYALYPSS

SEQ ID NO: 17786 - DNA, 985 bp, Zea mays subsp. mays
  misc_feature (1)..(985): Ceres Seq. ID no. 12360792
gcagcgaggaacgtgatcagaatcagccagtggtgcttgtgacggggtgctcggagggcggcatcggccacgcgatggcacgcgccttcgctgcggccgggtgcgccgtcgtggccacggcgcggtcacgcggttccatgcgcggtctcgacggcgacccgcggttcctgctgctggagctcgacgtgcgctccgacgagagcgcgcgcgccgccgtggcggatgcgctgcgggagcacggccgcatcgacgtgctcgtcaacaacgctggggttcacctcgtcgcaccactcgccgaggtgcccatggagtccttccaccaggttttcgacaccaatgtctatggtgcaatgaggttaattcaatctgttattcctcacatgatggaaagaaggaaaggaacaattgtgaatgttggaagtattaccgctctggcacctggaccatgggctggtgtgtattcagcatccaaagctgctcttcatgcattgagtgactcgttaagggttgaactaagaagcttcggcataaacgtgatgaccgtcgccccaggagggacgaggtcgaatcttgggaattcttctgcagccaagtatgatcagatgcacgagtggaagtactacaagaaatacgaggaagggctccgagccaggactggcatttcccagggccccaggtccactccagcagaagagcttgcaaaggcggtggttgcatcggttctaaagaagaaccctccagcttggttcgcttacggccagtactctctattctgtcgattttgtattatgcaccgctatggttcagagattgcctctataagtttgtcatgaaatgttagtccctggaagaataatggctgtatggaccaaagagagagctggacaggcccagttcaattcatttcattgtactgacagcctgttacgtcgtactcctatattgtatatatagaactatgctctgtacctgttggcaacttggc

SEQ ID NO: 17787 - protein, 276 aa, Zea mays subsp. mays
  misc_feature (1)..(276): Ceres Seq. ID no. 12360793
SEERDQNQPVVLVTGCSEGGIGHAMARAFAAAGCAVVATARSRGSMRGLDGDPRFLLLELDVRSDESARAAVADALREHGRIDVLVNNAGVHLVAPLAEVPMESFHQVFDTNVYGAMRLIQSVIPHMMERRKGTIVNVGSITALAPGPWAGVYSASKAALHALSDSLRVELRSFGINVMTVAPGGTRSNLGNSSAAKYDQMHEWKYYKKYEEGLRARTGISQGPRSTPAEELAKAVVASVLKKNPPAWFAYGQYSLFCRFCIMHRYGSEIASISLS

SEQ ID NO: 17788 - protein, 252 aa, Zea mays subsp. mays
  misc_feature (1)..(252): Ceres Seq. ID no. 12360794
MARAFAAAGCAVVATARSRGSMRGLDGDPRFLLLELDVRSDESARAAVADALREHGRIDVLVNNAGVHLVAPLAEVPMESFHQVFDTNVYGAMRLIQSVIPHMMERRKGTIVNVGSITALAPGPWAGVYSASKAALHALSDSLRVELRSFGINVMTVAPGGTRSNLGNSSAAKYDQMHEWKYYKKYEEGLRARTGISQGPRSTPAEELAKAVVASVLKKNPPAWFAYGQYSLFCRFCIMHRYGSEIASISLS

SEQ ID NO: 17789 - protein, 231 aa, Zea mays subsp. mays
  misc_feature (1)..(231): Ceres Seq. ID no. 12360795
MRGLDGDPRFLLLELDVRSDESARAAVADALREHGRIDVLVNNAGVHLVAPLAEVPMESFHQVFDTNVYGAMRLIQSVIPHMMERRKGTIVNVGSITALAPGPWAGVYSASKAALHALSDSLRVELRSFGINVMTVAPGGTRSNLGNSSAAKYDQMHEWKYYKKYEEGLRARTGISQGPRSTPAEELAKAVVASVLKKNPPAWFAYGQYSLFCRFCIMHRYGSEIASISLS

SEQ ID NO: 17790 - DNA, 912 bp, Zea mays subsp. mays
  misc_feature (1)..(912): Ceres Seq. ID no. 12360805
gcacgagaccattacctagaacatcctaatcaaaaatatattttatcagcgtgcggccacgtacacggtacacgcccccagctgcttcgaaaccaactccagaaaactcggcacagcctaggccgattcgcctgtgcctgtgcgtacgtgagctgcgaggtagatagatggctgcggtggtggaggcggcgccggctgcggagacggcggcaaaggccgtggcagaggaggaggccggcgtcaccgcgcctgggcctccggttggtggctccaactccaaggccctgatcgtcgttgacaaggtggatgataaacctttttctttgaataatatgccaaggaactccaatgatagagacattgctcttgcaacagtggaaatagagaagataaactctttgattaaagcttgggaagagaatgagaaggcaaaagcagataacaagactgctaagaaacaatctattattctttcatgggagaacacaaagaaggcaatcatagaagctgagttgaaaaagaagaaagaagaactagagaagaaaatggctgaatatgctgagaagatgaaaaacaagaaggcaatcatccataagaaggccgaggaaaagagagcgatggttatggcccagcatggtgaagaaattctcaagactgaggagatggcagctaagtaccgtgccactagggtagctccaaaaatttcttaggtgctttagagcataaggaaggtttgatttttatgctttcttatttgtgcattaaaatgccatggtgcaactttatcaacttatgtaattgttacccttcttaattgtttgtatagactactatttatggtgcacaaatgatactattggtgtataattagaccatcattgaccaaaatgaaaagcatataaatgtgaatgt

SEQ ID NO: 17791 - protein, 180 aa, Zea mays subsp. mays
  misc_feature (1)..(180): Ceres Seq. ID no. 12360806
MAAVVEAAPAAETAAKAVAEEEAGVTAPGPPVGGSNSKALIVVDKVDDKPFSLNNMPRNSNDRDIALATVEIEKINSLIKAWEENEKAKADNKTAKKQSIILSWENTKKAIIEAELKKKKEELEKKMAEYAEKMKNKKAIIHKKAEEKRAMVMAQHGEEILKTEEMAAKYRATRVAPKIS

SEQ ID NO: 17792 - protein, 125 aa, Zea mays subsp. mays
  misc_feature (1)..(125): Ceres Seq. ID no. 12360807
MPRNSNDRDIALATVEIEKINSLIKAWEENEKAKADNKTAKKQSIILSWENTKKAIIEAELKKKKEELEKKMAEYAEKMKNKKAIIHKKAEEKRAMVMAQHGEEILKTEEMAAKYRATRVAPKIS

SEQ ID NO: 17793 - protein, 95 aa, Zea mays subsp. mays
  misc_feature (1)..(95): Ceres Seq. ID no. 12360808
ARDHYLEHPNQKYILSACGHVHGTRPQLLRNQLQKTRHSLGRFACACAYVSCEVDRWLRWWRRRRLRRRRQRPWQRRRPASPRLGLRLVAPTPRP

SEQ ID NO: 17794 - DNA, 1204 bp, Zea mays subsp. mays
  misc_feature (1)..(1204): Ceres Seq. ID no. 12360865
gcacgagaccattacctagaacatcctaatcaaaaaatacaaaaaaggcagacggctacccgttcgaaaaaaaaaacagcagcagccggcggcggccatagcccaggagcccggagctgtttcttcgtcgcaggaatgggcaaggacggcatccagtacgcagtggtggacgccttcacggcggagccgttcaagggcaacccagccgcggtgtgcctcctcgaggacgccgccaaggccgccgacgagcggtggatgcagtccgtcgccgccgagttcaacatctccgagaccgccttcctcctccgggaaaagtcctccgcggccggcgccgtcccgctgttccagctccgatggttcacccccgtcgctgaggtggagctctgcggccacgccacgctggcttccgcccacttcctcttcacatccgtcctcgcggagcacgagaagctcgtcgagttctcgaccaagtccgggattcttacggccaaaaaggtccctgcgccgcagagcacgggcgtgtcgggcgaggggaagctgttcattgagctggatttccccacgattgaccttgttgattgccatccttccgagctgccggcaatccccgacaccctcaacggagcctccattgtcagcgttcacaagtcaacgacggccggtgacctcattgtggagctttcatcaggaaaggaggttgctgatatcattcctaacattcatgaaattgaaaagtgttccggcagaggaattattgttacagggccagcgcctgctggatctggctacgacttcttcacgcgttttttctgcccaaaatttggaatagatgaggatcccgtttgtggcagtgcacattgtgttttagcaccttactggggtgggaagctggggaaacacaaactgatagcgtttcaagcatcccctcggagtggaatactatacctggagttagaagctacaggcaggagagtgcgaattcagggagaagcggtcagtgtgatgactggcaccctcttagcataacccctgctcaatgaacatcctatgtcttcacttcagttgtgtggcatgatttctctgcagctaggaataaattaagtctcttttcacctgtccaaaggtgttagatacactgcttccagactatgaagcagagtgtatgaggatgtttcttttgaataaatcagtgggtgttcaatgc

SEQ ID NO: 17795 - protein, 341 aa, Zea mays subsp. mays
  misc_feature (1)..(341): Ceres Seq. ID no. 12360866
ARDHYLEHPNQKIQKRQTATRSKKKTAAAGGGHSPGARSCFFVAGMGKDGIQYAVVDAFTAEPFKGNPAAVCLLEDAAKAADERWMQSVAAEFNISETAFLLREKSSAAGAVPLFQLRWFTPVAEVELCGHATLASAHFLFTSVLAEHEKLVEFSTKSGILTAKKVPAPQSTGVSGEGKLFIELDFPTIDLVDCHPSELPAIPDTLNGASIVSVHKSTTAGDLIVELSSGKEVADIIPNIHEIEKCSGRGIIVTGPAPAGSGYDFFTRFFCPKFGIDEDPVCGSAHCVLAPYWGGKLGKHKLIAFQASPRSGILYLELEATGRRVRIQGEAVSVMTGTLLA

SEQ ID NO: 17796 - protein, 296 aa, Zea mays subsp. mays
  misc_feature (1)..(296): Ceres Seq. ID no. 12360867
MGKDGIQYAVVDAFTAEPFKGNPAAVCLLEDAAKAADERWMQSVAAEFNISETAFLLREKSSAAGAVPLFQLRWFTPVAEVELCGHATLASAHFLFTSVLAEHEKLVEFSTKSGILTAKKVPAPQSTGVSGEGKLFIELDFPTIDLVDCHPSELPAIPDTLNGASIVSVHKSTTAGDLIVELSSGKEVADIIPNIHEIEKCSGRGIIVTGPAPAGSGYDFFTRFFCPKFGIDEDPVCGSAHCVLAPYWGGKLGKHKLIAFQASPRSGILYLELEATGRRVRIQGEAVSVMTGTLLA

SEQ ID NO: 17797 - protein, 256 aa, Zea mays subsp. mays
  misc_feature (1)..(256): Ceres Seq. ID no. 12360868
MQSVAAEFNISETAFLLREKSSAAGAVPLFQLRWFTPVAEVELCGHATLASAHFLFTSVLAEHEKLVEFSTKSGILTAKKVPAPQSTGVSGEGKLFIELDFPTIDLVDCHPSELPAIPDTLNGASIVSVHKSTTAGDLIVELSSGKEVADIIPNIHEIEKCSGRGIIVTGPAPAGSGYDFFTRFFCPKFGIDEDPVCGSAHCVLAPYWGGKLGKHKLIAFQASPRSGILYLELEATGRRVRIQGEAVSVMTGTLLA

SEQ ID NO: 17798 - DNA, 1726 bp, Zea mays subsp. mays
  misc_feature (1)..(1726): Ceres Seq. ID no. 12360869
acgtgttcgcgcgcaagccgccaccaccaccagtctgtcccgttccccacctcaccctcttcttccctatactcgggctacacctgcgaccactgctcacccgtcgcggccatgactcccgcatccacctcccctctcgccgccgccgtcctgcccacgaacttatcttccttctctcgctgcccacctcgccgcctcccgcgcatctcctgcttggcagcgcccgaacgcgggggcaacaatgcgtcgaacgcctcgccggcaccgcagcagccgaggtggggtgccgcggtatccgccgcgctcgcggcggccgtggttgccgcctctatgccagcttacgcggacctgaacaagtttgaggccgagcagcggggcgaatttggcattggctctgccgcgcagttcggctcggccgatctcaagaaggctgtccacgttaacgagaacttcaggcgggccaacttcacatccgctgatatgagagagtcagatttcagtggttccacattcaatggtgcctatcttgaaaaggctgttgcttataaggcaaatttcactggtgctgatttgagtgatacattaatggaccgcatggttctgaatgaagctaaccttacaaatgctgttcttgtacggtcagtcctcacacgtagtgatcttggaggagccatcattgaaggtgctgacttcagtgatgctgttattgacctatcacagaaacaggcattatgcaaatatgcaagtgggaccaaccccatgacaggggtgagcactcgaaaaagcctaggatgtggcaatagccgtcgaaatgcatacgggagcccttcatcccctctgttgagtgccccgccacagaagattcttgaccgagatggtttctgtgatccagctactggtatgtgcgatgcaagctgagaggtttgatccaacatggaaactggtcactggatggtgtacatacattggagattgagtaagagcagaacagtgcagagaaacaagtcgtttttcttctcctcttgccattgttgtaacattgcaacacggaatcaggtaaaattcaggatgtagatgagatatgcacgctgagtactgaatggcatgtatagcatagtatgtatacgaaaatagatcatatcaatcatgtgcttcatgcttgaaaggagtggcccctgccttgttctaaagccaacatagccaaaagcagaagtttcaacagaggagtgtctcagcaaataaactttccactccatttcacaaacattgctgatgcatcggcagcaaccagagctgccgttctggatgaaccgcacaaatagacgtccatcgacagcttgactgtttgtgcagattgtcaggtcagttgctgaagtctagagatggcaatgggtacccgaaacccgaatacccgacggggtttacccgatatgaaggcgggtacgggatgatttctctacccgcgggtatgttaatgggtaaaaacctctacccgttgggtagacgggtacgggtatgggttggtactacccatacccgtctacccgtgggtaaaatatacccgcatcaatagcactataaacatctaatagagtccaacttagctagaataaaacccttctctagttatcatttgtttagataccaagttatgtaatcatatgatttgttatatgtaaaattgaagttgtttttatatgtttatttaatattttgagtgattggc

SEQ ID NO: 17799 - protein, 305 aa, Zea mays subsp. mays
  misc_feature (1)..(305): Ceres Seq. ID no. 12360870
TCSRASRHHHQSVPFPTSPSSSLYSGYTCDHCSPVAAMTPASTSPLAAAVLPTNLSSFSRCPPRRLPRISCLAAPERGGNNASNASPAPQQPRWGAAVSAALAAAVVAASMPAYADLNKFEAEQRGEFGIGSAAQFGSADLKKAVHVNENFRRANFTSADMRESDFSGSTFNGAYLEKAVAYKANFTGADLSDTLMDRMVLNEANLTNAVLVRSVLTRSDLGGAIIEGADFSDAVIDLSQKQALCKYASGTNPMTGVSTRKSLGCGNSRRNAYGSPSSPLLSAPPQKILDRDGFCDPATGMCDAS

SEQ ID NO: 17800 - protein, 268 aa, Zea mays subsp. mays
  misc_feature (1)..(268): Ceres Seq. ID no. 12360871
MTPASTSPLAAAVLPTNLSSFSRCPPRRLPRISCLAAPERGGNNASNASPAPQQPRWGAAVSAALAAAVVAASMPAYADLNKFEAEQRGEFGIGSAAQFGSADLKKAVHVNENFRRANFTSADMRESDFSGSTFNGAYLEKAVAYKANFTGADLSDTLMDRMVLNEANLTNAVLVRSVLTRSDLGGAIIEGADFSDAVIDLSQKQALCKYASGTNPMTGVSTRKSLGCGNSRRNAYGSPSSPLLSAPPQKILDRDGFCDPATGMCDAS

SEQ ID NO: 17801 - protein, 195 aa, Zea mays subsp. mays
  misc_feature (1)..(195): Ceres Seq. ID no. 12360872
MPAYADLNKFEAEQRGEFGIGSAAQFGSADLKKAVHVNENFRRANFTSADMRESDFSGSTFNGAYLEKAVAYKANFTGADLSDTLMDRMVLNEANLTNAVLVRSVLTRSDLGGAIIEGADFSDAVIDLSQKQALCKYASGTNPMTGVSTRKSLGCGNSRRNAYGSPSSPLLSAPPQKILDRDGFCDPATGMCDAS

SEQ ID NO: 17802 - DNA, 1320 bp, Zea mays subsp. mays
  misc_feature (1)..(1320): Ceres Seq. ID no. 12360889
gcacgagaccattacctagaacatcctaatcgaaaaacttgtcgtctcgtccactcggtcgatcgccttatctcctcctctcccagtcctcccgcccctcgccccatcccccaccacccagtcagtgtctgtcaccgcctcaccgaccacacgccaagggaagaagcagcagcgccatggccgcgccgctcacggccgtccgggcccgcctcctcctcctcccagtgacctgcacggcagccggtaccaccggccggccggcccctccgtccaagagcagcaggccgcgtctactaccaccaggcaccacccggtgccggtgctccaggcctcccatggaggcggtggcgccggtgtccgcggcggcggtgggcggcgctgctgctgctgccggcggacgcggcgctggcggtgggcggcgagttggggatcctcgagggccgcagcttcgcgctgctgcacccgctcatcatgggcgggctcttcgcgtacacgctctgggcggggtacctcggctggcagtggcgccgggtgcgcaccgtccaggacgagatcaacgcgctcaagaagcagctcaagcccgccgccgcggccactcccgcggcggtcggcgccggcgcggactcctcctccaccacaaccccgccgcccgctgcggccagcaagtcgccgtcgccggcggaggcccggatcgaggagctcaccgacgagcggaaggcgctgctcaaggggtcgttccgggaccgccacttcaacgcgggctccctcctcctcggcctcggcgtgctcgagtccgtcggcggcgcgctcaacacctggttccgcaccggcaagctgttcccgggcccgcacctcttcgcgggcgccgccatcaccgtgctgtgggccgccgcggccgcgctcgtcccggcgatgcagaagggggacgagacggcccgcagcctgcacatcgcgctcaacgccgtcaacgtcctgctcttcgtctggcagatccccaccgggctcgagatcgtcggcaaggtcttcgagttcaccacctggccatgagacgacgtccttgtgcgtgcgtgtctgctctgctatgcgcatcctgcatgtcccttcacccttctcttctctttcgtcccatcccatgacccatgtattgcttggtagtgttaggttcaatctccgtctgcaggtcgttgttttcttgacctgtcgaagtcgatccatgttcacaaagctgtgatgctgagaatgccaatcacaagttcctttacactgtacatgacaagagttcgttctgcagtacacagtctttagttaagccgaatcgcc

SEQ ID NO: 17803 - protein, 319 aa, Zea mays subsp. mays
  misc_feature (1)..(319): Ceres Seq. ID no. 12360890
MAAPLTAVRARLLLLPVTCTAAGTTGRPAPPSKSSRPRLLPPGTTRCRCSRPPMEAVAPVSAAAVGGAAAAAGGRGAGGGRRVGDPRGPQLRAAAPAHHGRALRVHALGGVPRLAVAPGAHRPGRDQRAQEAAQARRRGHSRGGRRRRGLLLHHNPAARCGQQVAVAGGGPDRGAHRRAEGAAQGVVPGPPLQRGLPPPRPRRARVRRRRAQHLVPHRQAVPGPAPLRGRRHHRAVGRRGRARPGDAEGGRDGPQPAHRAQRRQRPALRLADPHRARDRRQGLRVHHLAMRRRPCACVSALLCASCMSLHPSLLFRPIP

SEQ ID NO: 17804 - protein, 266 aa, Zea mays subsp. mays
  misc_feature (1)..(266): Ceres Seq. ID no. 12360891
MEAVAPVSAAAVGGAAAAAGGRGAGGGRRVGDPRGPQLRAAAPAHHGRALRVHALGGVPRLAVAPGAHRPGRDQRAQEAAQARRRGHSRGGRRRRGLLLHHNPAARCGQQVAVAGGGPDRGAHRRAEGAAQGVVPGPPLQRGLPPPRPRRARVRRRRAQHLVPHRQAVPGPAPLRGRRHHRAVGRRGRARPGDAEGGRDGPQPAHRAQRRQRPALRLADPHRARDRRQGLRVHHLAMRRRPCACVSALLCASCMSLHPSLLFRPIP

SEQ ID NO: 17805 - protein, 191 aa, Zea mays subsp. mays
  misc_feature (1)..(191): Ceres Seq. ID no. 12360892
MGGLFAYTLWAGYLGWQWRRVRTVQDEINALKKQLKPAAAATPAAVGAGADSSSTTTPPPAAASKSPSPAEARIEELTDERKALLKGSFRDRHFNAGSLLLGLGVLESVGGALNTWFRTGKLFPGPHLFAGAAITVLWAAAAALVPAMQKGDETARSLHIALNAVNVLLFVWQIPTGLEIVGKVFEFTTWP

SEQ ID NO: 17806 - DNA, 2498 bp, Zea mays subsp. mays
  misc_feature (1)..(2498): Ceres Seq. ID no. 12360983
gcacgagaccattacctagaacatcctaatcgaaaaaaactgccttttcttccggcttccaacttccaagtggcgactgctgccgactgccgggtgcgagaagagggagagatcagagtatcagacaagctgttgtccgaatccactccggcgaggacgagtgctgaggtcgaaatggggagaggagcggatgaggtggtgaaggtcgtggattcggaggacggcgagggggaggaggaagaggcagaggccgcggcggcggaggggtcgagcaaggagacgccgatgctgccaaggatgccggtgcgcgtgctactcgccgagggcgacgactccacgcgccacgtcatctccgcgctgctacgcaagtgcggctaccgagttgctgcagcctctgatggtgtgaaggcgtgggacatattaaaagaaaaatctttcaacatagaccttgttttaactgaagttgaactgcctttgatgtctgggttcctcttgttatccacgatcatggagcatgatgcatccaagaacatccctgttataatgatgtcttcacacgactctgtaagcatggttttcaaatgcatgctaaagggtgcagcagatttccttgttaagccgctaagaaagaacgaattaaggaacttgtggcagcacgtttggagaaaacaactggcaaacggtgggcccgatgtgcagcacatacaagaagagaatcttgcagaaagaatggaacagaagactggcgtgacaaaagctgataatttgaacagcgatggtccccgtaaaaatagagaatgcagtgaacaagaaagtgatgctcaaagttcttgcacaaggtcagagttggaggctgaaagtaagcaaactaacaacattttggagtatatgcaatcaactgaaaggcatttgtctattcgtagccacaaggatttagagctaaatggagagaccaaaacacgaactaagggtaataacttgattccaacaagagaagacgatttatcgccaaagaaaagaacatgtttgaatgacaataattctgagagaacttccagagatatggagctagtccacattatggacaatcagcagaagcatgacacacagagggatgtggatactatgagaacaacatccaggggaaatgatgagaactccatcccagcacaccagttggaactttctcttagaagaactgactatggaaaattagagaaccacgagaaaaatgatagaagaacactgaaccattcaacttcatctgcattttacttgtataattgcaggactgcgtccagcttagtaaatgctggtgatggtcaattatgcagcacctcagaaacactagtggatgttgaaaatagaaatggagatttggcagctctgtctgaagacacgactgaaacaaatcgtcctcctatcagagttgtaccatttcctgtccctgttcaatgcttcacatttgatgggcagccgttctggaatggtacaccggtggcatctccattctacccacagtcagctccccccatttggaatatcaaaacaccaacgtggcaagaatcaactccacaagcaacttcactgccgcaaaaatcgcaacagaatgaaccaattgaaatggatgctaaaccagttgaaaatgcagaggaacaatttgtcgtaggtcctcccagtgccagtgggaagcagctgcatgttgaaattcccaaagatgatctacggcatatttctcctgtgaccggtgaaagtggaatcagtacggtgctagacagcaccagaaatactctgagcagcagtggctgtgatagcacttccaaccagatcaccgcctctactgaaccatcatccaatgtatacaggggcgttcctgaaaccgcaagagccgaaggtttacgacacctgagccagcgtgaggctgcactgaacaagttccggctaaagaggaaggacaggtgctttgagaagaaggttcggtaccagagccggaaattactcgcagagcagcgtccacgggtcaagggccagtttgtccgtcaagatcatagcatccaaggaagctagggtccagttactgagctggaactctttcccattatctaaaaaaaaagtcactgtaagtgactccactgctgggtatcctgatgtcaggttttttcgaagagttagaagcaatcagaccgaagttacggtttgctgtgtatgtttgttaaagcttgtaatatatgtatgtataggctgactctgttctttccttaggttaggcacaggacctggcacgttctagacggtttgtcggtagacgttagaaaatacaggcatacttgtgtcctttagtagcacgtgtgctttaagccttgtattatgtaactagccaagttgtttttgatgtttcggattagatgtacactgtggatgtatggcgtgaaggatgtccaccaaagtatgctcgtttctgtgcagcttgttgcaatgaacattgttggcctggtttt

SEQ ID NO: 17807 - protein, 688 aa, Zea mays subsp. mays
  misc_feature (1)..(688): Ceres Seq. ID no. 12360984
ARDHYLEHPNRKKLPFLPASNFQVATAADCRVREEGEIRVSDKLLSESTPARTSAEVEMGRGADEVVKVVDSEDGEGEEEEAEAAAAEGSSKETPMLPRMPVRVLLAEGDDSTRHVISALLRKCGYRVAAASDGVKAWDILKEKSFNIDLVLTEVELPLMSGFLLLSTIMEHDASKNIPVIMMSSHDSVSMVFKCMLKGAADFLVKPLRKNELRNLWQHVWRKQLANGGPDVQHIQEENLAERMEQKTGVTKADNLNSDGPRKNRECSEQESDAQSSCTRSELEAESKQTNNILEYMQSTERHLSIRSHKDLELNGETKTRTKGNNLIPTREDDLSPKKRTCLNDNNSERTSRDMELVHIMDNQQKHDTQRDVDTMRTTSRGNDENSIPAHQLELSLRRTDYGKLENHEKNDRRTLNHSTSSAFYLYNCRTASSLVNAGDGQLCSTSETLVDVENRNGDLAALSEDTTETNRPPIRVVPFPVPVQCFTFDGQPFWNGTPVASPFYPQSAPPIWNIKTPTWQESTPQATSLPQKSQQNEPIEMDAKPVENAEEQFVVGPPSASGKQLHVEIPKDDLRHISPVTGESGISTVLDSTRNTLSSSGCDSTSNQITASTEPSSNVYRGVPETARAEGLRHLSQREAALNKFRLKRKDRCFEKKVRYQSRKLLAEQRPRVKGQFVRQDHSIQGS

SEQ ID NO: 17808 - protein, 630 aa, Zea mays subsp. mays
  misc_feature (1)..(630): Ceres Seq. ID no. 12360985
MGRGADEVVKVVDSEDGEGEEEEAEAAAAEGSSKETPMLPRMPVRVLLAEGDDSTRHVISALLRKCGYRVAAASDGVKAWDILKEKSFNIDLVLTEVELPLMSGFLLLSTIMEHDASKNIPVIMMSSHDSVSMVFKCMLKGAADFLVKPLRKNELRNLWQHVWRKQLANGGPDVQHIQEENLAERMEQKTGVTKADNLNSDGPRKNRECSEQESDAQSSCTRSELEAESKQTNNILEYMQSTERHLSIRSHKDLELNGETKTRTKGNNLIPTREDDLSPKKRTCLNDNNSERTSRDMELVHIMDNQQKHDTQRDVDTMRTTSRGNDENSIPAHQLELSLRRTDYGKLENHEKNDRRTLNHSTSSAFYLYNCRTASSLVNAGDGQLCSTSETLVDVENRNGDLAALSEDTTETNRPPIRVVPFPVPVQCFTFDGQPFWNGTPVASPFYPQSAPPIWNIKTPTWQESTPQATSLPQKSQQNEPIEMDAKPVENAEEQFVVGPPSASGKQLHVEIPKDDLRHISPVTGESGISTVLDSTRNTLSSSGCDSTSNQITASTEPSSNVYRGVPETARAEGLRHLSQREAALNKFRLKRKDRCFEKKVRYQSRKLLAEQRPRVKGQFVRQDHSIQGS

SEQ ID NO: 17809 - protein, 593 aa, Zea mays subsp. mays
  misc_feature (1)..(593): Ceres Seq. ID no. 12360986
MLPRMPVRVLLAEGDDSTRHVISALLRKCGYRVAAASDGVKAWDILKEKSFNIDLVLTEVELPLMSGFLLLSTIMEHDASKNIPVIMMSSHDSVSMVFKCMLKGAADFLVKPLRKNELRNLWQHVWRKQLANGGPDVQHIQEENLAERMEQKTGVTKADNLNSDGPRKNRECSEQESDAQSSCTRSELEAESKQTNNILEYMQSTERHLSIRSHKDLELNGETKTRTKGNNLIPTREDDLSPKKRTCLNDNNSERTSRDMELVHIMDNQQKHDTQRDVDTMRTTSRGNDENSIPAHQLELSLRRTDYGKLENHEKNDRRTLNHSTSSAFYLYNCRTASSLVNAGDGQLCSTSETLVDVENRNGDLAALSEDTTETNRPPIRVVPFPVPVQCFTFDGQPFWNGTPVASPFYPQSAPPIWNIKTPTWQESTPQATSLPQKSQQNEPIEMDAKPVENAEEQFVVGPPSASGKQLHVEIPKDDLRHISPVTGESGISTVLDSTRNTLSSSGCDSTSNQITASTEPSSNVYRGVPETARAEGLRHLSQREAALNKFRLKRKDRCFEKKVRYQSRKLLAEQRPRVKGQFVRQDHSIQGS

SEQ ID NO: 17810 - DNA, 2723 bp, Zea mays subsp. mays
  misc_feature (1)..(2723): Ceres Seq. ID no. 12361022
gcacgagaccattacctagaacatcctaatcgaaaaagggctctacttggacggggtgaggagaggcgaggagagcagagcaggcagccgacgacttccccacgcggaggcgttgcttcccggtcgtccaacgcctggcatcccttccttctcctcacccagcagcagccggtcggcctcggctagatctcgccggccgcctccaattggttgtccactgtggccgggccgaggggtacttatctataggcccgcagatctgcgcctgcgcccgtgggaatctccgcacctcgctatccgtctcttggatagatcgatcttccgtcgctggttccccttcgccccacacgagtacttccaaggaactggaacttccagccggcacggggattcgagcttctgctctatcagcaactccactgggcgctgagggtctgtagcagagcggtgcgatcggggcagaagggagccatgatgagggggcaggcgtggctggcgctgctggtcgtggtggcgctggccttggcggacgcggcggcggggaggttcgtggtggagaagaacagcctcgaggtgacctcccccgacgagctcaagggcaagtacgagtgcgccatcggcaacttcggggtgccgcagtacgggggcaccctgcacggatgggtcgagtaccccaagtccaaccggaaggcgtgccagagcttcgaccagttcgacatctcgttcaagcccaagcaggctgggggacgacccatcttcgtcctcgtcgaccgcggagaatgtttcttcacaaccaaggcatggaatgcacaaaatgctggagctgctgcagttcttgttgtggatgacaagtcggaacctctaatcacaatggacaacccagaagaaggcaaagagcacctagaaaacatcactattccctcagtgcttataacaaagaaattgggggaaaaccttaagaaatccgcggaaaatggcgatatgctcagcgttcttctggactggagagaatcccttccccatcccgatgagcgtgtagagtatgagttctggacaaacagtaatgatgaatgtggtcctaaatgtgatatgcaaatggacttcgtgaggagctttagaggaactgcacaaattcttgagaaaaagggttacactcagtttactcctcattatatcacatggtattgtccagaagcttttgttgatagcaagcaatgcaaatcacagtgcatcaatcatgggagatattgtgcaccagacccagatcaggattttagccaagggtatgatggaagaaatgttgtggttcaaaacctacatcagatttgtgtattcaagattgctaatgagactggaaagccatggctgtggtgggattatgtgcatgatttcgcacttaggtgtccaatgaaggataagaaatacaataatgactgtgcccatgatgttatcaaatcacttggattggacatcgagaatataaacaagtgtgttggagaccctgaagccgatgtggaaaatgaaattctaaaggcagaacaagatgcccaaattggtcatggtaaaaggggagatgtcacaatactaccaacccttgtcatcaacaacaagcaatatagaggtaagctggacaaagttgctgtcctgaaagcgatctgttcaggatttgaggagacaactgaacctgctatttgtttgagcgaagagattcaaacaaatgagtgtttggagaacaatgggggttgctggctggacaaagctaataatgttactgcatgcaaggataccttccgcgggcgtgtttgtgagtgccctattgtgagaggtgtaaaatttgttggtgatggatacacccattgtgaagcttccggtgttggtaggtgtgagatcagtaatggagggtgctggcaggaaactaaagatgggaaaacaatctctgcctgctcaaacgaaatatctgaaggttgtaaatgtccaatgggtttcaagggtgatggagaaaaaagttgtgaagacattgatgaatgccaagagaaactttattgtcagtgcaagggttgcagctgcaagaatacgtggggaagctatgaatgcagctgtggtgatgacaatatgctatacatgagagagcatgacacttgcatcagcaaagagggaactgccactactgttggctggagcttcctctgggttattttctttggacttgtttttgccggggttggagcatacgctgtgtacaaatacaggctgcggagttacatggattcagagatccgtgccatcatggctcagtacatgcctctggataaccaagaaggagcaaaccagcatcaggtcgtgcacgccaatgatatctgaagctgcactccttttctgaagcagaaatagagggggcgtgcaacatttcacttgtgctgctgcatcattgggtcatgggttttacaggtataggtcaactaggctcaaaaatacacaggttatgcgagatcaagatctactgtaccatgaattaagatttaagagagagacgttgtgcgcctcttgttacgacacttgatgaacagcatagggaatgataccatcatagttttagtagtccttcgttgccttcagtttgtcttcaaagagttcttgttgcctcttcacatgcatgtaaacactgtaaataccgttacctgaataaagcttcagcctgctaggctacaagcagggttcattgt

SEQ ID NO: 17811 - protein, 629 aa, Zea mays subsp. mays
  misc_feature (1)..(629): Ceres Seq. ID no. 12361023
MMRGQAWLALLVVVALALADAAAGRFVVEKNSLEVTSPDELKGKYECAIGNFGVPQYGGTLHGWVEYPKSNRKACQSFDQFDISFKPKQAGGRPIFVLVDRGECFFTTKAWNAQNAGAAAVLVVDDKSEPLITMDNPEEGKEHLENITIPSVLITKKLGENLKKSAENGDMLSVLLDWRESLPHPDERVEYEFWTNSNDECGPKCDMQMDFVRSFRGTAQILEKKGYTQFTPHYITWYCPEAFVDSKQCKSQCINHGRYCAPDPDQDFSQGYDGRNVVVQNLHQICVFKIANETGKPWLWWDYVHDFALRCPMKDKKYNNDCAHDVIKSLGLDIENINKCVGDPEADVENEILKAEQDAQIGHGKRGDVTILPTLVINNKQYRGKLDKVAVLKAICSGFEETTEPAICLSEEIQTNECLENNGGCWLDKANNVTACKDTFRGRVCECPIVRGVKFVGDGYTHCEASGVGRCEISNGGCWQETKDGKTISACSNEISEGCKCPMGFKGDGEKSCEDIDECQEKLYCQCKGCSCKNTWGSYECSCGDDNMLYMREHDTCISKEGTATTVGWSFLWVIFFGLVFAGVGAYAVYKYRLRSYMDSEIRAIMAQYMPLDNQEGANQHQVVHANDI

SEQ ID NO: 17812 - protein, 628 aa, Zea mays subsp. mays
  misc_feature (1)..(628): Ceres Seq. ID no. 12361024
MRGQAWLALLVVVALALADAAAGRFVVEKNSLEVTSPDELKGKYECAIGNFGVPQYGGTLHGWVEYPKSNRKACQSFDQFDISFKPKQAGGRPIFVLVDRGECFFTTKAWNAQNAGAAAVLVVDDKSEPLITMDNPEEGKEHLENITIPSVLITKKLGENLKKSAENGDMLSVLLDWRESLPHPDERVEYEFWTNSNDECGPKCDMQMDFVRSFRGTAQILEKKGYTQFTPHYITWYCPEAFVDSKQCKSQCINHGRYCAPDPDQDFSQGYDGRNVVVQNLHQICVFKIANETGKPWLWWDYVHDFALRCPMKDKKYNNDCAHDVIKSLGLDIENINKCVGDPEADVENEILKAEQDAQIGHGKRGDVTILPTLVINNKQYRGKLDKVAVLKAICSGFEETTEPAICLSEEIQTNECLENNGGCWLDKANNVTACKDTFRGRVCECPIVRGVKFVGDGYTHCEASGVGRCEISNGGCWQETKDGKTISACSNEISEGCKCPMGFKGDGEKSCEDIDECQEKLYCQCKGCSCKNTWGSYECSCGDDNMLYMREHDTCISKEGTATTVGWSFLWVIFFGLVFAGVGAYAVYKYRLRSYMDSEIRAIMAQYMPLDNQEGANQHQVVHANDI

SEQ ID NO: 17813 - protein, 496 aa, Zea mays subsp. mays
  misc_feature (1)..(496): Ceres Seq. ID no. 12361025
MDNPEEGKEHLENITIPSVLITKKLGENLKKSAENGDMLSVLLDWRESLPHPDERVEYEFWTNSNDECGPKCDMQMDFVRSFRGTAQILEKKGYTQFTPHYITWYCPEAFVDSKQCKSQCINHGRYCAPDPDQDFSQGYDGRNVVVQNLHQICVFKIANETGKPWLWWDYVHDFALRCPMKDKKYNNDCAHDVIKSLGLDIENINKCVGDPEADVENEILKAEQDAQIGHGKRGDVTILPTLVINNKQYRGKLDKVAVLKAICSGFEETTEPAICLSEEIQTNECLENNGGCWLDKANNVTACKDTFRGRVCECPIVRGVKFVGDGYTHCEASGVGRCEISNGGCWQETKDGKTISACSNEISEGCKCPMGFKGDGEKSCEDIDECQEKLYCQCKGCSCKNTWGSYECSCGDDNMLYMREHDTCISKEGTATTVGWSFLWVIFFGLVFAGVGAYAVYKYRLRSYMDSEIRAIMAQYMPLDNQEGANQHQVVHANDI

SEQ ID NO: 17814 - DNA, 1606 bp, Zea mays subsp. mays
  misc_feature (1)..(1606): Ceres Seq. ID no. 12361067
  misc_feature (1197)..(1197): n is a, c, t, g, unknown, or other
gcacgagaccattacctagaacatcctaatcgaaaaaagcaagccttcatctatcgagtcgcccgtcaccacagctgatattgaggcgacgcgccggccgtccagatcaaccaaaaaagagaaaaaaaaacagtagccatgtcgcggctcctcctcctcggggccgccgtgctgctgctcgcgtcggccgccacggcgcaggactgcctgtccgcgacgttcagcggcgggcggaccttcgggcggtgcaacaacctgccgtcgctgatcgccagcctgcactggacgtaccacccggagaacggcaccgcggacgtggcgttccgcgcgccgtcggacgccagcggctgggtcgcctggggcatcaaccccgaccgcggcggcagcatgggcggcagcagcgtcttcgtggcctcgccctcgcaggacggcagcggcgcggtgtccatcctcatgacccacctggagagcacgtcgcccagcctaaccaacaacaccctcaagttcaaggtgcccgtcggccccgccgccgagtactccaacggcgcctacaccatcttcgccatggtggagcttcccggcaactccacgcagcagttcacggtgtggcaggccggcgcgaccagcaacggtgccatctcccctcacccgacggcgccggccaacttggccagcacccagaggctggacttcctctccgggtccagcaccgccgcctcaaactccaggcttcaccgccgtaacatccacggcatgctgaacgcgatcgcctggggcgtcctgatccccgtcggcgccatcatcgcgcggtacctgcgcgtgttcgagtccgcggacccggcgtggttctacctgcacatcgcgtgccagtgctccggctacatcctgggcgtggccggctggggcctggggctgaagctcggcagcgagtcggccggcgtcacctaccagccgcaccgcagcatcggcatcgccatcttctgcctggccacgctgcaggtgttcgcgctgctgctccggcccgacaagaagaacaggtacaggctgtactggaacatctaccaccactccgtcggctactccgtcatcgtcctcggcgccgtcaacatcttcaaggggctcgacatcctcaagccggccagcggctacaagaccgcctacattgtcgtcctggccacgctcggcggcgtcgcgctntgcctcgaggccatcacgtggcccatcgccatccggaagcgcaggcgtaacgccgccgacaaggcgtccaacggcaacggcaacggctggcagcagggtgcgtaggggcctgatcgctgggcttgtgcgcgtgcgtgtgtttgtgctatagttttgatgcgagagagaggtctgatatcgatgtgctgatgccgttgttcagagagacatcgttgctgatgtgtttctttcctgttactactgcctctgtagtctgtactcctacctagaagagtagctcctttgattttttttcttctgttttgttgttgaattttattagggttctatagtgccatttgtacacattttttcccttcttattgatgtacgtacgactgctttgattactgtatggtttcagtcagtc

SEQ ID NO: 17815 - protein, 387 aa, Zea mays subsp. mays
  misc_feature (1)..(387): Ceres Seq. ID no. 12361068
  misc_feature (353)..(353): Xaa is any aa, unknown or other
MSRLLLLGAAVLLLASAATAQDCLSATFSGGRTFGRCNNLPSLIASLHWTYHPENGTADVAFRAPSDASGWVAWGINPDRGGSMGGSSVFVASPSQDGSGAVSILMTHLESTSPSLTNNTLKFKVPVGPAAEYSNGAYTIFAMVELPGNSTQQFTVWQAGATSNGAISPHPTAPANLASTQRLDFLSGSSTAASNSRLHRRNIHGMLNAIAWGVLIPVGAIIARYLRVFESADPAWFYLHIACQCSGYILGVAGWGLGLKLGSESAGVTYQPHRSIGIAIFCLATLQVFALLLRPDKKNRYRLYWNIYHHSVGYSVIVLGAVNIFKGLDILKPASGYKTAYIVVLATLGGVAXCLEAITWPIAIRKRRRNAADKASNGNGNGWQQGA

SEQ ID NO: 17816 - protein, 304 aa, Zea mays subsp. mays
  misc_feature (1)..(304): Ceres Seq. ID no. 12361069
  misc_feature (270)..(270): Xaa is any aa, unknown or other
MGGSSVFVASPSQDGSGAVSILMTHLESTSPSLTNNTLKFKVPVGPAAEYSNGAYTIFAMVELPGNSTQQFTVWQAGATSNGAISPHPTAPANLASTQRLDFLSGSSTAASNSRLHRRNIHGMLNAIAWGVLIPVGAIIARYLRVFESADPAWFYLHIACQCSGYILGVAGWGLGLKLGSESAGVTYQPHRSIGIAIFCLATLQVFALLLRPDKKNRYRLYWNIYHHSVGYSVIVLGAVNIFKGLDILKPASGYKTAYIVVLATLGGVAXCLEAITWPIAIRKRRRNAADKASNGNGNGWQQGA

SEQ ID NO: 17817 - protein, 282 aa, Zea mays subsp. mays
  misc_feature (1)..(282): Ceres Seq. ID no. 12361070
  misc_feature (248)..(248): Xaa is any aa, unknown or other
MTHLESTSPSLTNNTLKFKVPVGPAAEYSNGAYTIFAMVELPGNSTQQFTVWQAGATSNGAISPHPTAPANLASTQRLDFLSGSSTAASNSRLHRRNIHGMLNAIAWGVLIPVGAIIARYLRVFESADPAWFYLHIACQCSGYILGVAGWGLGLKLGSESAGVTYQPHRSIGIAIFCLATLQVFALLLRPDKKNRYRLYWNIYHHSVGYSVIVLGAVNIFKGLDILKPASGYKTAYIVVLATLGGVAXCLEAITWPIAIRKRRRNAADKASNGNGNGWQQGA

SEQ ID NO: 17818 - DNA, 2511 bp, Zea mays subsp. mays
  misc_feature (1)..(2511): Ceres Seq. ID no. 12361105
gcacgagaccattacctagaacatcctaatcgaaaaaccaatccgactctcgtccctccccgactcaccccactgcccagccgcacgcgccgccgtgtgttcgcgctctctcccactgtgtctgtgacgactgggtaggctacagccgccgcccgtcgccaggtgccgatcccttcgccgacgaagagcatccaccaggctccggccaagggcgtgatggcggctgtagggagcttgcagccgggggtggagactctacatgtgcaggattacaaggacgcgcctccagccaaggctgtggcggccgcggtagagagcttgcagccggcgatggagagcctacatgtgcaggaattcaaggacgcggctccggctaagggcgtttccgccgctgctgtagggagcttgcagccggggatggagaacctgcaggtgcaggattacaaggacgctagcatgtattatggtgcttacccggcttatccctatggagcaccctatggtggctggggggagtactccacatacttgagccatgatggagcacagacaccaactgctggcgcgtatgctgacatgtactatggccatgctgcatatggtcatatttatgggtctcagaattaccagtatccatcgacctacagcaagcaacagaattccactgccaagctgtcgtccaatggtaaaagtgagaaattggctccagctccggaaggggatgtctccactattgttgttgatgaggtgaaagtcctgaaaaatccaaacccgaccctgaaggcagacaggaatgcaccaggttccaatggttcatatggccgatctagtgtgcgttctggtaactatcagaaccagactagttggtcacactatccatattatagtagtgagatgttctctgacaagcagcaaaagtttaccagcaatcacaattcgactgctcccaatgataaaaccaaggggcagtcgaggaaccaaaacacgagacagtatcctcatctcatgggtctgcaaacaccaacttccccatcagtttactcagctaatggaatatatcggtatgatggcagctatggacctagcctttggtatggatcacacatgtatagttctgggttatatggtggatggaattcactgtatgatgggaagtacagaaccagaggaagatgtaataatggctattatgcttatggtaatggaagccttgatggctttaatgagctgaaaagagggccaagaagtgggatgtacacaaaccagctggggcttggagctactactgaagtaccagcaaaagagcaggaccttctgtctgctaatggttcacatcctgccatgaaggaccagtataatcgggctgactttgcggaaacatactcagacgcaaaattcttcattatcaaatcatacagtgaagacgatgttcacaagagcgtaaagtacaatgtgtgggctagcactccaaatggtaataagaaacttgatgctgcctatcaagaggctaaagaaaaatcaagcgaaactcctgttttccttcttttctctgtgaatgcaagtggccagtttgttgggcttgctgagatggtgggtcgtgttgattttaacaaaacagtagatcattggcaacaggacaagtggactggttgtttccctgtcaagtggcacattgtgaaggatgttccaaacagtttgctgaagcacatcattctcgagaacaatgaaaacaagccagtgacaaacagcagagatacacatgaggtgaagcttgagcaaggccttcaagtgcttaaggttttcaaggatcatgtgtgcaagacatctatactggatgactttggcttttacgataatcgtgagaagatgatgcaatataggaaagcaaagcagcagcagtcactgaaaaaggtcatcgatgtgaaggtgcctaacgccactgacgcagatacaagtctcgtaggaactggatcaacggaactcaccaatgttgaggctgatgtcttgaacaaagagctttcattagacaaagcagtagagaaaaacgaggagaaaggaaatgatgtcgccccacaggacctgaaatcatcagctgagaagtcggcaagcccaaatggctgttaatttttttttttttggttagctcggccattgacagtggtatggggcgggaacctgaggctgggggttgtttgaggaaatcctgagatcccattgagcttgtttcttgcccttgttttctatagttcatagaggattagttagttgcttgtgtgtttgggtgataggtgaggtcagtgtcctggcatggcaggtatttaggaatagaaggacgattaactggggtttacaatggtggttcatgggtttgaggttgtgtttccatctatttgcctttcccctctctatattccagttcctacctctctagattctggacaaacgtagtgcttatttaatgctggctggtttaagaacctgaaatggacaaaggaatccaatcaagtgttt

SEQ ID NO: 17819 - protein, 635 aa, Zea mays subsp. mays
  misc_feature (1)..(635): Ceres Seq. ID no. 12361106
MAAVGSLQPGVETLHVQDYKDAPPAKAVAAAVESLQPAMESLHVQEFKDAAPAKGVSAAAVGSLQPGMENLQVQDYKDASMYYGAYPAYPYGAPYGGWGEYSTYLSHDGAQTPTAGAYADMYYGHAAYGHIYGSQNYQYPSTYSKQQNSTAKLSSNGKSEKLAPAPEGDVSTIVVDEVKVLKNPNPTLKADRNAPGSNGSYGRSSVRSGNYQNQTSWSHYPYYSSEMFSDKQQKFTSNHNSTAPNDKTKGQSRNQNTRQYPHLMGLQTPTSPSVYSANGIYRYDGSYGPSLWYGSHMYSSGLYGGWNSLYDGKYRTRGRCNNGYYAYGNGSLDGFNELKRGPRSGMYTNQLGLGATTEVPAKEQDLLSANGSHPAMKDQYNRADFAETYSDAKFFIIKSYSEDDVHKSVKYNVWASTPNGNKKLDAAYQEAKEKSSETPVFLLFSVNASGQFVGLAEMVGRVDFNKTVDHWQQDKWTGCFPVKWHIVKDVPNSLLKHIILENNENKPVTNSRDTHEVKLEQGLQVLKVFKDHVCKTSILDDFGFYDNREKMMQYRKAKQQQSLKKVIDVKVPNATDADTSLVGTGSTELTNVEADVLNKELSLDKAVEKNEEKGNDVAPQDLKSSAEKSASPNGC

SEQ ID NO: 17820 - protein, 597 aa, Zea mays subsp. mays
  misc_feature (1)..(597): Ceres Seq. ID no. 12361107
MESLHVQEFKDAAPAKGVSAAAVGSLQPGMENLQVQDYKDASMYYGAYPAYPYGAPYGGWGEYSTYLSHDGAQTPTAGAYADMYYGHAAYGHIYGSQNYQYPSTYSKQQNSTAKLSSNGKSEKLAPAPEGDVSTIVVDEVKVLKNPNPTLKADRNAPGSNGSYGRSSVRSGNYQNQTSWSHYPYYSSEMFSDKQQKFTSNHNSTAPNDKTKGQSRNQNTRQYPHLMGLQTPTSPSVYSANGIYRYDGSYGPSLWYGSHMYSSGLYGGWNSLYDGKYRTRGRCNNGYYAYGNGSLDGFNELKRGPRSGMYTNQLGLGATTEVPAKEQDLLSANGSHPAMKDQYNRADFAETYSDAKFFIIKSYSEDDVHKSVKYNVWASTPNGNKKLDAAYQEAKEKSSETPVFLLFSVNASGQFVGLAEMVGRVDFNKTVDHWQQDKWTGCFPVKWHIVKDVPNSLLKHIILENNENKPVTNSRDTHEVKLEQGLQVLKVFKDHVCKTSILDDFGFYDNREKMMQYRKAKQQQSLKKVIDVKVPNATDADTSLVGTGSTELTNVEADVLNKELSLDKAVEKNEEKGNDVAPQDLKSSAEKSASPNGC

SEQ ID NO: 17821 - protein, 568 aa, Zea mays subsp. mays
  misc_feature (1)..(568): Ceres Seq. ID no. 12361108
MENLQVQDYKDASMYYGAYPAYPYGAPYGGWGEYSTYLSHDGAQTPTAGAYADMYYGHAAYGHIYGSQNYQYPSTYSKQQNSTAKLSSNGKSEKLAPAPEGDVSTIVVDEVKVLKNPNPTLKADRNAPGSNGSYGRSSVRSGNYQNQTSWSHYPYYSSEMFSDKQQKFTSNHNSTAPNDKTKGQSRNQNTRQYPHLMGLQTPTSPSVYSANGIYRYDGSYGPSLWYGSHMYSSGLYGGWNSLYDGKYRTRGRCNNGYYAYGNGSLDGFNELKRGPRSGMYTNQLGLGATTEVPAKEQDLLSANGSHPAMKDQYNRADFAETYSDAKFFIIKSYSEDDVHKSVKYNVWASTPNGNKKLDAAYQEAKEKSSETPVFLLFSVNASGQFVGLAEMVGRVDFNKTVDHWQQDKWTGCFPVKWHIVKDVPNSLLKHIILENNENKPVTNSRDTHEVKLEQGLQVLKVFKDHVCKTSILDDFGFYDNREKMMQYRKAKQQQSLKKVIDVKVPNATDADTSLVGTGSTELTNVEADVLNKELSLDKAVEKNEEKGNDVAPQDLKSSAEKSASPNGC

SEQ ID NO: 17822 - DNA, 1870 bp, Zea mays subsp. mays
  misc_feature (1)..(1870): Ceres Seq. ID no. 12361130
ctctaaaaccccaaccgtcgacgttcactcctcaccccctgcggccctgctcttttgagcctcactcctcagtcttcacgccgccggggcagtgctaagatccaggacacgcgctgtcccgctagcaccacgcctccccttgtcatcgtcctcctcccacgtgctgctgtgggggtgcagacgggagacacatccggacctgattgatttcttcgttttgttctgctggtttacatggctgcaagaaagaaaaagcctttgcttattgcttgccaagcaaccagtgccagaataacaagatctcaggctgctgcaaatagtacaagatctgggctggctccttctgtaccagtacctctgaaaacggagcataaccatgcagcgaaaaaaaagatgaaaagggaagcttcagatgaaaatgcttctgctgatgctggagcttcagctcctctgcctaaaaggcgtacagttctcaagaatgtaactaacataagctgtgctaaaatttccaaaaggtgcactgctgtgactgggctgaagttgggtccctcccagaaggctgggcagagcataaacaagcaatgcacaaacaagatctccatgcttctccctctggctgttggagggagttcacttgtggatgattctaataatgctgaagaaacacaaatggtagaccttttggcacagaaagagaagcagattgttttgcttaaggaggctcagccattacagaatactgaacaaaacaaaggcggtgcttgtgatgaggcatctgttgaggaaagaaatgccatgaatgtacacgaaactgctgccttaaaggctggggtctctaatggtttaaacattgtagatattgacaaaaataatggtgatcctcaaatgtgtgttacctacgttgcagagatatacagaaatctaatggcctcagagcttataagaagacctaggtcaaattacatggagactttgcaacaggacatcacagctagcatgcgaggtgttctaattgattggcttgttgaggtttcggacgaatataagcttgtggcagatacactttaccttacagtatatcttattgaccaatttctttctcagaactgtatccaaacgcacaagctgcaacttcttgggataactagtatgctgattgcctcgaaatatgaagagtattctgctcctagtgctgaagaattttgtaacataacggctggtacatatgcaaaggctgaggttctggaaatggagcaacaagtgcttaatgatctgggctttcatttatctgttccaacaacaaacacatttctcaggagattccttagagcagcacaggcttctcgtacagctcatctgaccactttgaattatctggcgagttatcttgccgagttgactttaatcagttacgatttcatgaaatttcttccctcagaggtggcagcatcttcgattttccttgcaaaatggacacttgaccaatctgaccatccttggaaccctactcttgagcactacacgtcttacaaaagcttcgatattagaacttgcgtgcgggctctacaggaactgcagcacaacaccagtaattgccccctcaacgccatccgtgagaagtatgggcagcagaagttcgagtgcgttgccaacctcaggtcaccggagctgctgcggtcgctcttcagttgatgtgctcccctgcactctgctgattcactcgccatttgctgcaacgatcctgacactgtataaaatatttcttcagtttctgttccatttccaaactttcttcagtttgaacatgcattctgtgacttgggtcaccgacaaaagaggcgcgacacactaatatatcaatttgtaactc

SEQ ID NO: 17823 - protein, 485 aa, Zea mays subsp. mays
  misc_feature (1)..(485): Ceres Seq. ID no. 12361131
MAARKKKPLLIACQATSARITRSQAAANSTRSGLAPSVPVPLKTEHNHAAKKKMKREASDENASADAGASAPLPKRRTVLKNVTNISCAKISKRCTAVTGLKLGPSQKAGQSINKQCTNKISMLLPLAVGGSSLVDDSNNAEETQMVDLLAQKEKQIVLLKEAQPLQNTEQNKGGACDEASVEERNAMNVHETAALKAGVSNGLNIVDIDKNNGDPQMCVTYVAEIYRNLMASELIRRPRSNYMETLQQDITASMRGVLIDWLVEVSDEYKLVADTLYLTVYLIDQFLSQNCIQTHKLQLLGITSMLIASKYEEYSAPSAEEFCNITAGTYAKAEVLEMEQQVLNDLGFHLSVPTTNTFLRRFLRAAQASRTAHLTTLNYLASYLAELTLISYDFMKFLPSEVAASSIFLAKWTLDQSDHPWNPTLEHYTSYKSFDIRTCVRALQELQHNTSNCPLNAIREKYGQQKFECVANLRSPELLRSLFS

SEQ ID NO: 17824 - protein, 432 aa, Zea mays subsp. mays
  misc_feature (1)..(432): Ceres Seq. ID no. 12361132
MKREASDENASADAGASAPLPKRRTVLKNVTNISCAKISKRCTAVTGLKLGPSQKAGQSINKQCTNKISMLLPLAVGGSSLVDDSNNAEETQMVDLLAQKEKQIVLLKEAQPLQNTEQNKGGACDEASVEERNAMNVHETAALKAGVSNGLNIVDIDKNNGDPQMCVTYVAEIYRNLMASELIRRPRSNYMETLQQDITASMRGVLIDWLVEVSDEYKLVADTLYLTVYLIDQFLSQNCIQTHKLQLLGITSMLIASKYEEYSAPSAEEFCNITAGTYAKAEVLEMEQQVLNDLGFHLSVPTTNTFLRRFLRAAQASRTAHLTTLNYLASYLAELTLISYDFMKFLPSEVAASSIFLAKWTLDQSDHPWNPTLEHYTSYKSFDIRTCVRALQELQHNTSNCPLNAIREKYGQQKFECVANLRSPELLRSLFS

SEQ ID NO: 17825 - protein, 363 aa, Zea mays subsp. mays
  misc_feature (1)..(363): Ceres Seq. ID no. 12361133
MLLPLAVGGSSLVDDSNNAEETQMVDLLAQKEKQIVLLKEAQPLQNTEQNKGGACDEASVEERNAMNVHETAALKAGVSNGLNIVDIDKNNGDPQMCVTYVAEIYRNLMASELIRRPRSNYMETLQQDITASMRGVLIDWLVEVSDEYKLVADTLYLTVYLIDQFLSQNCIQTHKLQLLGITSMLIASKYEEYSAPSAEEFCNITAGTYAKAEVLEMEQQVLNDLGFHLSVPTTNTFLRRFLRAAQASRTAHLTTLNYLASYLAELTLISYDFMKFLPSEVAASSIFLAKWTLDQSDHPWNPTLEHYTSYKSFDIRTCVRALQELQHNTSNCPLNAIREKYGQQKFECVANLRSPELLRSLFS

SEQ ID NO: 17826 - DNA, 2169 bp, Zea mays subsp. mays
  misc_feature (1)..(2169): Ceres Seq. ID no. 12361134
gcacgagaccattacctagaacatcctaatcgaaaaagctcgacgcatcttcgccgccgctcaaccttccccccacgccccaacctatccactcgaaaccttctttcccccgggagacgattcgtcagggagaggaaagaggcaagaggggccatggacgctgccaagttggtgacgccgatcgctgtgtctcacattctggcgcacccgtcggcgggctccgacggcgcagtgaccgatctcgtcgttcaggtcctcgacctgaagtccgtcggcacgggcagccggttcagtttcacagcaactgacgggaaggataagatcaaggcgatgcttcccaccaacttcgggtcggaggtccgctctggcaacctgaagaacctcggcctcatccgcatcatcgactacacttgcaacgtcgtcaaaggcaaagatgacaaagtcttggttgtcatcaaatgcgagcttgtgtgccaagcgcttgacgccgagatcaacggcgaggccaaaaaagaggagcctccaattgtgctgaagcctaaggacgaatgcgtgggcgtgactcccccactcgctatgaagcccaagcaggaggtgaagtctgcgtcccagatcgtgaatgagcagcgtggaaatactgctcctgtcaagcccctttccatgacaaagagggtccatcctttgatcactctgaacccctaccagggtaactgggtcattaaggtgcgggtcacgagcaaaggcaacctgagaacctacaggaatgctcgcggagaaggctgtgtcttcaatgtagagctcaccgatgaggatggcacccagatccaagccaccatgtttaatgacgctgcaaagaagttctatccgatttttgagctgggaaatgtctattatgtctcaaaaggatctcttagaattgccaacaagcagttcaagactgtccaaaatgactacgagatgtcactaaacgagaatgctattgttgaagaagcagagggggagacttgcattccgcaagtgcaatacaaccttgtcaagattgatcagctaggatcatatgtcggtggcagggagcttgtagatattgttggtgtggttcagagcgtatctcccacactcagtgtcaggagaaagattgacaacgagacaataccgaagcgtgacattgttgtggcggatgactctggcaaaactgttagtatctctctttggaatgatcttgctactacgactgggcaagagcttttggacatggctgacagttcgcctgttgttgcgataaagagcctaaaagtgtctgactttcaaggcgtgtctctttctactgtaggcaaaagtactcttgcgattaatcctgatctacacgaggctcagaatctcaagtcatggtatgactctgaaggcaaagatacttcgctggcaccaattggtgcagaaatgggtgccgcacgggccggtggcttcaagtccacgtattctgatagagtttttctgtctcacattactagtgatcctgccatgggccaggaaaagcctgttttctttagtttgtatgccaccataagccacatcaagcctgaccagaacatgtggtaccgtgcttgcaagacctgcaacaagaaggtgactgaaacttttggatctggatactggtgcgagggatgccaaaagaatgactcggaatgctcactgagatacatcatggtcgtcaaggtctccgatcctactggcgaggcatgggtctctgtgttcaacgagcatgcagagaagatcattggctgcagcgccgacgagcttgatcggatcaggaaagaggagggggacgacagttatgctctgaagctcaaggaagccacctgggttcctcacctgttccgcgtcagcgtcacacagcatgaatacaataacgagaaaaggcagagaatcactgtgaggagtgaagcgccggtcgagcacgcagctgaatccaagtacctgcttgaacagatagcgaagcttactgcttgctagtagaagatgcaacctttctggtggttcgttaagggctgccctccgagatgttccctctgggttttagcacttctgtaagatatatgtagaggtttggttaccttgatgtcaagcaacagatgctaggacagttcaagcatgatgcatgaagcgtttgcc

SEQ ID NO: 17827 - protein, 669 aa, Zea mays subsp. mays
  misc_feature (1)..(669): Ceres Seq. ID no. 12361135
ARDHYLEHPNRKSSTHLRRRSTFPPRPNLSTRNLLSPGRRFVRERKEARGAMDAAKLVTPIAVSHILAHPSAGSDGAVTDLVVQVLDLKSVGTGSRFSFTATDGKDKIKAMLPTNFGSEVRSGNLKNLGLIRIIDYTCNVVKGKDDKVLVVIKCELVCQALDAEINGEAKKEEPPIVLKPKDECVGVTPPLAMKPKQEVKSASQIVNEQRGNTAPVKPLSMTKRVHPLITLNPYQGNWVIKVRVTSKGNLRTYRNARGEGCVFNVELTDEDGTQIQATMFNDAAKKFYPIFELGNVYYVSKGSLRIANKQFKTVQNDYEMSLNENAIVEEAEGETCIPQVQYNLVKIDQLGSYVGGRELVDIVGVVQSVSPTLSVRRKIDNETIPKRDIVVADDSGKTVSISLWNDLATTTGQELLDMADSSPVVAIKSLKVSDFQGVSLSTVGKSTLAINPDLHEAQNLKSWYDSEGKDTSLAPIGAEMGAARAGGFKSTYSDRVFLSHITSDPAMGQEKPVFFSLYATISHIKPDQNMWYRACKTCNKKVTETFGSGYWCEGCQKNDSECSLRYIMVVKVSDPTGEAWVSVFNEHAEKIIGCSADELDRIRKEEGDDSYALKLKEATWVPHLFRVSVTQHEYNNEKRQRITVRSEAPVEHAAESKYLLEQIAKLTAC

SEQ ID NO: 17828 - protein, 618 aa, Zea mays subsp. mays
  misc_feature (1)..(618): Ceres Seq. ID no. 12361136
MDAAKLVTPIAVSHILAHPSAGSDGAVTDLVVQVLDLKSVGTGSRFSFTATDGKDKIKAMLPTNFGSEVRSGNLKNLGLIRIIDYTCNVVKGKDDKVLVVIKCELVCQALDAEINGEAKKEEPPIVLKPKDECVGVTPPLAMKPKQEVKSASQIVNEQRGNTAPVKPLSMTKRVHPLITLNPYQGNWVIKVRVTSKGNLRTYRNARGEGCVFNVELTDEDGTQIQATMFNDAAKKFYPIFELGNVYYVSKGSLRIANKQFKTVQNDYEMSLNENAIVEEAEGETCIPQVQYNLVKIDQLGSYVGGRELVDIVGVVQSVSPTLSVRRKIDNETIPKRDIVVADDSGKTVSISLWNDLATTTGQELLDMADSSPVVAIKSLKVSDFQGVSLSTVGKSTLAINPDLHEAQNLKSWYDSEGKDTSLAPIGAEMGAARAGGFKSTYSDRVFLSHITSDPAMGQEKPVFFSLYATISHIKPDQNMWYRACKTCNKKVTETFGSGYWCEGCQKNDSECSLRYIMVVKVSDPTGEAWVSVFNEHAEKIIGCSADELDRIRKEEGDDSYALKLKEATWVPHLFRVSVTQHEYNNEKRQRITVRSEAPVEHAAESKYLLEQIAKLTAC

SEQ ID NO: 17829 - protein, 559 aa, Zea mays subsp. mays
  misc_feature (1)..(559): Ceres Seq. ID no. 12361137
MLPTNFGSEVRSGNLKNLGLIRIIDYTCNVVKGKDDKVLVVIKCELVCQALDAEINGEAKKEEPPIVLKPKDECVGVTPPLAMKPKQEVKSASQIVNEQRGNTAPVKPLSMTKRVHPLITLNPYQGNWVIKVRVTSKGNLRTYRNARGEGCVFNVELTDEDGTQIQATMFNDAAKKFYPIFELGNVYYVSKGSLRIANKQFKTVQNDYEMSLNENAIVEEAEGETCIPQVQYNLVKIDQLGSYVGGRELVDIVGVVQSVSPTLSVRRKIDNETIPKRDIVVADDSGKTVSISLWNDLATTTGQELLDMADSSPVVAIKSLKVSDFQGVSLSTVGKSTLAINPDLHEAQNLKSWYDSEGKDTSLAPIGAEMGAARAGGFKSTYSDRVFLSHITSDPAMGQEKPVFFSLYATISHIKPDQNMWYRACKTCNKKVTETFGSGYWCEGCQKNDSECSLRYIMVVKVSDPTGEAWVSVFNEHAEKIIGCSADELDRIRKEEGDDSYALKLKEATWVPHLFRVSVTQHEYNNEKRQRITVRSEAPVEHAAESKYLLEQIAKLTAC

SEQ ID NO: 17830 - DNA, 2634 bp, Zea mays subsp. mays
  misc_feature (1)..(2634): Ceres Seq. ID no. 12361141
gcacgagaccattacctagaacatcctaatcgaaaaagcctacacgcccccgcctcctgccctctgtccacatcctcgcctctccccactagttcgctcgcgtgatggtggtgcgggagcagcggaacaagggttcgtcgtcggccaccctgtgacaccccgcccacgcccccgcggcggaacctgcaaacccggaggccggagctccgacttcgtcggccatcgaccgcgtctgatcggcgctgggacctgccgtccggacgaaatcggtcagcatgacggggcccaatgagaaggcggcggcgggaggcgggggtggcgagaggcgcaagtacccgatccacgtggaggactacgagctgtacgaggagatcgggcagggcgtcagcgccatcgtgtaccgcgcactctgcaagccactcgacgagatcgtcgccgtcaaggtggtcgacttcgagcgcaccaacagcgacctgaacaacatcgttcgtgaagctcagacaatgattttgatagaccatcctaacgttgtcaaggcgcattgttcatttgcaaaagaccaaacgttatgggtggttatgccgtatatggctggggggtcctgtcttcacataatgaaatcagtgcatcctactggattcgaggaacccatcatcgcgactatacttcgtgaagtcctgaaaggtttagagtatcttcaccatcatggctctatacatcgagatgtgaaggcaggaaatattctagtcgattctcggggtggaattaaacttggggactttggagtctctgcttgcctttttgattctggtgatagacagagggccaggaatacttttgtgggaacaccttgctggatggcgcccgaggttatggagcaactacatggatatgatttcagagcagacatatggtcctttggaattactgcacttgaaacttgctcatggtcatgctcctttctctaagtaccctcccatgaaggtcttgctcatgacacttcagaatgctcctccaggtcttgactatgaaagagataagaaattcacgaggaacttcaagcaaatggttgctatgtgtttggtaaaagacccttcaaagaggccttcggcaaaaaagttgttgaagcaaccatttttcaagcaagctcgttccactgattttattgcacgaaagcttttagaaggattgcctggccttggtgttagatatcaagctttgaaggaaaaggatcaacatttaatggctcaaaagaaaatgtctgatggaaagaaagaagaaatctcgcaggatgaatacaaaaggggtatcagcagctggacctttgacatggatgacctgagatctcaagcttcattgggcacagaatgtgaagacagtaccttatgcaaagattcagatatatctttctatgacttggacagtttacaggatcaagcaccagaagggccacacttgttgagagatttctcaacgaagtatgatgctgacattgaaaatgatatgacaaccaaagataagtcagccgtttcatctcctgatcagcctgctagcttagtgaggaatgcttctatgcgtgggatgcccataaacggttctttcaggaaagacaactctacagaaagcttcgatttggaatgtcaagagaaacatctggacattgttccgactagctcatcccctgaaaggaagttttcttttagttcttgctcatcaaatgggctccttttgtccaaagagagctctaaacagcaaactagcatccacaaccttgacaagtgtaatggagggcatttgcatgtatcagatgaaacatcttctgaagctgctcctaagacacataaatcagcagaggaccatgatgatagatccaaacctccacttataagaggtcgatttagagttatacctgggcatgttgactcaaaggctcaaccacctggcctacagaagtgtcacagcatgcagacaatttctcgccttccatcattaagtataccctcttccgcagaagttgcatcaaccattattggtggctccttctacatgcagctatatagtattctacagacaaatatgcttcagagggaccaaatacttaacgcgatgaagcaggtgagtggttgtgctatggcttcaccaggcgtaccttctatggcttcaccgtgtatcccttccacaagtcgctcgacatctccatcaggtgtaccatcagttgacagatccatgctggaagctgcacaagaaagggagaaagagctgctgaatgaggtcttggagctgcaatggcggttattgtgcacacaagatgaggttcagaagcttaaagcaaaggcagcgcagatctgatgctgaagctgttaagggagcattaagggcgcgtcatgataagatgatctgttcatgcggttttcaaatggctatttagcataggagagagatacaaaattaaggattggtgtatatttaaaaaggtgctagtgatgctcgagtgtccaatcctgtctaagcaggacattaatttcgtacaatctgtgtgtttgtgtttatgggtggcatggcgctgtgtttttgttggagcgcaattcccaggttgggacttgggaaagatagcttaacatgcctatgggtttt

SEQ ID NO: 17831 - protein, 487 aa, Zea mays subsp. mays
  misc_feature (1)..(487): Ceres Seq. ID no. 12361142
MDMISEQTYGPLELLHLKLAHGHAPFSKYPPMKVLLMTLQNAPPGLDYERDKKFTRNFKQMVAMCLVKDPSKRPSAKKLLKQPFFKQARSTDFIARKLLEGLPGLGVRYQALKEKDQHLMAQKKMSDGKKEEISQDEYKRGISSWTFDMDDLRSQASLGTECEDSTLCKDSDISFYDLDSLQDQAPEGPHLLRDFSTKYDADIENDMTTKDKSAVSSPDQPASLVRNASMRGMPINGSFRKDNSTESFDLECQEKHLDIVPTSSSPERKFSFSSCSSNGLLLSKESSKQQTSIHNLDKCNGGHLHVSDETSSEAAPKTHKSAEDHDDRSKPPLIRGRFRVIPGHVDSKAQPPGLQKCHSMQTISRLPSLSIPSSAEVASTIIGGSFYMQLYSILQTNMLQRDQILNAMKQVSGCAMASPGVPSMASPCIPSTSRSTSPSGVPSVDRSMLEAAQEREKELLNEVLELQWRLLCTQDEVQKLKAKAAQI

SEQ ID NO: 17832 - protein, 485 aa, Zea mays subsp. mays
  misc_feature (1)..(485): Ceres Seq. ID no. 12361143
MISEQTYGPLELLHLKLAHGHAPFSKYPPMKVLLMTLQNAPPGLDYERDKKFTRNFKQMVAMCLVKDPSKRPSAKKLLKQPFFKQARSTDFIARKLLEGLPGLGVRYQALKEKDQHLMAQKKMSDGKKEEISQDEYKRGISSWTFDMDDLRSQASLGTECEDSTLCKDSDISFYDLDSLQDQAPEGPHLLRDFSTKYDADIENDMTTKDKSAVSSPDQPASLVRNASMRGMPINGSFRKDNSTESFDLECQEKHLDIVPTSSSPERKFSFSSCSSNGLLLSKESSKQQTSIHNLDKCNGGHLHVSDETSSEAAPKTHKSAEDHDDRSKPPLIRGRFRVIPGHVDSKAQPPGLQKCHSMQTISRLPSLSIPSSAEVASTIIGGSFYMQLYSILQTNMLQRDQILNAMKQVSGCAMASPGVPSMASPCIPSTSRSTSPSGVPSVDRSMLEAAQEREKELLNEVLELQWRLLCTQDEVQKLKAKAAQI

SEQ ID NO: 17833 - protein, 456 aa, Zea mays subsp. mays
  misc_feature (1)..(456): Ceres Seq. ID no. 12361144
MKVLLMTLQNAPPGLDYERDKKFTRNFKQMVAMCLVKDPSKRPSAKKLLKQPFFKQARSTDFIARKLLEGLPGLGVRYQALKEKDQHLMAQKKMSDGKKEEISQDEYKRGISSWTFDMDDLRSQASLGTECEDSTLCKDSDISFYDLDSLQDQAPEGPHLLRDFSTKYDADIENDMTTKDKSAVSSPDQPASLVRNASMRGMPINGSFRKDNSTESFDLECQEKHLDIVPTSSSPERKFSFSSCSSNGLLLSKESSKQQTSIHNLDKCNGGHLHVSDETSSEAAPKTHKSAEDHDDRSKPPLIRGRFRVIPGHVDSKAQPPGLQKCHSMQTISRLPSLSIPSSAEVASTIIGGSFYMQLYSILQTNMLQRDQILNAMKQVSGCAMASPGVPSMASPCIPSTSRSTSPSGVPSVDRSMLEAAQEREKELLNEVLELQWRLLCTQDEVQKLKAKAAQI

SEQ ID NO: 17834 - DNA, 1962 bp, Zea mays subsp. mays
  misc_feature (1)..(1962): Ceres Seq. ID no. 12361158
gcacgagaccattacctagaacatcctaatcgaaaagatcgatccgatccacatagccattggcagttcagttctccgatcctctaccgcagcagcgtaagcaaagtagaaggcaaggaccaatggcgccgccgcgggtctccttcctggagctctgcctctccttcctctgcttgtggtcttctactactttcacatgagatccaagcggaagaaccctttcgtgccgctggactggccgctggtgggcatgctcccggccctcctcggcaacctccaccacctccacgactggatcacctccctcctggtcgccagtcagctcagcttcctcttcacaggcccgccgcgctccggcatgcagttcttcgtcaccgctgaccccgccaacgtccgccacgtcttcacctccaacttcgccaactaccccaagggccccgagttcgaggagatcttcgacgtcctcggcggcggcatcttcaacgccgacggcgagtcgtggcgccggcagcgcgccaaggcgcagctgctcatgtccagcgccccgttccgagccctggtgtcgcggtacagccgcgccaaggtggacaccgccctgctcccgctgctctcgcacatggccgccaccggggaggcgttcgacctccaggacgtgttcctccggctgacgttcgacaccacgacgacgctggtgttcggcgtcgaccccgggtgcctatccgtcggcctccccgaggtgccgttcgcgcgcgccatggacgacgccatgggcgtgctcctcctccgccacgtcgtcccgatgacgtggtggaagctggcgcggaggctccggatcgggcacgagcgcaagatggcggaggcgtggcgcaccatcgaccagttcgtcgccgacacgatcgccaagcggcgggccgagaaggcgaggcacggcaacgagcaggtctcggcggacctgctctcgtcctacatcaacgacgacgagggcgaggacgaggaaggcggcgtggacgcgttcctgcgcgacacgaccatcaacctcatgctggccggccgcgacacgacgggctcggcgctgtcctggttcttctacctcctgacgcggaacccgcgcgtggtggccaagatacggcaggagctggagtgcgtcaagagcaagagcagcggcggcggcatggcgagcttcgacccggacgagctgagccggctgacgtacctgcacgcagcgctgtgcgagtcgctgaggctgtacccgcccgtgccgcaggagctcaaggaggcggcggcggcggacgtgctgccgtgcaggcacgaggtgcgggccggggacaagatcctggtgtcgctgtacgcgatgggaaggatggaggaggtgtggggcagcgactgccgggagttcaggccggagcggtggatcccggagttggaggacgggcgcagggtggtgcagcaggtgcggtacgtgccgtcgtacaagttcatgtcgttcaactcggggccccggacctgcctcggcaaggacatggcgttcgtgcagctgaaggcggcggcggccgccgtggtcagcaacttcgacgtggaggcggtgccggggcacgtcgtggagcccatgctgtccatcatacttcacatgaagaatggctttatggccacggtcaagaggaggcgccagacgtttgcttagcttcgacgtacgtacgtacggtccattattatctgtggtaaacatgagatcacacagtcggtacgtacgttagctcgctcacatgtatgtaccagcaggtgcaagtacacgtggtcgtcgtggcatgtacgtgtacgacactccgtccgccgttgaaaggtacgtagtgttattacgtgtacttgtacgtgtgtgctgtgcgatgtcgatcagtgcatatagcatatgggtgttttctgtggtgtggtggggcgaaatgagagtatgagaccaaacctcct

SEQ ID NO: 17835 - protein, 494 aa, Zea mays subsp. mays
  misc_feature (1)..(494): Ceres Seq. ID no. 12361159
MRSKRKNPFVPLDWPLVGMLPALLGNLHHLHDWITSLLVASQLSFLFTGPPRSGMQFFVTADPANVRHVFTSNFANYPKGPEFEEIFDVLGGGIFNADGESWRRQRAKAQLLMSSAPFRALVSRYSRAKVDTALLPLLSHMAATGEAFDLQDVFLRLTFDTTTTLVFGVDPGCLSVGLPEVPFARAMDDAMGVLLLRHVVPMTWWKLARRLRIGHERKMAEAWRTIDQFVADTIAKRRAEKARHGNEQVSADLLSSYINDDEGEDEEGGVDAFLRDTTINLMLAGRDTTGSALSWFFYLLTRNPRVVAKIRQELECVKSKSSGGGMASFDPDELSRLTYLHAALCESLRLYPPVPQELKEAAAADVLPCRHEVRAGDKILVSLYAMGRMEEVWGSDCREFRPERWIPELEDGRRVVQQVRYVPSYKFMSFNSGPRTCLGKDMAFVQLKAAAAAVVSNFDVEAVPGHVVEPMLSIILHMKNGFMATVKRRRQTFA

SEQ ID NO: 17836 - protein, 476 aa, Zea mays subsp. mays
  misc_feature (1)..(476): Ceres Seq. ID no. 12361160
MLPALLGNLHHLHDWITSLLVASQLSFLFTGPPRSGMQFFVTADPANVRHVFTSNFANYPKGPEFEEIFDVLGGGIFNADGESWRRQRAKAQLLMSSAPFRALVSRYSRAKVDTALLPLLSHMAATGEAFDLQDVFLRLTFDTTTTLVFGVDPGCLSVGLPEVPFARAMDDAMGVLLLRHVVPMTWWKLARRLRIGHERKMAEAWRTIDQFVADTIAKRRAEKARHGNEQVSADLLSSYINDDEGEDEEGGVDAFLRDTTINLMLAGRDTTGSALSWFFYLLTRNPRVVAKIRQELECVKSKSSGGGMASFDPDELSRLTYLHAALCESLRLYPPVPQELKEAAAADVLPCRHEVRAGDKILVSLYAMGRMEEVWGSDCREFRPERWIPELEDGRRVVQQVRYVPSYKFMSFNSGPRTCLGKDMAFVQLKAAAAAVVSNFDVEAVPGHVVEPMLSIILHMKNGFMATVKRRRQTFA

SEQ ID NO: 17837 - protein, 440 aa, Zea mays subsp. mays
  misc_feature (1)..(440): Ceres Seq. ID no. 12361161
MQFFVTADPANVRHVFTSNFANYPKGPEFEEIFDVLGGGIFNADGESWRRQRAKAQLLMSSAPFRALVSRYSRAKVDTALLPLLSHMAATGEAFDLQDVFLRLTFDTTTTLVFGVDPGCLSVGLPEVPFARAMDDAMGVLLLRHVVPMTWWKLARRLRIGHERKMAEAWRTIDQFVADTIAKRRAEKARHGNEQVSADLLSSYINDDEGEDEEGGVDAFLRDTTINLMLAGRDTTGSALSWFFYLLTRNPRVVAKIRQELECVKSKSSGGGMASFDPDELSRLTYLHAALCESLRLYPPVPQELKEAAAADVLPCRHEVRAGDKILVSLYAMGRMEEVWGSDCREFRPERWIPELEDGRRVVQQVRYVPSYKFMSFNSGPRTCLGKDMAFVQLKAAAAAVVSNFDVEAVPGHVVEPMLSIILHMKNGFMATVKRRRQTFA

SEQ ID NO: 17838 - DNA, 2269 bp, Zea mays subsp. mays
  misc_feature (1)..(2269): Ceres Seq. ID no. 12361170
gcacgagaccattacctagaacatcctaatcgaaaaaccagaccaccgtcgctcgctcgcctgcacaacctctccatccaggccacagctcgagaccaacgaccgacgcctagacgcggctgggcggtcggcctcacctcgttcccccgcctcccttcttcctgctccgcgtctcgatctcgactcccccgccgcgtcgcgcgacccggccagatctcgcccaccctgcgccgcggccatggataacttgatcaccctcgtcaacaagctgcagagggcttgcacggctctcggagaccacggagaggagagcgccctcccgacgctctgggactcgctgccggctatcgccgtcgttggaggacagagctctggtaaatcatctgtgttggagagcgtggttgggaaggatttcctaccgaggggttcaggcattgtaacccggcggccgctggtgctgcagctccacagaattgatggtgacagggaatatgcagagttcattcatcttccgagaaagagatttacagattttgctgctgtgagaaaggagatagctgatgaaactgaccgagaaacaggccgttcaaagcaaatatcaactgtccctatccatttaagcatattttctccccatgttgtgaatcttactcttattgatcttcctgggcttactaaagtagcagttgatggccaaccggagagtattgtacatgacattgaaaacatggttcgctcatatattgaaaagccaaattgtatcattctggctgtgtccccagccaatcaggaccttgctacttctgatgcaatcaagatttcacgggaagttgatcccaaaggtgaaaggacctttggtgtgctcacaaaaattgatctgatggataagggtaccgatgctgttgatatactggaaggaagatcttatcgtctccaaacaccatgggttggtgttgttaatcgatcccaacaagatatcaacaagaatgtggacatgattgctgctaggcgtagagagcgagagtattttgcatctacaccagaatataagcacatggcttctaggatgggatctgaatatttaggaaagatgctttcaaagcatttggaacaagtgatcaaatcaaggattccggggatccaatctcttataacaaagacaattgcagagctggaaactgaacttaatcggcttggaaaacccattgctaatgatgctggggggaagctgtacacgatcatggaaatatgccgtatgtttgatggtatttacaaagagcatctggatggagtgcgccctggcggagagaaagtttaccatgtcttcgacaatcaatttcctgtagctattaaacgattgcagtttgataaacaactctctatggaaaatgtgaggaagcttataacagaggctgatggataccagcctcacttgatagctccagaacaaggatatagacgccttatagaatcttgtcttattagtatcagaggtcctgctgaggcggctgttgacgcggtccatgcaattctcaaggaccttgtccgcaaggctatcaatgaaacacatgaactgaagcagtttcccacccttcgtgtggaagtaggcaatgcagcttttgagtcattggatagaatgagggatgaaagcaagaaaaatacattaaagctagttgacatggaatgcagctacttgacagtagatttcttcaggaagcttcctcaggatgttgagaagggtggaaatccaagccactctatttttgatagatataatgactcttatcttagacgaattggacaaactgttctgtcatatgttaatatggtgtgttcgaccttgaggaactccatcccaaaatctattgtttattgtcaagtgcgagaggccaagcgctcgctgctcgatcacttcttcactgaacctggagcaagagagatgaagcagctttccaaacttcttgacgaagacccagcagtcatggaacgcagaactaaccttgcaaagaggctcgagctgtaccggagtgcccaatccgaaattgatgccgttgcatggtccaaatagtcctgatggccaagatatctgttcttaccccttgtctggcgattctctctcctattctggggcatatatagctgatttttcgtgttgtaggtcaggtcattttatatatcaccggagctgtacggtgtcatgttccttgtgcttgaggatctcggggggcacttgtatctcgaacaagttcgtacatcgcgctttcgttcc

SEQ ID NO: 17839 - protein, 609 aa, Zea mays subsp. mays
  misc_feature (1)..(609): Ceres Seq. ID no. 12361171
MDNLITLVNKLQRACTALGDHGEESALPTLWDSLPAIAVVGGQSSGKSSVLESVVGKDFLPRGSGIVTRRPLVLQLHRIDGDREYAEFIHLPRKRFTDFAAVRKEIADETDRETGRSKQISTVPIHLSIFSPHVVNLTLIDLPGLTKVAVDGQPESIVHDIENMVRSYIEKPNCIILAVSPANQDLATSDAIKISREVDPKGERTFGVLTKIDLMDKGTDAVDILEGRSYRLQTPWVGVVNRSQQDINKNVDMIAARRREREYFASTPEYKHMASRMGSEYLGKMLSKHLEQVIKSRIPGIQSLITKTIAELETELNRLGKPIANDAGGKLYTIMEICRMFDGIYKEHLDGVRPGGEKVYHVFDNQFPVAIKRLQFDKQLSMENVRKLITEADGYQPHLIAPEQGYRRLIESCLISIRGPAEAAVDAVHAILKDLVRKAINETHELKQFPTLRVEVGNAAFESLDRMRDESKKNTLKLVDMECSYLTVDFFRKLPQDVEKGGNPSHSIFDRYNDSYLRRIGQTVLSYVNMVCSTLRNSIPKSIVYCQVREAKRSLLDHFFTEPGAREMKQLSKLLDEDPAVMERRTNLAKRLELYRSAQSEIDAVAWSK

SEQ ID NO: 17840 - protein, 446 aa, Zea mays subsp. mays
  misc_feature (1)..(446): Ceres Seq. ID no. 12361172
MVRSYIEKPNCIILAVSPANQDLATSDAIKISREVDPKGERTFGVLTKIDLMDKGTDAVDILEGRSYRLQTPWVGVVNRSQQDINKNVDMIAARRREREYFASTPEYKHMASRMGSEYLGKMLSKHLEQVIKSRIPGIQSLITKTIAELETELNRLGKPIANDAGGKLYTIMEICRMFDGIYKEHLDGVRPGGEKVYHVFDNQFPVAIKRLQFDKQLSMENVRKLITEADGYQPHLIAPEQGYRRLIESCLISIRGPAEAAVDAVHAILKDLVRKAINETHELKQFPTLRVEVGNAAFESLDRMRDESKKNTLKLVDMECSYLTVDFFRKLPQDVEKGGNPSHSIFDRYNDSYLRRIGQTVLSYVNMVCSTLRNSIPKSIVYCQVREAKRSLLDHFFTEPGAREMKQLSKLLDEDPAVMERRTNLAKRLELYRSAQSEIDAVAWSK

SEQ ID NO: 17841 - protein, 395 aa, Zea mays subsp. mays
  misc_feature (1)..(395): Ceres Seq. ID no. 12361173
MDKGTDAVDILEGRSYRLQTPWVGVVNRSQQDINKNVDMIAARRREREYFASTPEYKHMASRMGSEYLGKMLSKHLEQVIKSRIPGIQSLITKTIAELETELNRLGKPIANDAGGKLYTIMEICRMFDGIYKEHLDGVRPGGEKVYHVFDNQFPVAIKRLQFDKQLSMENVRKLITEADGYQPHLIAPEQGYRRLIESCLISIRGPAEAAVDAVHAILKDLVRKAINETHELKQFPTLRVEVGNAAFESLDRMRDESKKNTLKLVDMECSYLTVDFFRKLPQDVEKGGNPSHSIFDRYNDSYLRRIGQTVLSYVNMVCSTLRNSIPKSIVYCQVREAKRSLLDHFFTEPGAREMKQLSKLLDEDPAVMERRTNLAKRLELYRSAQSEIDAVAWSK

SEQ ID NO: 17842 - DNA, 2453 bp, Zea mays subsp. mays
  misc_feature (1)..(2453): Ceres Seq. ID no. 12361174
gcacgagaccattacctagaacatcctaatcaaaaagtaaattcttataatagcttacagggaaaagactcttcaatctgaagcaaaatgtaccgggaatgttgaagagcgggactcttaagcagtagtgagatgcggcggtggtggtcgccggcgttggcggctgtggagccgcggtccgtgcagctcctgctcctgggcgtcgctctcgtcgcagcttctttctacgccggcaccctcttcggctcctccgcgtcccctgcgctcgtactgcccccttcgcgcccccgatcgcccgattccttcagggccaaagttacagatgttccagtgtttaccaacagagtttctcgtacgtaccgggcaaaatcagtgacagttccagatcacggagttgatgtgtgtcctttggaatacaatgagtatgtcccctgccatgatggagcctatataagcagcttgaagagcctggatacatctaggcatgaggatcttgaaagtatttgtcctccatgggagaagcggttgttttgtttggtgccccctccaaatgactacaagataccaataagatggccaacaagccgagactacgtatggcgtagtaatgtcaaccattcacatcttgctgaggtcaaaggaggacagaactgggtgcatgagaagggcaaactttggtggtttcctggaggtggcactcacttcaaacatggtgcatcagaatacatagagaggctaggaaatatgacgacaaatagtactggtgatcttcgttctgccggagtagttcaagttttggatgttggatgtggtgttgctagcttttctgcatatcttcttccgctagacattcgaaccatgtcatttgctccaaaagatggccatgagaatcaaatccagtttgctttagaacgtgggattggtgcaatgatctctgtgttggccacaaaacaattaccttatcctgaaaattcatttgaaatggttcactgttcaagatgtcgtgttgattggcatgaaaatgatggaatattactcaaagaggtagaccgtcttttgcgacctaatgggtattttgtatactctgctccaccagcttatagaaaagataaggactttcctgttatttgggagaagctagttaatattacaacaacaatgtgttggaagcttattgctaagcatgttcaaacagctatttgggttaaacctgaagatgagtcctgcagacagaaaaatgttgatatgaatctactgagtatttgtgaatccaatgacaacatttcaccatcatggaaaattccgttaatgaattgtgtgaagctcaacaaggacaaatccaatattcagaaattgccttccagatctgatcgcctatcattttattccaagagtttggagataataggagttgcaccagagaggtttgagaagaataaccagttctggaagaaccaggttcacaagtattggtcatttcttcatgttgaaaagactagcattcgaaacgtcatggacatgaatgctaattatggtggatttgctgcagcactaagcagtgaccctgtctggattatgaatatagtaccctataccatgatgaacacattgcctgttatctatgaccgtgggttactcggttcttaccatgactggtgtgagccattctcaacatatcctagatcctatgacttgttgcatgctttccacctcttttctcattataaacgccgcaaggaagattgtttgttggaggatatcatgttagaaatggatcgcatcattcgaccacagggttttatcattattagagacgagaatgacactctctcaagaatcatcaatctagcaccgaagttcctttgggatgttaccacgcacatgttggaaaatgaggaaagcgggacagatcaagttctgttttgcaggaagaaattctgggctattgtttgagttatacttgggtggaaattgggaagctgccatattttatcctacttttggttgccctttgtatcagtgacagagcagagcgtaaggagagctgtttggcatgatagatgttccaatgaaacataatatttcattgcacgttctctgcagttgacagtagtgcattgttgagaaggcatatggtacggtggtgcggttgacagggttatccagaaactagctcggataatttttgcttttgagctgtactatttgtctacgaaggacatgggtgagccggtaaggtgtagtcttactgacagtgtttgtagtttctctcataatgaatagccgttaattcttttgttatcttattcactaatggctaattaggtttaggttctcaagttctcaacaatatgttggtagtgctgtttctgttgttccatctggggagcatctgtagtactataaaccttatgtaaggtactgtttccagccaatgccgaggtgcatttgtt

SEQ ID NO: 17843 - protein, 606 aa, Zea mays subsp. mays
  misc_feature (1)..(606): Ceres Seq. ID no. 12361175
MRRWWSPALAAVEPRSVQLLLLGVALVAASFYAGTLFGSSASPALVLPPSRPRSPDSFRAKVTDVPVFTNRVSRTYRAKSVTVPDHGVDVCPLEYNEYVPCHDGAYISSLKSLDTSRHEDLESICPPWEKRLFCLVPPPNDYKIPIRWPTSRDYVWRSNVNHSHLAEVKGGQNWVHEKGKLWWFPGGGTHFKHGASEYIERLGNMTTNSTGDLRSAGVVQVLDVGCGVASFSAYLLPLDIRTMSFAPKDGHENQIQFALERGIGAMISVLATKQLPYPENSFEMVHCSRCRVDWHENDGILLKEVDRLLRPNGYFVYSAPPAYRKDKDFPVIWEKLVNITTTMCWKLIAKHVQTAIWVKPEDESCRQKNVDMNLLSICESNDNISPSWKIPLMNCVKLNKDKSNIQKLPSRSDRLSFYSKSLEIIGVAPERFEKNNQFWKNQVHKYWSFLHVEKTSIRNVMDMNANYGGFAAALSSDPVWIMNIVPYTMMNTLPVIYDRGLLGSYHDWCEPFSTYPRSYDLLHAFHLFSHYKRRKEDCLLEDIMLEMDRIIRPQGFIIIRDENDTLSRIINLAPKFLWDVTTHMLENEESGTDQVLFCRKKFWAIV

SEQ ID NO: 17844 - protein, 402 aa, Zea mays subsp. mays
  misc_feature (1)..(402): Ceres Seq. ID no. 12361176
MTTNSTGDLRSAGVVQVLDVGCGVASFSAYLLPLDIRTMSFAPKDGHENQIQFALERGIGAMISVLATKQLPYPENSFEMVHCSRCRVDWHENDGILLKEVDRLLRPNGYFVYSAPPAYRKDKDFPVIWEKLVNITTTMCWKLIAKHVQTAIWVKPEDESCRQKNVDMNLLSICESNDNISPSWKIPLMNCVKLNKDKSNIQKLPSRSDRLSFYSKSLEIIGVAPERFEKNNQFWKNQVHKYWSFLHVEKTSIRNVMDMNANYGGFAAALSSDPVWIMNIVPYTMMNTLPVIYDRGLLGSYHDWCEPFSTYPRSYDLLHAFHLFSHYKRRKEDCLLEDIMLEMDRIIRPQGFIIIRDENDTLSRIINLAPKFLWDVTTHMLENEESGTDQVLFCRKKFWAIV

SEQ ID NO: 17845 - protein, 364 aa, Zea mays subsp. mays
  misc_feature (1)..(364): Ceres Seq. ID no. 12361177
MSFAPKDGHENQIQFALERGIGAMISVLATKQLPYPENSFEMVHCSRCRVDWHENDGILLKEVDRLLRPNGYFVYSAPPAYRKDKDFPVIWEKLVNITTTMCWKLIAKHVQTAIWVKPEDESCRQKNVDMNLLSICESNDNISPSWKIPLMNCVKLNKDKSNIQKLPSRSDRLSFYSKSLEIIGVAPERFEKNNQFWKNQVHKYWSFLHVEKTSIRNVMDMNANYGGFAAALSSDPVWIMNIVPYTMMNTLPVIYDRGLLGSYHDWCEPFSTYPRSYDLLHAFHLFSHYKRRKEDCLLEDIMLEMDRIIRPQGFIIIRDENDTLSRIINLAPKFLWDVTTHMLENEESGTDQVLFCRKKFWAIV

SEQ ID NO: 17846 - DNA, 1498 bp, Zea mays subsp. mays
  misc_feature (1)..(1498): Ceres Seq. ID no. 12361178
gcacgagaccattacctagaacatcctaatcaaaaaaacccccgggcagcggacaaacaagcacacagcacgagcgaagagacgcagccatggcgatggctccaccgcctgcctgctcgctcttcccccgggtcgccgctgctgcgcccagttccgtcacctccaactccgttttgacctcgcgtggccccggtatccttccttccccgcgtctcgctttcgcccgccgccacctctccgcggcatggtcatcgaaggcagcagcctccgcttctgtcgaaatccaggatgactacacggatgaggtggacgcggtgaacattgcgcaggatgtcacccagctcattggaaaaacaccaatggtgtatctcaatagagttgctgacggatgtgtggctaatatcgctgcaaagctcgagtacatgggaccttgccgaagtgtcaaagataggattggattaagcatgattaatgatgctgaagagaagggattaatttctccagacaagaccattttggtagaaccaacaactggaaatactggtgtagccattgcttctgtggctgcagcaagaggatacaagttgatagcaacaatgccttcatcattagatgtcgagagacgcattcttctgcgtgcattcggagcagagattgtgttaactgatcctaccaaaggactaaaaggagcttttgataaagctgaggaaatagtcctgagaacaccaaatgcgtatatgtttcagcagttcaacaatgaggcaaatagtgaggttattggggtagaacctgctgaaactagtgtgatttctggtgatagccctggttacattccaagtatattagatgtgcagttgattgatgaggttgtgaaggttagcacagcagaagccgttgattctgcaagggaacttgctctaaaagagggcttgctggttggtatttcctctggtgctgcagcggttgctgctatcaatgttggcaaaagacctgaaaatgccggaaagctgattgcggtcattttccccagctttggagagagatacatctccaccattctgttccgtccgatatatgactctgttcgaagaatgaggaagagatagcgagccttgaaccacttcaagcgcgtggccagtcccttctctagacctgacaggcttccatgacatgattgataaacgtgaagcagtgaagaccctgtttgattgcaacttcagggtccgaagttttgaagctgcacagagtttctatcaggtgagctgcaggcctgcagcttggttctagcaagactggaggagtgcctcatgtttagaccagctcatacaatcctggtgcaacacgcagaattgcgtgccgcagttagcttgggactttcgtttagtagtctaggaccgggtacaaaccgcttgttacctggtacgcacttgagctgattttagcgaccaactatctgcaaattctttttgccttccgaattttgattgtttcatctttt

SEQ ID NO: 17847 - protein, 338 aa, Zea mays subsp. mays
  misc_feature (1)..(338): Ceres Seq. ID no. 12361179
MAMAPPPACSLFPRVAAAAPSSVTSNSVLTSRGPGILPSPRLAFARRHLSAAWSSKAAASASVEIQDDYTDEVDAVNIAQDVTQLIGKTPMVYLNRVADGCVANIAAKLEYMGPCRSVKDRIGLSMINDAEEKGLISPDKTILVEPTTGNTGVAIASVAAARGYKLIATMPSSLDVERRILLRAFGAEIVLTDPTKGLKGAFDKAEEIVLRTPNAYMFQQFNNEANSEVIGVEPAETSVISGDSPGYIPSILDVQLIDEVVKVSTAEAVDSARELALKEGLLVGISSGAAAVAAINVGKRPENAGKLIAVIFPSFGERYISTILFRPIYDSVRRMRKR

SEQ ID NO: 17848 - protein, 336 aa, Zea mays subsp. mays
  misc_feature (1)..(336): Ceres Seq. ID no. 12361180
MAPPPACSLFPRVAAAAPSSVTSNSVLTSRGPGILPSPRLAFARRHLSAAWSSKAAASASVEIQDDYTDEVDAVNIAQDVTQLIGKTPMVYLNRVADGCVANIAAKLEYMGPCRSVKDRIGLSMINDAEEKGLISPDKTILVEPTTGNTGVAIASVAAARGYKLIATMPSSLDVERRILLRAFGAEIVLTDPTKGLKGAFDKAEEIVLRTPNAYMFQQFNNEANSEVIGVEPAETSVISGDSPGYIPSILDVQLIDEVVKVSTAEAVDSARELALKEGLLVGISSGAAAVAAINVGKRPENAGKLIAVIFPSFGERYISTILFRPIYDSVRRMRKR

SEQ ID NO: 17849 - protein, 248 aa, Zea mays subsp. mays
  misc_feature (1)..(248): Ceres Seq. ID no. 12361181
MVYLNRVADGCVANIAAKLEYMGPCRSVKDRIGLSMINDAEEKGLISPDKTILVEPTTGNTGVAIASVAAARGYKLIATMPSSLDVERRILLRAFGAEIVLTDPTKGLKGAFDKAEEIVLRTPNAYMFQQFNNEANSEVIGVEPAETSVISGDSPGYIPSILDVQLIDEVVKVSTAEAVDSARELALKEGLLVGISSGAAAVAAINVGKRPENAGKLIAVIFPSFGERYISTILFRPIYDSVRRMRKR

SEQ ID NO: 17850 - DNA, 2064 bp, Zea mays subsp. mays
  misc_feature (1)..(2064): Ceres Seq. ID no. 12361230
gcacgagaccattacctagaacatcctaatcgaaaaagaaaggtccccgtagaaattcgaaaccacaccaccacctggaaacccagacaaagcacgagccacgcacggcccccgctgcctcccttccgccgccgccgccgccggcggcgcgccaccgtcgctgctctcccgccttcaccgcgcccaactccaatccttgcctcccccgcgcgcttcagcctcttcactccccatcgttttcgcctggccagatccaggtttccttgaccgagacctcgcctgccttacgcctccggtcggattcttcgccgtccttgtccccactgggcaccgctggggtggagcggagatcggatccgccgggagctgattccttctctcgcaggctggatgcccttactttcttcgatggactgctcgtgttattctgcaattctcagttttgctgtgaacgctgaatcgaatgtttctttcgttgcgttcagtctagtttgacgcggattcatttgctggtcggcatagcatgatcctacggtgattgcggatagcttgtgcaagctggtggcttgggtgttgtctttttaatctggcctaaagatatcctgagacggtagcgtcacatggatgctagtacagaggttactgatgctattggtgcggtgggctttgacaatgaggccgcggggaagttgccgcccagtgatagtgtagaggggcacgcagaagaacacgatgtgctggctgatggagcccattcgggcgagagcgaggtgatcaacccatctgaagaagtagaaatggaagccacctcgcagtcccaggacataaagcctcgagttcctgagggggttcaaggccattcaatgaaggttggtactaaatctcagcgacagagccctcgaggcggggataagagtcaaactaggaaaagctcttttagtccttcttatcctaaggcgcccattgcacgggtttctgatccagatctagttgattgctctttgagcaatggtgatgctggttccagtaagaaaaaggccgagaagagcagtttccgcccagttgccaaggagaccccatcacttgaggactcaaatgagaagaaaaaaactcagaaggcatcaaaccaacattctgtcaaaaaggatattgaagaagaatcaaatgaaagtgtgaaacctcaaagggttggcagcactccttcatatggatttagttttaagtgtgatgagagagctgaaaaacgaagagagttctactcaaagctcgaggagaagattcatgcacaggaactagagaaaagcaacttgcaggcaaaatcaaaggaaactgaagaagctgaactcaaaatgctgagaaagagtttaaatttcaaggcaacaccaatgcccagcttttataaggaaccacctccccccaaggttgagttgaagaagatacctacaacaagagctaggtcaccaaagcttggtcgctccaagaacacatcctcaggagggacagaagggaatccaaatcctccagctcgttcagctcgactgagtctcgatgaaagggtctcccaaaatggtgtcaagaaagcacctgctgcaaatgcagcgaagaagccccagcggaaatctctacctaaactgccttcagagcaaacaaccaaagttgacattgcaccatctgttccatctgcagaagagctagaaaacaagttgccgacgaagggtggtcttgatcgagagccgatccgcgctcaaattacacctgacgaacctggactcactgcataggaacctatcaagccgactcctatgaaaggagggagttgtgccccagcttcctttatcacattttgctatttctgcagtaaactgctggctggtattatgtattagaattagtctcagcaccaggagcttgaagagtggcaagtgacaccgtgtattctttatcttagtttctgttgacataccaggtatttgtagttggcagacaggcagaatttcatattattctccagggctaccagtcaattaagttgccgtccaagtaagatatgtacacgattttgcc

SEQ ID NO: 17851 - protein, 386 aa, Zea mays subsp. mays
  misc_feature (1)..(386): Ceres Seq. ID no. 12361231
MDASTEVTDAIGAVGFDNEAAGKLPPSDSVEGHAEEHDVLADGAHSGESEVINPSEEVEMEATSQSQDIKPRVPEGVQGHSMKVGTKSQRQSPRGGDKSQTRKSSFSPSYPKAPIARVSDPDLVDCSLSNGDAGSSKKKAEKSSFRPVAKETPSLEDSNEKKKTQKASNQHSVKKDIEEESNESVKPQRVGSTPSYGFSFKCDERAEKRREFYSKLEEKIHAQELEKSNLQAKSKETEEAELKMLRKSLNFKATPMPSFYKEPPPPKVELKKIPTTRARSPKLGRSKNTSSGGTEGNPNPPARSARLSLDERVSQNGVKKAPAANAAKKPQRKSLPKLPSEQTTKVDIAPSVPSAEELENKLPTKGGLDREPIRAQITPDEPGLTA

SEQ ID NO: 17852 - protein, 327 aa, Zea mays subsp. mays
  misc_feature (1)..(327): Ceres Seq. ID no. 12361232
MEATSQSQDIKPRVPEGVQGHSMKVGTKSQRQSPRGGDKSQTRKSSFSPSYPKAPIARVSDPDLVDCSLSNGDAGSSKKKAEKSSFRPVAKETPSLEDSNEKKKTQKASNQHSVKKDIEEESNESVKPQRVGSTPSYGFSFKCDERAEKRREFYSKLEEKIHAQELEKSNLQAKSKETEEAELKMLRKSLNFKATPMPSFYKEPPPPKVELKKIPTTRARSPKLGRSKNTSSGGTEGNPNPPARSARLSLDERVSQNGVKKAPAANAAKKPQRKSLPKLPSEQTTKVDIAPSVPSAEELENKLPTKGGLDREPIRAQITPDEPGLTA

SEQ ID NO: 17853 - protein, 305 aa, Zea mays subsp. mays
  misc_feature (1)..(305): Ceres Seq. ID no. 12361233
MKVGTKSQRQSPRGGDKSQTRKSSFSPSYPKAPIARVSDPDLVDCSLSNGDAGSSKKKAEKSSFRPVAKETPSLEDSNEKKKTQKASNQHSVKKDIEEESNESVKPQRVGSTPSYGFSFKCDERAEKRREFYSKLEEKIHAQELEKSNLQAKSKETEEAELKMLRKSLNFKATPMPSFYKEPPPPKVELKKIPTTRARSPKLGRSKNTSSGGTEGNPNPPARSARLSLDERVSQNGVKKAPAANAAKKPQRKSLPKLPSEQTTKVDIAPSVPSAEELENKLPTKGGLDREPIRAQITPDEPGLTA

SEQ ID NO: 17854 - DNA, 2006 bp, Zea mays subsp. mays
  misc_feature (1)..(2006): Ceres Seq. ID no. 12361244
attcgattcctccgccccgccggccgaaaccaagtttctccgcggccgcccggatccccgacccccggccccgagcgttccatgggctcgccttccgcatcgaggcattagcaagcctcgcgccgcactgccgagcccccgacgcctgcctttgcctcactggttttggaaggaatccaagatgggtgtaatcagcacagtgctgggtttctctggttttggctttgggttctcggctggcattgttattggttacttcctcttcatctacgtccagccaactgatgtcaaggatgtcaaggttcgcccgcttgtagaatatgattcaaaatccttggagggcatccttcctgaaattcctttatgggtcaagaatcctgactatgatagaattgattggctgaataggttcttggagttgatgtggccttatcttaacaaggctatctgcagaactgcacaggatatcgcgaagccaattattgctgagaacactgcaaagtataagatagactctgttgagtttgaatcacttactttgggtagcttaccacccacctttcaagggatgaaagtctatgtcacagaggagcaagagctgataatggaaccatctcttaaatgggctgcaaacccaaatattactgttgctgtaaaagcctatggtttgaaagctactatccagattgtggatctacaagtctttgcatcacctcgcattactctgaagccattggtgcctacatttccttgctttgcaaaaatccttgtctcactcatggagaagccacatgttgactttgggctaaaacttcttggagcagatgtaatggctattcctggtctttacagatttgttcaggagaccatcaagaaacaagtagcaagcatgtatttgtggccgaagacactagaagtacctataatggatccctcaaaagcatcaaaaaggcctgttggaattctacttgtgaaggttgtgagagcccaaaatctgcggaagaaggatctgctgggtaaatctgacccatacgtgaaacttaagatgtcagatgataaacttccatccaagaagacaactgtaaagcgcagcaatctcaatccagagtggggtgaagacttcaagtttgttgtgacagatccagaaaaccaggctcttgaagttaatgtcttcgactgggaacaggttgggaaacatgaaaagatgggaatgaacatgatcccacttagagaactcctaccagaggggactaaagttactaccctcaacttgcttaagaccatggacccaaacgatgtacaaaatgagaagtctcgtggtgagcttactctagagctcacatacaagcctttcaaggaagaagatatagagaaagaagatacacagggtgctgatgtgatagagaaagctccagatggcactccagctggtggtggcttgctttatgttgttgttcatgaagcccaagatcttgaggggaagcaccatacaaacccatatgcaaaaataattttcaaaggcgaggagaagaaaactaaggtcatcaagaagaatagggatccaagatgggaggatgagtttgagttcgtgtgtgaggagcctcctgtgaatgataaactgcatgttgaagtcataagtaaagccccgaaggcagggctgatacatggcaaggaaactttgggctatattgatattagccttgcagacgtgatcagcaacaagcggattaatgaaaagtaccatctcatagactcgaaaaatggtcagatccagatcgagttgcagtggagaacttcctagacaggaaggagccagaatgccttgatgttcctctattcagtttgcgtatatctgtgattgagattgaggtcatgtagatatttcttttttttatagacatctgttgttcggatcttctcttaatcgatcaagtttccgacaagaactatgcagacatgttacagaccctgagaatggaactgaacaaatgacacgtcatacaatt

SEQ ID NO: 17855 - protein, 599 aa, Zea mays subsp. mays
  misc_feature (1)..(599): Ceres Seq. ID no. 12361245
FDSSAPPAETKFLRGRPDPRPPAPSVPWARLPHRGISKPRAALPSPRRLPLPHWFWKESKMGVISTVLGFSGFGFGFSAGIVIGYFLFIYVQPTDVKDVKVRPLVEYDSKSLEGILPEIPLWVKNPDYDRIDWLNRFLELMWPYLNKAICRTAQDIAKPIIAENTAKYKIDSVEFESLTLGSLPPTFQGMKVYVTEEQELIMEPSLKWAANPNITVAVKAYGLKATIQIVDLQVFASPRITLKPLVPTFPCFAKILVSLMEKPHVDFGLKLLGADVMAIPGLYRFVQETIKKQVASMYLWPKTLEVPIMDPSKASKRPVGILLVKVVRAQNLRKKDLLGKSDPYVKLKMSDDKLPSKKTTVKRSNLNPEWGEDFKFVVTDPENQALEVNVFDWEQVGKHEKMGMNMIPLRELLPEGTKVTTLNLLKTMDPNDVQNEKSRGELTLELTYKPFKEEDIEKEDTQGADVIEKAPDGTPAGGGLLYVVVHEAQDLEGKHHTNPYAKIIFKGEEKKTKVIKKNRDPRWEDEFEFVCEEPPVNDKLHVEVISKAPKAGLIHGKETLGYIDISLADVISNKRINEKYHLIDSKNGQIQIELQWRTS

SEQ ID NO: 17856 - protein, 539 aa, Zea mays subsp. mays
  misc_feature (1)..(539): Ceres Seq. ID no. 12361246
MGVISTVLGFSGFGFGFSAGIVIGYFLFIYVQPTDVKDVKVRPLVEYDSKSLEGILPEIPLWVKNPDYDRIDWLNRFLELMWPYLNKAICRTAQDIAKPIIAENTAKYKIDSVEFESLTLGSLPPTFQGMKVYVTEEQELIMEPSLKWAANPNITVAVKAYGLKATIQIVDLQVFASPRITLKPLVPTFPCFAKILVSLMEKPHVDFGLKLLGADVMAIPGLYRFVQETIKKQVASMYLWPKTLEVPIMDPSKASKRPVGILLVKVVRAQNLRKKDLLGKSDPYVKLKMSDDKLPSKKTTVKRSNLNPEWGEDFKFVVTDPENQALEVNVFDWEQVGKHEKMGMNMIPLRELLPEGTKVTTLNLLKTMDPNDVQNEKSRGELTLELTYKPFKEEDIEKEDTQGADVIEKAPDGTPAGGGLLYVVVHEAQDLEGKHHTNPYAKIIFKGEEKKTKVIKKNRDPRWEDEFEFVCEEPPVNDKLHVEVISKAPKAGLIHGKETLGYIDISLADVISNKRINEKYHLIDSKNGQIQIELQWRTS

SEQ ID NO: 17857 - protein, 459 aa, Zea mays subsp. mays
  misc_feature (1)..(459): Ceres Seq. ID no. 12361247
MWPYLNKAICRTAQDIAKPIIAENTAKYKIDSVEFESLTLGSLPPTFQGMKVYVTEEQELIMEPSLKWAANPNITVAVKAYGLKATIQIVDLQVFASPRITLKPLVPTFPCFAKILVSLMEKPHVDFGLKLLGADVMAIPGLYRFVQETIKKQVASMYLWPKTLEVPIMDPSKASKRPVGILLVKVVRAQNLRKKDLLGKSDPYVKLKMSDDKLPSKKTTVKRSNLNPEWGEDFKFVVTDPENQALEVNVFDWEQVGKHEKMGMNMIPLRELLPEGTKVTTLNLLKTMDPNDVQNEKSRGELTLELTYKPFKEEDIEKEDTQGADVIEKAPDGTPAGGGLLYVVVHEAQDLEGKHHTNPYAKIIFKGEEKKTKVIKKNRDPRWEDEFEFVCEEPPVNDKLHVEVISKAPKAGLIHGKETLGYIDISLADVISNKRINEKYHLIDSKNGQIQIELQWRTS

SEQ ID NO: 17858 - DNA, 1503 bp, Zea mays subsp. mays
  misc_feature (1)..(1503): Ceres Seq. ID no. 12361279
gcacgagaccattacctagaacatcctaatcaaaaaagcagcgtccgctccaaaacgcaacggtcgaatctcctcgaattcgaattgcagccggtgccacccacctcacatggcggcggcggaagagatgatggcggtgctggacaaggagacgctggcgctgatgggtctgggcaacgccgccgccgcggtggttgtcgagtgcgagaagttcaaggagaacgcgaggccgctcaagcgcgggcgcgacgtgtccaaactcaaccacgcgctcaaggcacacgccgatcccgcccagcgcgccactcttctcgaagcccgaaagaagatgattgaggcaatctacgagtaccaaggcgaggatccgctccaaccgtggctggactgcatcaagtgggtgcaggagtattttccgaccggcggcgagtgctcagggttggtggtgttgtacgagcagtgcgtgcggaccttattggatgacgagcgctacaaggacgacctccgcttcctcaaagtgtggctggaatacgcggggaactgtgctgatgctgaggtaatatacaggttcctggaggccaaccagattgggcagggccatgcgatctactacatgtcttacgcatcgttgatggagtcaaagaacaagttgaggaaagctaatgagatctttgtccttggtatagctagaaaagcgaagcctctggagaagttggaagctgtatacagggcatttcttcgaagatcaatcaaaaagagggaacaagagcaggatgatacagtagatgatgatctgccaaaacgcagtttcgggaataacttgaaacgagatgaaaacagaaatcagcaagcagggaactcccacctggggagaccaagggcactgcagaggccgctttcagtttacaaagatgaaagtccattaccaaatcagggccttgacagagtgaggagcaaagaaaataacacaagttggcgcaccctcggaacacgagcagaacggaacaaggaaaataacatgatgcctgctaaatggacgtctcacaagattccacagaagttaggagcaagaggagcggttcaatcaacccgagccagttgttccattgaagtcttcgtcgaggaagactgcacacatgaacctgctcggccggtgccaaagagcccaaatccttctgttctgaagctcaggcaaacaacaagcaaaagccttaagaaggagactgaattgctcaaggagaacccgctgcgcaacttccccctgagcaggcttaggtaatcagcatcttgctggttctgagaaacatctcgtacgttatgatttggtcgtatgtatggttgctgtgaggtgttgtgcccaaaaaaaaggctttattagcctctaaagcttagacgagcaatgtatgcctatggcattacccaagtgctgtaaggttctgcattatattgacacggcgtgcttattattgatagacctgcagatctcgtgcgtgcctatgtgaatcg

SEQ ID NO: 17859 - protein, 388 aa, Zea mays subsp. mays
  misc_feature (1)..(388): Ceres Seq. ID no. 12361280
MAAAEEMMAVLDKETLALMGLGNAAAAVVVECEKFKENARPLKRGRDVSKLNHALKAHADPAQRATLLEARKKMIEAIYEYQGEDPLQPWLDCIKWVQEYFPTGGECSGLVVLYEQCVRTLLDDERYKDDLRFLKVWLEYAGNCADAEVIYRFLEANQIGQGHAIYYMSYASLMESKNKLRKANEIFVLGIARKAKPLEKLEAVYRAFLRRSIKKREQEQDDTVDDDLPKRSFGNNLKRDENRNQQAGNSHLGRPRALQRPLSVYKDESPLPNQGLDRVRSKENNTSWRTLGTRAERNKENNMMPAKWTSHKIPQKLGARGAVQSTRASCSIEVFVEEDCTHEPARPVPKSPNPSVLKLRQTTSKSLKKETELLKENPLRNFPLSRLR

SEQ ID NO: 17860 - protein, 382 aa, Zea mays subsp. mays
  misc_feature (1)..(382): Ceres Seq. ID no. 12361281
MMAVLDKETLALMGLGNAAAAVVVECEKFKENARPLKRGRDVSKLNHALKAHADPAQRATLLEARKKMIEAIYEYQGEDPLQPWLDCIKWVQEYFPTGGECSGLVVLYEQCVRTLLDDERYKDDLRFLKVWLEYAGNCADAEVIYRFLEANQIGQGHAIYYMSYASLMESKNKLRKANEIFVLGIARKAKPLEKLEAVYRAFLRRSIKKREQEQDDTVDDDLPKRSFGNNLKRDENRNQQAGNSHLGRPRALQRPLSVYKDESPLPNQGLDRVRSKENNTSWRTLGTRAERNKENNMMPAKWTSHKIPQKLGARGAVQSTRASCSIEVFVEEDCTHEPARPVPKSPNPSVLKLRQTTSKSLKKETELLKENPLRNFPLSRLR

SEQ ID NO: 17861 - protein, 381 aa, Zea mays subsp. mays
  misc_feature (1)..(381): Ceres Seq. ID no. 12361282
MAVLDKETLALMGLGNAAAAVVVECEKFKENARPLKRGRDVSKLNHALKAHADPAQRATLLEARKKMIEAIYEYQGEDPLQPWLDCIKWVQEYFPTGGECSGLVVLYEQCVRTLLDDERYKDDLRFLKVWLEYAGNCADAEVIYRFLEANQIGQGHAIYYMSYASLMESKNKLRKANEIFVLGIARKAKPLEKLEAVYRAFLRRSIKKREQEQDDTVDDDLPKRSFGNNLKRDENRNQQAGNSHLGRPRALQRPLSVYKDESPLPNQGLDRVRSKENNTSWRTLGTRAERNKENNMMPAKWTSHKIPQKLGARGAVQSTRASCSIEVFVEEDCTHEPARPVPKSPNPSVLKLRQTTSKSLKKETELLKENPLRNFPLSRLR

SEQ ID NO: 17862 - DNA, 1268 bp, Zea mays subsp. mays
  misc_feature (1)..(1268): Ceres Seq. ID no. 12361287
gcacgagaccattacctagaacatcctaatcaaaaaattaaaccatcgaacattctccttggcgaaggctatcatgcaaaattgtccgactttggacttgctaagcttggtcctgtaggcgacaagactcatgtgacaacacgcgttatggggacacatggttattgtgctcctgaatatgccttagctggacagctgacagtgaagtctgacatctatagttttggcgtcgttttccttgagctaattacaggtcgaagaccacaagacactgatcggcctcctgaggaacaagacctagttgcatgggctcgtccattgttcaaagaccaaaagaagtttcgcaagatggctgatccttcgttgtgtggccgcttcccaaagaggggtttattccaggcactagctattgcagcaatgtgtttgcaggagaaggcaaaaagccgacctcccatgagggaagttgccgcagctctctcttatttagcatcacaagcatacgacaggaacaacaacgctgctgctcatcgtaatcgtgccgggccttcaacaccgagagttctggacgaccagattggccaggacacctgcacattggctaatcaacagggagctcagatgtccatgcatgtcgggacagaccacgccatgcctgaagtgaaggaagcttcctgtagtggttcacatcgtggaggacggggcagggttaccccgaatggcgctgatagggagcgtgcacttgcggacgccaacgtgtgggccgaggcttggaggcgccaggagaaggcaagcaagatgcgatagcgaccagagcctgactgcatgagttttgacatgtcactgcaaagatgcttactttgcatacattttgaaagagaactgtgggctacacgaagggttgttagaatagaaagaggaataatgcgcagtggaaatgtagagcttcaccagagtgagcgcttcgaagatttcaccggtgaatctacagtactcagacttgtttcagtgcgtacatggatttagcttactttatacacagacacttcacactccatagatgcatgtaatagctcaataataggcacagtagactacacaatctgtctgtagttcagcggttttggaaaattaataacataggatccgccgttaggttgcatgaaatgctatgatccgttggcgggtcttgcattctctattgggtcaacgtctacatatttgtacatcgttcaaccatttacatgatgaaatatacaattaagacttct

SEQ ID NO: 17863 - protein, 267 aa, Zea mays subsp. mays
  misc_feature (1)..(267): Ceres Seq. ID no. 12361288
ARDHYLEHPNQKIKPSNILLGEGYHAKLSDFGLAKLGPVGDKTHVTTRVMGTHGYCAPEYALAGQLTVKSDIYSFGVVFLELITGRRPQDTDRPPEEQDLVAWARPLFKDQKKFRKMADPSLCGRFPKRGLFQALAIAAMCLQEKAKSRPPMREVAAALSYLASQAYDRNNNAAAHRNRAGPSTPRVLDDQIGQDTCTLANQQGAQMSMHVGTDHAMPEVKEASCSGSHRGGRGRVTPNGADRERALADANVWAEAWRRQEKASKMR

SEQ ID NO: 17864 - protein, 218 aa, Zea mays subsp. mays
  misc_feature (1)..(218): Ceres Seq. ID no. 12361289
MGTHGYCAPEYALAGQLTVKSDIYSFGVVFLELITGRRPQDTDRPPEEQDLVAWARPLFKDQKKFRKMADPSLCGRFPKRGLFQALAIAAMCLQEKAKSRPPMREVAAALSYLASQAYDRNNNAAAHRNRAGPSTPRVLDDQIGQDTCTLANQQGAQMSMHVGTDHAMPEVKEASCSGSHRGGRGRVTPNGADRERALADANVWAEAWRRQEKASKMR

SEQ ID NO: 17865 - protein, 151 aa, Zea mays subsp. mays
  misc_feature (1)..(151): Ceres Seq. ID no. 12361290
MADPSLCGRFPKRGLFQALAIAAMCLQEKAKSRPPMREVAAALSYLASQAYDRNNNAAAHRNRAGPSTPRVLDDQIGQDTCTLANQQGAQMSMHVGTDHAMPEVKEASCSGSHRGGRGRVTPNGADRERALADANVWAEAWRRQEKASKMR

SEQ ID NO: 17866 - DNA, 1536 bp, Zea mays subsp. mays
  misc_feature (1)..(1536): Ceres Seq. ID no. 12361389
gcacgagaccattacctagaacatcctaatcgaaaacccctcatcgccttcgtggcctggcctgcccgtcgtgtgcggctctgcgcctctccctccctccctcccttccccgatcgtaaccgccgcctccgatcgatcgccacgatgcggctcttctgacgtaccgccgggcgtcaccgtcaccgaccgagacccgcgcccctcgcctggactccatggccgcgtcctccccgctggtgctgtcgctgctcctcttcgcgtcgctgacggcgctgctggtcctcgcgccgcgcctatccccgccgcagccgccggcggccgccggtggtggtggtggcgaggaggccgacgacctccgcctgttccgccgcgcgactctggagtcgtcggcggcggacggccctcccaaggtggccttcctgttcctgaccaactccgacctcaccttcgcccctctctgggagcgcttcttcgcggggaacgaggcgcggctgcgcgtgtacgtccacgcggacccgtccgcgcgcctgcttcttccacgcgtgcacgcagcagctacatcgaggtgctggagggcgagccgcagatggcgtcgcgctacgcggcgcgcggcggcgaggagggcatgctcccggaggtgccgtacgagcggttccgcatcgggtcgcagttcttcgcgctggcccggcgccacgccgtgctggtggtccgggagcgccggctgtggcgcaagttccgcgcgccctgcgtccccgagatggcgcaggactcgtgctaccccgaggagcactacttcccgacgctgctggacatggcggaccccggcggcgtggcgcggtacacgctcacgcgcgtcaactggacgggtagcgtcgcgggccacccgcacacgtacgccgcgccggaggtctcgccaaggctcatcgcagacctccgcgcctccaaccacacccaccacccccacatgttcgcgcgcaagttcgcgcccgactgcctcggcccgctcctcgccatcgccgacaccgtcatcttcaaggactgatggcgggcggctccatccaggtactacttactactcggcagcagagggctgggcctggggctagtcaaggccgccgacgacggacggcgcggcaccggaatcagtggcgttcttctcccgtttggaccccccctgcagcgtcatgcatgttcatcagctccagtgtttctgtgtagtagattaggagtgtagagaagaggaggacgacgacgacgacagcacgcggcgacctaatgcgaagcggcaggttgtggttgcgtgcgtgtacgcgtcctcgatcgtcgtccatccgtgaaaaaaaaagaagaaaaaatatcgcgcgcgtgtgtggcttttgcctagcgtagccagccaaataaggttctactgcaagtaataaatcctagtgttgtacagcataggtagccgccactcctgctctgtgggtttcgtgtctcgatgtttttgtgctttgcagtgtactacgtacatactaatacgtgcttccaacttcc

SEQ ID NO: 17867 - protein, 296 aa, Zea mays subsp. mays
  misc_feature (1)..(296): Ceres Seq. ID no. 12361390
MAASSPLVLSLLLFASLTALLVLAPRLSPPQPPAAAGGGGGEEADDLRLFRRATLESSAADGPPKVAFLFLTNSDLTFAPLWERFFAGNEARLRVYVHADPSARLLLPRVHAAATSRCWRASRRWRRATRRAAARRACSRRCRTSGSASGRSSSRWPGATPCWWSGSAGCGASSARPASPRWRRTRATPRSTTSRRCWTWRTPAAWRGTRSRASTGRVASRATRTRTPRRRSRQGSSQTSAPPTTPTTPTCSRASSRPTASARSSPSPTPSSSRTDGGRLHPGTTYYSAAEGWAWG

SEQ ID NO: 17868 - protein, 151 aa, Zea mays subsp. mays
  misc_feature (1)..(151): Ceres Seq. ID no. 12361391
MASRYAARGGEEGMLPEVPYERFRIGSQFFALARRHAVLVVRERRLWRKFRAPCVPEMAQDSCYPEEHYFPTLLDMADPGGVARYTLTRVNWTGSVAGHPHTYAAPEVSPRLIADLRASNHTHHPHMFARKFAPDCLGPLLAIADTVIFKD

SEQ ID NO: 17869 - DNA, 1307 bp, Zea mays subsp. mays
  misc_feature (1)..(1307): Ceres Seq. ID no. 12361396
agaagccccctgtgccttgctcctcggtgtttcctccagatagtagtgtttcctcagtggactagtgtgaagctgtgcttagcgtagcggaagggaggaaggacaaggcaaggcaactgatggcggcgggcggcggaggcggctcggcggcgccgttcgtgtggaagacgtacacgatggtggaggaccccgggacggcaggggtgatcggctggggcagcggcaacaacagcttcgtcgtcgccgaccccttcgtcttctcgcagacgctgctccccgcgcacttcaagcacaacaacttctccagcttcgtccgccagctcaacacctatggcttccgcaaggttgatccggaccggtgggagttcgcccacgcgtcgttcctgcgcggccagacgcacctcctgcgcaacatcgtccgccgcggcagcagcgccgcccggtgccggaggcggaaagaggaaggacgccagccccacggagctggcctccggggacgacatgaccatggtggccacggaggtggtgcgcctcaagcaagagcagcgcgccatcgacgaccgcgtcgcctccatgtggcgccgcgtgcaggagacggagcgcaggcccaagcagatgctcgcgttcctcctcaaggtcgtcggcgaccgcgacaggctgcaccgcctcgtcggcgacgcccccgtgccagataacgggttcgcctccggcggtgccgccgagccgcccgccgcggaggtcggcgagaagcgggccaggctgctgctcgacggtgacagcatggtggcgctcggtcccgaggccgtcgacttcgccgggttctacagcggcggcggtgcgttcggcgatgttgccgtggatgctgccgctgggtcccgcggaggcgggttctcgtttgcgttcggcgtggacgcggggtactgaatgacgagcaggcgccgccattgtcagcagcttggcccgcttatgctgctgtcgagcttcctgccaatgccattgcgctgagcggcggcagccgtcacatggaagcatggcaggggatggatgataatgatgttaagttctatccctgctacatggataggatgtgtgtctgatgctgcttttcgtggatctatatgggcggggagcgactactccgtcgagatctaaaaataaggggatatactgtcatggagtgtgaccttcgaagttcccaatatgagtaggtttgatgttgtacatgaccagtgcagcagcactaatatttcaatctcctgcggatacgcagctggaaaattggcatcgctattatttagcccttttct

SEQ ID NO: 17870 - protein, 197 aa, Zea mays subsp. mays
  misc_feature (1)..(197): Ceres Seq. ID no. 12361397
MASARLIRTGGSSPTRRSCAARRTSCATSSAAAAAPPGAGGGKRKDASPTELASGDDMTMVATEVVRLKQEQRAIDDRVASMWRRVQETERRPKQMLAFLLKVVGDRDRLHRLVGDAPVPDNGFASGGAAEPPAAEVGEKRARLLLDGDSMVALGPEAVDFAGFYSGGGAFGDVAVDAAAGSRGGGFSFAFGVDAGY

SEQ ID NO: 17871 - protein, 191 aa, Zea mays subsp. mays
  misc_feature (1)..(191): Ceres Seq. ID no. 12361398
MAAGGGGGSAAPFVWKTYTMVEDPGTAGVIGWGSGNNSFVVADPFVFSQTLLPAHFKHNNFSSFVRQLNTYGFRKVDPDRWEFAHASFLRGQTHLLRNIVRRGSSAARCRRRKEEGRQPHGAGLRGRHDHGGHGGGAPQARAARHRRPRRLHVAPRAGDGAQAQADARVPPQGRRRPRQAAPPRRRRPRAR

SEQ ID NO: 17872 - protein, 172 aa, Zea mays subsp. mays
  misc_feature (1)..(172): Ceres Seq. ID no. 12361399
MVEDPGTAGVIGWGSGNNSFVVADPFVFSQTLLPAHFKHNNFSSFVRQLNTYGFRKVDPDRWEFAHASFLRGQTHLLRNIVRRGSSAARCRRRKEEGRQPHGAGLRGRHDHGGHGGGAPQARAARHRRPRRLHVAPRAGDGAQAQADARVPPQGRRRPRQAAPPRRRRPRAR

SEQ ID NO: 17873 - DNA, 1711 bp, Zea mays subsp. mays
  misc_feature (1)..(1711): Ceres Seq. ID no. 12361402
aactaaccagctccggcccaaacacagccacgagcacctacacccccccgctgtcacctctccttccatcgccacaggcggcccttctccgcggaagccggcgggccgccgcctcccttacccctctcgctgtgctcctccgcaccgtcattccctagcattccccacgggcgaggtaaagaaacattctcccaccccctccagccccataggtgccaccgggatttctcttgcggttgcttggcccagatctgcggcgcattcggcgtttctgatctcgcgtgcacctcgtttccctcggcggtggatcagtggcggcttggtcgagatgggcgatgcggttgatgacatcatctgtgcaacggatgcggcggtcgccgtcgaggatgcggccagtgggaagcccgcaatgctctctagcttaggggggcagggtgaggaagagcatgaggagaaggacaatgaggacaagtcaggcgagagcgaggtgatcaacccgccagaagacgctggcggggaggccacctcacccctggaagggttgaagcctcgcctttccaaggggaatcaaagccatggacctaatgctgtcaaatcaaagagcccaacgagtggagacgaaggtcagacgaggaaaaaggctcccaattcttctcttcctaaggcacccattgtccaggtgtcccatggtgacgctggtgtcggcagtaataaagatggcaagaatgagtctcgctcatcttccgtggatgcaacattgctggatgactccaaggagaaaaggaaaactcaaaagccattagcacagctcttttccatcaaaagtgacgaagaacagtcaaatggtgagagtgcaaagcctcgaaaagttggcagcattccatcatatggtttcaccttcaagtgtgatgagagatctgaaaaaagaagagagttctattcgaagcttgaggagaagattcatgcaagagagttagaaataagcaatttgcaagcgaaatcaaaggaaactgaagaagcagaactcaaaatgctgagaaagagtttgaacttcaaggcaacaccaatgccaagcttctataaggaaccaactcctgtcaaggttgaattgaaaaagatccccccaacaagagccaaatcgccaaagtttggtcgttctaaaaacaagtccacaccagagactgaagaaaatgctaccgcggaccagcctgcccacctgagcctcgaggagaatgtttctcaaaccggtgtgaaaaaaccaaccccgttgaatccagcaaagaagccccagaggaagtcactccccagactgccatctgaagaaaccggtccgcttgatgccacctcaaggcaacttataaagagcgccaagctggatgcagttagtgctccggagacaggatcagctacaggacaggcacaactacaaggaagtcagacggaaacagattctggtcaggggccagttgaagctggagctaatcctgatgaacaagacgccagcgaacagagtgttgtttagtgaagatcacgatgaccaaaccagctgatttgtgatgtgcatggtgttcctcggctttgtataatattgtgcttgcctgctagagtaacctgtagtctgtattatgttatgtgatatatactactactcctggtttattttcctggaattgagccgtatgttgcttatcaatctagatagcttttgttc

SEQ ID NO: 17874 - protein, 506 aa, Zea mays subsp. mays
  misc_feature (1)..(506): Ceres Seq. ID no. 12361403
TNQLRPKHSHEHLHPPAVTSPSIATGGPSPRKPAGRRLPYPSRCAPPHRHSLAFPTGEVKKHSPTPSSPIGATGISLAVAWPRSAAHSAFLISRAPRFPRRWISGGLVEMGDAVDDIICATDAAVAVEDAASGKPAMLSSLGGQGEEEHEEKDNEDKSGESEVINPPEDAGGEATSPLEGLKPRLSKGNQSHGPNAVKSKSPTSGDEGQTRKKAPNSSLPKAPIVQVSHGDAGVGSNKDGKNESRSSSVDATLLDDSKEKRKTQKPLAQLFSIKSDEEQSNGESAKPRKVGSIPSYGFTFKCDERSEKRREFYSKLEEKIHARELEISNLQAKSKETEEAELKMLRKSLNFKATPMPSFYKEPTPVKVELKKIPPTRAKSPKFGRSKNKSTPETEENATADQPAHLSLEENVSQTGVKKPTPLNPAKKPQRKSLPRLPSEETGPLDATSRQLIKSAKLDAVSAPETGSATGQAQLQGSQTETDSGQGPVEAGANPDEQDASEQSVV

SEQ ID NO: 17875 - protein, 397 aa, Zea mays subsp. mays; identical to SEQ ID NO: 14913
  misc_feature (1)..(397): Ceres Seq. ID no. 12361404

SEQ ID NO: 17876 - protein, 370 aa, Zea mays subsp. mays; identical to SEQ ID NO: 14914
  misc_feature (1)..(370): Ceres Seq. ID no. 12361405

SEQ ID NO: 17877 - DNA, 1723 bp, Zea mays subsp. mays
  misc_feature (1)..(1723): Ceres Seq. ID no. 12361433
gcacgagaccattacctagaacatcctaatcgaaaagccctttccctcttccctcccgtcgtcttcactccgacgcctcccctgccgccaccgctattgcctattgggagggcggtccctgtcgcgcgcgacgccgaggcttcgtgacggggacacgctgctaatttgtagcgcaccacacgccggctcggcctcggttgcgcctcgcctcgcctcgccaggggattactggtgggcagcgctcgtgcttgttgtgcagccggtgtgcgtctgctcgcggcctgcggcgatggggcaggacctcgtcgagatccacccgcgcgagctccagttcacatttgaggtgaagaaacaaagttcatgtgttgtctgcctaaccaacaagtccaacgaatatgttgcttttaaggttaaaacgacatcccctaaaagatactgtgttcgaccaaataccggggttatccttccgaggaaaacatgtgaattcacagttaccatgcaagcgctccggactgctccaccagacatgcaattaaaggacaagtttttagtacagaccacagttgttccttatggcacatctgatgaagaactcgttcctgccgttttctccaaagaaactggcagatacatcgaggaaagcaaattgagagttgttcttgttagttcataccaatccctcgaagagcaacccactaatggaattcatgacactgagccagctgttgaagttcctttactgaaagagatgccaaatttagggagcgaagtaccagatgttgcaaaagaaattcctgcccctctggtacaaggtccagcaattgtgaccggaataccttcacctgtcaaagaggttccaggcctgagagaaattcctgtgccactgaacgaagcaccaactttattggcagaatttccttcccctcaaaaagatccctctgctattacagttgaacatgcctctaatgttacaattgagcatgcccctgctatttccattgaatccccacctttgaaacaaagtgttccagtttttaaggaatctcctctgaaacaaagcgttgcagtttttaaggaatctcctcctttgaaacaaagcatttcagtttttaaggaatctcctccactggaggaaactactcctaaagaagctgttatgctaagtgaccgagggcttttcaatgtgcagaatcatcaattatcccatgtaacagaagatgttcagaatatgaaatcaaagctcaacaatcttgaatcaaaattggaagaggctgaaaagatgataataaggctaagagaagagagcagaaataccacccaggagcgggatgagctacagcaagaaatggtattcctaagaaagaagggaaccgcaaggagtcaaatgggtttccccctgctctttgtggtgtacgtggcgcttcttggtacctgtatcggttacctgctccgcatatgagttccaaacttcaaaaaagttcagcagatgggatatgcttcgtatgtgggcaagacaattgaacggcagttgcactccaaaatgttgaggggtgaatttattagcattattagttcggaacttcatatggttttgcacataacagcagtgccaaactaccatctgcctgtatgtatagaacagttactttttttcgcgttttatagaacccacccaaaagatgtctgctgcctcgtagactaacctgggattcttcttccatcc

SEQ ID NO: 17878 - protein, 389 aa, Zea mays subsp. mays
  misc_feature (1)..(389): Ceres Seq. ID no. 12361434
MGQDLVEIHPRELQFTFEVKKQSSCVVCLTNKSNEYVAFKVKTTSPKRYCVRPNTGVILPRKTCEFTVTMQALRTAPPDMQLKDKFLVQTTVVPYGTSDEELVPAVFSKETGRYIEESKLRVVLVSSYQSLEEQPTNGIHDTEPAVEVPLLKEMPNLGSEVPDVAKEIPAPLVQGPAIVTGIPSPVKEVPGLREIPVPLNEAPTLLAEFPSPQKDPSAITVEHASNVTIEHAPAISIESPPLKQSVPVFKESPLKQSVAVFKESPPLKQSISVFKESPPLEETTPKEAVMLSDRGLFNVQNHQLSHVTEDVQNMKSKLNNLESKLEEAEKMIIRLREESRNTTQERDELQQEMVFLRKKGTARSQMGFPLLFVVYVALLGTCIGYLLRI

SEQ ID NO: 17879 - protein, 320 aa, Zea mays subsp. mays
  misc_feature (1)..(320): Ceres Seq. ID no. 12361435
MQALRTAPPDMQLKDKFLVQTTVVPYGTSDEELVPAVFSKETGRYIEESKLRVVLVSSYQSLEEQPTNGIHDTEPAVEVPLLKEMPNLGSEVPDVAKEIPAPLVQGPAIVTGIPSPVKEVPGLREIPVPLNEAPTLLAEFPSPQKDPSAITVEHASNVTIEHAPAISIESPPLKQSVPVFKESPLKQSVAVFKESPPLKQSISVFKESPPLEETTPKEAVMLSDRGLFNVQNHQLSHVTEDVQNMKSKLNNLESKLEEAEKMIIRLREESRNTTQERDELQQEMVFLRKKGTARSQMGFPLLFVVYVALLGTCIGYLLRI

SEQ ID NO: 17880 - protein, 310 aa, Zea mays subsp. mays
  misc_feature (1)..(310): Ceres Seq. ID no. 12361436
MQLKDKFLVQTTVVPYGTSDEELVPAVFSKETGRYIEESKLRVVLVSSYQSLEEQPTNGIHDTEPAVEVPLLKEMPNLGSEVPDVAKEIPAPLVQGPAIVTGIPSPVKEVPGLREIPVPLNEAPTLLAEFPSPQKDPSAITVEHASNVTIEHAPAISIESPPLKQSVPVFKESPLKQSVAVFKESPPLKQSISVFKESPPLEETTPKEAVMLSDRGLFNVQNHQLSHVTEDVQNMKSKLNNLESKLEEAEKMIIRLREESRNTTQERDELQQEMVFLRKKGTARSQMGFPLLFVVYVALLGTCIGYLLRI

SEQ ID NO: 17881 - DNA, 1722 bp, Zea mays subsp. mays
  misc_feature (1)..(1722): Ceres Seq. ID no. 12361452
gcacgagaccattacctagaacatcctaatcgaaaaaaaaataaaaaaattgggtgtttacaacgaattttaggtcttggccccttgggctcttggtccaagcgattttttttctgtgggccgttgggtccgtggaacatatccgttgcagaagactacagattgcagaagcgctcgctcgctgttgttgctgctgccaactgaagggatgcgagccacggccaccgcaggaggccgtgcggtgttccacctccaacacctctgcccgcgcccgccatggcgagctcttcctcctgctgccaccacgcacctctcccgctccgcgccagcgaggcgagccgaccaccgttgcctccccaaaggtttcttatcaactctagaaccggggatttcaggagtctccttgtgtcggcgtgctcatgcaacatgtagctattctttggatgacaagttacagggagagctagatgatatacagggagaacagagaaagctagaaacagttggtgcgtttcagaaaataccaatggtgatgcctgcaactgatatactaatgtcagcacaaaggaaatctagaaatgtgccaccaacaaagggtatagcaaatattgctaagcgtgaaaggaacaaaggtgcgaaacagcttgatgccttaatgaaagaactttctgtaccgctgagaacatacacagaaaacttcccaaagaggagagatttgcatccttatgagaggtctctcattgagttgacttttggggagggttattatgagcaggttctaggacgtgtagatactctcaggaaaaggattacttctgttggaaagcaacatgcttcagtctgtgctaagtcaacaacaaaacgtgaagcagaggaacgcctcactgagggcagaaagaaactcgaagaggctttccagcatgggaagcacgccattgatgatttagtaaatgtagcaaaggctttgcgttctatgcctgttgttgatctacatattccaacactatgtctagttggatcacccaatgtggggaagtcatctttagtccggatattatcatctggaaaacctgaggtctgcagctacccattcacaacaagagggattctaatgggtcacattgtatctaatcaggaacgttttcaggttacggacactccaggactcctgacaaggcatgatgatgacagaaataacatagagcgattgacactcgctgtcctttcttatctacctattgctgtcctgtatgtgcatgatctatccgaagactgtgggacctcagtggccgatcagtacatcacgtacaagcatattaaggacagattcggtgaccgcctatggcttgatgttatatccaaatgcgatcttttgggaaagaaagagcccataagttttcacgatgctgatgacgatgtagcacggtacagaagattggggccagaaggcgccctccaagtatctgtgcagagcgaaatcggcgtcaaacagcttaaggaaagagtgcatgagctgctgacctctcagatggctcggatcaaatctaccaaggcggagcctgaaacacaggaagtagggactagtgttgtttactgaagtttgacaataataaggattcgaatatcatgctgggtgtccgcgtaaacattcaatgtcgatgatggtaacacattccatctgttgtccttttgtccatttggaaagggtggtcagaattgccc

SEQ ID NO: 17882 - protein, 462 aa, Zea mays subsp. mays
  misc_feature (1)..(462): Ceres Seq. ID no. 12361453
MRATATAGGRAVFHLQHLCPRPPWRALPPAATTHLSRSAPARRADHRCLPKGFLSTLEPGISGVSLCRRAHATCSYSLDDKLQGELDDIQGEQRKLETVGAFQKIPMVMPATDILMSAQRKSRNVPPTKGIANIAKRERNKGAKQLDALMKELSVPLRTYTENFPKRRDLHPYERSLIELTFGEGYYEQVLGRVDTLRKRITSVGKQHASVCAKSTTKREAEERLTEGRKKLEEAFQHGKHAIDDLVNVAKALRSMPVVDLHIPTLCLVGSPNVGKSSLVRILSSGKPEVCSYPFTTRGILMGHIVSNQERFQVTDTPGLLTRHDDDRNNIERLTLAVLSYLPIAVLYVHDLSEDCGTSVADQYITYKHIKDRFGDRLWLDVISKCDLLGKKEPISFHDADDDVARYRRLGPEGALQVSVQSEIGVKQLKERVHELLTSQMARIKSTKAEPETQEVGTSVVY

SEQ ID NO: 17883 - protein, 356 aa, Zea mays subsp. mays
  misc_feature (1)..(356): Ceres Seq. ID no. 12361454
MVMPATDILMSAQRKSRNVPPTKGIANIAKRERNKGAKQLDALMKELSVPLRTYTENFPKRRDLHPYERSLIELTFGEGYYEQVLGRVDTLRKRITSVGKQHASVCAKSTTKREAEERLTEGRKKLEEAFQHGKHAIDDLVNVAKALRSMPVVDLHIPTLCLVGSPNVGKSSLVRILSSGKPEVCSYPFTTRGILMGHIVSNQERFQVTDTPGLLTRHDDDRNNIERLTLAVLSYLPIAVLYVHDLSEDCGTSVADQYITYKHIKDRFGDRLWLDVISKCDLLGKKEPISFHDADDDVARYRRLGPEGALQVSVQSEIGVKQLKERVHELLTSQMARIKSTKAEPETQEVGTSVVY

SEQ ID NO: 17884 - protein, 354 aa, Zea mays subsp. mays
  misc_feature (1)..(354): Ceres Seq. ID no. 12361455
MPATDILMSAQRKSRNVPPTKGIANIAKRERNKGAKQLDALMKELSVPLRTYTENFPKRRDLHPYERSLIELTFGEGYYEQVLGRVDTLRKRITSVGKQHASVCAKSTTKREAEERLTEGRKKLEEAFQHGKHAIDDLVNVAKALRSMPVVDLHIPTLCLVGSPNVGKSSLVRILSSGKPEVCSYPFTTRGILMGHIVSNQERFQVTDTPGLLTRHDDDRNNIERLTLAVLSYLPIAVLYVHDLSEDCGTSVADQYITYKHIKDRFGDRLWLDVISKCDLLGKKEPISFHDADDDVARYRRLGPEGALQVSVQSEIGVKQLKERVHELLTSQMARIKSTKAEPETQEVGTSVVY

SEQ ID NO: 17885 - DNA, 1537 bp, Zea mays subsp. mays
  misc_feature (1)..(1537): Ceres Seq. ID no. 12361456
gcacgagaccattacctagaacatcctaatcgaaaaagctattcgcgggaccgtatccgagcaggacagcaggttgttcagcgatcactcgagcggtcgagccctcgcgccgcggagagtgtctccagtctcaagtacagcggaggatggagagcggcttgcttgacaccgccgcggctgccggtctctgcccggtggcggccgggcgccgccgcgtcgggagcacgggcacggcgaggtgcttcctcagctgctcctgcgcttccagagactgcagggtgagcgcgtcctactcccactccatcagccggatgctgagcggggtgcggtcggcggcgcgcaagaggctcttcaggagcgacccggccgagctgctgggcgtcgccaactggtcggagacgggcggcggcggcgccgggggccaccagcactggtggacggcgctggagaacaacttcgtgctggaggccaccgacgacgagtacggcggggtcgtcgtcgacgccgatcggctgccggccgacagggccgccttcgcgcgctccctcgcggcgtcgctctcctactggaagtccgtggggaagaaaggggtgtggttgaaattaccggtggatctagccgagttcgtccctttagcagtgaaggaaggcttcaagtaccaccacgcggaggaagcgtatttgatgatgacgtactggatccccgatgaaccgaatatgctcccagcaaatgcttctcatcaggttggggttgggggttttgtgatcaacgaccaaatggaggttctagtggtgcaagagaagtaccgcggatcgtcgctggatggcgtatggaaactccccacaggcttcattcttgcgtctgaggaaatctacacgggggccagcagagaggtgaaggaggaaaccggggtcgacaccgagttcgttgacgtcgttgctttcaggcatgcccacaacgtggcgtttcacaagtccgacctcttcttcatctgcatgctgaggcctgtgtcgagtgagatcaagattgacgagacagagattcaggcagcgaagtggatggcgctggaggagttcgtgaagcagcccttcatccaggaagaccacatcttccagaagatcatggacatctgcatccagcgcctccgcaagtgctactgtgggctgacgccgcaccacgtcgtctccaagttcgacgacagaacgtccacgctctactacaatgtcgccgagcccgaggacgtgaactgcagcgccgcctgatgtaatatgatgtgagggggagggggagccaccccagcatctactagtctaatttttgctgcgcagaagtttcatgatgcagcagtgttagtcgtgcgattactgagagtgaaatactagtggcagactgcgcgaggcaatagagttgccgagcctgtacatatacgtgtagggcatatgcataaccagagagctgtatatcccggggcggatccccgggcaggaggaaaattttcattgccgccgtaaattacaatttaactttagctcgccct

SEQ ID NO: 17886 - protein, 371 aa, Zea mays subsp. mays
  misc_feature (1)..(371): Ceres Seq. ID no. 12361457
MESGLLDTAAAAGLCPVAAGRRRVGSTGTARCFLSCSCASRDCRVSASYSHSISRMLSGVRSAARKRLFRSDPAELLGVANWSETGGGGAGGHQHWWTALENNFVLEATDDEYGGVVVDADRLPADRAAFARSLAASLSYWKSVGKKGVWLKLPVDLAEFVPLAVKEGFKYHHAEEAYLMMTYWIPDEPNMLPANASHQVGVGGFVINDQMEVLVVQEKYRGSSLDGVWKLPTGFILASEEIYTGASREVKEETGVDTEFVDVVAFRHAHNVAFHKSDLFFICMLRPVSSEIKIDETEIQAAKWMALEEFVKQPFIQEDHIFQKIMDICIQRLRKCYCGLTPHHVVSKFDDRTSTLYYNVAEPEDVNCSAA

SEQ ID NO: 17887 - protein, 316 aa, Zea mays subsp. mays
  misc_feature (1)..(316): Ceres Seq. ID no. 12361458
MLSGVRSAARKRLFRSDPAELLGVANWSETGGGGAGGHQHWWTALENNFVLEATDDEYGGVVVDADRLPADRAAFARSLAASLSYWKSVGKKGVWLKLPVDLAEFVPLAVKEGFKYHHAEEAYLMMTYWIPDEPNMLPANASHQVGVGGFVINDQMEVLVVQEKYRGSSLDGVWKLPTGFILASEEIYTGASREVKEETGVDTEFVDVVAFRHAHNVAFHKSDLFFICMLRPVSSEIKIDETEIQAAKWMALEEFVKQPFIQEDHIFQKIMDICIQRLRKCYCGLTPHHVVSKFDDRTSTLYYNVAEPEDVNCSAA

SEQ ID NO: 17888 - protein, 192 aa, Zea mays subsp. mays
  misc_feature (1)..(192): Ceres Seq. ID no. 12361459
MMTYWIPDEPNMLPANASHQVGVGGFVINDQMEVLVVQEKYRGSSLDGVWKLPTGFILASEEIYTGASREVKEETGVDTEFVDVVAFRHAHNVAFHKSDLFFICMLRPVSSEIKIDETEIQAAKWMALEEFVKQPFIQEDHIFQKIMDICIQRLRKCYCGLTPHHVVSKFDDRTSTLYYNVAEPEDVNCSAA

SEQ ID NO: 17889 - DNA, 1050 bp, Zea mays subsp. mays
  misc_feature (1)..(1050): Ceres Seq. ID no. 12361487
gcacgagaccattacctagaacatcctaatcgaaaaatccaaactcacagcacgctagctcttcagaacttgcggacgaaagactgaccgtgcaccgctagcagatcgatcgaccatggcgtcgtcctctcttctcctcctcgccgccgtcgccctcttcgccgcctccgcagacgcggccaccttcaacgtcatcaaccgctgcaagaacacgctgtggccggccgccctccccggcggcggcgcgcgcctggaccctggcaagacgtggaccgtgcaggtgccggcgggcacggcgcacgcgcgggtgtgggcgcgcacggggtgcagcttcgacggcagcggccgcgggacgtgccagacgggggactgcggcggcgcgctggcgtgcaccgtgtccgggagaacccccgcgacgctgggctgagtacacgctcaacaggaacggcccggactacatcgacatctccctcgtggatggcttcaacgtgcccatgtccttccagtgccgcggcaggggccccagctgcaaggccgacatcaacgcccagtgccccgccgcgctcaaggtgcccggcggctgcgccagcgcctgcgagaagctcggcggcgacacctactgctgccggggccagtacaaggacaagtgcccgcccacggactactccaggttcttcaagaggctgtgcccggacgcctacagctacgccaaggacgaccagaccagcaccttcacctgcccacagggctccaactacgatgtcgtgctctgcccgtgagccacatgttcgagagatcaacgaccatgcattcgcagctcgcaacaagtgcacactagtacaactatacacaagaaataagagtcgcgatatttattattatcgcgcgtggagtagttggtaaataaatcgcttattgcgagtattttggcccatgaataaggccttacttactggccatcatttccgacatatatacgtttgttcatgaataaagaaactttgcaaaacagcacaatatataatttagcacaatatataattttggagc

SEQ ID NO: 17890 - protein, 141 aa, Zea mays subsp. mays
  misc_feature (1)..(141): Ceres Seq. ID no. 12361488
MASTCPCPSSAAAGAPAARPTSTPSAPPRSRCPAAAPAPARSSAATPTAAGASTRTSARPRTTPGSSRGCARTPTATPRTTRPAPSPAHRAPTTMSCSAREPHVREINDHAFAARNKCTLVQLYTRNKSRDIYYYRAWSSW

SEQ ID NO: 17891 - protein, 103 aa, Zea mays subsp. mays
  misc_feature (1)..(103): Ceres Seq. ID no. 12361489
MASSSLLLLAAVALFAASADAATFNVINRCKNTLWPAALPGGGARLDPGKTWTVQVPAGTAHARVWARTGCSFDGSGRGTCQTGDCGGALACTVSGRTPATLG

SEQ ID NO: 17892 - protein, 94 aa, Zea mays subsp. mays
  misc_feature (1)..(94): Ceres Seq. ID no. 12361490
MSFQCRGRGPSCKADINAQCPAALKVPGGCASACEKLGGDTYCCRGQYKDKCPPTDYSRFFKRLCPDAYSYAKDDQTSTFTCPQGSNYDVVLCP

SEQ ID NO: 17893 - DNA, 2706 bp, Zea mays subsp. mays
  misc_feature (1)..(2706): Ceres Seq. ID no. 12361500
gcacgagaccattacctagaacatcctaatcgaaaaattatcgatcccagccccaggccatggcgacgaggtggaggaggtcgctgctctgggtcgccgtcgtccagttcctgaccctgtgcgtcgccgagcatctcgtagtggaagcatacaaaaagtcctacattgtgtatctgggatcacatgcatatggccgtgatgcgtcggcggaggagcatgctcgcgcaacccagtctcaccaccacctcctggcatcgatcctcggcggcgacgacgaccaccaccatgagacggcgcggcagtccatcttctactcctacaccaagagcagcatcaatggcttcgcggcgcacctggaggagtcggtcgcgcagcagatcgcggagcaccctgaggtggtggcggtgctggagagcaagatgctcaagctgcacaccacgcggtcctgggacttcatggacctggagcgcgacggtcacgtcctccctggctccatctggaaccacgctaggttcggacaggacgtcatcatcgccagtctcgacagcggagtgtggcccgagtcccacagcttccaagacgacggcggccaagtgccagctcgctggaagggctcctgtcaagacaccgttaagtacggtgtcgcctgcaaccgcaaactcatcggcgctaggttcttcaacaaagacatgctctttagcaacccagccgtggtgaacgccaactggacgcgcgacaccgagggccacggcacccacacgctctccaccgccgccggtggctttgtgccccgtgccagtctcttcggctatgccactggcacagccaaaggcggcgcgccgcgtgcgcgcgtcgccgcttataaggtttgctggtcgggagagtgcgccgccgccgacgtccttgcgggcttcgagtccgccatccatgacggcgccgacgtcatttccgtctccttcggtcaggacgcgcccctcgccgatgacgtcaagtcactcttccacgagcctgtcatgctcggctcgctccacgccgccatccacggtgtctccgtcatctgctccgccggcaactccggcccgtacgatgacaccgtcgtcaatgccgcgccatgggtcaccacagtcgccgccaccaccgtcgacagagacttccccaacgttctcaccctcggcaatagcgtgcgccttaggggaacgagcctcgagtctactacgctgcactccagcatgctctacccgatgatcgacgccgcgcgcgccgcgcgcaccacctctaacccgtacgacgcggccagctgcgggctcggcaccctcgaccctgctgccatcaggggcaagatcgtcgtgtgtcgccgcggcggcggaggcggaggcgacgtctcccgagtcagcaaggggatggccgtgctcgaggccgggggagccgggatgatcctcgccaacgacaggatggacggtgacgacatcgtcgcagacccgcacgtcctcccggccaccatgatcacctacagcgaggccgtctctctgtacggctacatggagtccaccagcaaccccgtcgccaacatctcacccgccaagacggaggtgggcgtcaagaactcgccgtccgtggcgggcttctcctcccgcgggcccagcgggactctgccgtacgtgctcaagcccgacatcgccgcgccgggggtcgacatcctggccgccttcaccgagtacgtcggccccacggagctcgcctccgacaagcgccgctccgagtacgccatcctgtccggcacgtccatggcctgcccacacgtctccggcgtcatcgctctcctcaaggcggcgcgccccgagtggagccccgccgcgatgcgctccgcgatcatgaccacggcgcgcacccaggacaacacgggagcgcccatgcgcgaccacgacggcaaggaggccaacgccttcgcctacggcgccggcaacgtgcaccccaaccgcgccgtcgacccgggcctcgtgtacgacgccggccccgacgactacttcaccttcctctgcgccatgggcatctccgcggcagacatgaagcggctcagcgccggcaagttcgcgtgcccagctaatagcgctaaggaggcgcccgccatggaggacctcaactacccgtccatcgtggtgccgtcgctgcgcggcacgcagacggtgacgcgacggctgaagaacgtcggccgtccggccaagtacctcgcgtcctggcgcgcgccggttgggatcaccatggaggtgaagccgagggtgcttgagttcagcaaggtcggtgaggaaaaggagttcaaggtgacggtgacgtcgcagcaggacaagctcgggatgggctacgtctttgggaggctcgtctggacagacgggacccactatgtcagaagccccgtcgtcgtcaacgccctcgcatgatctatccagttcgtgctaactagagtacactacctactactactacttgagggccttgtggatttttgtgacatcttagataagtagtaaggctctaaaatatatttttatttcttcttgttattattagtaaagaaatgagataggtttttttttgcttagctaaaagacatatcatctataataaattttggctctttgcatgggaacttgaattaatggtaaaaaactgcatataatataatgaagggaaaagggcacttctagtttc

SEQ ID NO: 17894 - protein, 791 aa, Zea mays subsp. mays
  misc_feature (1)..(791): Ceres Seq. ID no. 12361501
MATRWRRSLLWVAVVQFLTLCVAEHLVVEAYKKSYIVYLGSHAYGRDASAEEHARATQSHHHLLASILGGDDDHHHETARQSIFYSYTKSSINGFAAHLEESVAQQIAEHPEVVAVLESKMLKLHTTRSWDFMDLERDGHVLPGSIWNHARFGQDVIIASLDSGVWPESHSFQDDGGQVPARWKGSCQDTVKYGVACNRKLIGARFFNKDMLFSNPAVVNANWTRDTEGHGTHTLSTAAGGFVPRASLFGYATGTAKGGAPRARVAAYKVCWSGECAAADVLAGFESAIHDGADVISVSFGQDAPLADDVKSLFHEPVMLGSLHAAIHGVSVICSAGNSGPYDDTVVNAAPWVTTVAATTVDRDFPNVLTLGNSVRLRGTSLESTTLHSSMLYPMIDAARAARTTSNPYDAASCGLGTLDPAAIRGKIVVCRRGGGGGGDVSRVSKGMAVLEAGGAGMILANDRMDGDDIVADPHVLPATMITYSEAVSLYGYMESTSNPVANISPAKTEVGVKNSPSVAGFSSRGPSGTLPYVLKPDIAAPGVDILAAFTEYVGPTELASDKRRSEYAILSGTSMACPHVSGVIALLKAARPEWSPAAMRSAIMTTARTQDNTGAPMRDHDGKEANAFAYGAGNVHPNRAVDPGLVYDAGPDDYFTFLCAMGISAADMKRLSAGKFACPANSAKEAPAMEDLNYPSIVVPSLRGTQTVTRRLKNVGRPAKYLASWRAPVGITMEVKPRVLEFSKVGEEKEFKVTVTSQQDKLGMGYVFGRLVWTDGTHYVRSPVVVNALA

SEQ ID NO: 17895 - protein, 671 aa, Zea mays subsp. mays
  misc_feature (1)..(671): Ceres Seq. ID no. 12361502
MLKLHTTRSWDFMDLERDGHVLPGSIWNHARFGQDVIIASLDSGVWPESHSFQDDGGQVPARWKGSCQDTVKYGVACNRKLIGARFFNKDMLFSNPAVVNANWTRDTEGHGTHTLSTAAGGFVPRASLFGYATGTAKGGAPRARVAAYKVCWSGECAAADVLAGFESAIHDGADVISVSFGQDAPLADDVKSLFHEPVMLGSLHAAIHGVSVICSAGNSGPYDDTVVNAAPWVTTVAATTVDRDFPNVLTLGNSVRLRGTSLESTTLHSSMLYPMIDAARAARTTSNPYDAASCGLGTLDPAAIRGKIVVCRRGGGGGGDVSRVSKGMAVLEAGGAGMILANDRMDGDDIVADPHVLPATMITYSEAVSLYGYMESTSNPVANISPAKTEVGVKNSPSVAGFSSRGPSGTLPYVLKPDIAAPGVDILAAFTEYVGPTELASDKRRSEYAILSGTSMACPHVSGVIALLKAARPEWSPAAMRSAIMTTARTQDNTGAPMRDHDGKEANAFAYGAGNVHPNRAVDPGLVYDAGPDDYFTFLCAMGISAADMKRLSAGKFACPANSAKEAPAMEDLNYPSIVVPSLRGTQTVTRRLKNVGRPAKYLASWRAPVGITMEVKPRVLEFSKVGEEKEFKVTVTSQQDKLGMGYVFGRLVWTDGTHYVRSPVVVNALA

SEQ ID NO: 17896 - protein, 659 aa, Zea mays subsp. mays
  misc_feature (1)..(659): Ceres Seq. ID no. 12361503
MDLERDGHVLPGSIWNHARFGQDVIIASLDSGVWPESHSFQDDGGQVPARWKGSCQDTVKYGVACNRKLIGARFFNKDMLFSNPAVVNANWTRDTEGHGTHTLSTAAGGFVPRASLFGYATGTAKGGAPRARVAAYKVCWSGECAAADVLAGFESAIHDGADVISVSFGQDAPLADDVKSLFHEPVMLGSLHAAIHGVSVICSAGNSGPYDDTVVNAAPWVTTVAATTVDRDFPNVLTLGNSVRLRGTSLESTTLHSSMLYPMIDAARAARTTSNPYDAASCGLGTLDPAAIRGKIVVCRRGGGGGGDVSRVSKGMAVLEAGGAGMILANDRMDGDDIVADPHVLPATMITYSEAVSLYGYMESTSNPVANISPAKTEVGVKNSPSVAGFSSRGPSGTLPYVLKPDIAAPGVDILAAFTEYVGPTELASDKRRSEYAILSGTSMACPHVSGVIALLKAARPEWSPAAMRSAIMTTARTQDNTGAPMRDHDGKEANAFAYGAGNVHPNRAVDPGLVYDAGPDDYFTFLCAMGISAADMKRLSAGKFACPANSAKEAPAMEDLNYPSIVVPSLRGTQTVTRRLKNVGRPAKYLASWRAPVGITMEVKPRVLEFSKVGEEKEFKVTVTSQQDKLGMGYVFGRLVWTDGTHYVRSPVVVNALA

SEQ ID NO: 17897 - DNA, 2782 bp, Zea mays subsp. mays
  misc_feature (1)..(2782): Ceres Seq. ID no. 12361524
gaaaaatcccaccccccctccactccactaccacggcggcacggcctgcctctgcagctctgccctgctccgcacccctcgctctccaaccccaacgcgcggcgttgctaaaattcaccgcagcgcttactccagtttggccacctcaccacccgccgccgctgtttaagaaggccccgcgcccgatcggggatcacgaaccttggccgccgctgccggagtgggggcgtagatttccggcggccatggggggcgccgtgatggtcgccatcgcggcctctatcggcaacttgctgcagggctgggacaatgcgacaattgctggagccgtcctgtacataaagaaggaattcaacctgcagagcgagcctctgatcgagggcctcatcgtcgccatgtccctcattggggcaacagtcatcacgacgttctccggggcagcggccgactgcgttggtaggaggcccatgctggtcgcctcggctgtcctctacttcgtcagtgggctggtgatgctttgggcgccaagtgtgtacatcttgctcctcgcaaggctcattgatgggttcggtatcggtttggcggtcacacttgttcctctctacatctccgagactgcaccgacagacattcgtgggctgttgaacacgttgccgcagttcagtgggtcaggagggatgttcctctcctactgcatggtgtttgggatgtccctcatgcccaaacctgattggaggctcatgcttggagttctgtcgatcccgtcacttatttactttggactgactgtcttctacttgcctgaatcaccaaggtggcttgtgagcaaaggaaggatggcggaggcgaagagagtgttgcaaaggctgcggggaagagaagatgtctcaggggagatggctcttctagttgaaggtttgggggtcggtaaagatacacgtattgaagaatacataattggtcccgatgatgaacttgctgatgaagggctggctccagatccagagaagatcaaactatatggacctgaagaaggcctatcttgggttgcccgacctgttcggggacaaagtgctcttggaagcgcgttaggtctcatctctcgtcatgggagtatggcggctagtcagggtaagcccctcgtggatcctatggtcactcttttcggaagtgttcatgaaaagatgcctgagatcatggggagcatgaggagcacattgtttcccaactttggcagcatgtttagtgttgccgaccagcagcaggtgaaagctgactgggacgccgagagtcaaagggaaggtgaagattatgcttcggatcatggtggcgatgacatcgaggataacctccaaagcccacttatttctcgtcaggcaacaagtgtggaaggaaaggagatcgctgcacctcatggtagcatattgggtgctgtgggaaggagcagtagcttgcagggaggggaggcagtaagcagcatgggcattggcggaggatggcagttggcgtggaaatggaccgagagagagggcgaagatgggcaaaaggaaggtggcttccagcgtatttacttgcatgaggagggcgtacaaggcaacaggggttctatattgtcattaccaggcggggatgttcctcctggtggtgagttcatccaggctgcagctcttgtgagccaaccagctctttactctaaggaactgctggagcaacgtgctgctggtcctgcgatgatgcatccatctgaagcagttactaaaggtccaagatgggccgacctatttgagcctggggtgaagcatgcactgtttgttggcataggaatacagatcctgcaacagtttgctggcatcaacggcgttctctactacactcctcaaattcttgagcaagcaggcgttggtgttcttctgtcgaacctcggccttaacgcttcttcggcatcaatcctcattagcgccctgacgaccttactgatgctcccaagcatcggcattgcgatgaggctcatggatatgtccggaaggaggtttctcctcctcgcgacgatcccagtcctaatagtcgcgctactcgtcctggtggtgtccaacatcgtggacgtgggggacgtggcgcacgcggcgctctccacggccagcgtcatagtctacttctgcttcttcgtcatggggttcgggcccgtccccaacatcctctgcgcagagatcttccccaccacggtccgcggtgtctgcatcgccatctgcgccctggccttctggctcggtgacatcatcgtgacgtacactctccccgtgatgctgaacgtcgtcgggctcgccggcgtctttggggtgtacgccgtcgtgtgcgtcctagccctcgcgttcgtgttcgtcaaggtgcccgagacgaagggcatgcctctcgaggtcatcaccgagttcttctccgttggggcaaagcaagccaaggaagaggaggaggaggaggccagggaaggttgatcacccggacggccggacccagttaccggcaccgcctgtggggatttttgtggtctgcacacttcactgtggttggtcctgtgatgatgtatttgtgaaaaaaaaaactttgggtagggggcagagatgatttggctgtacaatgtgaggcttgattctgccaaaggctggccttcagaactaggaagggtgtctgttatcttcttttgttgcttggagaccttgtgcttgtgttggttggaattttgttgcctatgtaactagtggtgtatgacagttatgctattggtttc

SEQ ID NO: 17898 - protein, 828 aa, Zea mays subsp. mays
  misc_feature (1)..(828): Ceres Seq. ID no. 12361525
KIPPPLHSTTTAARPASAALPCSAPLALQPQRAALLKFTAALTPVWPPHHPPPLFKKAPRPIGDHEPWPPLPEWGRRFPAAMGGAVMVAIAASIGNLLQGWDNATIAGAVLYIKKEFNLQSEPLIEGLIVAMSLIGATVITTFSGAAADCVGRRPMLVASAVLYFVSGLVMLWAPSVYILLLARLIDGFGIGLAVTLVPLYISETAPTDIRGLLNTLPQFSGSGGMFLSYCMVFGMSLMPKPDWRLMLGVLSIPSLIYFGLTVFYLPESPRWLVSKGRMAEAKRVLQRLRGREDVSGEMALLVEGLGVGKDTRIEEYIIGPDDELADEGLAPDPEKIKLYGPEEGLSWVARPVRGQSALGSALGLISRHGSMAASQGKPLVDPMVTLFGSVHEKMPEIMGSMRSTLFPNFGSMFSVADQQQVKADWDAESQREGEDYASDHGGDDIEDNLQSPLISRQATSVEGKEIAAPHGSILGAVGRSSSLQGGEAVSSMGIGGGWQLAWKWTEREGEDGQKEGGFQRIYLHEEGVQGNRGSILSLPGGDVPPGGEFIQAAALVSQPALYSKELLEQRAAGPAMMHPSEAVTKGPRWADLFEPGVKHALFVGIGIQILQQFAGINGVLYYTPQILEQAGVGVLLSNLGLNASSASILISALTTLLMLPSIGIAMRLMDMSGRRFLLLATIPVLIVALLVLVVSNIVDVGDVAHAALSTASVIVYFCFFVMGFGPVPNILCAEIFPTTVRGVCIAICALAFWLGDIIVTYTLPVMLNVVGLAGVFGVYAVVCVLALAFVFVKVPETKGMPLEVITEFFSVGAKQAKEEEEEEAREG

SEQ ID NO: 17899 - protein, 747 aa, Zea mays subsp. mays
  misc_feature (1)..(747): Ceres Seq. ID no. 12361526
MGGAVMVAIAASIGNLLQGWDNATIAGAVLYIKKEFNLQSEPLIEGLIVAMSLIGATVITTFSGAAADCVGRRPMLVASAVLYFVSGLVMLWAPSVYILLLARLIDGFGIGLAVTLVPLYISETAPTDIRGLLNTLPQFSGSGGMFLSYCMVFGMSLMPKPDWRLMLGVLSIPSLIYFGLTVFYLPESPRWLVSKGRMAEAKRVLQRLRGREDVSGEMALLVEGLGVGKDTRIEEYIIGPDDELADEGLAPDPEKIKLYGPEEGLSWVARPVRGQSALGSALGLISRHGSMAASQGKPLVDPMVTLFGSVHEKMPEIMGSMRSTLFPNFGSMFSVADQQQVKADWDAESQREGEDYASDHGGDDIEDNLQSPLISRQATSVEGKEIAAPHGSILGAVGRSSSLQGGEAVSSMGIGGGWQLAWKWTEREGEDGQKEGGFQRIYLHEEGVQGNRGSILSLPGGDVPPGGEFIQAAALVSQPALYSKELLEQRAAGPAMMHPSEAVTKGPRWADLFEPGVKHALFVGIGIQILQQFAGINGVLYYTPQILEQAGVGVLLSNLGLNASSASILISALTTLLMLPSIGIAMRLMDMSGRRFLLLATIPVLIVALLVLVVSNIVDVGDVAHAALSTASVIVYFCFFVMGFGPVPNILCAEIFPTTVRGVCIAICALAFWLGDIIVTYTLPVMLNVVGLAGVFGVYAVVCVLALAFVFVKVPETKGMPLEVITEFFSVGAKQAKEEEEEEAREG

SEQ ID NO: 17900 - protein, 742 aa, Zea mays subsp. mays
  misc_feature (1)..(742): Ceres Seq. ID no. 12361527
MVAIAASIGNLLQGWDNATIAGAVLYIKKEFNLQSEPLIEGLIVAMSLIGATVITTFSGAAADCVGRRPMLVASAVLYFVSGLVMLWAPSVYILLLARLIDGFGIGLAVTLVPLYISETAPTDIRGLLNTLPQFSGSGGMFLSYCMVFGMSLMPKPDWRLMLGVLSIPSLIYFGLTVFYLPESPRWLVSKGRMAEAKRVLQRLRGREDVSGEMALLVEGLGVGKDTRIEEYIIGPDDELADEGLAPDPEKIKLYGPEEGLSWVARPVRGQSALGSALGLISRHGSMAASQGKPLVDPMVTLFGSVHEKMPEIMGSMRSTLFPNFGSMFSVADQQQVKADWDAESQREGEDYASDHGGDDIEDNLQSPLISRQATSVEGKEIAAPHGSILGAVGRSSSLQGGEAVSSMGIGGGWQLAWKWTEREGEDGQKEGGFQRIYLHEEGVQGNRGSILSLPGGDVPPGGEFIQAAALVSQPALYSKELLEQRAAGPAMMHPSEAVTKGPRWADLFEPGVKHALFVGIGIQILQQFAGINGVLYYTPQILEQAGVGVLLSNLGLNASSASILISALTTLLMLPSIGIAMRLMDMSGRRFLLLATIPVLIVALLVLVVSNIVDVGDVAHAALSTASVIVYFCFFVMGFGPVPNILCAEIFPTTVRGVCIAICALAFWLGDIIVTYTLPVMLNVVGLAGVFGVYAVVCVLALAFVFVKVPETKGMPLEVITEFFSVGAKQAKEEEEEEAREG

SEQ ID NO: 17901 - DNA, 1099 bp, Zea mays subsp. mays
  misc_feature (1)..(1099): Ceres Seq. ID no. 12361605
tattggagagatgaaaagcactgcagaatatgccattcaactttcgaggttggttttgatcttgaagaaaaatatgctgtacatgtggcgacgtgcagggagcctgaactttcacatgaggtaccaaatcataaatttctgccatcacagctacaggcacttaaagcagccattcatgctattgaggcatctatgcctgaggcagcttttactggttcttggatgaagtctgctcacaagctgtgggttaagcggctgcgacgaacgtcatcattgccagagcttttgcaggttcttgtcgattttgtaggggcaatggatgttgattggttgtacaaaagttcatctgcgagattgagaacaaatctggatgacatcattgtcgactttcagacaatgccacaaacaacatcagcagttgcactttgggttgtccaattggatgccctcattgcgccttatttggataatgccatgacaagtatgtttttgttcacaatcgcaatgtctaatgacagctggtgaatgctaggtagcttacgaagatggattcttttgcgtgatgcacaagcaccccgagctgacttctttttctggcaccatctgcaagttttttcttgatgaaagcttttcatctaggtgagacagaacatggggtctgctttgagttcgagaacaagatcttgcgacttgctgtaaagcatggaatatattgttccctcccagcagagcattgcgtcatagacaatgaaaaagttttgttaataatcgttgcttcagatatgtgaaagttttggctttccatgtagcgacacaattgggatgtaggccatttntgaaacagaccgctgtttgcaggtggtgctgtttgggacttgattaccagctgtgcccttagttttaacggaggggtggttataattttgttccttctatatctgtatgtgctaagttgctcctagtccgtgagagctttctacattaggctatttttgtatgttatgtaaccagtttctattagagtgcagttgtagacatttagaacatgtacaccaatattgtgactgtttaaacaagtgagggaggcatagaagacttc

SEQ ID NO: 17902 - protein, 174 aa, Zea mays subsp. mays
  misc_feature (1)..(174): Ceres Seq. ID no. 12361606
YWRDEKHCRICHSTFEVGFDLEEKYAVHVATCREPELSHEVPNHKFLPSQLQALKAAIHAIEASMPEAAFTGSWMKSAHKLWVKRLRRTSSLPELLQVLVDFVGAMDVDWLYKSSSARLRTNLDDIIVDFQTMPQTTSAVALWVVQLDALIAPYLDNAMTSMFLFTIAMSNDSW

SEQ ID NO: 17903 - protein, 110 aa, Zea mays subsp. mays
  misc_feature (1)..(110): Ceres Seq. ID no. 12361607
MPEAAFTGSWMKSAHKLWVKRLRRTSSLPELLQVLVDFVGAMDVDWLYKSSSARLRTNLDDIIVDFQTMPQTTSAVALWVVQLDALIAPYLDNAMTSMFLFTIAMSNDSW

SEQ ID NO: 17904 - protein, 100 aa, Zea mays subsp. mays
  misc_feature (1)..(100): Ceres Seq. ID no. 12361608
MKSAHKLWVKRLRRTSSLPELLQVLVDFVGAMDVDWLYKSSSARLRTNLDDIIVDFQTMPQTTSAVALWVVQLDALIAPYLDNAMTSMFLFTIAMSNDSW

SEQ ID NO: 17905 - DNA, 1205 bp, Zea mays subsp. mays
  misc_feature (1)..(1205): Ceres Seq. ID no. 12361617
ctctcgattcggaaaacctccaaccctagccgcgatccgacaacgcctccatccctagccgactgctgcaagcttcagagctcaagagtcagggcgccatggcgacagagacggagaccttcgcctttcaggctgagatcaaccagctgctctcactcatcatcaacaccttctattccaacaaggagatcttcctccgggagctcatttccaactcttccgatgcgttggacaaaatcaggttcgagagcctcactgacaagagcaagctcgatgcgcagccggagctgttcatccacattgtaccagacaaggcttcgaacacgctctccatcatcgacagcggcatcggcatgaccaagtccgaccttgtcaacaacctcggtaccatcgccaggtccgggaccaaggagttcatggaagcccttgctgctggcgctgatgtgtctatgattgggcagttcggtgtcggtttctactctgcctacctcgtcgccgagagggtcgtcgtgaccaccaagcataacgatgacgagcagtacgtgtgggaatcccaggcgggcgggtcgttcactgttactcgtgacacgtctggggagcagcttggcaggggtactaagattacacttttcctcaaggaagatcagttagaataccttgaggagcgtcgcctcaaggatttggtcaagaagcactctgagttcatcagctaccccatctccctgtggaccgaaaagacaacggagaaggagatttctgatgatgaagatgaggaagagaagaaagacgctgaggagggaaaggttgaggatgttgacgaggagaaggaagagaaagaaaaaaagaaaaagaagatcaaggaggtttctcacgagtggtcattgatcaacaagcagaagcccatctggatgaggaagccagaagagatcacaaaggaagaatatgctgccttctacaaaagcttgacaaatgactgggaggagcatctggctgtgaagcacttctctgtggagggtcagctggagttcaaggctgttctctttgttcctaagagggccccgtttgatctcttcgacacaaggaagaagcaaaacaacatcaagctctatgtgcgcagggtgtttatcatggacaactgtgaggaactgatccctgagtggctgagttttgttaagggtattgttgactctgaggaccttcccctc

SEQ ID NO: 17906 - protein, 369 aa, Zea mays subsp. mays
  misc_feature (1)..(369): Ceres Seq. ID no. 12361618
MATETETFAFQAEINQLLSLIINTFYSNKEIFLRELISNSSDALDKIRFESLTDKSKLDAQPELFIHIVPDKASNTLSIIDSGIGMTKSDLVNNLGTIARSGTKEFMEALAAGADVSMIGQFGVGFYSAYLVAERVVVTTKHNDDEQYVWESQAGGSFTVTRDTSGEQLGRGTKITLFLKEDQLEYLEERRLKDLVKKHSEFISYPISLWTEKTTEKEISDDEDEEEKKDAEEGKVEDVDEEKEEKEKKKKKIKEVSHEWSLINKQKPIWMRKPEEITKEEYAAFYKSLTNDWEEHLAVKHFSVEGQLEFKAVLFVPKRAPFDLFDTRKKQNNIKLYVRRVFIMDNCEELIPEWLSFVKGIVDSEDLPL

SEQ ID NO: 17907 - protein, 284 aa, Zea mays subsp. mays
  misc_feature (1)..(284): Ceres Seq. ID no. 12361619
MTKSDLVNNLGTIARSGTKEFMEALAAGADVSMIGQFGVGFYSAYLVAERVVVTTKHNDDEQYVWESQAGGSFTVTRDTSGEQLGRGTKITLFLKEDQLEYLEERRLKDLVKKHSEFISYPISLWTEKTTEKEISDDEDEEEKKDAEEGKVEDVDEEKEEKEKKKKKIKEVSHEWSLINKQKPIWMRKPEEITKEEYAAFYKSLTNDWEEHLAVKHFSVEGQLEFKAVLFVPKRAPFDLFDTRKKQNNIKLYVRRVFIMDNCEELIPEWLSFVKGIVDSEDLPL

SEQ ID NO: 17908 - protein, 263 aa, Zea mays subsp. mays
  misc_feature (1)..(263): Ceres Seq. ID no. 12361620
MEALAAGADVSMIGQFGVGFYSAYLVAERVVVTTKHNDDEQYVWESQAGGSFTVTRDTSGEQLGRGTKITLFLKEDQLEYLEERRLKDLVKKHSEFISYPISLWTEKTTEKEISDDEDEEEKKDAEEGKVEDVDEEKEEKEKKKKKIKEVSHEWSLINKQKPIWMRKPEEITKEEYAAFYKSLTNDWEEHLAVKHFSVEGQLEFKAVLFVPKRAPFDLFDTRKKQNNIKLYVRRVFIMDNCEELIPEWLSFVKGIVDSEDLPL

SEQ ID NO: 17909 - DNA, 1851 bp, Zea mays subsp. mays
  misc_feature (1)..(1851): Ceres Seq. ID no. 12361706
acttttgaaaatagttttgtgctctcaaggcaaaagagcacacttgactcttgctcgcctctctcactcactctctcactcaagctccagtcacacactctctctagctctctgccactccgtccattgggctggactggactggaggcatggccattccattgctagctccagcgcgctccaacggcagcaggccgctggcgctggcgctggtgctcgtcgccgcggccgcgctgtgccgtccgggtgcttgcgacgacggagccgccgccgccgcggacaggatcaggcggctcccgggggagccggaggtgagcttcgcccagtactcgggctacgtcgccgtggacagcggcggcggcaagcgcgccctgttctactacttcgtggaggccgacgtcgtggaccccgcctccaagcctctcgtcctctggctcaacggcgggcctgggtgctcgtccctgggcgtaggcgccttctcagagaacgggccgttcaggcctagtggccaggtgctggtcaagaacgaatacagctggaacaaagaggccaatgtgatatacctggagacgccggctggtgttggctactcctactctgctgatgctgcttactaccagggcgtggatgacaagatgacagccatggacaacatggtgttcctgcaaaggtggctccaaaagttcccacagtacaagggcagagacctctacatcgctggagagagctacgcagggcactacatcccgcaactcgcggaggccatggtggagttcaacaagaaggacaggatcttcaacctcagaggcgtcgctctgggcaaccctgtgctggaattcgcgacggacttcaacgcccgcgccgagtacttctggtcgcacggcctcatctccgacgccacctaccgcgtgttcacctccgcctgcaactactcccgctacgtcaccgagtactacggcggctcgctgtcgccgctgtgcgcccgggtgatgaaccaggtgacgcgcgagaccagccgcttcgtcgacaagtacgacgtcacgctcgacgtctgcctctcgtcggtgctctctcagtccaagatcctctcgccgcacgagcaggtcgggcagcggatcgacgtgtgcgtggaggacgagacggtgaggtacctcaaccgccgggacgtgcaggcggcgctgcacgcgaggctcgtcggcgtcgacaagtgggcggtctgcagcagcgttctcgagtacgagctgctcaacctgcagatcccgaccatcaacgtcgtcggatcgctcgtgaaatcgggcatccgagtgctcgtttacagcggcgaccaggactcggtgatccctctgacgggcagccggacgctggtgcagaacctggcgcgcgacatgggcctcaagaccaccaccccgtaccgggtgtggttcgaagggcagcaggtcggaggatggacgcaggtgtacggaggcggcgcgctgtccttcgccaccatcaggggcgcctcccacgaggcgcccttctcgcagcccgggcgctcgctcgttctcttcagggcgttcctgcagggccagcctctgcctgaaaccttctcgtgatcagggtgctcgatgcagctccttctgcaggtggggtggggggttttgcactgtagtaatctgtaaggaggtgtttggtgtgtctgcctcctggctcctgctagctgatgatactagtggtttggtttggcgccgcggtaggagtaggagcgagcgagcggccggcgctgttcgaggtctgtgctccgtgtttctacagcgtccgtccatggctcggcaattgcctaaagaagcggaaaggatttgtccctcgtttcgt

SEQ ID NO: 17910 - protein, 480 aa, Zea mays subsp. mays
  misc_feature (1)..(480): Ceres Seq. ID no. 12361707
MAIPLLAPARSNGSRPLALALVLVAAAALCRPGACDDGAAAAADRIRRLPGEPEVSFAQYSGYVAVDSGGGKRALFYYFVEADVVDPASKPLVLWLNGGPGCSSLGVGAFSENGPFRPSGQVLVKNEYSWNKEANVIYLETPAGVGYSYSADAAYYQGVDDKMTAMDNMVFLQRWLQKFPQYKGRDLYIAGESYAGHYIPQLAEAMVEFNKKDRIFNLRGVALGNPVLEFATDFNARAEYFWSHGLISDATYRVFTSACNYSRYVTEYYGGSLSPLCARVMNQVTRETSRFVDKYDVTLDVCLSSVLSQSKILSPHEQVGQRIDVCVEDETVRYLNRRDVQAALHARLVGVDKWAVCSSVLEYELLNLQIPTINVVGSLVKSGIRVLVYSGDQDSVIPLTGSRTLVQNLARDMGLKTTTPYRVWFEGQQVGGWTQVYGGGALSFATIRGASHEAPFSQPGRSLVLFRAFLQGQPLPETFS

SEQ ID NO: 17911 - protein, 318 aa, Zea mays subsp. mays
  misc_feature (1)..(318): Ceres Seq. ID no. 12361708
MTAMDNMVFLQRWLQKFPQYKGRDLYIAGESYAGHYIPQLAEAMVEFNKKDRIFNLRGVALGNPVLEFATDFNARAEYFWSHGLISDATYRVFTSACNYSRYVTEYYGGSLSPLCARVMNQVTRETSRFVDKYDVTLDVCLSSVLSQSKILSPHEQVGQRIDVCVEDETVRYLNRRDVQAALHARLVGVDKWAVCSSVLEYELLNLQIPTINVVGSLVKSGIRVLVYSGDQDSVIPLTGSRTLVQNLARDMGLKTTTPYRVWFEGQQVGGWTQVYGGGALSFATIRGASHEAPFSQPGRSLVLFRAFLQGQPLPETFS

SEQ ID NO: 17912 - protein, 315 aa, Zea mays subsp. mays
  misc_feature (1)..(315): Ceres Seq. ID no. 12361709
MDNMVFLQRWLQKFPQYKGRDLYIAGESYAGHYIPQLAEAMVEFNKKDRIFNLRGVALGNPVLEFATDFNARAEYFWSHGLISDATYRVFTSACNYSRYVTEYYGGSLSPLCARVMNQVTRETSRFVDKYDVTLDVCLSSVLSQSKILSPHEQVGQRIDVCVEDETVRYLNRRDVQAALHARLVGVDKWAVCSSVLEYELLNLQIPTINVVGSLVKSGIRVLVYSGDQDSVIPLTGSRTLVQNLARDMGLKTTTPYRVWFEGQQVGGWTQVYGGGALSFATIRGASHEAPFSQPGRSLVLFRAFLQGQPLPETFS

SEQ ID NO: 17913 - DNA, 2743 bp, Zea mays subsp. mays
  misc_feature (1)..(2743): Ceres Seq. ID no. 12361729
gcacgagaccattacctagaacatcctaatcgaaaagacgaactcatcactgcactggtggtgtccgtggtgctccacagagtgaagcgatagccaggagaggcgacgatgcgcaagtgggcgctctcctccgcgctcctcctcctctttctcctcaccacactccccgacccagctaagaagctacaagtgaatgccgaggagagcagcgatgacttggctaacccacccaaggtagaggagaagcttggtgctgtccctcatggcctgtccaccgactctgaggttgcccagagggaagccgagtctatctctaggaagactctcaggagctcagccgagaagtttgagttccaagctgaggtttccagactcatggacatcatcatcaactcactctacagcaacaaggatatcttcctgagggagctcatatctaatgcctctgatgcgttggataagattaggttcctttcccttactgataaggaagttctgggtgaaggggacactgcaaagcttgagattcagattaagttggacaaagagaagaaaatcctctccattcgggataggggtattggtatgaccaaggaagatcttattaagaaccttggaacgattgctaaatctggcacttcagcttttgtggaaaagatgcagtctggaggtgacctcaatcttattggacagtttggtgttggcttctactctgtgtacttggttgctgactatgttgaagtggtcagcaagcacaatgatgataaacagtatgtgtgggaatcaaaagctgatggatcatttgccatctctgaggatacatggaatgagccccttggccgtggaactgagataagattgcatctgcgagatgaggccaaggagtacttggaagaggataagctaaaggatttggtgaagaagtactctgagttcatcaacttccctatctatttgtggtcgaccaaggaggttgatgttgaagtgccaactgatgaggatgagacaagtgaagaagaggattcaactccagaaactacagaggaagagacagaagaagacgaagacgaagagaaagagaaaaagcccaagaccaagacaataaaggagactacttctgagtgggaacttctgaatgatgtgaaggctgtatggcttcgcagcccaaaggaggttactgatgaagaatactcgaagttttaccactcactagccaaggacttcggtgatgacaagcctatgggttggagccacttcactgccgaaggagatgttgagttcaaagctttgctctttattcccccgaaggctccacatgatctctatgagagttactacaacagtaacaagtcaaacctcaagttgtatgttaggagagttttcatctctgacgaatttgatgatcttcttcccaagtacctgagctttttgaagggtattgttgactcggacacgctgcccctgaatgtgtcacgagaaatgcttcaacaacatagcagtctcaagaccatcaagaagaagctgatccgcaaagcccttgacatgatcaggaaacttgctgaagaagaccctgatgagtacagcaacaaggataagacagatgaagagaaaagcgagatggaggagaagaagggccagtacgccaagttctggaatgagtttggcaaatcaatcaagctgggtatcatcgaagacgcgactaacagaaaccgccttgcgaagcttcttagatttgagagtaccaagtcggatggcaaacttgcctcccttgacgagtacatctcacggatgaagtcagggcagaaagacatcttctacatcacgggaagcagcaaagagcagctggagaagtctccattcctcgagaggctaaccaagaagaactacgaggttatcttcttcaccgaccccgtggacgagtacctgatgcagtacctgatggactacgaggacaagaagttccagaacgtgtccaaggagggactgaagctgggcaaggactcgaagctcaaggacctcaaggagtcgttcaaggagctgactgactggtggaagaaggccctggagagtgagaacgtggactcggtgaagatcagcaaccggctgcacgacaccccctgcgtcgtggtcacctccaagtacgggtggagcgccaacatggagaagatcatgcaggcgcagaccctgtcggactcgagcaagcaggcgtacatgcgcggcaagagggtgctggagatcaaccccaggcaccccatcatcaaggagctccgcgacaaggtcgcccaggacaacgagagcgaggagctgaagcacacggcgaggctggtgtaccagacggccctgatggagagcgggttcaacctccccgaccccaaggagttcgcgtccagcatctacaagtcggtgcagaagggcctggacctgagccccgacgcgaccgtggaggaggacgacgaggcagaggagcagccggaggtggaggagaaggagccggagccggagccgtcgtcctacgacaaggacgagctttaggctttcggatttgttttcaagtctagctagctcccgctttactaggaatgtgatgatatcggtgactgcctggttcaagtcacgtgatggttcttgagagacgcccatttttttcccatgcaacgtgatacgggatttttgcctgtctttgtacctactctacaagctttagttcagtgattcagtctaattaattagtggtttgcagttt

SEQ ID NO: 17914 - protein, 807 aa, Zea mays subsp. mays
  misc_feature (1)..(807): Ceres Seq. ID no. 12361730
MRKWALSSALLLLFLLTTLPDPAKKLQVNAEESSDDLANPPKVEEKLGAVPHGLSTDSEVAQREAESISRKTLRSSAEKFEFQAEVSRLMDIIINSLYSNKDIFLRELISNASDALDKIRFLSLTDKEVLGEGDTAKLEIQIKLDKEKKILSIRDRGIGMTKEDLIKNLGTIAKSGTSAFVEKMQSGGDLNLIGQFGVGFYSVYLVADYVEVVSKHNDDKQYVWESKADGSFAISEDTWNEPLGRGTEIRLHLRDEAKEYLEEDKLKDLVKKYSEFINFPIYLWSTKEVDVEVPTDEDETSEEEDSTPETTEEETEEDEDEEKEKKPKTKTIKETTSEWELLNDVKAVWLRSPKEVTDEEYSKFYHSLAKDFGDDKPMGWSHFTAEGDVEFKALLFIPPKAPHDLYESYYNSNKSNLKLYVRRVFISDEFDDLLPKYLSFLKGIVDSDTLPLNVSREMLQQHSSLKTIKKKLIRKALDMIRKLAEEDPDEYSNKDKTDEEKSEMEEKKGQYAKFWNEFGKSIKLGIIEDATNRNRLAKLLRFESTKSDGKLASLDEYISRMKSGQKDIFYITGSSKEQLEKSPFLERLTKKNYEVIFFTDPVDEYLMQYLMDYEDKKFQNVSKEGLKLGKDSKLKDLKESFKELTDWWKKALESENVDSVKISNRLHDTPCVVVTSKYGWSANMEKIMQAQTLSDSSKQAYMRGKRVLEINPRHPIIKELRDKVAQDNESEELKHTARLVYQTALMESGFNLPDPKEFASSIYKSVQKGLDLSPDATVEEDDEAEEQPEVEEKEPEPEPSSYDKDEL

SEQ ID NO: 17915 - protein, 718 aa, Zea mays subsp. mays
  misc_feature (1)..(718): Ceres Seq. ID no. 12361731
MDIIINSLYSNKDIFLRELISNASDALDKIRFLSLTDKEVLGEGDTAKLEIQIKLDKEKKILSIRDRGIGMTKEDLIKNLGTIAKSGTSAFVEKMQSGGDLNLIGQFGVGFYSVYLVADYVEVVSKHNDDKQYVWESKADGSFAISEDTWNEPLGRGTEIRLHLRDEAKEYLEEDKLKDLVKKYSEFINFPIYLWSTKEVDVEVPTDEDETSEEEDSTPETTEEETEEDEDEEKEKKPKTKTIKETTSEWELLNDVKAVWLRSPKEVTDEEYSKFYHSLAKDFGDDKPMGWSHFTAEGDVEFKALLFIPPKAPHDLYESYYNSNKSNLKLYVRRVFISDEFDDLLPKYLSFLKGIVDSDTLPLNVSREMLQQHSSLKTIKKKLIRKALDMIRKLAEEDPDEYSNKDKTDEEKSEMEEKKGQYAKFWNEFGKSIKLGIIEDATNRNRLAKLLRFESTKSDGKLASLDEYISRMKSGQKDIFYITGSSKEQLEKSPFLERLTKKNYEVIFFTDPVDEYLMQYLMDYEDKKFQNVSKEGLKLGKDSKLKDLKESFKELTDWWKKALESENVDSVKISNRLHDTPCVVVTSKYGWSANMEKIMQAQTLSDSSKQAYMRGKRVLEINPRHPIIKELRDKVAQDNESEELKHTARLVYQTALMESGFNLPDPKEFASSIYKSVQKGLDLSPDATVEEDDEAEEQPEVEEKEPEPEPSSYDKDEL

SEQ ID NO: 17916 - protein, 648 aa, Zea mays subsp. mays
  misc_feature (1)..(648): Ceres Seq. ID no. 12361732
MTKEDLIKNLGTIAKSGTSAFVEKMQSGGDLNLIGQFGVGFYSVYLVADYVEVVSKHNDDKQYVWESKADGSFAISEDTWNEPLGRGTEIRLHLRDEAKEYLEEDKLKDLVKKYSEFINFPIYLWSTKEVDVEVPTDEDETSEEEDSTPETTEEETEEDEDEEKEKKPKTKTIKETTSEWELLNDVKAVWLRSPKEVTDEEYSKFYHSLAKDFGDDKPMGWSHFTAEGDVEFKALLFIPPKAPHDLYESYYNSNKSNLKLYVRRVFISDEFDDLLPKYLSFLKGIVDSDTLPLNVSREMLQQHSSLKTIKKKLIRKALDMIRKLAEEDPDEYSNKDKTDEEKSEMEEKKGQYAKFWNEFGKSIKLGIIEDATNRNRLAKLLRFESTKSDGKLASLDEYISRMKSGQKDIFYITGSSKEQLEKSPFLERLTKKNYEVIFFTDPVDEYLMQYLMDYEDKKFQNVSKEGLKLGKDSKLKDLKESFKELTDWWKKALESENVDSVKISNRLHDTPCVVVTSKYGWSANMEKIMQAQTLSDSSKQAYMRGKRVLEINPRHPIIKELRDKVAQDNESEELKHTARLVYQTALMESGFNLPDPKEFASSIYKSVQKGLDLSPDATVEEDDEAEEQPEVEEKEPEPEPSSYDKDEL

SEQ ID NO: 17917 - DNA, 892 bp, Zea mays subsp. mays
  misc_feature (1)..(892): Ceres Seq. ID no. 12361752
accacaccaaaacccgcatccataaacaagaaaaagaaaagaaaacccccgctgccagcgacagaagaagaaggggtcccttctccttggttgcgttgcgcctccctcctgtctgcgtgcgtgcaatcgacgcagaggcgcgggcgctcgcaccaccacgaccacgacccgatggctttcatgcgctcccgctcaaatgcatcttctggcatgggagttgctcctaacattagggagacattcgttgagcttcaaatgaagaaggcattccgatatgttatcttcaaaatcgaagagaagcaaaagcaggtggttgtggagaagacaggggctactactgaaagctatgatgattttttggcctctctcccagagaatgactgccgatatgcgctgtatgattttgattttgttactggggagaatgtgcagaaaagcaagattttcttcattgcctggtccccatcgacatcccgcatacgtgctaagatgctgtactccacgtcgaaggaccgcatcaagtacgagcttgacgggttccactacgaaatccaggcgaccgacccatcggaggtggacatcgaggttctccgggagcgggctcactgaagctggttctccttttgaagggacctgtggagggccgtgaaccttcagccagatgcaaattcaattgtcaacgatgaagctcccgccgtggtgtttgttaataagttactgtaagcatatcatttagtcgctactcgctatgcatgacactagctggtgaagcgctatctaagctctattggtatgaccgtatgaggtttggttgccgtgttgccgagcctgtaaacgaagcaagatttgcagacttgttatattgtggtattgatgatactggattactggc

SEQ ID NO: 17918 - protein, 202 aa, Zea mays subsp. mays
  misc_feature (1)..(202): Ceres Seq. ID no. 12361753
TTPKPASINKKKKRKPPLPATEEEGVPSPWLRCASLLSACVQSTQRRGRSHHHDHDPMAFMRSRSNASSGMGVAPNIRETFVELQMKKAFRYVIFKIEEKQKQVVVEKTGATTESYDDFLASLPENDCRYALYDFDFVTGENVQKSKIFFIAWSPSTSRIRAKMLYSTSKDRIKYELDGFHYEIQATDPSEVDIEVLRERAH

SEQ ID NO: 17919 - protein, 145 aa, Zea mays subsp. mays
  misc_feature (1)..(145): Ceres Seq. ID no. 12361754
MAFMRSRSNASSGMGVAPNIRETFVELQMKKAFRYVIFKIEEKQKQVVVEKTGATTESYDDFLASLPENDCRYALYDFDFVTGENVQKSKIFFIAWSPSTSRIRAKMLYSTSKDRIKYELDGFHYEIQATDPSEVDIEVLRERAH

SEQ ID NO: 17920 - protein, 142 aa, Zea mays subsp. mays
  misc_feature (1)..(142): Ceres Seq. ID no. 12361755
MRSRSNASSGMGVAPNIRETFVELQMKKAFRYVIFKIEEKQKQVVVEKTGATTESYDDFLASLPENDCRYALYDFDFVTGENVQKSKIFFIAWSPSTSRIRAKMLYSTSKDRIKYELDGFHYEIQATDPSEVDIEVLRERAH

SEQ ID NO: 17921 - DNA, 936 bp, Zea mays subsp. mays
  misc_feature (1)..(936): Ceres Seq. ID no. 12361858
gaagcccaagacgctaactctctccctctcgtcctcctccctcacctccatgtcctcctcctcgctgcccgcccccgtcaccgatgtctgggaggtcgtcacccccactgccccacctgttgaccacgtggacggagggcttgatgactgcgtcatcttcccgccgcggctgcatgaggggctgggcctggacggcgagcccgaggaggtcccgccgatgccagcagtggcgaaggaggagaacgaggaggatggtgaatacgagggggaggacgatgagtggctgtggggatgggagaggtgcagcttggcggcgaggcgcgcttgggcggccggtgtcgggatcgttcaggagcgggtgctcgtgcatggcgcgtgtgggtgcccggcggtgaggcccgccgtgtggtcggttgcggcggcggctgctgtggtggggacacttctgtacgcccgtcggcgggataggagggaacgggacctgctcgtgcttctctccaaagagaaggataagaggatagcacaactcctgcatcaaattgctttaatgagtgacatcagaagcggcaatgaagcagtgaaggttatcaggaagtcctaatcattttcactgttgaagggttcagttgctatgttgtagcaaactgattaggtagttagggaatcagactagtcggtttgcaggttcaatacttgtagctaaattgtagtttagctgcatgatcttcacggttctgatgtttacgtataactagatgctgaaacctgcaaggttgcaacacaatctcaagcaatcaatagtcaccaccacgtcgcggtttcttctaaaaatatgtgtatagctgaatgatttggttaattcgtagatgtgtagaattgttgttcatgtcgacaaccctggacaatgctctgtatatgtatcttccatttattgct

SEQ ID NO: 17922 - protein, 199 aa, Zea mays subsp. mays
  misc_feature (1)..(199): Ceres Seq. ID no. 12361859
KPKTLTLSLSSSSLTSMSSSSLPAPVTDVWEVVTPTAPPVDHVDGGLDDCVIFPPRLHEGLGLDGEPEEVPPMPAVAKEENEEDGEYEGEDDEWLWGWERCSLAARRAWAAGVGIVQERVLVHGACGCPAVRPAVWSVAAAAAVVGTLLYARRRDRRERDLLVLLSKEKDKRIAQLLHQIALMSDIRSGNEAVKVIRKS

SEQ ID NO: 17923 - protein, 183 aa, Zea mays subsp. mays
  misc_feature (1)..(183): Ceres Seq. ID no. 12361860
MSSSSLPAPVTDVWEVVTPTAPPVDHVDGGLDDCVIFPPRLHEGLGLDGEPEEVPPMPAVAKEENEEDGEYEGEDDEWLWGWERCSLAARRAWAAGVGIVQERVLVHGACGCPAVRPAVWSVAAAAAVVGTLLYARRRDRRERDLLVLLSKEKDKRIAQLLHQIALMSDIRSGNEAVKVIRKS

SEQ ID NO: 17924 - protein, 127 aa, Zea mays subsp. mays
  misc_feature (1)..(127): Ceres Seq. ID no. 12361861
MPAVAKEENEEDGEYEGEDDEWLWGWERCSLAARRAWAAGVGIVQERVLVHGACGCPAVRPAVWSVAAAAAVVGTLLYARRRDRRERDLLVLLSKEKDKRIAQLLHQIALMSDIRSGNEAVKVIRKS

SEQ ID NO: 17925 - DNA, 638 bp, Zea mays subsp. mays
  misc_feature (1)..(638): Ceres Seq. ID no. 12361868
acaatggcccatgagcgtcattctcggagcctacggagtaccaaccacgtcaccgaaactgtagacgaggaggacaagggtcaagggaaagaaagccaaccgccccaatctcgcgtcccgccggcggccaccaccaccaccgccatgatcagcatcctcgcgcaggagcgcctcctcgggttcgccctgggctccgtctctatgggaggtttcgtcctccaccagcgccgcgccatctaccgctcaatcgctgaagccgatgggtcgtcctacttctaccagcctggtgaaattgccggtcgtagaagttcaactgaactggctcatgtatggaacaaggcggtggacgagactcttgggaaacttgttgtgtaccttagctctcgtggatggtgatccaagcaccatgtcgaacatggcaactgaggaggcacgggtggaggaagactcttttttgaagccactgatgtgctcatatttctctgtatccggattgagcatgttttgttttaaaagaaaagatgctcccagtgaccgatttatctcgaactgagctgattctactgcatgtttcccttaactggtgcatgttacttcgaggtcaatgttctggcccctgtgaaaggcaggattcgtct

SEQ ID NO: 17926 - protein, 131 aa, Zea mays subsp. mays
  misc_feature (1)..(131): Ceres Seq. ID no. 12361869
TMAHERHSRSLRSTNHVTETVDEEDKGQGKESQPPQSRVPPAATTTTAMISILAQERLLGFALGSVSMGGFVLHQRRAIYRSIAEADGSSYFYQPGEIAGRRSSTELAHVWNKAVDETLGKLVVYLSSRGW

SEQ ID NO: 17927 - protein, 130 aa, Zea mays subsp. mays
  misc_feature (1)..(130): Ceres Seq. ID no. 12361870
MAHERHSRSLRSTNHVTETVDEEDKGQGKESQPPQSRVPPAATTTTAMISILAQERLLGFALGSVSMGGFVLHQRRAIYRSIAEADGSSYFYQPGEIAGRRSSTELAHVWNKAVDETLGKLVVYLSSRGW

SEQ ID NO: 17928 - protein, 97 aa, Zea mays subsp. mays
  misc_feature (1)..(97): Ceres Seq. ID no. 12361871
MGRPTSTSLVKLPVVEVQLNWLMYGTRRWTRLLGNLLCTLALVDGDPSTMSNMATEEARVEEDSFLKPLMCSYFSVSGLSMFCFKRKDAPSDRFISN

SEQ ID NO: 17929 - DNA, 1050 bp, Zea mays subsp. mays
  misc_feature (1)..(1050): Ceres Seq. ID no. 12361897
gacatttatggcaaaagagaggtcatacagaagctaagacagcacctcaagaaacgtgatgagatgatcatggagatgcaaactcagattgctgatcttaagaactctcttaacattcaggtgacacagtccagcaatctgcagtctcaattggatgctgccaatcgtgatctgtttgaatctgaacgagagattcagcatctaaggaagattattgcagatcattgtgtcacagaagcactctctcatgataaacctttgcaagctgcgcattggcagccagatgccgcaaatgggcattctaatggctatggtgatggttgtgttgatgatgctgacctgcattgtattagcatcgagaagaggaaggtagaagtagagagggtggagatgctcaagaaagaggtggttgaactgaaggaagtcattgagggaaaggactttgtgcttcagagctacaaggaacagaaggtggaactcttctcaaagatcagggagttgcaggaaaagctctcagcacaagtgccaatcatcttgtaggatctatctgtgatactttttagaagattgaatctaagcataatgttgccatgtcccatgagcagcagagggggtcccgcttcagtgaagattgcagaaggtcttggcatttggcaatcgtcacgcatgccaaacaccatgctaggatctttgtggaatgcttctcttttcctttgaggggagctttgcataatgttaggttgatttgtttctttcttggttgtcataatgttaggttggtttgctttcttccttcttcaatatctagcccttggttgctcaaagtttacaaagggattctttttttcagttgctaggcctcaggtaactcaattgaacttcatactcaagttgctgtacaggttctcagatttcaggagacacagaagtctgtactgtgcctctgcctcctgtttcatgcttttttttttgttaagtgatctttggaatgttaggtccatgacatttctactatgagatttgaagactatggcattgcccttttttgtg

SEQ ID NO: 17930 - protein, 179 aa, Zea mays subsp. mays
  misc_feature (1)..(179): Ceres Seq. ID no. 12361898
DIYGKREVIQKLRQHLKKRDEMIMEMQTQIADLKNSLNIQVTQSSNLQSQLDAANRDLFESEREIQHLRKIIADHCVTEALSHDKPLQAAHWQPDAANGHSNGYGDGCVDDADLHCISIEKRKVEVERVEMLKKEVVELKEVIEGKDFVLQSYKEQKVELFSKIRELQEKLSAQVPIIL

SEQ ID NO: 17931 - protein, 158 aa, Zea mays subsp. mays
  misc_feature (1)..(158): Ceres Seq. ID no. 12361899
MIMEMQTQIADLKNSLNIQVTQSSNLQSQLDAANRDLFESEREIQHLRKIIADHCVTEALSHDKPLQAAHWQPDAANGHSNGYGDGCVDDADLHCISIEKRKVEVERVEMLKKEVVELKEVIEGKDFVLQSYKEQKVELFSKIRELQEKLSAQVPIIL

SEQ ID NO: 17932 - protein, 156 aa, Zea mays subsp. mays
  misc_feature (1)..(156): Ceres Seq. ID no. 12361900
MEMQTQIADLKNSLNIQVTQSSNLQSQLDAANRDLFESEREIQHLRKIIADHCVTEALSHDKPLQAAHWQPDAANGHSNGYGDGCVDDADLHCISIEKRKVEVERVEMLKKEVVELKEVIEGKDFVLQSYKEQKVELFSKIRELQEKLSAQVPIIL

SEQ ID NO: 17933 - DNA, 929 bp, Zea mays subsp. mays
  misc_feature (1)..(929): Ceres Seq. ID no. 12361956
aaggccattctttgtggaatttgataataacattttctcgtctagtcatcttcgtcgctcgagtactcgagctgaaaggggaagaccaagctccctttttgaagaaagtcctcgacaaatgttccatagtctcatgggggagagggacagacatagacacataaccatggaaggaattacagaggttttggctgcattggagaggattgaacagcaagcagagctgacctatgatcaattgctaatgctggaggctaatctattttttggcgcctttgcctcctatgatcggcatagagacatgcggatggatattgatgatatgtcctatgaggaattattggccctggaggagagaataggctctgtgagcacagctctttcagaggagcagttcacaaaatgcctcaaaagaagcatatatagtcaggtcgctctagaagtgaacaaatcaaccgttgatgacatgaaatgcagcatctgtcaggaagagtacgcggagggcgaagaggttgggaggctgccatgcgagcaccggtaccatgtgtgctgcataggccagtggcttgggcagaagaactggtgtccagtatgcaaagcgtctgccgtgccttccaagggctgaagcattggggatgctggaaaccccgntccggattacaaaccatccttgcttttgtctacgtacattgttcttttccctatatgcattagatatagatcatgtctagatgtatgacgctagaacagcttgcgatttgggaggaagctaagagagtaatagttagctggttaataatagttcatagctaatatttgctagataactattacttggctacctattagctgtgcctttcacattgtggtacaggacaaatgcttgtcagatcgtgaacaaccttataacttgatgaatggcctaagtc

SEQ ID NO: 17934 - protein, 207 aa, Zea mays subsp. mays
  misc_feature (1)..(207): Ceres Seq. ID no. 12361957
RPFFVEFDNNIFSSSHLRRSSTRAERGRPSSLFEESPRQMFHSLMGERDRHRHITMEGITEVLAALERIEQQAELTYDQLLMLEANLFFGAFASYDRHRDMRMDIDDMSYEELLALEERIGSVSTALSEEQFTKCLKRSIYSQVALEVNKSTVDDMKCSICQEEYAEGEEVGRLPCEHRYHVCCIGQWLGQKNWCPVCKASAVPSKG

SEQ ID NO: 17935 - protein, 168 aa, Zea mays subsp. mays
  misc_feature (1)..(168): Ceres Seq. ID no. 12361958
MFHSLMGERDRHRHITMEGITEVLAALERIEQQAELTYDQLLMLEANLFFGAFASYDRHRDMRMDIDDMSYEELLALEERIGSVSTALSEEQFTKCLKRSIYSQVALEVNKSTVDDMKCSICQEEYAEGEEVGRLPCEHRYHVCCIGQWLGQKNWCPVCKASAVPSKG

SEQ ID NO: 17936 - protein, 163 aa, Zea mays subsp. mays
  misc_feature (1)..(163): Ceres Seq. ID no. 12361959
MGERDRHRHITMEGITEVLAALERIEQQAELTYDQLLMLEANLFFGAFASYDRHRDMRMDIDDMSYEELLALEERIGSVSTALSEEQFTKCLKRSIYSQVALEVNKSTVDDMKCSICQEEYAEGEEVGRLPCEHRYHVCCIGQWLGQKNWCPVCKASAVPSKG

SEQ ID NO: 17937 - DNA, 1030 bp, Zea mays subsp. mays
  misc_feature (1)..(1030): Ceres Seq. ID no. 12361972
cccagattttcccgcgttcgtggtctccactctccagttctccgttccccaaccccaacctagcatccttgcatcccggggctcagttagcgttgccgccgcaccgtactacacctccggtggccggtgcgcccatttcccgccgatcaagcgcgatggcctcgacgagggatctagccatagcttctctctcagctgcgaccggcgccgttgttgccgccgctgcactgcgcctcttgtcttcccgcagaacatcctccgtcagaccccagaacctccccgccgccgctaacggatctgcctccgagcgcccgctggctcagtcccccttcgatcctgtcaagagggaaggatatatttcctgggacgactacttcatggcgatcgccttcctttcggctgagcgatctaaggatcctaaccggcaggttggagcatgcttggttagccaagagggaataatcctaggaattggctacaatggcttccctagaggttgttccgatgacaagcttccttgggcaaagaaatctgcaagtggagatccattagagacaaaattcccctacgttgtccatgctgaggttaatgcaattctaaataccaaccatgcttcagcggctggacagaaattatatgtcaccatgttcccatgcaatgaatgtgccaagattattattcagtcaggcgtatctgaggtcatatatttcgttgaaaaaaagattgacaactcagctcacgtttatgttgcctctcacaagctattgtcgatggctggtgtcaaggtcaggaagcatcagccccagatggcgcaaataccgatccagttccaggagccatgaagccggtactagttccagccttccagaagcactagtgagcgaataaacagtgcaagatacctgttgaccgcggcacctgtgacaaccgacaatggccgacccgcagcggtctcggtatgcggcgtcgatccctctccctccctcagaggctgttgtaaaactatagctagaatgagtaaagtttggcg

SEQ ID NO: 17938 - protein, 279 aa, Zea mays subsp. mays
  misc_feature (1)..(279): Ceres Seq. ID no. 12361973
QIFPRSWSPLSSSPFPNPNLASLHPGAQLALPPHRTTPPVAGAPISRRSSAMASTRDLAIASLSAATGAVVAAAALRLLSSRRTSSVRPQNLPAAANGSASERPLAQSPFDPVKREGYISWDDYFMAIAFLSAERSKDPNRQVGACLVSQEGIILGIGYNGFPRGCSDDKLPWAKKSASGDPLETKFPYVVHAEVNAILNTNHASAAGQKLYVTMFPCNECAKIIIQSGVSEVIYFVEKKIDNSAHVYVASHKLLSMAGVKVRKHQPQMAQIPIQFQEP

SEQ ID NO: 17939 - protein, 228 aa, Zea mays subsp. mays
  misc_feature (1)..(228): Ceres Seq. ID no. 12361974
MASTRDLAIASLSAATGAVVAAAALRLLSSRRTSSVRPQNLPAAANGSASERPLAQSPFDPVKREGYISWDDYFMAIAFLSAERSKDPNRQVGACLVSQEGIILGIGYNGFPRGCSDDKLPWAKKSASGDPLETKFPYVVHAEVNAILNTNHASAAGQKLYVTMFPCNECAKIIIQSGVSEVIYFVEKKIDNSAHVYVASHKLLSMAGVKVRKHQPQMAQIPIQFQEP

SEQ ID NO: 17940 - protein, 154 aa, Zea mays subsp. mays
  misc_feature (1)..(154): Ceres Seq. ID no. 12361975
MAIAFLSAERSKDPNRQVGACLVSQEGIILGIGYNGFPRGCSDDKLPWAKKSASGDPLETKFPYVVHAEVNAILNTNHASAAGQKLYVTMFPCNECAKIIIQSGVSEVIYFVEKKIDNSAHVYVASHKLLSMAGVKVRKHQPQMAQIPIQFQEP

SEQ ID NO: 17941 - DNA, 929 bp, Zea mays subsp. mays
  misc_feature (1)..(929): Ceres Seq. ID no. 12361987
gcacgagaccattacctagaacatcctaatcgaaaatgctcaaccgctacatgcacctctcgggccgcttccacatgcgcgaggtggagcgcaccgtgcagcgcctcatccgcgacggggtgatagtgcacgcgccggcgagcccgttccacggcttcgtctacgtcgccttccaggagcgcgccaccgccatcgcgcacggcaacacggcgcgcctcgtgggcgcgcgcggggccgggggacgccgctctcgcgcgcatctgcggcaccgtcgccgccgacgagaagcggcacgaggcggcgtacacccgcgtcgtgggcaagttcttcgaggccgacccggacgccgccgtgcgcgccatggcgtacatgatgcggcgccggatcgacatgcccactgtgctcatcaacgacggccgccacagcagcggcgacttctacgctcgcttcgtcgccatcgcgcagcaggccggcacgtacacggtttccgactaccgcgccattctcgagcacttcatacggcagtggggcgtcgaggaacttgcggcggggctcaccggcgaggggaggcgcgcgcgggactacctgtgcgcgctgccgcacaagataaagaggatggaagagaaggcccacgatagagcggtcaaagcacaaaagaaacccacacccatccccatcaactggatcttcgataggaccattcctgtcattctaccttagtgtttatctttttcgatctttgtttgggtatctatgctgttattgtaagctaattccatggaccttgatagcgtcgttcatgcctacgtgtcgatagcatcattagtgtcgttctacccttaatcctgttatgccacgttaggtaccatttttttccataagagaatatttacaaatttataatttgttggatcgaggtgatacagggg

SEQ ID NO: 17942 - protein, 200 aa, Zea mays subsp. mays
  misc_feature (1)..(200): Ceres Seq. ID no. 12361988
MLNRYMHLSGRFHMREVERTVQRLIRDGVIVHAPASPFHGFVYVAFQERATAIAHGNTARLVGARGAGGRRSRAHLRHRRRRREAARGGVHPRRGQVLRGRPGRRRARHGVHDAAPDRHAHCAHQRRPPQQRRLLRSLRRHRAAGRHVHGFRLPRHSRALHTAVGRRGTCGGAHRRGEARAGLPVRAAAQDKEDGREGPR

SEQ ID NO: 17943 - protein, 195 aa, Zea mays subsp. mays
  misc_feature (1)..(195): Ceres Seq. ID no. 12361989
MHLSGRFHMREVERTVQRLIRDGVIVHAPASPFHGFVYVAFQERATAIAHGNTARLVGARGAGGRRSRAHLRHRRRRREAARGGVHPRRGQVLRGRPGRRRARHGVHDAAPDRHAHCAHQRRPPQQRRLLRSLRRHRAAGRHVHGFRLPRHSRALHTAVGRRGTCGGAHRRGEARAGLPVRAAAQDKEDGREGPR

SEQ ID NO: 17944 - protein, 187 aa, Zea mays subsp. mays
  misc_feature (1)..(187): Ceres Seq. ID no. 12361990
MREVERTVQRLIRDGVIVHAPASPFHGFVYVAFQERATAIAHGNTARLVGARGAGGRRSRAHLRHRRRRREAARGGVHPRRGQVLRGRPGRRRARHGVHDAAPDRHAHCAHQRRPPQQRRLLRSLRRHRAAGRHVHGFRLPRHSRALHTAVGRRGTCGGAHRRGEARAGLPVRAAAQDKEDGREGPR

SEQ ID NO: 17945 - DNA, 1532 bp, Zea mays subsp. mays
  misc_feature (1)..(1532): Ceres Seq. ID no. 12362073
gcgttattttgtttgccaacccacagaaaaaggcggcagttcatccgctgctgttcctagttctctccacccagaagtcgacctcgttttttcctccctcctgtcccaaatctcacctccttccagttccagctaccgctgctcgcgttgactcgcctcttcctccattcagtgactccttggatcggctcagggacacgcaccagcgtattgtgtcggcgccgaatcttgcgcgcatttcgcgctattgttgccccggaggagtggtttggatccaagaaagtgatcggccttcttggttggatctcctcccgcaatggcggcgctcctggagctgttcctgggctcctctcccacgccggtggactgggaggcagaggtctacccggcgtacggggacttcgccgtactccccttactcgtcgccttcttccccgccgtccggttcctcctcgaccgactcgtcttcgaggttttagcacgaaaatttatatttggaaagggacatgataagctttctgaaacagatgacagtagaaagaaaatcaataaatttaaggaatcagcatggaagtttgttttttttctttctggcgaactgctttcactatctgtaacatacaatgagccatggtttaagaacacaagatacttttggataggccctggtgaccagatctggcctgatcaaaagataaaactgaagctcaaagctgtctacatgtatgctgctggattttacacatattcaattttcgctctcctgttctgggaaacaagacgttcggactttggagtatcaatgtcccaccatatagcaactgttgttctgattattctttcctacattttccgattcgctcgtgttggcactgttgttttagcccttcatgatgcaagtgatatattcctagagattgggaagatggccaagtacagtagctgcgagtggctagcagttatggcatttcttctttttgtggcatcgtggatacttcttcggctcgttatgttccctttctggatcctaagaagcacaagctatgaagtgctgctgaccttggatagggagaagcatcgattttatggccccatatactactatgttttcaactgtcttctgttctcactcctagttcttcacatatatttgtgggtactgatatggcggatgctagttaaacagattcaatcgaaagggcgtgttggtgatgatgttcgatccgattctgaaggcgaagatgagcatgaagattaactttttaggttgaatgattaactgaagaactacattgtgtgatacctgcagcaaggcacaccttctgaaccttttttttttcttttacagaagatatccagatattgtaattcattaggtcatatcattcgttcagcatagaagatgacaaccatcatttgggagttgtcaatgaagccgcctatcggatgctttttatcaaaacagaagtgcattgtatttatttcactaaaccatcatttataagagatacagaatgatcccttgttcatcc

SEQ ID NO: 17946 - protein, 313 aa, Zea mays subsp. mays
  misc_feature (1)..(313): Ceres Seq. ID no. 12362074
MAALLELFLGSSPTPVDWEAEVYPAYGDFAVLPLLVAFFPAVRFLLDRLVFEVLARKFIFGKGHDKLSETDDSRKKINKFKESAWKFVFFLSGELLSLSVTYNEPWFKNTRYFWIGPGDQIWPDQKIKLKLKAVYMYAAGFYTYSIFALLFWETRRSDFGVSMSHHIATVVLIILSYIFRFARVGTVVLALHDASDIFLEIGKMAKYSSCEWLAVMAFLLFVASWILLRLVMFPFWILRSTSYEVLLTLDREKHRFYGPIYYYVFNCLLFSLLVLHIYLWVLIWRMLVKQIQSKGRVGDDVRSDSEGEDEHED

SEQ ID NO: 17947 - protein, 178 aa, Zea mays subsp. mays
  misc_feature (1)..(178): Ceres Seq. ID no. 12362075
MYAAGFYTYSIFALLFWETRRSDFGVSMSHHIATVVLIILSYIFRFARVGTVVLALHDASDIFLEIGKMAKYSSCEWLAVMAFLLFVASWILLRLVMFPFWILRSTSYEVLLTLDREKHRFYGPIYYYVFNCLLFSLLVLHIYLWVLIWRMLVKQIQSKGRVGDDVRSDSEGEDEHED

SEQ ID NO: 17948 - protein, 158 aa, Zea mays subsp. mays
  misc_feature (1)..(158): Ceres Seq. ID no. 12362076
VILFANPQKKAAVHPLLFLVLSTQKSTSFFPPSCPKSHLLPVPATAARVDSPLPPFSDSLDRLRDTHQRIVSAPNLARISRYCCPGGVVWIQESDRPSWLDLLPQWRRSWSCSWAPLPRRWTGRQRSTRRTGTSPYSPYSSPSSPPSGSSSTDSSSRF

SEQ ID NO: 17949 - DNA, 1721 bp, Zea mays subsp. mays
  misc_feature (1)..(1721): Ceres Seq. ID no. 12362091
agggagggaggggcagataaagaacactgcaccatttgatttgtgtgctcctgcagtctacaccctcacttgctttcaaacgtgcacctcctctcttcttcttcctcccctcatctccttccaacagtgccataaccacagcctccctctcctctctctcttgttgcacgaatatgacgccatgatctcccccgtgaacgacaaggagaagcagagtgctacataggtacatgtagggtactataggataggaactatacagctaggaggtagcgcggagggaggagcacgccgccagcagtagggatgtacaagaaccagctccaagaactggcgcagaggagctgcttcagcctgccgtcgtacgtgtgcacgcgcgagggccctgaccacgcgccgcgcttccgggcggccgtcaccttcaacggtgagaccttcgagggccccagcggctgcaccacgctccgccaggccgagcacgccgctgccgaagtcgccctcgcccgcctctccctccgcggcccgttccactaccctcgccgcccgggtcctcgatgagacgggggtgtacaagaacctgctgcaggagacggcccaccgggcggggctgaagctgccggcgtacaccacggtgcgatcgggcccgggccactcgccggtgttctcctccaccgtcgagctcgccggcttgagcttcgcgggcgaccccgccaggaccaagaagcaggcggagaagaacgccgccatggccgcctggtcctcgctcaaacagatgccggaggctcgcaaggagcccggcgccggcgacgagcaggagcacgtggctgtcgccagagcgctcgcggcgctgaagccgcgagacggcggcgacggaaaggcggcgccgcctctgcagaagcacagcagcaacggctcttcttcctccgctcttccgaacccgtcgctgtacagacaccaatggcggcctcggaccagtacccctgcccagcccctgccgccgaggacgggggccctgcccctgcagccgccggccggcccaaggatcctgcccccgctgcatctgctacaacagccggcgtgcggctccagggacgccgcggcggcagagctggtgcggatgctggagcgcgccatggtgcgcgaccgggaggcaacgccgccttcgccgtgctactacgcggcgcctgccgcctcggcgtaccgccacggcagcgcgccgaggaccttcgccgcgggcgggttccacgccccggctgtgagcgtgcggtcggtgatcccggtgtgcgccgccccgccgccgcagaccccggtcaaggaggaaaggaatggcccggcgacaccctcaggcgcatgcaagagggcgtgagcgacgtggtcagcttgtgaagcgcagcccagagaagaagaaagaaagagcctggctctgttgttgcaggggagttttggatcacaactttctctgtagtctgtacagaagttgtgtacgaggtcaactactacgcatctccctcgctctctgtgtgtgtttgaccaggatctagatggtgagatcttcgtcagaaaggcagccatggccatgatgaggctgtgaagggttttaggtggacgatgaacatatatgaatatatagttgtactgttctagggcttcagtagaagccatgctaccgtgttaacaagcgcatcgtatcatcccttcggctcggcaatctgcctgcctgc

SEQ ID NO: 17950 - protein, 206 aa, Zea mays subsp. mays
  misc_feature (1)..(206): Ceres Seq. ID no. 12362092
MAAWSSLKQMPEARKEPGAGDEQEHVAVARALAALKPRDGGDGKAAPPLQKHSSNGSSSSALPNPSLYRHQWRPRTSTPAQPLPPRTGALPLQPPAGPRILPPLHLLQQPACGSRDAAAAELVRMLERAMVRDREATPPSPCYYAAPAASAYRHGSAPRTFAAGGFHAPAVSVRSVIPVCAAPPPQTPVKEERNGPATPSGACKRA

SEQ ID NO: 17951 - protein, 197 aa, Zea mays subsp. mays
  misc_feature (1)..(197): Ceres Seq. ID no. 12362093
MPEARKEPGAGDEQEHVAVARALAALKPRDGGDGKAAPPLQKHSSNGSSSSALPNPSLYRHQWRPRTSTPAQPLPPRTGALPLQPPAGPRILPPLHLLQQPACGSRDAAAAELVRMLERAMVRDREATPPSPCYYAAPAASAYRHGSAPRTFAAGGFHAPAVSVRSVIPVCAAPPPQTPVKEERNGPATPSGACKRA

SEQ ID NO: 17952 - protein, 142 aa, Zea mays subsp. mays
  misc_feature (1)..(142): Ceres Seq. ID no. 12362094
MAASDQYPCPAPAAEDGGPAPAAAGRPKDPAPAASATTAGVRLQGRRGGRAGADAGARHGARPGGNAAFAVLLRGACRLGVPPRQRAEDLRRGRVPRPGCERAVGDPGVRRPAAADPGQGGKEWPGDTLRRMQEGVSDVVSL

SEQ ID NO: 17953 - DNA, 1839 bp, Zea mays subsp. mays
  misc_feature (1)..(1839): Ceres Seq. ID no. 12362107
gactggtcactgtgccattgccgccgtccgtcctaggctcctagctagctagctagcaagctccgccgacgacggtacgtcaatcgagctagccctgcccatccactacactaccgcagcggcaagcaatggcgtgcggctctgctaccgccgctcgaccagcagcccgcctctggctgctggcggcggtggtggtggcgacctccttcctcgccgtcgcggcgccgccgggcgcgctggtgacgagcgtcccggggttcggcaacaagcagcagctgccgtcgaagcactacgccgggtacgtgacggtggacgagcggcacggcaggcggctgttctactacctggtggagtcggagcgcgacccggcccgggaccccgtcgtgctctggctcaacggcgggcccggctgctccagcttcgacggcttcgtctacgagcacgggccattcagctttgagccatcaggagggtcagctgggagcctgccaaagcttcatctcaacccttatagctggtctaaggtgtcgagtgtgatatacttggactcccctgccggcgtcgggctttcctactcaaacaacgtttcggactacgagactggcgacttcaagaccgccgccgattcgcacactttcctgctcaagtggttccagctctaccctgagttcttggcaaatccgttctacatagccggagagtcgtacgctggcgtttatgtccctaccctttcaagcgaagtcgtcaaaggaatccacaaaggagtgaagccagttataaactttaagggctacatggtcggcaatggtgtgtgcgacaccgtctttgatggtaatgctcttgtgccgtttgcgcacgggatggctctcatttcagagagtatatacaaggaagccagcactgcatgtcaagggaattactggaactctagcagtgcaaaatgcgacgaggcgctgtcaaaagtcgagacagaaatcgacggattaaatatctacgacatccttgagccatgttaccacgccccagctgataccaaacaagcagcagtgaccccacaggcacagagtactagcgagctgcctcagagtttcaaagacctcggcgtgaccagcaacaagcctctccctgtaaggacaagaatgcacggacgggcgtggcctttgagagctccggtaagagacggccgcgttccgtcgtggcaggagctggcggctgatgtagcttcgacttccagtggagttccgtgtatgagcgatgaggttgcgacagcgtggctaaacaacaatagcgtcagatccgctatccatgccgaaccagtcagttcaatcggaccctgggaattatgcacggataaactggattttgatcatgatgccggcagcatgatcatctatcacaagaacctcacgagtcagggctaccgtgctttcatctacagcggcgaccatgacatgtgtgtaccttacaccgggactgaagcatggactgcgtctttaggctacgccgtcgttgatccgtggcgacagtggattgtcgacgaacaagttgccgggtacacccaaggatatgaaaagggccttacttttgccactattaagggtgctgggcacacagttcctgagtacaaaccacaggaagcactagctttctacagccgttggcttgccggtgctaaactgtgaggaggcctattttgtgtgcaaaggtcatgcagtactgaatcaaacagaagttggataaagcatgcagcaataaggcagtcgaaggatcaaagtatccaacgcgccaactacaatgttgcattcattttcacatgttataccaatgcagttgctaatt

SEQ ID NO: 17954 - protein, 517 aa, Zea mays subsp. mays
  misc_feature (1)..(517): Ceres Seq. ID no. 12362108
MACGSATAARPAARLWLLAAVVVATSFLAVAAPPGALVTSVPGFGNKQQLPSKHYAGYVTVDERHGRRLFYYLVESERDPARDPVVLWLNGGPGCSSFDGFVYEHGPFSFEPSGGSAGSLPKLHLNPYSWSKVSSVIYLDSPAGVGLSYSNNVSDYETGDFKTAADSHTFLLKWFQLYPEFLANPFYIAGESYAGVYVPTLSSEVVKGIHKGVKPVINFKGYMVGNGVCDTVFDGNALVPFAHGMALISESIYKEASTACQGNYWNSSSAKCDEALSKVETEIDGLNIYDILEPCYHAPADTKQAAVTPQAQSTSELPQSFKDLGVTSNKPLPVRTRMHGRAWPLRAPVRDGRVPSWQELAADVASTSSGVPCMSDEVATAWLNNNSVRSAIHAEPVSSIGPWELCTDKLDFDHDAGSMIIYHKNLTSQGYRAFIYSGDHDMCVPYTGTEAWTASLGYAVVDPWRQWIVDEQVAGYTQGYEKGLTFATIKGAGHTVPEYKPQEALAFYSRWLAGAKL

SEQ ID NO: 17955 - protein, 295 aa, Zea mays subsp. mays
  misc_feature (1)..(295): Ceres Seq. ID no. 12362109
MVGNGVCDTVFDGNALVPFAHGMALISESIYKEASTACQGNYWNSSSAKCDEALSKVETEIDGLNIYDILEPCYHAPADTKQAAVTPQAQSTSELPQSFKDLGVTSNKPLPVRTRMHGRAWPLRAPVRDGRVPSWQELAADVASTSSGVPCMSDEVATAWLNNNSVRSAIHAEPVSSIGPWELCTDKLDFDHDAGSMIIYHKNLTSQGYRAFIYSGDHDMCVPYTGTEAWTASLGYAVVDPWRQWIVDEQVAGYTQGYEKGLTFATIKGAGHTVPEYKPQEALAFYSRWLAGAKL

SEQ ID NO: 17956 - protein, 273 aa, Zea mays subsp. mays
  misc_feature (1)..(273): Ceres Seq. ID no. 12362110
MALISESIYKEASTACQGNYWNSSSAKCDEALSKVETEIDGLNIYDILEPCYHAPADTKQAAVTPQAQSTSELPQSFKDLGVTSNKPLPVRTRMHGRAWPLRAPVRDGRVPSWQELAADVASTSSGVPCMSDEVATAWLNNNSVRSAIHAEPVSSIGPWELCTDKLDFDHDAGSMIIYHKNLTSQGYRAFIYSGDHDMCVPYTGTEAWTASLGYAVVDPWRQWIVDEQVAGYTQGYEKGLTFATIKGAGHTVPEYKPQEALAFYSRWLAGAKL

SEQ ID NO: 17957 - DNA, 1574 bp, Zea mays subsp. mays
  misc_feature (1)..(1574): Ceres Seq. ID no. 12362111
gtcgatggaggaacaacacatggctgggccgccgtaccgctaccggcttcggcatctccggctgatggacatagcacccgcaagcgcgagcaacgacgattcagggcatcacggctccaacgggatggccatcatggtgtcgatcctggtggtggtcatcgtctgcaccctcttctactgcgtctactgctggagatggaggaagcgcaacgctgtcaggagagcgcagatagagaggctgaggccgatgtccagctcggacctgccgctcatggacctgtcctccatccacgaggccaccaacagcttctccaaggagaacaagctcggcgaaggcggtttcgggcccgtctatcggggcgtgatgggcggcggcgcggagatcgccgtgaagcggctgtcggctcggtcgcggcagggcgcggcggagttccgcaacgaggtggagctgatcgccaagctgcagcaccggaacctggtccgcctgctgggatgctgcgtcgagagggacgagaagatgctcgtctacgagtacctccccaaccgaagcctcgactccttcctcttcgatagcaggaagagcgggcagctggactggaagacgaggcagagcatcgtcctggggatcgcccgcggcatgctgtacctgcacgaggactcgtgcctcaaggtcatccacagggacctcaaggccagcaacgtgctcctggacaacaggatgaaccctaagatctccgacttcggcatggccaagatcttcgaggaggagggcaacgagcctaacacgggccccgtggtcggcacctacgggtacatggctccggagtacgccatggagggcgtcttctcggtgaagtcagacgtcttcagcttcggggtgctggtgctagagatcctcagcgggcagcggaacggctccatgtacctccaggagcaccagcacaccctgattcaagatgcctggaagctgtggaacgaggacagggcggcggagttcatggacgcggcgctggcggggtcgtacccgcgggacgaggcgtggcggtgcttccacgtggggctgctgtgcgtgcaggagagcccggacctccggcccaccatgtccagcgtggtgctcatgctcatcagcgaccagacggcgcagcagatgccggcgccggcgcagccgccgctgttcgccagcaggctcggcaggaaggcgtccgcgtcggacttgtcgctggccatgaagacggagacgaccaagacgcagtccgtcaacgaggtgtccatctccatgatggagccacggtgagacgaggggggccttgcttgatcgtcaaccaacaagtgtccgtctccgtcccatccgcatgagaaacccttactcggggagccgtcgtgatttgcttggttctttgatcagcaacgggatacgctgtgcgtcgtcgtagtcggtgcgcgcgtgtatgtgtgtgatggttacggatgtcttgcgagccgtaatcgcgctgggaaagtcccaggccccagcctttgtcgcgggaaaaatcttgtagccgtgacatgtgcagcgagaaaaacgctttgagact

SEQ ID NO: 17958 - protein, 430 aa, Zea mays subsp. mays
  misc_feature (1)..(430): Ceres Seq. ID no. 12362112
SMEEQHMAGPPYRYRLRHLRLMDIAPASASNDDSGHHGSNGMAIMVSILVVVIVCTLFYCVYCWRWRKRNAVRRAQIERLRPMSSSDLPLMDLSSIHEATNSFSKENKLGEGGFGPVYRGVMGGGAEIAVKRLSARSRQGAAEFRNEVELIAKLQHRNLVRLLGCCVERDEKMLVYEYLPNRSLDSFLFDSRKSGQLDWKTRQSIVLGIARGMLYLHEDSCLKVIHRDLKASNVLLDNRMNPKISDFGMAKIFEEEGNEPNTGPVVGTYGYMAPEYAMEGVFSVKSDVFSFGVLVLEILSGQRNGSMYLQEHQHTLIQDAWKLWNEDRAAEFMDAALAGSYPRDEAWRCFHVGLLCVQESPDLRPTMSSVVLMLISDQTAQQMPAPAQPPLFASRLGRKASASDLSLAMKTETTKTQSVNEVSISMMEPR

SEQ ID NO: 17959 - protein, 429 aa, Zea mays subsp. mays
  misc_feature (1)..(429): Ceres Seq. ID no. 12362113
MEEQHMAGPPYRYRLRHLRLMDIAPASASNDDSGHHGSNGMAIMVSILVVVIVCTLFYCVYCWRWRKRNAVRRAQIERLRPMSSSDLPLMDLSSIHEATNSFSKENKLGEGGFGPVYRGVMGGGAEIAVKRLSARSRQGAAEFRNEVELIAKLQHRNLVRLLGCCVERDEKMLVYEYLPNRSLDSFLFDSRKSGQLDWKTRQSIVLGIARGMLYLHEDSCLKVIHRDLKASNVLLDNRMNPKISDFGMAKIFEEEGNEPNTGPVVGTYGYMAPEYAMEGVFSVKSDVFSFGVLVLEILSGQRNGSMYLQEHQHTLIQDAWKLWNEDRAAEFMDAALAGSYPRDEAWRCFHVGLLCVQESPDLRPTMSSVVLMLISDQTAQQMPAPAQPPLFASRLGRKASASDLSLAMKTETTKTQSVNEVSISMMEPR

SEQ ID NO: 17960 - protein, 424 aa, Zea mays subsp. mays
  misc_feature (1)..(424): Ceres Seq. ID no. 12362114
MAGPPYRYRLRHLRLMDIAPASASNDDSGHHGSNGMAIMVSILVVVIVCTLFYCVYCWRWRKRNAVRRAQIERLRPMSSSDLPLMDLSSIHEATNSFSKENKLGEGGFGPVYRGVMGGGAEIAVKRLSARSRQGAAEFRNEVELIAKLQHRNLVRLLGCCVERDEKMLVYEYLPNRSLDSFLFDSRKSGQLDWKTRQSIVLGIARGMLYLHEDSCLKVIHRDLKASNVLLDNRMNPKISDFGMAKIFEEEGNEPNTGPVVGTYGYMAPEYAMEGVFSVKSDVFSFGVLVLEILSGQRNGSMYLQEHQHTLIQDAWKLWNEDRAAEFMDAALAGSYPRDEAWRCFHVGLLCVQESPDLRPTMSSVVLMLISDQTAQQMPAPAQPPLFASRLGRKASASDLSLAMKTETTKTQSVNEVSISMMEPR

SEQ ID NO: 17961 - DNA, 1506 bp, Zea mays subsp. mays
  misc_feature (1)..(1506): Ceres Seq. ID no. 12362128
attaaatagaaagcgagcttcattcgtttttgattggcgtcgcagcaaccacctgtcaagtgtcaacactccagtccactacaatcatcgctgtaggagatggaggaggcggcggcggcggcggcggaggtgaggtatgggatagtcggggtggggatgatgggccgggagcacctccacaacctcgcccacctcgccacagaggtcgagcgggagcagtccgtccgggtgcgggtcaccggcctcgccgacccccaccaggagtcactccgccttggcctccagctcgccgctgagctcggcctcccgcctccccagacctttccaggtcaccgcgagctgctggacagcgggctctgtgacgccatcatcgtatcatccccaaacatgacccactacgagatactcatggacatcatccaccatcgtgaaccgcagcacatccttgtcgagaagcccctgtgcaccactgtgcaggactgcaagaaggtcattgaagctgctaaacagagaccagagatagttgtgcaagttggattagaatacaggtatatgccacccgttgctaagctgatagacatcgttaagagcggtacactaggacaagtcagaatggtggcaatacgcgaacaccgttttcctttccttgttaaggtaaacaactggaatagattcaattgtaacagtgggggaactctagtagagaagtgctgccacttctttgatctgatgatattgtttgcggctgcaaatccagttcgcgtgatggcttcaggagccattgatgttaaccataagaatgaagtgtatgatggacaggtaccagatattattgataatgcatatgtgatagtagaatttgataatggctcccgtggcatgcttgatctctgcatgtttgctgaaggaagtagaaacgagcaagaaatttgtgtggttggtgacattgggaagggcgaaacttttgttccagagagcattgtcaggtttggaaagagaacagaaggcagagatggagttgtaacaataatggcggaagatgaacggatcaagtatcaaggtcttcatcatggatccagctacttggagcacctcaatttcttgtctgctataagggctcaaggtgcatccggaccatctgtgaacttaagtgacggcctactatctgttgccgtcggtgtggctgggcaattatcaatcgagcagggccggtttgtaaccatggaagaggtcttaggtttgtagcctggtgataattcaggcatcctaatgtactgtaaaaccttttgtgtattattaggtatatgttcttaataatgctgcggactgacgagtttatgcaaagttaggataacattataacatgcatttcaaatagaggaatatgatgataatcttcaagcaaatgtcatggagtagcagggttatgttatctgcaagtgatatcttggacctcttggttgtgattaatggaccaatatctagaacatgtcatattatttcttg

SEQ ID NO: 17962 - protein, 381 aa, Zea mays subsp. mays
  misc_feature (1)..(381): Ceres Seq. ID no. 12362129
MEEAAAAAAEVRYGIVGVGMMGREHLHNLAHLATEVEREQSVRVRVTGLADPHQESLRLGLQLAAELGLPPPQTFPGHRELLDSGLCDAIIVSSPNMTHYEILMDIIHHREPQHILVEKPLCTTVQDCKKVIEAAKQRPEIVVQVGLEYRYMPPVAKLIDIVKSGTLGQVRMVAIREHRFPFLVKVNNWNRFNCNSGGTLVEKCCHFFDLMILFAAANPVRVMASGAIDVNHKNEVYDGQVPDIIDNAYVIVEFDNGSRGMLDLCMFAEGSRNEQEICVVGDIGKGETFVPESIVRFGKRTEGRDGVVTIMAEDERIKYQGLHHGSSYLEHLNFLSAIRAQGASGPSVNLSDGLLSVAVGVAGQLSIEQGRFVTMEEVLGL

SEQ ID NO: 17963 - protein, 362 aa, Zea mays subsp. mays
  misc_feature (1)..(362): Ceres Seq. ID no. 12362130
MMGREHLHNLAHLATEVEREQSVRVRVTGLADPHQESLRLGLQLAAELGLPPPQTFPGHRELLDSGLCDAIIVSSPNMTHYEILMDIIHHREPQHILVEKPLCTTVQDCKKVIEAAKQRPEIVVQVGLEYRYMPPVAKLIDIVKSGTLGQVRMVAIREHRFPFLVKVNNWNRFNCNSGGTLVEKCCHFFDLMILFAAANPVRVMASGAIDVNHKNEVYDGQVPDIIDNAYVIVEFDNGSRGMLDLCMFAEGSRNEQEICVVGDIGKGETFVPESIVRFGKRTEGRDGVVTIMAEDERIKYQGLHHGSSYLEHLNFLSAIRAQGASGPSVNLSDGLLSVAVGVAGQLSIEQGRFVTMEEVLGL

SEQ ID NO: 17964 - protein, 361 aa, Zea mays subsp. mays
  misc_feature (1)..(361): Ceres Seq. ID no. 12362131
MGREHLHNLAHLATEVEREQSVRVRVTGLADPHQESLRLGLQLAAELGLPPPQTFPGHRELLDSGLCDAIIVSSPNMTHYEILMDIIHHREPQHILVEKPLCTTVQDCKKVIEAAKQRPEIVVQVGLEYRYMPPVAKLIDIVKSGTLGQVRMVAIREHRFPFLVKVNNWNRFNCNSGGTLVEKCCHFFDLMILFAAANPVRVMASGAIDVNHKNEVYDGQVPDIIDNAYVIVEFDNGSRGMLDLCMFAEGSRNEQEICVVGDIGKGETFVPESIVRFGKRTEGRDGVVTIMAEDERIKYQGLHHGSSYLEHLNFLSAIRAQGASGPSVNLSDGLLSVAVGVAGQLSIEQGRFVTMEEVLGL

SEQ ID NO: 17965 - DNA, 1846 bp, Zea mays subsp. mays
  misc_feature (1)..(1846): Ceres Seq. ID no. 12362153
gaacttattacaaccgaccaacgcgctttgtaacgcctccgctgcaatcagcccccgcggcgagcttgccctgcccctgaccctgagtgctagttctcgccgttacgtaaggcttcttggccttgcgtcctccgtctttcgttgctgatacatcgaggtattaaagaagctgcctgattccgggtagcagaggtcgccgccgcctgcagcaatggccgacttctcctggctcacggtgcttggtttcctattcctcacattcaactcaggcatggcgatttatcggtccaacggtgacgccggctccgtcgctttcgtcgtggtatcttatctcgacctggtggccctgttcgcctgcttgcgctactacgagcagttggatcagcagcactcccaaaagcgcgcgagggtcaaggctggggtttggagcctcacgaccctccttactatcatgttcagttacaaggtggctgagattatgcccctgccagtcaaacttgttgtctggtcgatggcagccgctaccacctgtggcggcttctacgctttcttcgtccacagcgagaagcctgtcatgccagcggtggcgccacggcccgccgcggccaaggatgcagcctccaactaggttcgtttgccaccacaaggcgcatactgccggccttggttcggcaccgcgcgttagatcccagggccaactaggttgttctctaattcctaatttcttggccttttctcttccactctccgccattttagctgtcgcctcggttgttttagcttgccggcgtggacagactggcagatctggaggtcggtgcgaccagatccggtgctgctgtgcccgatggcagaggagatctctctggtttactctgctaagagtcaaagaggagctgatgacgacaactaagcttgggttaccgataattgagcctgttctctgcacgagaagaaattttcggcctcaccttgtactaataagtatgctggatagtcccccagcacgggagttaattgtatcaagagaagtggagaccaagggcagagtagaactacagaggatatctttgtatatggaggctacatgtgaacaagaaaggagaggaggaagactgtagatctgaagaacctaaggagaaacaatcagagtacttgctggaacacatatatcttccatgataaaagttagatttcttgtttggtgctcatgcatgggttccatatgttcttcccgtcttattagaacatatctattggactaccatgcataaaaagccgtcgtttcataaactattgggactatacggcaccaatgaagctattgatgctggccggcaagctgacagcgaggtgaaagcttttcaaaacgatattccgagtggaagagaaaagaaaataaaagaaatagcaggttattttagaaaaaaaaatagttggcccatatgtaacgcgcggtagctttaagattattatctccagcagcttattcatatattatacatatattcaaatttcactctgtgaatagtagtctagaatacagtagtgttttgagtaaactatggataaactgctggacaaggtctaagacaagtgctgcgtggtggcaacaaacgacacttagtcttgtttggtggcaatgacattggaggggctaaagttttttcgctcctaaacaagctcctaagaatcttacgtgttatgttgcattatggaatatctatgtatctgcaaactctctgtagtatgtatgtacctcggatgtgctctatgtggctttgtaattttgaacggaggaagtaataataagataaatggatggcgtaacaagatactttgctct

SEQ ID NO: 17966 - protein, 169 aa, Zea mays subsp. mays
  misc_feature (1)..(169): Ceres Seq. ID no. 12362154
MQPPTRFVCHHKAHTAGLGSAPRVRSQGQLGCSLIPNFLAFSLPLSAILAVASVVLACRRGQTGRSGGRCDQIRCCCARWQRRSLWFTLLRVKEELMTTTKLGLPIIEPVLCTRRNFRPHLVLISMLDSPPARELIVSREVETKGRVELQRISLYMEATCEQERRGGRL

SEQ ID NO: 17967 - protein, 138 aa, Zea mays subsp. mays
  misc_feature (1)..(138): Ceres Seq. ID no. 12362155
MADFSWLTVLGFLFLTFNSGMAIYRSNGDAGSVAFVVVSYLDLVALFACLRYYEQLDQQHSQKRARVKAGVWSLTTLLTIMFSYKVAEIMPLPVKLVVWSMAAATTCGGFYAFFVHSEKPVMPAVAPRPAAAKDAASN

SEQ ID NO: 17968 - protein, 118 aa, Zea mays subsp. mays
  misc_feature (1)..(118): Ceres Seq. ID no. 12362156
MAIYRSNGDAGSVAFVVVSYLDLVALFACLRYYEQLDQQHSQKRARVKAGVWSLTTLLTIMFSYKVAEIMPLPVKLVVWSMAAATTCGGFYAFFVHSEKPVMPAVAPRPAAAKDAASN

SEQ ID NO: 17969 - DNA, 1611 bp, Zea mays subsp. mays
  misc_feature (1)..(1611): Ceres Seq. ID no. 12362162
gtgtgttctttgttaacatccatgaaccaatcatttggcgcctccatgagatgattcaacacctaaaattcgataggatatatagcaatcaaccttcagctgtttcagtggaccccatactgaaaattgggcttctgaacatctccgagatccgatttagagtgtcaatggcaatgtccccaagccaaaggccaaggggagtatttgggttctggtcgtcgttgatgactgcattgggaaacatggagcatatgccggtccgtatagctcaaagataccgggaggaattgtgcatgcggcaaagtgcacttatgaactctgctatatctaacattcaaaaggatcttcttagccaacctcttcagctactttccggtgttgatattcttggtaatgcgagtagcgctctgagtaacatgagcaaggggatagctgcattgtctatggacaagaaattcattcagggccggatgagacaggatagcaaaggtgtggaagactttggggatgtcataagagatggaggtggtgctcttgcaaaaggcatcttcagaggtgtcacaggcatattgacaaagcccatcgagggtgcaaaatcttctggtgttgaaggttttgtgcaaggagttggaaagggtataattggcgcagctgcacaaccagttagcggagttcttgatcttttatcaaaaactactgaaggtgccaatgcggtaaaaatgaaaatatcatcagcgataatggctgaggagcagttgctgcgtaggcgtcttcctcgagctattggtgggaatagtttgctctatccttatgacggacacaaagctactggccaggctatcttgcatctagctgaatgtgctacattccttggtcaaattgatatttttaaaatccgaggaaagtttgcttctaccgatgcttatgaggatcattttttacttcctaaggggaagatttttttaatcactcacagaagagtactattgcttcagttaccaatgatgacccagcgtaagttcaatcctacgaaggatccttgttcagtaatatgggatgtattatgggatgatttggtaacagtggagatgacccatgggaaaaaagatcctccagattcctggccttctaagcttattttatacttgaaagctaaaccttcaaattcgaaggaaattgttcgtttggtcaagtgtaatcgaggttcagatcaagcatctatcatttactcggcaattgacaaagcttataaagcttacggtccaaactcgttgaaggaattcttgagatggaaggtaccaaggccatatgcccctcgcaatagtagtggccgaagtatccaagacttatcatttggttaaaaggtcaacacaaatgcacactttagtgttaaacacagtagaatcttaggatgaaggtattttaggttgacacttttggttaccaggcaaatgatatattctacatatacactataggtatcagaggataggtactttgccttcatgtaaatagatatattttaggaggcgccggtattcatgtaaatgtgaacatctctgttataaagaaaaaaataataatgcaaattatgcaagattcattgctgcc

SEQ ID NO: 17970 - protein, 452 aa, Zea mays subsp. mays
  misc_feature (1)..(452): Ceres Seq. ID no. 12362163
VFFVNIHEPIIWRLHEMIQHLKFDRIYSNQPSAVSVDPILKIGLLNISEIRFRVSMAMSPSQRPRGVFGFWSSLMTALGNMEHMPVRIAQRYREELCMRQSALMNSAISNIQKDLLSQPLQLLSGVDILGNASSALSNMSKGIAALSMDKKFIQGRMRQDSKGVEDFGDVIRDGGGALAKGIFRGVTGILTKPIEGAKSSGVEGFVQGVGKGIIGAAAQPVSGVLDLLSKTTEGANAVKMKISSAIMAEEQLLRRRLPRAIGGNSLLYPYDGHKATGQAILHLAECATFLGQIDIFKIRGKFASTDAYEDHFLLPKGKIFLITHRRVLLLQLPMMTQRKFNPTKDPCSVIWDVLWDDLVTVEMTHGKKDPPDSWPSKLILYLKAKPSNSKEIVRLVKCNRGSDQASIIYSAIDKAYKAYGPNSLKEFLRWKVPRPYAPRNSSGRSIQDLSFG

SEQ ID NO: 17971 - protein, 436 aa, Zea mays subsp. mays
  misc_feature (1)..(436): Ceres Seq. ID no. 12362164
MIQHLKFDRIYSNQPSAVSVDPILKIGLLNISEIRFRVSMAMSPSQRPRGVFGFWSSLMTALGNMEHMPVRIAQRYREELCMRQSALMNSAISNIQKDLLSQPLQLLSGVDILGNASSALSNMSKGIAALSMDKKFIQGRMRQDSKGVEDFGDVIRDGGGALAKGIFRGVTGILTKPIEGAKSSGVEGFVQGVGKGIIGAAAQPVSGVLDLLSKTTEGANAVKMKISSAIMAEEQLLRRRLPRAIGGNSLLYPYDGHKATGQAILHLAECATFLGQIDIFKIRGKFASTDAYEDHFLLPKGKIFLITHRRVLLLQLPMMTQRKFNPTKDPCSVIWDVLWDDLVTVEMTHGKKDPPDSWPSKLILYLKAKPSNSKEIVRLVKCNRGSDQASIIYSAIDKAYKAYGPNSLKEFLRWKVPRPYAPRNSSGRSIQDLSFG

SEQ ID NO: 17972 - protein, 397 aa, Zea mays subsp. mays
  misc_feature (1)..(397): Ceres Seq. ID no. 12362165
MAMSPSQRPRGVFGFWSSLMTALGNMEHMPVRIAQRYREELCMRQSALMNSAISNIQKDLLSQPLQLLSGVDILGNASSALSNMSKGIAALSMDKKFIQGRMRQDSKGVEDFGDVIRDGGGALAKGIFRGVTGILTKPIEGAKSSGVEGFVQGVGKGIIGAAAQPVSGVLDLLSKTTEGANAVKMKISSAIMAEEQLLRRRLPRAIGGNSLLYPYDGHKATGQAILHLAECATFLGQIDIFKIRGKFASTDAYEDHFLLPKGKIFLITHRRVLLLQLPMMTQRKFNPTKDPCSVIWDVLWDDLVTVEMTHGKKDPPDSWPSKLILYLKAKPSNSKEIVRLVKCNRGSDQASIIYSAIDKAYKAYGPNSLKEFLRWKVPRPYAPRNSSGRSIQDLSFG

SEQ ID NO: 17973 - DNA, 1847 bp, Zea mays subsp. mays
  misc_feature (1)..(1847): Ceres Seq. ID no. 12362207
gcacgagaccattacctagaacatcctaatcgaaaagtttttgtcagtcatgcggccagcttcctccccgctagctcactagccaggcccgggcgcctcaccgccacggtgaccgccgccttctttgacgcctgcggcctgcctaaccccgaagtctctcagtgcgtgtttggccgaaatccacggggagggcttgtcctcgcctttgctgagctgctccggagcggagccgtgcctacttgagttcaggtttgtttcgccatccgaggccaagattcggagcgtcgccgaagggaggcgatgaagggcaaaggcgggccggtggacaggaggtcctccgccagatggaggctgctggtgctctgcgcattcagcttcggcatcggcatgatcttcaccgaccggttctggacagcaccggataccagtagccataccatgtctcaacgctggaggcaagagcaagagctccaacttgtatcagaagattgcaacacaaagaggaagcatggggaagacaaggatataatgggagaggtaaccaagactcatgaagccatacaatcattggataagtccatctcaacgctgcagatggagcttgcagcaaagcggagcacacttgagctactccgatctagtggttcaccagtaacctctgaaactagccaaccaaggaaaaaggcttttgttgtcattggagtcaacactgcattcagcagccgcaagcgccgtgattctgtccgggagacatggatgcctcaaggagaaaagctgcaacaattagaagaacagaagggaatagttatccgcttcactatcgggcacagtgctacatccaacagtatactggacaaagctatagattcagaggacgctcagcatcatgactttcttaggctggaccatgttgagggatatcatgaactctcagctaagacaaaaatattcttctctactgctgttggcatctgggacgctgacttctacgtcaaggtcgatgatgatgtgcatgtaaacctaggaatgcttgccactacccttgctcggcataaatcgaaaccaagaacttatattggctgcatgaagtcaggcccagttcttgctgacaagaatgtgaagtaccatgaacctgagtactggaaatttggggaggaaggaaataagtacttccgtcatgctacagggcagatatatgccatttcgaaagatctggcgacttatatctcaatcaatcggcctatcttgcacaaatacgcaaacgaagacgtgtcgcttggatcgtggttcatcggtttggaagttaatcacatcgatgaaaggaacatgtgctgtggaactccaccagactgtgagtggaaagggcaagctggcaatgtctgcgtagcgtctttcgactggagctgcagtggcatatgcaagtctgttgagaggatcaaagatgtacatgctcgctgcggcgaaggggattcagcagtttggagtgctcttgtctagcacataccctcctttgcccgtaaatatgtagcataattggtaagctttggtggtggtggacaccagcataggcgttaggcaactccccaagtaaacttgacaaaacccagagatcatgatcatgccccgtggaacattgccaatggtaactctggctggaaaaattctgcgtaattttggtctgtcactgttcatgaccttcggacttcggtggtgttaggagctccaaggtagggttgcaactgatgttactgatcttacatgtagggggagagtttctcagctgatgcgagatcatgtaatgcagaggacattgttttatgcaaattttgacattcttttgcgggttc

SEQ ID NO: 17974 - protein, 398 aa, Zea mays subsp. mays
  misc_feature (1)..(398): Ceres Seq. ID no. 12362208
MKGKGGPVDRRSSARWRLLVLCAFSFGIGMIFTDRFWTAPDTSSHTMSQRWRQEQELQLVSEDCNTKRKHGEDKDIMGEVTKTHEAIQSLDKSISTLQMELAAKRSTLELLRSSGSPVTSETSQPRKKAFVVIGVNTAFSSRKRRDSVRETWMPQGEKLQQLEEQKGIVIRFTIGHSATSNSILDKAIDSEDAQHHDFLRLDHVEGYHELSAKTKIFFSTAVGIWDADFYVKVDDDVHVNLGMLATTLARHKSKPRTYIGCMKSGPVLADKNVKYHEPEYWKFGEEGNKYFRHATGQIYAISKDLATYISINRPILHKYANEDVSLGSWFIGLEVNHIDERNMCCGTPPDCEWKGQAGNVCVASFDWSCSGICKSVERIKDVHARCGEGDSAVWSALV

SEQ ID NO: 17975 - protein, 369 aa, Zea mays subsp. mays
  misc_feature (1)..(369): Ceres Seq. ID no. 12362209
MIFTDRFWTAPDTSSHTMSQRWRQEQELQLVSEDCNTKRKHGEDKDIMGEVTKTHEAIQSLDKSISTLQMELAAKRSTLELLRSSGSPVTSETSQPRKKAFVVIGVNTAFSSRKRRDSVRETWMPQGEKLQQLEEQKGIVIRFTIGHSATSNSILDKAIDSEDAQHHDFLRLDHVEGYHELSAKTKIFFSTAVGIWDADFYVKVDDDVHVNLGMLATTLARHKSKPRTYIGCMKSGPVLADKNVKYHEPEYWKFGEEGNKYFRHATGQIYAISKDLATYISINRPILHKYANEDVSLGSWFIGLEVNHIDERNMCCGTPPDCEWKGQAGNVCVASFDWSCSGICKSVERIKDVHARCGEGDSAVWSALV

SEQ ID NO: 17976 - protein, 352 aa, Zea mays subsp. mays
  misc_feature (1)..(352): Ceres Seq. ID no. 12362210
MSQRWRQEQELQLVSEDCNTKRKHGEDKDIMGEVTKTHEAIQSLDKSISTLQMELAAKRSTLELLRSSGSPVTSETSQPRKKAFVVIGVNTAFSSRKRRDSVRETWMPQGEKLQQLEEQKGIVIRFTIGHSATSNSILDKAIDSEDAQHHDFLRLDHVEGYHELSAKTKIFFSTAVGIWDADFYVKVDDDVHVNLGMLATTLARHKSKPRTYIGCMKSGPVLADKNVKYHEPEYWKFGEEGNKYFRHATGQIYAISKDLATYISINRPILHKYANEDVSLGSWFIGLEVNHIDERNMCCGTPPDCEWKGQAGNVCVASFDWSCSGICKSVERIKDVHARCGEGDSAVWSALV

SEQ ID NO: 17977 - DNA, 1648 bp, Zea mays subsp. mays
  misc_feature (1)..(1648): Ceres Seq. ID no. 12362215
aagaagcgaagcaaccaacccccgaaatcttcaacggcgccatcgccactgcgtcatgcccgtcccgcacctcctctcgccactccccctgccctcgccgccgccgcccctccaccgcaatggagcgccatggcggcgcccgacgcaactacgtgccgcactacgggtcccgcctccgcttcacctggggctcgccgcggcccgtggcgatggcgtgaggcggttcgtcgggacgctgggctcgaagagagcgcgagcggtcggtgcaattagggtttctgcgatctctggagacggcggtggcggtgctggtggtacgggaattgcggcggcagcggccgccactgtggtctttgctgtgatgaaccgggtgctctacaagctggcgctcgtgccaatgaagaattaccctttcttcctcgcccagttcgccacatttgggtatgtcctagtgtatttctcaattctcttcataagatttcgcgctgggattgtcactagagaaatgttagcgcttccgaagccacagttcatgctaattggtttactggaagcgctaggtgctgcttcaggcatggctgctgctgctatgttgcccgggccatctattccagtgttgtcacagtcctttctggtttggcaacttatcttatctgccctcatcttgggaaggaaatatagagcaaatcagatccttggctgcttgcttgttacagctggagtaattctagcagtggccggtggagccagtaatggtccgattctctttgaagtcaaattcttttggccagcagtaatgatgatttcagctgcatttcaagctgctgcttccattatcaaggagtttgttttcattgatggtgcaaaacgccttgagggaaagaagcctgatatatttgtagtcaactcttttggttctggtttccaggcactttttattttcctactccttccatttctctctaacttgaaagggattccttttgctgaactccctgcatacctaacccgtggtgctgcatgctttctgaatgtgggagggaatctgaaggattgccatggagctcctttgctaccacttctctacataactctgaacatggccttcaacatttctgtccttaatcttgtgaagatgtctacagcagtggttgcttcgctgacatcaactttagcagtacctctttccatctatatactgtcactgcctctaccatatctacccgaaggaacaaatttgagcgcatcttttttgattggtgttgctaccttagtgctcggattgcttctatacaatcttcctcaagaatcaaccaatcaagtaaaggaagattaatctaaacccatatcagatataaggttaacaggaagctattggtgctccactaagaaaatagccgcattttgttgacagtggcttcacagtttggtacataactcatgaagagcagtgttcttctgccacaaacatttgcggtgcaaacatttgaggcaccagctgacttcaaagtttagaaacagcaagttcttgtttcatctgttaacaaaatcctaatggattatgcagctatatataagctctacctgagcggatgtaactactaactactttcagatgagtaagggctttacaaattcattggttgtg

SEQ ID NO: 17978 - protein, 444 aa, Zea mays subsp. mays
  misc_feature (1)..(444): Ceres Seq. ID no. 12362216
RSEATNPRNLQRRHRHCVMPVPHLLSPLPLPSPPPPLHRNGAPWRRPTQLRAALRVPPPLHLGLAAARGDGVRRFVGTLGSKRARAVGAIRVSAISGDGGGGAGGTGIAAAAAATVVFAVMNRVLYKLALVPMKNYPFFLAQFATFGYVLVYFSILFIRFRAGIVTREMLALPKPQFMLIGLLEALGAASGMAAAAMLPGPSIPVLSQSFLVWQLILSALILGRKYRANQILGCLLVTAGVILAVAGGASNGPILFEVKFFWPAVMMISAAFQAAASIIKEFVFIDGAKRLEGKKPDIFVVNSFGSGFQALFIFLLLPFLSNLKGIPFAELPAYLTRGAACFLNVGGNLKDCHGAPLLPLLYITLNMAFNISVLNLVKMSTAVVASLTSTLAVPLSIYILSLPLPYLPEGTNLSASFLIGVATLVLGLLLYNLPQESTNQVKED

SEQ ID NO: 17979 - protein, 426 aa, Zea mays subsp. mays
  misc_feature (1)..(426): Ceres Seq. ID no. 12362217
MPVPHLLSPLPLPSPPPPLHRNGAPWRRPTQLRAALRVPPPLHLGLAAARGDGVRRFVGTLGSKRARAVGAIRVSAISGDGGGGAGGTGIAAAAAATVVFAVMNRVLYKLALVPMKNYPFFLAQFATFGYVLVYFSILFIRFRAGIVTREMLALPKPQFMLIGLLEALGAASGMAAAAMLPGPSIPVLSQSFLVWQLILSALILGRKYRANQILGCLLVTAGVILAVAGGASNGPILFEVKFFWPAVMMISAAFQAAASIIKEFVFIDGAKRLEGKKPDIFVVNSFGSGFQALFIFLLLPFLSNLKGIPFAELPAYLTRGAACFLNVGGNLKDCHGAPLLPLLYITLNMAFNISVLNLVKMSTAVVASLTSTLAVPLSIYILSLPLPYLPEGTNLSASFLIGVATLVLGLLLYNLPQESTNQVKED

SEQ ID NO: 17980 - protein, 324 aa, Zea mays subsp. mays
  misc_feature (1)..(324): Ceres Seq. ID no. 12362218
MNRVLYKLALVPMKNYPFFLAQFATFGYVLVYFSILFIRFRAGIVTREMLALPKPQFMLIGLLEALGAASGMAAAAMLPGPSIPVLSQSFLVWQLILSALILGRKYRANQILGCLLVTAGVILAVAGGASNGPILFEVKFFWPAVMMISAAFQAAASIIKEFVFIDGAKRLEGKKPDIFVVNSFGSGFQALFIFLLLPFLSNLKGIPFAELPAYLTRGAACFLNVGGNLKDCHGAPLLPLLYITLNMAFNISVLNLVKMSTAVVASLTSTLAVPLSIYILSLPLPYLPEGTNLSASFLIGVATLVLGLLLYNLPQESTNQVKED

SEQ ID NO: 17981 - DNA, 1623 bp, Zea mays subsp. mays
  misc_feature (1)..(1623): Ceres Seq. ID no. 12362233
aagctcaccgctcactcacaagcacgctgcgaaacacagacgcagagacccgcgcacagatcgaagcggaggatgaaggtggaggtggtggagacgacgctggtgccgccgagcgaggcgacgccgcggcacgcgctgtggctgtccaacctggacctggcggtgcccaagacccacaccccgctcgtctactactacccgaggcccgccggcgccggcgccggggaggagggaaagggagagggagaagggtcgttcttcgacccggcgcgcctgcgggaggcgctgtccagggcgctggtgcccttctacccgctggcggggcggctggcggccggcccgggcggccggctcgagatcgactgcaccggcgagggcgcgctgttctgcgtcgcgcgggccgacttcaccggcgacgagatgttcgccgacttcgagccctcccccgaggcgcgccgcctgctcgtgccattcgccgcgtccggcgacccgccctgcgtgctcgccatggtccaggtgaccttcctcaagtgcggcggcgtggccgtgggcacgggcatgcaccacgtgacgatggacggcgccggcgcgatccagttcatccgggcgtggacggcgctggcgcgcggggaggcccccgcgtggacgccgtcgcacgaccggacgctcctgcgcgcgcgctccccgccgcacgtccccgcctgcgagcacccggtctactccccggcctacctcaacggggcgccgcggcccttcgtgacgcgcgtctacgccgtgccgcccaagctgctggcgggcatccggtcgcgctgcgcgccgggcgcgtccacgtactgcgcggtgacggcgcacctgtggcgcgccatgtgcgtcgcccggggcctcccggcgggcagcgacacgcggctgcgcgtcccggccaacgtccggcagcgcctgcgcccgccgctcccggcgtcctacttcggcaacgccatcgtgcgggacctggtcaccgtgcgggtggccgacgtgctgtcgcagccgctgggcttcgtggcggagcggatcaagcgcgcggtggcccgcgtcgacgacgcccgcgtgcgctccgtcgtcgactacctggagcttgagtcggacaagggcaaccaggcggcgcgcggccagttcatgcccgagtccgacctgtgggtcgtcagcttgctcggcatgcccatccacgacgccgacttcggctggggccgccccgggttcgtggcccccgcgcagatgttcggcagcggcacggcgtacgtcacgcagggacgcgacaaggacgaccccatcaacgtgctcttcgcgctcgagccagagtacctgaacaccttcgagaaggccttctacggggagtgaccgtgacgcgaccacgaccagccatggcgaggagtccgatgacgatggaatgggactgtgatgccattgtgatgccatgccgttgtggcatctcccgtggtgtgcactgtaataccatatcatattgcatgtttcggaatgcaagtcaatgcttactgggtgtgtgataaggtgcttcattccagctttgtactagtgtcaccaagcacgtaaataattgaatgagaaactggaacgtgcacggctggg

SEQ ID NO: 17982 - protein, 457 aa, Zea mays subsp. mays
  misc_feature (1)..(457): Ceres Seq. ID no. 12362234
KLTAHSQARCETQTQRPAHRSKRRMKVEVVETTLVPPSEATPRHALWLSNLDLAVPKTHTPLVYYYPRPAGAGAGEEGKGEGEGSFFDPARLREALSRALVPFYPLAGRLAAGPGGRLEIDCTGEGALFCVARADFTGDEMFADFEPSPEARRLLVPFAASGDPPCVLAMVQVTFLKCGGVAVGTGMHHVTMDGAGAIQFIRAWTALARGEAPAWTPSHDRTLLRARSPPHVPACEHPVYSPAYLNGAPRPFVTRVYAVPPKLLAGIRSRCAPGASTYCAVTAHLWRAMCVARGLPAGSDTRLRVPANVRQRLRPPLPASYFGNAIVRDLVTVRVADVLSQPLGFVAERIKRAVARVDDARVRSVVDYLELESDKGNQAARGQFMPESDLWVVSLLGMPIHDADFGWGRPGFVAPAQMFGSGTAYVTQGRDKDDPINVLFALEPEYLNTFEKAFYGE

SEQ ID NO: 17983 - protein, 433 aa, Zea mays subsp. mays
  misc_feature (1)..(433): Ceres Seq. ID no. 12362235
MKVEVVETTLVPPSEATPRHALWLSNLDLAVPKTHTPLVYYYPRPAGAGAGEEGKGEGEGSFFDPARLREALSRALVPFYPLAGRLAAGPGGRLEIDCTGEGALFCVARADFTGDEMFADFEPSPEARRLLVPFAASGDPPCVLAMVQVTFLKCGGVAVGTGMHHVTMDGAGAIQFIRAWTALARGEAPAWTPSHDRTLLRARSPPHVPACEHPVYSPAYLNGAPRPFVTRVYAVPPKLLAGIRSRCAPGASTYCAVTAHLWRAMCVARGLPAGSDTRLRVPANVRQRLRPPLPASYFGNAIVRDLVTVRVADVLSQPLGFVAERIKRAVARVDDARVRSVVDYLELESDKGNQAARGQFMPESDLWVVSLLGMPIHDADFGWGRPGFVAPAQMFGSGTAYVTQGRDKDDPINVLFALEPEYLNTFEKAFYGE

SEQ ID NO: 17984 - protein, 370 aa, Zea mays subsp. mays
  misc_feature (1)..(370): Ceres Seq. ID no. 12362236
AHRSLTSTLRNTDAETRAQIEAEDEGGGGGDDAGAAERGDAAARAVAVQPGPGGAQDPHPARLLLPEARRRRRRGGGKGRGRRVVLRPGAPAGGAVQGAGALLPAGGAAGGRPGRPARDRLHRRGRAVLRRAGRLHRRRDVRRLRALPRGAPPARAIRRVRRPALRARHGPGDLPQVRRRGRGHGHAPRDDGRRRRDPVHPGVDGAGARGGPRVDAVARPDAPARALPAARPRLRAPGLLPGLPQRGAAALRDARLRRAAQAAGGHPVALRAGRVHVLRGDGAPVARHVRRPGPPGGQRHAAARPGQRPAAPAPAAPGVLLRQRHRAGPGHRAGGRRAVAAAGLRGGADQARGGPRRRRPRALRRRLPGA

SEQ ID NO: 17985 - DNA, 1434 bp, Zea mays subsp. mays
  misc_feature (1)..(1434): Ceres Seq. ID no. 12362303
accgatcacacaatcccgacttcccgaggccgcccggcccgagagcaccgagcacgcttctcccaaactgcactgctccgtccacggcacggcgaggcggggacgccaaagcaaaaaggcaataaagccagcggccagggccaggaccaggagccggcgtcggtggaggctgaggcagaggcgccgaagcggcggcggcatgggggtgctgcggagcacgcagagcctggaggccgaggtagaggagatgcgcggcgcgctgctgctccatggcgcgtgggcgtggaggcccggcgggggcgccgccaagcgcgcggcccgcgccgtggagcccgccgccgcggaggcgcgcaccgtgtgcgtcacggggggcacgtccttcctcggcttcgccgtcgtcgaccgcctgctccgccacggctacaccgtccgcctcgccctcgagacgcaagaggaccttgacaagctgcgggagatggagatgtttggggagaatggcagggatggggtctggactgtgatcgcaaatgtgatggacccggagagtttgcatgaggctttcgacggctgtgttggtgtctttcacacttcgtcgcatgtggatccagcgggcatctccggttacacgaaacacatggcaggcttggaggccaaagcagcagagctggtggtggaagcatgtgtgaggacagaatccgtgaggaagtgcgtcctgacgtcgtcactgttggcatgcgtctggaggcagaactaccctcatgaccgccgccggttcccaactaccatcgatgagaactgttggagcgacgagagcttgtgccgcgacaacaagctgtggctgtcactcggcaagacgatggcggaaaaggcggcgtggagggccgcacggggaacagacctgaagctagtgaccatatgcccagcactggtaactgggccggggttccggaggcggaaccctactccatccattgcatacctcaaaggagcgcacgccatgctcgtccaaggtctgctggcgactgcgaacgtggagagggtggcggaggcgcacgtccgcgtgtacgaggagctgagcggcacggccgggggccggtacatctgctacgaccacgtggtgcgacgaggcgaggagttcgcggagctgcagcggcagctggggctcagggtccccgcgacgcccgacggctatggtggcgacgacgacgacggccgggcgccgcggttccagctctgtaaccggaagctggcggcgctcatgtccgcgcggaggcggtgcacctacgacgcctacttccccatgccgcaggagtgagaccggaagaggagagagagctgctgatgctggacaacgactggagcgtgcgtgacaagtgacctcgtgtacatagcaatagtggtgatcggctcgcatcaatataataaatcggcccc

SEQ ID NO: 17986 - protein, 437 aa, Zea mays subsp. mays
  misc_feature (1)..(437): Ceres Seq. ID no. 12362304
PITQSRLPEAARPESTEHASPKLHCSVHGTARRGRQSKKAIKPAARARTRSRRRWRLRQRRRSGGGMGVLRSTQSLEAEVEEMRGALLLHGAWAWRPGGGAAKRAARAVEPAAAEARTVCVTGGTSFLGFAVVDRLLRHGYTVRLALETQEDLDKLREMEMFGENGRDGVWTVIANVMDPESLHEAFDGCVGVFHTSSHVDPAGISGYTKHMAGLEAKAAELVVEACVRTESVRKCVLTSSLLACVWRQNYPHDRRRFPTTIDENCWSDESLCRDNKLWLSLGKTMAEKAAWRAARGTDLKLVTICPALVTGPGFRRRNPTPSIAYLKGAHAMLVQGLLATANVERVAEAHVRVYEELSGTAGGRYICYDHVVRRGEEFAELQRQLGLRVPATPDGYGGDDDDGRAPRFQLCNRKLAALMSARRRCTYDAYFPMPQE

SEQ ID NO: 17987 - protein, 371 aa, Zea mays subsp. mays
  misc_feature (1)..(371): Ceres Seq. ID no. 12362305
MGVLRSTQSLEAEVEEMRGALLLHGAWAWRPGGGAAKRAARAVEPAAAEARTVCVTGGTSFLGFAVVDRLLRHGYTVRLALETQEDLDKLREMEMFGENGRDGVWTVIANVMDPESLHEAFDGCVGVFHTSSHVDPAGISGYTKHMAGLEAKAAELVVEACVRTESVRKCVLTSSLLACVWRQNYPHDRRRFPTTIDENCWSDESLCRDNKLWLSLGKTMAEKAAWRAARGTDLKLVTICPALVTGPGFRRRNPTPSIAYLKGAHAMLVQGLLATANVERVAEAHVRVYEELSGTAGGRYICYDHVVRRGEEFAELQRQLGLRVPATPDGYGGDDDDGRAPRFQLCNRKLAALMSARRRCTYDAYFPMPQE

SEQ ID NO: 17988 - protein, 355 aa, Zea mays subsp. mays
  misc_feature (1)..(355): Ceres Seq. ID no. 12362306
MRGALLLHGAWAWRPGGGAAKRAARAVEPAAAEARTVCVTGGTSFLGFAVVDRLLRHGYTVRLALETQEDLDKLREMEMFGENGRDGVWTVIANVMDPESLHEAFDGCVGVFHTSSHVDPAGISGYTKHMAGLEAKAAELVVEACVRTESVRKCVLTSSLLACVWRQNYPHDRRRFPTTIDENCWSDESLCRDNKLWLSLGKTMAEKAAWRAARGTDLKLVTICPALVTGPGFRRRNPTPSIAYLKGAHAMLVQGLLATANVERVAEAHVRVYEELSGTAGGRYICYDHVVRRGEEFAELQRQLGLRVPATPDGYGGDDDDGRAPRFQLCNRKLAALMSARRRCTYDAYFPMPQE

SEQ ID NO: 17989 - DNA, 907 bp, Zea mays subsp. mays
  misc_feature (1)..(907): Ceres Seq. ID no. 12362307
atcagattgggagactcacttcactcactcgggagtcgggtcctcctcgactcagctcctccacaaacaaagccaccaccatcccaacccaaacacatcggccgaccacgggcgccgccatgtccaccgctgacgcggcgagcccggccctggcgccggactgggacgcgccggcgggcgaaggcctggccctggcccagttcgccgcgggctgcttctggagcgtggagctggtgtaccagcgcctcccaggcgtggcgcgcacggaggtggggtactcgcagggccaccgccacgcccccacctaccgcgacgtctgcggcaacggcacgggccacgccgaggtggtccgcgtgcactacgaccccaaggcctgcccctacgacgtcctcctcgacgtcttctgggccaagcacaaccccaccacgctcaacagacagggcaacgacgtcgggacgcagtaccggtcgggcatctactactacacggcagagcaggagacgctggcgcgcgagtcgctggctgcgaagcagaaggagtggcaggacgcgatcgtcaccgaggtcctgccggcgcgacggttctaccccgccgaggagtaccaccagcagtacctcgagaagggcgggcagtccgccaagaagggctgcagcgatcccatccgctgctacggttgagtaccgaccgacccctgtccggagcaccgaagacgccgtgaatgaactgtgctgcatcgatgcgttgtactacctccacctccgctctcgaatagttgttgcccgctagttcattttataactaaacgaccataaataaaaaagaacggagggaagatattgtaactaaagtgtaagatgacttttttgtgttgtgtatcgtactactgcttgttcagagatctacgttg

SEQ ID NO: 17990 - protein, 261 aa, Zea mays subsp. mays
  misc_feature (1)..(261): Ceres Seq. ID no. 12362308
IRLGDSLHSLGSRVLLDSAPPQTKPPPSQPKHIGRPRAPPCPPLTRRARPWRRTGTRRRAKAWPWPSSPRAASGAWSWCTSASQAWRARRWGTRRATATPPPTATSAATARATPRWSACTTTPRPAPTTSSSTSSGPSTTPPRSTDRATTSGRSTGRASTTTRQSRRRWRASRWLRSRRSGRTRSSPRSCRRDGSTPPRSTTSSTSRRAGSPPRRAAAIPSAATVEYRPTPVRSTEDAVNELCCIDALYYLHLRSRIVVAR

SEQ ID NO: 17991 - protein, 224 aa, Zea mays subsp. mays
  misc_feature (1)..(224): Ceres Seq. ID no. 12362309
QIGRLTSLTRESGPPRLSSSTNKATTIPTQTHRPTTGAAMSTADAASPALAPDWDAPAGEGLALAQFAAGCFWSVELVYQRLPGVARTEVGYSQGHRHAPTYRDVCGNGTGHAEVVRVHYDPKACPYDVLLDVFWAKHNPTTLNRQGNDVGTQYRSGIYYYTAEQETLARESLAAKQKEWQDAIVTEVLPARRFYPAEEYHQQYLEKGGQSAKKGCSDPIRCYG

SEQ ID NO: 17992 - protein, 185 aa, Zea mays subsp. mays
  misc_feature (1)..(185): Ceres Seq. ID no. 12362310
MSTADAASPALAPDWDAPAGEGLALAQFAAGCFWSVELVYQRLPGVARTEVGYSQGHRHAPTYRDVCGNGTGHAEVVRVHYDPKACPYDVLLDVFWAKHNPTTLNRQGNDVGTQYRSGIYYYTAEQETLARESLAAKQKEWQDAIVTEVLPARRFYPAEEYHQQYLEKGGQSAKKGCSDPIRCYG

SEQ ID NO: 17993 - DNA, 1256 bp, Zea mays subsp. mays
  misc_feature (1)..(1256): Ceres Seq. ID no. 12362320
gcacgagaccattacctagaacatcctaatcgaaaaactcggcctcggccacggccaccctctcaaaccaaacagaacccacacgcgtgcacggacacggagcacgcgtgcgcgccccacgagcgatgtctccccttcgccgcgcgcgctctaccctgctcctcctccactacgtggccgcctcccacttcctgctgtgcgcgccgatccagcgcaccgccgcggccacattgccggaccccgcgccactcgacccggcactgatcctcccctcggcgacctcggtgcagcccaccgccactaccattcccgggggcacgatcccggcgttccccgagcagtcggactcgctagcggggtcctcgtccgcgtgcccgctcgccccttccccggtgctcctcccggccgtgcggtcctcctgcgccaccgacgacggcgcgctgccgccgaggctgcgctgctgccccgcgctggccgcgtggctgttcgccgcctacgcgcccaccgcgctagcggagcggcccccggccgcggccgcggctaccgtggacatgccgctgccgcccgacgactccgagacgtgcgcgggcgccgtggaccgcgcgctgcgtgcggcgggagcggcgctgccccgcccccctggcgctggcggcaacgggacgtgcgacgtggcgttctgctactgcggggtgaggctgaggcggctggcctgcgggtccccgccggctgagggcgggatgtggtcgccagctgacgccgcggcgagggagctggagaaggactgcgcgcagccgggcgtccctggctgttccaaatgcctccttgctcttaccacgataaaggccacgaatcccgggtgtggtgctggcgtggaggcagcaggcaagaagaagcagcagatctaccgatggaccgcgagtgaccgtgactgcgagctcatggggctcatgtggctgctgcagcgcaatgccacacggtacggagcggcggccacggccgtgatccgggccctaatggccgtggacgaggcgttcaccgcaggggtcgcggtggcggcagatacgggggcagccgtggcgtgctcgctgcccgtggacgacgacatgcccctcccggccgagtacgcgcaggtcagcagggccagcgacgcgcctcgtctctgctgcttcctgctcgtgctgctctccattctaagcttctgttttgtgtactcgttgtaatactttgcgatttaattgaagttcgttgtatggtcc

SEQ ID NO: 17994 - protein, 364 aa, Zea mays subsp. mays
  misc_feature (1)..(364): Ceres Seq. ID no. 12362321
MSPLRRARSTLLLLHYVAASHFLLCAPIQRTAAATLPDPAPLDPALILPSATSVQPTATTIPGGTIPAFPEQSDSLAGSSSACPLAPSPVLLPAVRSSCATDDGALPPRLRCCPALAAWLFAAYAPTALAERPPAAAAATVDMPLPPDDSETCAGAVDRALRAAGAALPRPPGAGGNGTCDVAFCYCGVRLRRLACGSPPAEGGMWSPADAAARELEKDCAQPGVPGCSKCLLALTTIKATNPGCGAGVEAAGKKKQQIYRWTASDRDCELMGLMWLLQRNATRYGAAATAVIRALMAVDEAFTAGVAVAADTGAAVACSLPVDDDMPLPAEYAQVSRASDAPRLCCFLLVLLSILSFCFVYSL

SEQ ID NO: 17995 - protein, 222 aa, Zea mays subsp. mays
  misc_feature (1)..(222): Ceres Seq. ID no. 12362322
MPLPPDDSETCAGAVDRALRAAGAALPRPPGAGGNGTCDVAFCYCGVRLRRLACGSPPAEGGMWSPADAAARELEKDCAQPGVPGCSKCLLALTTIKATNPGCGAGVEAAGKKKQQIYRWTASDRDCELMGLMWLLQRNATRYGAAATAVIRALMAVDEAFTAGVAVAADTGAAVACSLPVDDDMPLPAEYAQVSRASDAPRLCCFLLVLLSILSFCFVYSL

SEQ ID NO: 17996 - DNA, 984 bp, Zea mays subsp. mays
  misc_feature (1)..(984): Ceres Seq. ID no. 12362327
acggatgctataataactgcccctcaccaaacctcccagccagctctcactcactcacaagtcacacagccacacttgaaccgctgcccgcagcggagggagcttgcacgggccaacgcacacataacacaagctcgtcgtcgatggcgcggtgggctgcggtgctagcgctggccgcggccacggccatcgccgtggcgtccgtggcgggcggcgacatgaacgcggacaagacggagtgcgcggaccagctggtgggcctggcgccgtgcctgcagtacgtgcaggggcaggcccgcgcgccgccgcccgactgctgcggcggcctgcgccaggtgctggggaagagccccaagtgcctgtgcgtgctcgtcaaggacaaggacgaccccaacctgggcatcaagatcaacgccaccctcgcgctcgcgctccccaacgcctgcggcgccacccgcgccaacgtctcccactgcgctcagctcctgcatattcccccgggctccaaagacgccgccgtcttcagtcccggcagcgacaagggctccactgccgctccagccaaggacaactcgacggcgacgaccgactcccgcgcgctgcaggcgaccaccggacgcggcgtgtcctcctcggcggcgaccgccggtgctgcactcacggtgctgctcgccggctacctcctcctgctcgtgccagagctgtcgcctagctcgttctagaccctctgtcaagttgtgccaccagtaggatttgatatgttgttgttctttctagtacgtgacgtgacagacaatttgctgctggtgtccttgttgttgtagtagttgcactgcgtgttcctgttatgctatgggtacgagatgttagggcatgggttaagctaagctaaggcgatgggggatcagtaccttacctctcatctctggctgctgatcctttttgttcttggcactgctgttttatctgaacatttgatcagcc

SEQ ID NO: 17997 - protein, 239 aa, Zea mays subsp. mays
  misc_feature (1)..(239): Ceres Seq. ID no. 12362328
GCYNNCPSPNLPASSHSLTSHTATLEPLPAAEGACTGQRTHNTSSSSMARWAAVLALAAATAIAVASVAGGDMNADKTECADQLVGLAPCLQYVQGQARAPPPDCCGGLRQVLGKSPKCLCVLVKDKDDPNLGIKINATLALALPNACGATRANVSHCAQLLHIPPGSKDAAVFSPGSDKGSTAAPAKDNSTATTDSRALQATTGRGVSSSAATAGAALTVLLAGYLLLLVPELSPSSF

SEQ ID NO: 17998 - protein, 192 aa, Zea mays subsp. mays
  misc_feature (1)..(192): Ceres Seq. ID no. 12362329
MARWAAVLALAAATAIAVASVAGGDMNADKTECADQLVGLAPCLQYVQGQARAPPPDCCGGLRQVLGKSPKCLCVLVKDKDDPNLGIKINATLALALPNACGATRANVSHCAQLLHIPPGSKDAAVFSPGSDKGSTAAPAKDNSTATTDSRALQATTGRGVSSSAATAGAALTVLLAGYLLLLVPELSPSSF

SEQ ID NO: 17999 - protein, 167 aa, Zea mays subsp. mays
  misc_feature (1)..(167): Ceres Seq. ID no. 12362330
MNADKTECADQLVGLAPCLQYVQGQARAPPPDCCGGLRQVLGKSPKCLCVLVKDKDDPNLGIKINATLALALPNACGATRANVSHCAQLLHIPPGSKDAAVFSPGSDKGSTAAPAKDNSTATTDSRALQATTGRGVSSSAATAGAALTVLLAGYLLLLVPELSPSSF

SEQ ID NO: 18000 - DNA, 1484 bp, Zea mays subsp. mays
  misc_feature (1)..(1484): Ceres Seq. ID no. 12362339
aaaaatcgtccgactgtagcctagtcgacggatttgatcccgcaggccgcagcgcagcggccgtgtccgctgccgccaccagccaccggccacagccaggcagccagctcgcgtcgaagaagacgacgtggcccgccaagctcccctgccaaaagaaacaggagggcccgcgtcgtcgcctagtcggcgcgtggtgggagtggtatggagaggggcgccgccacggccgccgcggcgctcggctgcgccctccgctccccttccccctccgcgtccccggctccccggtggccgccgctccaccgctgcccacggcgcggcccgcccgggcctccccgctccctcctgccgcccgcgcggcgtttcaggcccctagacatgaagaagggacatagtaggaactcaccgaagaccttcagctcatctggacactcgggggttagactaaacaacgaaggtctcgtcaacgacaggctcctaatagattgtggagaggatcaagattgtgtgctcggtggcatagttgccctgggaaaagtttgatgctctccacattggtcatcgggaattggcaatgcatgcttctaaagcagggactccttttcttctttcttttgtgggaatggccgaagtacttggctggacatataggccacctatagttgctcattgtgatcgcaagcgggtcctttcatcttgggctccatactgtaggaatgtggtaccacttgaatatcaagttgaattttcaaaggtcaggtccctgtctccacgacaatttgttgaaaggttatcaaaggatcttagaataaaaggtgtcgtggcaggtgaaaattacaggtttggttacaaagcatctggtgacgcaactgagttagtgaaactatgtgaggaatttggtttaagtgcattcattgtacgctctgtcatggacacagcaaaaagatctcttaatggattttcaggcgctataaattcgagtgataaaggacaggtttcttccagccgtgtccgccatgcattggctatgggtgacatggaatacgtctctgaattactagggaggaaacaccgtcttttgctaatggttaaccaacactgccttcatgaaaagaaaagcattgtactccctaattcttgcatgctgaacatgccaccagctgaaggtctctatgaaaactgcgaccttgttaatggagggtatcttggaccatgtagagtgatcatcaactctgatactatcatcattgagatgaaagatgataacagtttatccctaaatcctattcaagaagttcagttagggattgagtttggatgaagttatatactttttgcatctgccatcttgtggagattattgctgaaagaagacattggggggaatactgcaaggggaagtcgaagactttgttcaagcgtgcagtacgcctcatcgtgattgagttcaggagcattttgtagtctcacaagaatgctttatt

SEQ ID NO: 18001 - protein, 248 aa, Zea mays subsp. mays
  misc_feature (1)..(248): Ceres Seq. ID no. 12362340
MHASKAGTPFLLSFVGMAEVLGWTYRPPIVAHCDRKRVLSSWAPYCRNVVPLEYQVEFSKVRSLSPRQFVERLSKDLRIKGVVAGENYRFGYKASGDATELVKLCEEFGLSAFIVRSVMDTAKRSLNGFSGAINSSDKGQVSSSRVRHALAMGDMEYVSELLGRKHRLLLMVNQHCLHEKKSIVLPNSCMLNMPPAEGLYENCDLVNGGYLGPCRVIINSDTIIIEMKDDNSLSLNPIQEVQLGIEFG

SEQ ID NO: 18002 - protein, 232 aa, Zea mays subsp. mays
  misc_feature (1)..(232): Ceres Seq. ID no. 12362341
MAEVLGWTYRPPIVAHCDRKRVLSSWAPYCRNVVPLEYQVEFSKVRSLSPRQFVERLSKDLRIKGVVAGENYRFGYKASGDATELVKLCEEFGLSAFIVRSVMDTAKRSLNGFSGAINSSDKGQVSSSRVRHALAMGDMEYVSELLGRKHRLLLMVNQHCLHEKKSIVLPNSCMLNMPPAEGLYENCDLVNGGYLGPCRVIINSDTIIIEMKDDNSLSLNPIQEVQLGIEFG

SEQ ID NO: 18003 - protein, 130 aa, Zea mays subsp. mays
  misc_feature (1)..(130): Ceres Seq. ID no. 12362342
KSSDCSLVDGFDPAGRSAAAVSAAATSHRPQPGSQLASKKTTWPAKLPCQKKQEGPRRRLVGAWWEWYGEGRRHGRRGARLRPPLPFPLRVPGSPVAAAPPLPTARPARASPLPPAARAAFQAPRHEEGT

SEQ ID NO: 18004 - DNA, 2024 bp, Zea mays subsp. mays
  misc_feature (1)..(2024): Ceres Seq. ID no. 12362351
attttgggggctctaaaatagcctcgccctcctcgtgccttatcttcatctcacctcctctttctcctccgtgctgatcggcagtctctaagctttgcaacaactgatagccgaattccgcgcgccggtccctaaaaaaatgcaagtactaggtagtagataagatgcatttcccagtaatttttcgttattatatatacgcagcacgggaaggaggggagacactctgttcaaccaccagccgagttcgcagcggcactccaggtccagcagtctcttcggctcttcgttggtggtgcgtggacaccggaaattacctcggggattgcgttcctgatctaagcccggcatgaagtgctgctcagagcgtttgctgctcctgctcctgctgctgctggcatcgtcgtcgttactgtccgtcgtggttgccgcgcagcagacttgccctgccgacctcgacagcaaatgcgacggtggtgcgcctgatgactgggagggggaattcttccccggcgtcccgaaaatcaagtatgagggtccaacaagcaagaaccctcttgcttataagtggtataacaaggaggaagtcattctcggaaagaagatgaaggactggatgcgcttcagtgttgcgttctggcacacgttccgtggtactggcgccgatccttttggtgcgcctacaaaggtttggccttgggaggacggcacaaattcgttggccatggctaagagaagaatgagagctcactttgagttcatggagaagctgggggttgacaaatggtgcttccatgatagggatattgcccctgatgggaaaactctcgaagaaacaaatgctaacttggatgagatagttgagctggcaaagcagctccagggtgagaccaatataaagccattgtggggtactgcacagctctttatgcatcctcgttacatgcacggagctgctactagcccagaggttaaagtatatgcatatgcggctgcacaagttaagaaagctttggaggtcactcactacctaggtggtgaaaactatgtgttttggggtggaagagagggttaccaaactcttctgaacactgatcttaagagagaacttgaccatttggctaactttcttcaagctgctgttgactacaagaagaagattggattcaacggaacactgttgatagagcctaaaccacaggaacctacaaaacaccagtatgactgggatgttgcaactacgtttgcttttctacagaagtatggtcttaccggagagttcaagattaatgttgagtgcaaccatgctactctatctggacatagctgccatcatgaactggagactgcacgcattaatgggctgcttgggaacattgatgcaaacactggtgatcctcaagttggctgggacacggatcagttcatgacagacattgcagaggctactttggttatgtcaactgtggttaagaatggtggacttgcacctggtggcttcaactttgacgccaaattgcggagggaaagcactgatgttgaggacttgtttcttgctcatatctccggaatggacaccctggcccgtggcctccgcaacgccgccaagctgatcgaggatggttccctagatgctctcgtccgcaagcggtaccggagctttgatagtgagatgggtgccttgatcgaggctgggaaaggagactttgaggcgctggagaagaaggtccttgagtggggtgagcccactgttccgtccggcaagcaggaactggcggagattctgttccactctgctctatagatggcgccatgtccgtagcggtagctcctggaataagcaagcactgagcctgcgcccctcctaacgcgcgcggtcgtcctcaccaccacgggaatgtttctggttgcgcgcgatgaaccatgtacaatacaccgtggaactgaaatagctagtcagaatttttagaagtgttgcgtcttttgtttggaacggaataaaactgaactttgtggttagtttg

SEQ ID NO: 18005 - protein, 484 aa, Zea mays subsp. mays
  misc_feature (1)..(484): Ceres Seq. ID no. 12362352
MKCCSERLLLLLLLLLASSSLLSVVVAAQQTCPADLDSKCDGGAPDDWEGEFFPGVPKIKYEGPTSKNPLAYKWYNKEEVILGKKMKDWMRFSVAFWHTFRGTGADPFGAPTKVWPWEDGTNSLAMAKRRMRAHFEFMEKLGVDKWCFHDRDIAPDGKTLEETNANLDEIVELAKQLQGETNIKPLWGTAQLFMHPRYMHGAATSPEVKVYAYAAAQVKKALEVTHYLGGENYVFWGGREGYQTLLNTDLKRELDHLANFLQAAVDYKKKIGFNGTLLIEPKPQEPTKHQYDWDVATTFAFLQKYGLTGEFKINVECNHATLSGHSCHHELETARINGLLGNIDANTGDPQVGWDTDQFMTDIAEATLVMSTVVKNGGLAPGGFNFDAKLRRESTDVEDLFLAHISGMDTLARGLRNAAKLIEDGSLDALVRKRYRSFDSEMGALIEAGKGDFEALEKKVLEWGEPTVPSGKQELAEILFHSAL

SEQ ID NO: 18006 - protein, 399 aa, Zea mays subsp. mays
  misc_feature (1)..(399): Ceres Seq. ID no. 12362353
MKDWMRFSVAFWHTFRGTGADPFGAPTKVWPWEDGTNSLAMAKRRMRAHFEFMEKLGVDKWCFHDRDIAPDGKTLEETNANLDEIVELAKQLQGETNIKPLWGTAQLFMHPRYMHGAATSPEVKVYAYAAAQVKKALEVTHYLGGENYVFWGGREGYQTLLNTDLKRELDHLANFLQAAVDYKKKIGFNGTLLIEPKPQEPTKHQYDWDVATTFAFLQKYGLTGEFKINVECNHATLSGHSCHHELETARINGLLGNIDANTGDPQVGWDTDQFMTDIAEATLVMSTVVKNGGLAPGGFNFDAKLRRESTDVEDLFLAHISGMDTLARGLRNAAKLIEDGSLDALVRKRYRSFDSEMGALIEAGKGDFEALEKKVLEWGEPTVPSGKQELAEILFHSAL

SEQ ID NO: 18007 - protein, 395 aa, Zea mays subsp. mays
  misc_feature (1)..(395): Ceres Seq. ID no. 12362354
MRFSVAFWHTFRGTGADPFGAPTKVWPWEDGTNSLAMAKRRMRAHFEFMEKLGVDKWCFHDRDIAPDGKTLEETNANLDEIVELAKQLQGETNIKPLWGTAQLFMHPRYMHGAATSPEVKVYAYAAAQVKKALEVTHYLGGENYVFWGGREGYQTLLNTDLKRELDHLANFLQAAVDYKKKIGFNGTLLIEPKPQEPTKHQYDWDVATTFAFLQKYGLTGEFKINVECNHATLSGHSCHHELETARINGLLGNIDANTGDPQVGWDTDQFMTDIAEATLVMSTVVKNGGLAPGGFNFDAKLRRESTDVEDLFLAHISGMDTLARGLRNAAKLIEDGSLDALVRKRYRSFDSEMGALIEAGKGDFEALEKKVLEWGEPTVPSGKQELAEILFHSAL

SEQ ID NO: 18008 - DNA, 1741 bp, Zea mays subsp. mays
  misc_feature (1)..(1741): Ceres Seq. ID no. 12362368
gcacgagaccattacctagaacatcctaatcgaaaaaccccccgttctgtagctctcctctaatcctgatttttgtatgcgtggtggtcgctcttccgtctctcccagcccagcagccagcagtcgtctccttctctacctccctcgcatatcctgctcctctgtaaccactgtactaaaactagcctgtacctgtactgtgctgacattatatacagccccttctctttgcttcttgctcgtgccaattggcagttgccattgccaatcaccacgtagagctgcattattgcttgcttcgaggccatgggaactgcaagagttcgcttcgtggtccttgttctgatctctacgtttctcagagtcagagaaggcagagccgcgacattcacgttcgtgaaccggtgcacggggacggtgtggccgggcatccagtccaacgccggaagctcgaggctggacacgacgggcttcgtgctgccgccgggcacgtcgcgcgcggtcccggcgccgtcggggtggtccggccgcgtctgggcccgcaccggctgcgggcaggacggcagcggcaaggtggtgtgcgcgacgggcgactgcgggtccgggtccctggagtgcaacgggcagaacgcggcgacgcctgcgacgctggccgagttcacgctggcctccgcgggcggcaacgacttctacgacgtgagcctggtggacggctacaacctgccgatcctggtggagcccgcgggcggcgccgccaccggcgccagtgccacgacgtgcgccgcggccgggtgcacggcggacctcaacgagcggtgccccgcggagctgcgcgccgagggcggcgccgggtgccgcaccgcctgccacgccttcggcaggcccgagtactgctgcagcggcgcctacgccaaccccaacacctgccgccccaccgcctactcgcagctcttcaagtccgcctgccccaactcgtacagctacgcatacgacgaccccaccagcaccttcacctgcgccggcggccgcgactacaccatcaccttctgccccgtcgccaccccaagcgtgaaatcgtcgagtggccctggagcggcaacaacgacggcggcaccgacaggcccgacgccgacgctgccgggggcgacgccgcggtcggcaggcggcggcccggaggggcagggcgtgatgctgggcgacaactcctggctcgccagcctcgccacgggcgacgcgtcgtccgcgccggcgctccgggccttgcccctcgcgccgctcctgctcgtcggcctgctcctgcttgtgctgctatagcaccaccagcgggaaacccaggcaaccgaccgcgtcacgggcgtgtgaggcgaaagcttttgatctcggacagcctaccgaacgcgcgcgctcctgctacgtttgatgaatcatctcctagtcacggtgcaggcctgcagtgcggcggatgattttgacggctagccgaatgcgcgcacccccatccccagtcagcagctgaaggaaaaaaagtttaagtggcctactcatggatgaggtggctgcagcatggactagacacaaatactattagtgctgatggtgtatagtaccgctgccgctttaaagtagtgtacagtgcagtgcagctctgatggcgctgtccctcggcacatgggaggagatgtgcccatgccatgccatctgatctgtgcttgcggatcaatcaaatactacgtacgtgtcc

SEQ ID NO: 18009 - protein, 335 aa, Zea mays subsp. mays
  misc_feature (1)..(335): Ceres Seq. ID no. 12362369
MGTARVRFVVLVLISTFLRVREGRAATFTFVNRCTGTVWPGIQSNAGSSRLDTTGFVLPPGTSRAVPAPSGWSGRVWARTGCGQDGSGKVVCATGDCGSGSLECNGQNAATPATLAEFTLASAGGNDFYDVSLVDGYNLPILVEPAGGAATGASATTCAAAGCTADLNERCPAELRAEGGAGCRTACHAFGRPEYCCSGAYANPNTCRPTAYSQLFKSACPNSYSYAYDDPTSTFTCAGGRDYTITFCPVATPSVKSSSGPGAATTTAAPTGPTPTLPGATPRSAGGGPEGQGVMLGDNSWLASLATGDASSAPALRALPLAPLLLVGLLLLVLL

SEQ ID NO: 18010 - DNA, 1501 bp, Zea mays subsp. mays
  misc_feature (1)..(1501): Ceres Seq. ID no. 12362374
gatgatgatgaataggccgcaaccgcagcaagccggcccgctgcagctcctccgttcgctaggactaggcgtaggcggaggcggaggcgcccggcggggggccatgaagtcggccacgtcgctcctgctcggcgctgcgctcgccaccgccttcttccttctctacacctccctctgccgcgacctcggcagcgccgctgccgccgcgcccaggtcgggatcgtcgccgccgccgacgccgcggcgggagcaggagaccggcgacacggccgccgctcggcaggaggccgccacgggagagggcggggaagaacgtgtggctgcgagcagcgacggcggccgcagaggcggcggcgccaccgccgccacagcggaggagaatggtcagagcaaggaggaggagcagcggcggattgtgatgcctgccacgtcaacaacccacgaggccacctcccaccatagaccgcagccgaagcaacagaagaagaagaggagcccaccagcagcgtcccaggatctggcggacctgctccggcgagcggcgacggcggacaagacggtgctgatgacggcgatcaacgaggcgtgggcagcgccagggtcgttcctggacctgttcctggagagcttccgccagggcgaggacaccgcgggcctgccgcggcacctgctggtcgtggccatggacggcagggccctggagcggtgcaacgccgtgcaccccttctgctacctgttccgcgtcgacggcatggacttcgccgccgagcagaagtacatggagggcgactacctggagatgatgtggcgccggaaccggttccagcagagcgtgctggagctgggctacagcttcctcttcacggacgtggacatcctgtggttccggagcccgttcccgcgcctgccccgcgccgcgcaggtcgtcatgtcggccgacttcttcgtcggcgacgccgactcgcccaacaactaccccaacggcggcctcctctacgtccgctcctcgcccgccacggtgggcttctaccgccactggcaggcgtcgcgcgcgaggttcccgggccaccacgagcagtacgtcttcgacaagatcgtcaaggaagggtacggccggcgcccgggtgcagttcctggacacggccgtcttcgggggtttctgccagcacggcgacgacctgggcagggtggccaccatgcacgccaactgctgcgtggggctggacaacaagctcttcgacctcaagaacgtgctgcaggactggaagacctacagagcacgcgccgccgccggcaacgcgcagggtttctcgtggcgggtgcccggaaaatgcatacactgactctagactctggaggggttgagctcatttttcgattgttcgccagatagtacaacttaacagctacatctcatttttccccctaatgtatacatacatatattgtttatatatatatatttgtaaagctttttatggaatgtaaaaaaattattatt

SEQ ID NO: 18011 - protein, 463 aa, Zea mays subsp. mays
  misc_feature (1)..(463): Ceres Seq. ID no. 12362375
MMMNRPQPQQAGPLQLLRSLGLGVGGGGGARRGAMKSATSLLLGAALATAFFLLYTSLCRDLGSAAAAAPRSGSSPPPTPRREQETGDTAAARQEAATGEGGEERVAASSDGGRRGGGATAATAEENGQSKEEEQRRIVMPATSTTHEATSHHRPQPKQQKKKRSPPAASQDLADLLRRAATADKTVLMTAINEAWAAPGSFLDLFLESFRQGEDTAGLPRHLLVVAMDGRALERCNAVHPFCYLFRVDGMDFAAEQKYMEGDYLEMMWRRNRFQQSVLELGYSFLFTDVDILWFRSPFPRLPRAAQVVMSADFFVGDADSPNNYPNGGLLYVRSSPATVGFYRHWQASRARFPGHHEQYVFDKIVKEGYGRRPGAVPGHGRLRGFLPARRRPGQGGHHARQLLRGAGQQALRPQERAAGLEDLQSTRRRRQRAGFLVAGARKMHTLTLDSGGVELIFRLFAR

SEQ ID NO: 18012 - protein, 462 aa, Zea mays subsp. mays
  misc_feature (1)..(462): Ceres Seq. ID no. 12362376
MMNRPQPQQAGPLQLLRSLGLGVGGGGGARRGAMKSATSLLLGAALATAFFLLYTSLCRDLGSAAAAAPRSGSSPPPTPRREQETGDTAAARQEAATGEGGEERVAASSDGGRRGGGATAATAEENGQSKEEEQRRIVMPATSTTHEATSHHRPQPKQQKKKRSPPAASQDLADLLRRAATADKTVLMTAINEAWAAPGSFLDLFLESFRQGEDTAGLPRHLLVVAMDGRALERCNAVHPFCYLFRVDGMDFAAEQKYMEGDYLEMMWRRNRFQQSVLELGYSFLFTDVDILWFRSPFPRLPRAAQVVMSADFFVGDADSPNNYPNGGLLYVRSSPATVGFYRHWQASRARFPGHHEQYVFDKIVKEGYGRRPGAVPGHGRLRGFLPARRRPGQGGHHARQLLRGAGQQALRPQERAAGLEDLQSTRRRRQRAGFLVAGARKMHTLTLDSGGVELIFRLFAR

SEQ ID NO: 18013 - protein, 461 aa, Zea mays subsp. mays
  misc_feature (1)..(461): Ceres Seq. ID no. 12362377
MNRPQPQQAGPLQLLRSLGLGVGGGGGARRGAMKSATSLLLGAALATAFFLLYTSLCRDLGSAAAAAPRSGSSPPPTPRREQETGDTAAARQEAATGEGGEERVAASSDGGRRGGGATAATAEENGQSKEEEQRRIVMPATSTTHEATSHHRPQPKQQKKKRSPPAASQDLADLLRRAATADKTVLMTAINEAWAAPGSFLDLFLESFRQGEDTAGLPRHLLVVAMDGRALERCNAVHPFCYLFRVDGMDFAAEQKYMEGDYLEMMWRRNRFQQSVLELGYSFLFTDVDILWFRSPFPRLPRAAQVVMSADFFVGDADSPNNYPNGGLLYVRSSPATVGFYRHWQASRARFPGHHEQYVFDKIVKEGYGRRPGAVPGHGRLRGFLPARRRPGQGGHHARQLLRGAGQQALRPQERAAGLEDLQSTRRRRQRAGFLVAGARKMHTLTLDSGGVELIFRLFAR

SEQ ID NO: 18014 - DNA, 1804 bp, Zea mays subsp. mays
  misc_feature (1)..(1804): Ceres Seq. ID no. 12362385
aattcgggctgggcttgttggcctcgcctcggttggtgccctctctgccgccgcggaggagagtcgccgccaccaccaccatccagccagccaaggcttcccttccccagcagcagtctccagccgcagccatggccaagccaccgccgcccacctccacctccgaccccgcgctccccaccactgctacaaccacctcgtcggcccccaagtcgtcgtctcgcccctccccccgcccccggggcctcctcgatccgctcgcagcctccgcgcgctccctcctcgcctcggcgcgccgctccccggtcaccacgctagccgccgccttcttcctcctcgcgctcgtcatgtacggcgaggacgcccgcaccatcgccgagctctccatcgacgactacctctacccggacgccgacctctacaacgtctccggcctgccgcccctcgcgctgcccccgctcacctgcgacctctcccgcggcagatgggtcttcgacaacgtctccgttccggcgtaccgggagaaagactgcaccttcctcaccaagcaggtctcctgcctcgccaacggccgccccgacgacatgtggcagtactggagatggcagcccaacgagtgctccctccccacgttcgacgctcggagattcatggaggcgatgcgcgggaagcggctcatgttcgtgggggactcgctgaaccgcaaccagtgggagtcgctggtgtgcctcgtgcagcccatcctgtctaagggcaggaagaagatcgtcaagcggggctccttcaacaccttctacgctaaggagtaccgcgccacgctcgagttctactgggcgcccttcctcgtcgaatccaactctgacaaccccaacttccacagcatcaaggaacggatcatcagtcccgagcggatcgaggcgcacgccaagcactggaaggatgctgactacctcatcttcaacacctacatctggtggatgaacaacgccgacatcaaagtcaggagacccaattcgaggtactggtctgacaacgatgaggttcccaggattgaggcgtatggccgtgtgttcaagacatggtctgattggctcaatgacaacatcgatcctgcccgaacgtccgtcttcttcatgacgatttctcctcctcacctcagcccacagaattggggaaacccggacggtatcaaatgtgtaagagagacgcttccatatcagaactacagccaacacctggatctttaccatgacatgcggctgtatgacttagtggtcaatgtggccagctccatggagaaggtcccagtgacagtgatcaatatcacaaggatgtcagattaccggaaggacgcccacacgtccctgtacaccatccggcaagggaagctgctgacgcctaagcagaaggcagaccccgagaagttcgcggattgcatccactggtgccttcctggcgtgccggacgtgtggaaccaaatactctacacgaggattctttcgaaatcatcgtggcattctaattttagcccccctccatcccagtctctgcctcttcctccccaatgagaatcagaagtgggggcttggtttttgtcggagaatgtatgatttttcattctttttccttcctttttgggtagattgagtaaaatgatagcacgaaaaggaaaatgaatgttctgattactgatggtatagcatgtaagaagattcagctgaagtgtaaattagttgtgagttagccaattgagaaaacaacagcgacctagtataaagtgcatatacatatactgctggttcac

SEQ ID NO: 18015 - protein, 521 aa, Zea mays subsp. mays
  misc_feature (1)..(521): Ceres Seq. ID no. 12362386
FGLGLLASPRLVPSLPPRRRVAATTTIQPAKASLPQQQSPAAAMAKPPPPTSTSDPALPTTATTTSSAPKSSSRPSPRPRGLLDPLAASARSLLASARRSPVTTLAAAFFLLALVMYGEDARTIAELSIDDYLYPDADLYNVSGLPPLALPPLTCDLSRGRWVFDNVSVPAYREKDCTFLTKQVSCLANGRPDDMWQYWRWQPNECSLPTFDARRFMEAMRGKRLMFVGDSLNRNQWESLVCLVQPILSKGRKKIVKRGSFNTFYAKEYRATLEFYWAPFLVESNSDNPNFHSIKERIISPERIEAHAKHWKDADYLIFNTYIWWMNNADIKVRRPNSRYWSDNDEVPRIEAYGRVFKTWSDWLNDNIDPARTSVFFMTISPPHLSPQNWGNPDGIKCVRETLPYQNYSQHLDLYHDMRLYDLVVNVASSMEKVPVTVINITRMSDYRKDAHTSLYTIRQGKLLTPKQKADPEKFADCIHWCLPGVPDVWNQILYTRILSKSSWHSNFSPPPSQSLPLPPQ

SEQ ID NO: 18016 - protein, 478 aa, Zea mays subsp. mays
  misc_feature (1)..(478): Ceres Seq. ID no. 12362387
MAKPPPPTSTSDPALPTTATTTSSAPKSSSRPSPRPRGLLDPLAASARSLLASARRSPVTTLAAAFFLLALVMYGEDARTIAELSIDDYLYPDADLYNVSGLPPLALPPLTCDLSRGRWVFDNVSVPAYREKDCTFLTKQVSCLANGRPDDMWQYWRWQPNECSLPTFDARRFMEAMRGKRLMFVGDSLNRNQWESLVCLVQPILSKGRKKIVKRGSFNTFYAKEYRATLEFYWAPFLVESNSDNPNFHSIKERIISPERIEAHAKHWKDADYLIFNTYIWWMNNADIKVRRPNSRYWSDNDEVPRIEAYGRVFKTWSDWLNDNIDPARTSVFFMTISPPHLSPQNWGNPDGIKCVRETLPYQNYSQHLDLYHDMRLYDLVVNVASSMEKVPVTVINITRMSDYRKDAHTSLYTIRQGKLLTPKQKADPEKFADCIHWCLPGVPDVWNQILYTRILSKSSWHSNFSPPPSQSLPLPPQ

SEQ ID NO: 18017 - protein, 406 aa, Zea mays subsp. mays
  misc_feature (1)..(406): Ceres Seq. ID no. 12362388
MYGEDARTIAELSIDDYLYPDADLYNVSGLPPLALPPLTCDLSRGRWVFDNVSVPAYREKDCTFLTKQVSCLANGRPDDMWQYWRWQPNECSLPTFDARRFMEAMRGKRLMFVGDSLNRNQWESLVCLVQPILSKGRKKIVKRGSFNTFYAKEYRATLEFYWAPFLVESNSDNPNFHSIKERIISPERIEAHAKHWKDADYLIFNTYIWWMNNADIKVRRPNSRYWSDNDEVPRIEAYGRVFKTWSDWLNDNIDPARTSVFFMTISPPHLSPQNWGNPDGIKCVRETLPYQNYSQHLDLYHDMRLYDLVVNVASSMEKVPVTVINITRMSDYRKDAHTSLYTIRQGKLLTPKQKADPEKFADCIHWCLPGVPDVWNQILYTRILSKSSWHSNFSPPPSQSLPLPPQ

SEQ ID NO: 18018 - DNA, 2041 bp, Zea mays subsp. mays
  misc_feature (1)..(2041): Ceres Seq. ID no. 12362393
gcacgagaccattacctagaacatcctaatcaaaaagctgtctaccctcaccaactcctacctcccgagacaaattccgaggtcgacacaagaaaagggaaagaaccacaggtaattgccttcctgtgtcgggattgtagctccaatccactccgcgccggccgggtgcgctgccatccggatcagacgccctcgcatctctcgcccttccggcatcgtatcccctgggcggcagcggagtaaagatccgacccgcttgggattgtttgcttctcctttttgcggtgcgccgctggactccagtgctgcacatgctcgacgacggtgctgagctcctgcaatggcccgaagaaatgccggcgcaatgcagcgggagggttcggcggggtcggttaaggactggtcggaattcgacccttcgccgtctcccaagctggcgtactcgcagtcctacgtcgccatgagagggctgttgacgtcggtggcttctctggaccctgtcctgacgtcgagcagcctcaagtctctgtgggcagccttgtcatcgcacaggcacgctcggtccttggagaggccaaagtacaaggggatgaactggaagaggcccatgttccacctgcttgtgtgcttcttagtgggagttttcattggattcacaccactcttctctctcgatttatccagtaacatagattctgaaaacgagacgcttccgtttgacggggatgtggttaacagacagatgctggaacttaaaagtacaaggttggagccgattgtggctgcggcagagactgaagccgcccaagaacaacaggttgatgagagtcctccagttcctgcgatgctggatgatgaggcggacttcattgaagcgtcacatgtccaaccttctgttaatgattctgacattggtgcaaagaagcagctgataattgtgacaacaacttctgttcgaccacatcaggcttattacttgaaccgcctggctcatgttttaaaaaatgtaccacctcctcttctgtggattgtggcggaatggccgtatcagtcccgtgaaacagcggagatcctgaggtcttctggggttatgtacagacatcttatctgcaatcggaacagtacaaatataaggaagattattgtctgccaaaagaacaatgcaatttttcatatcaagaagcaccgtttagatggtatagtacattttgctgatgaggagcgagtgtactcagttgatttatttgaagacatgcgaaaaatcaggcgctttggtacgtggccagtagcgacacatgttggagccaggtacaaggtggttttggaagggcctgtctgtaggggtaatcaagtcactggatggcatacaaacaagagagggggtgtacctcgtcggtttccaattggtttctctggttttgcttttaacagcactatactttgggatccccagaggtggaacagccccactttagagtctattatactccattcaggtggcagaggtggcttgcaggagtcaagattcatcgagaagcttgtcgaggacgagactcagatggaaggcctcgcagacaactgcactcgggttatggtctggaatttggacttggaacctccacagctgaattaccctactagctggcagctgcagaagaacctagacatcgtcgtgccaataacataaaccgcgatgctgctgctgccctttttgttcgcgcctcctagtgagtgtggtggaatgatgacgacaatgcccatgccttcctgaacttggtagcgtccaggatcacgcgaagctgctctgccaagacctggttcgaataatgtggtactagtaacaacagttggaaagcgaagaagcctgcctgacaaaaggaaaaattctttctccccccgttgcgctgcattaccaatgatcctcaacatagataggcttgtatatttcttttccttccatttttcgattattcctgttcgttacatataccatgcatacatacatacatacataaatacatatacaccttcattcattcat

SEQ ID NO: 18019 - protein, 448 aa, Zea mays subsp. mays
  misc_feature (1)..(448): Ceres Seq. ID no. 12362394
MARRNAGAMQREGSAGSVKDWSEFDPSPSPKLAYSQSYVAMRGLLTSVASLDPVLTSSSLKSLWAALSSHRHARSLERPKYKGMNWKRPMFHLLVCFLVGVFIGFTPLFSLDLSSNIDSENETLPFDGDVVNRQMLELKSTRLEPIVAAAETEAAQEQQVDESPPVPAMLDDEADFIEASHVQPSVNDSDIGAKKQLIIVTTTSVRPHQAYYLNRLAHVLKNVPPPLLWIVAEWPYQSRETAEILRSSGVMYRHLICNRNSTNIRKIIVCQKNNAIFHIKKHRLDGIVHFADEERVYSVDLFEDMRKIRRFGTWPVATHVGARYKVVLEGPVCRGNQVTGWHTNKRGGVPRRFPIGFSGFAFNSTILWDPQRWNSPTLESIILHSGGRGGLQESRFIEKLVEDETQMEGLADNCTRVMVWNLDLEPPQLNYPTSWQLQKNLDIVVPIT

SEQ ID NO: 18020 - protein, 440 aa, Zea mays subsp. mays
  misc_feature (1)..(440): Ceres Seq. ID no. 12362395
MQREGSAGSVKDWSEFDPSPSPKLAYSQSYVAMRGLLTSVASLDPVLTSSSLKSLWAALSSHRHARSLERPKYKGMNWKRPMFHLLVCFLVGVFIGFTPLFSLDLSSNIDSENETLPFDGDVVNRQMLELKSTRLEPIVAAAETEAAQEQQVDESPPVPAMLDDEADFIEASHVQPSVNDSDIGAKKQLIIVTTTSVRPHQAYYLNRLAHVLKNVPPPLLWIVAEWPYQSRETAEILRSSGVMYRHLICNRNSTNIRKIIVCQKNNAIFHIKKHRLDGIVHFADEERVYSVDLFEDMRKIRRFGTWPVATHVGARYKVVLEGPVCRGNQVTGWHTNKRGGVPRRFPIGFSGFAFNSTILWDPQRWNSPTLESIILHSGGRGGLQESRFIEKLVEDETQMEGLADNCTRVMVWNLDLEPPQLNYPTSWQLQKNLDIVVPIT

SEQ ID NO: 18021 - protein, 408 aa, Zea mays subsp. mays
  misc_feature (1)..(408): Ceres Seq. ID no. 12362396
MRGLLTSVASLDPVLTSSSLKSLWAALSSHRHARSLERPKYKGMNWKRPMFHLLVCFLVGVFIGFTPLFSLDLSSNIDSENETLPFDGDVVNRQMLELKSTRLEPIVAAAETEAAQEQQVDESPPVPAMLDDEADFIEASHVQPSVNDSDIGAKKQLIIVTTTSVRPHQAYYLNRLAHVLKNVPPPLLWIVAEWPYQSRETAEILRSSGVMYRHLICNRNSTNIRKIIVCQKNNAIFHIKKHRLDGIVHFADEERVYSVDLFEDMRKIRRFGTWPVATHVGARYKVVLEGPVCRGNQVTGWHTNKRGGVPRRFPIGFSGFAFNSTILWDPQRWNSPTLESIILHSGGRGGLQESRFIEKLVEDETQMEGLADNCTRVMVWNLDLEPPQLNYPTSWQLQKNLDIVVPIT

SEQ ID NO: 18022 - DNA, 993 bp, Zea mays subsp. mays
  misc_feature (1)..(993): Ceres Seq. ID no. 12362418
attgatttagaaccgctcgcgatacggctgaagaatttggggacgcttacgccgtgcgcgcacgcgtccaagtcgccgtcatgacgccattgcctgccgtgccgtggcccgagatgtttcctacggccgggatcacaggtgtcgcgcgcaggccggaaaagggcaggcccccaaggactctgcgccggcaccgcgccaacaaaccccgtggctctggcgtgcggacggccggccggacgtgccgtcgagtcgaagcggcagcgctcgtctcgacccgtcgtcgaccccccgtgccgcagccagatcggcctgatgagttggaaagggtagaatcagcaggtggcagggtcattaactggatggggtaccgtgtcctgggtgtgcttgcgacatcaaggtcaattggtgactattacatgaagccattcatatcagcggaaccagaggtgactgtcacagagcgcacgcacagggacgagttcatcatcctggcgagcgacgggctgtgggacgtcatgtccaacgaggtggcctgcagggtcgcgaagagctgtctgtgcgggcgcgcggcttccaagtgccctgacaccatccgcgggagctcggccagtgatgccgccgcggtgctggtggagttcgccatgtcgcggggcagcactgacaacatcagcgtcgtggtggtggagctgaaacgtctgaagaggtggaagggtggcagtagacagaacggtcggacgtagcctggccctgtaggagtctccggctcgtcgcgaaatatatgcatggcgacggagctctagggaagcagccgagcatatgacggaatggtgtaaaaagaagaagaagaagaagaagagagggttctgactcttgagagctatacctatgctgtgaccaggtgagtgtaggagctgctcgtagctttgccgttgtattgcgttggttacttggttctttagttcaatcaatactaacaaaatggcgttccgggcc

SEQ ID NO: 18023 - protein, 219 aa, Zea mays subsp. mays
  misc_feature (1)..(219): Ceres Seq. ID no. 12362419
MTPLPAVPWPEMFPTAGITGVARRPEKGRPPRTLRRHRANKPRGSGVRTAGRTCRRVEAAALVSTRRRPPVPQPDRPDELERVESAGGRVINWMGYRVLGVLATSRSIGDYYMKPFISAEPEVTVTERTHRDEFIILASDGLWDVMSNEVACRVAKSCLCGRAASKCPDTIRGSSASDAAAVLVEFAMSRGSTDNISVVVVELKRLKRWKGGSRQNGRT

SEQ ID NO: 18024 - protein, 208 aa, Zea mays subsp. mays
  misc_feature (1)..(208): Ceres Seq. ID no. 12362420
MFPTAGITGVARRPEKGRPPRTLRRHRANKPRGSGVRTAGRTCRRVEAAALVSTRRRPPVPQPDRPDELERVESAGGRVINWMGYRVLGVLATSRSIGDYYMKPFISAEPEVTVTERTHRDEFIILASDGLWDVMSNEVACRVAKSCLCGRAASKCPDTIRGSSASDAAAVLVEFAMSRGSTDNISVVVVELKRLKRWKGGSRQNGRT

SEQ ID NO: 18025 - protein, 126 aa, Zea mays subsp. mays
  misc_feature (1)..(126): Ceres Seq. ID no. 12362421
MGYRVLGVLATSRSIGDYYMKPFISAEPEVTVTERTHRDEFIILASDGLWDVMSNEVACRVAKSCLCGRAASKCPDTIRGSSASDAAAVLVEFAMSRGSTDNISVVVVELKRLKRWKGGSRQNGRT

SEQ ID NO: 18026 - DNA, 2010 bp, Zea mays subsp. mays
  misc_feature (1)..(2010): Ceres Seq. ID no. 12362438
actcaccacccccggccgagcgaattgaagaagctccccctctgaactgaagcaatggcaggcggcaatgccggtggcgccgctcgagtcctgttctccatcctcggcctggcgctggcgctgccgctgctcgtggccggcgacgacccgtaccggttcttcacgtggacggtgacctacggcgacatctacccgctgggcgtcaagcagcaggggatcctgatcaacaaccagttcccggggccgcagatcgaggccgtcaccaacgacaacctcatcatcaacgtcttcaacaagctcaacgagccgttcctcctctcctggagcgggctccagcagcggcggaactcgttcgaggacggcgtggccgggacgacgtgcccgatcccgccgggctccaacttcacctacatcatgcaggccaaggaccagatcggcacctactactacttcccatcgctggccttccacaaggccgccggcgggttcggcggcatccgcgtgctcagccgcccgcagatccccgtcccgttcccgccgccggccgccgactacaccgtcctcatcggcgactggtacaaggccaaccacaccgacttgcggtacgtgctcgacagcggcgtggcgctcgggttccctgacgggctgctcatcaacggctggggcctgaatggctacaccttcaacgttcagcccggccggacgtaccggttccggatcaccaacgtggggctggccacgtccctcaacatccggttccaggggcacaccatgaagctggtggaggtggagggctcgcacaccatgcagaccacctactcgtccctggacgtgcacctgggccagtcctactccgtgctgctcaccgccgaccagccgggctacgactacgccgtcgtcgtctccacgcgcttcacgagccggatcatctccaccacggcggtcctgcgctacgccaactccgccggcagggcgccgggtcccctccccggtggccccaccatccagatcgactggtcgctcaaccaggcccgctcggtccggtggaacctgacggccagcgggccgcggcccaacccgcaggggtcgtaccactacggcctggtgccggtgacctggaccatccgcctggccaactcggcggcgaccatcggcgggaagcggcgctacgcggtgaacggcgcgtcgtacgtgggccccgacaccccgctcaaggtcgcagactactacaagatcggcggcgtcttctccgtgggcaccatcgccgacagcccccccgcctacggcggcgccgcctacctgcggacgtcggtcatgggcgccagctacagggactacgtcgaggtcgtgttcgagaacggcgaggacgaggtgcagtcgtggcacatcgacggatacgccttctgggtcgtcgggatggatggagggaaatggtcgtcggcaagcaggcagggctacaacctgagggacggcgtttcgcggtacactgttcaggtgtaccccagatcgtggacggcgatttacatgcccctggacaacgtgggcatgtggaacgtccggtcggagaactgggccaggcagtacctggggcagcagttctacctccgcgtctggacgccgtccacgtcgttgcgcgacgagtaccccatccccaagaacgcgctcctgtgcggccgggcggccggacgccggaccaggccgctgtgagagtgacactgccgccggatcattcacagcttttgtcatgagaggatgacacactattggtttggtctttggagaagagcaggaacatacacaagtttatataccctcaactgaagggaggttcagaggaacgaaagtgttgcttgccgattttttttcattttagtttttttttccctttaaagtttcatatttacgtctctgctgaactaaaaccgtgttggaatttctgggtcaacactataacttatactccctccgtcccaacatagtatttgttttagagtgttaacggattcatgc

SEQ ID NO: 18027 - protein, 550 aa, Zea mays subsp. mays
  misc_feature (1)..(550): Ceres Seq. ID no. 12362439
MAGGNAGGAARVLFSILGLALALPLLVAGDDPYRFFTWTVTYGDIYPLGVKQQGILINNQFPGPQIEAVTNDNLIINVFNKLNEPFLLSWSGLQQRRNSFEDGVAGTTCPIPPGSNFTYIMQAKDQIGTYYYFPSLAFHKAAGGFGGIRVLSRPQIPVPFPPPAADYTVLIGDWYKANHTDLRYVLDSGVALGFPDGLLINGWGLNGYTFNVQPGRTYRFRITNVGLATSLNIRFQGHTMKLVEVEGSHTMQTTYSSLDVHLGQSYSVLLTADQPGYDYAVVVSTRFTSRIISTTAVLRYANSAGRAPGPLPGGPTIQIDWSLNQARSVRWNLTASGPRPNPQGSYHYGLVPVTWTIRLANSAATIGGKRRYAVNGASYVGPDTPLKVADYYKIGGVFSVGTIADSPPAYGGAAYLRTSVMGASYRDYVEVVFENGEDEVQSWHIDGYAFWVVGMDGGKWSSASRQGYNLRDGVSRYTVQVYPRSWTAIYMPLDNVGMWNVRSENWARQYLGQQFYLRVWTPSTSLRDEYPIPKNALLCGRAAGRRTRPL

SEQ ID NO: 18028 - protein, 430 aa, Zea mays subsp. mays
  misc_feature (1)..(430): Ceres Seq. ID no. 12362440
MQAKDQIGTYYYFPSLAFHKAAGGFGGIRVLSRPQIPVPFPPPAADYTVLIGDWYKANHTDLRYVLDSGVALGFPDGLLINGWGLNGYTFNVQPGRTYRFRITNVGLATSLNIRFQGHTMKLVEVEGSHTMQTTYSSLDVHLGQSYSVLLTADQPGYDYAVVVSTRFTSRIISTTAVLRYANSAGRAPGPLPGGPTIQIDWSLNQARSVRWNLTASGPRPNPQGSYHYGLVPVTWTIRLANSAATIGGKRRYAVNGASYVGPDTPLKVADYYKIGGVFSVGTIADSPPAYGGAAYLRTSVMGASYRDYVEVVFENGEDEVQSWHIDGYAFWVVGMDGGKWSSASRQGYNLRDGVSRYTVQVYPRSWTAIYMPLDNVGMWNVRSENWARQYLGQQFYLRVWTPSTSLRDEYPIPKNALLCGRAAGRRTRPL

SEQ ID NO: 18029 - protein, 311 aa, Zea mays subsp. mays
  misc_feature (1)..(311): Ceres Seq. ID no. 12362441
MKLVEVEGSHTMQTTYSSLDVHLGQSYSVLLTADQPGYDYAVVVSTRFTSRIISTTAVLRYANSAGRAPGPLPGGPTIQIDWSLNQARSVRWNLTASGPRPNPQGSYHYGLVPVTWTIRLANSAATIGGKRRYAVNGASYVGPDTPLKVADYYKIGGVFSVGTIADSPPAYGGAAYLRTSVMGASYRDYVEVVFENGEDEVQSWHIDGYAFWVVGMDGGKWSSASRQGYNLRDGVSRYTVQVYPRSWTAIYMPLDNVGMWNVRSENWARQYLGQQFYLRVWTPSTSLRDEYPIPKNALLCGRAAGRRTRPL

SEQ ID NO: 18030 - DNA, 2410 bp, Zea mays subsp. mays
  misc_feature (1)..(2410): Ceres Seq. ID no. 12362462
gcacgagaccattacctagaacatcctaatcaaaaagtggcgcccgtgcgctagccactaggcggggcgcacgccgcctgtcacgtgggcgatatttttcctggccctcggcggtcggcgcgctgcgtcgccgcttgcttcctcctctacttgagtgccgagtcctccgcgctctgcagtcccccgacccggagccaaagccaacaaacagccgctccgccttcttccgcggctgcagccagcgcgaggtcatcattgaatggctgcaacgatgggttcaatatctgccaatggttcttaccaaacaaataggcccagtgcactaaagcaggcacctcacatgcaattccaacaatgttgcaacggtggacttaggttcttaagcaagcattcccaatccacgcgaagtaagatacaggtggctaaaagaagagctacagataatggaattcatccaaagactacgggacatcgggcacctattgtatgttctgctgggatgactattgtatttgttgcaactgaagtgcacccatggtgcaaaactggtggcctcggtgatgttgtaggaggactgcccccagctttggctgctatgggacaccgtgtcatgacaatagctcctcgttatgatcaatacaaggatgcatgggatacaagtgtccttgttgaggtaaatattggtgacacggtagaaactgttcgcttcttccactgctacaaaagaggagttgatcgtgtttttgttgatcatcctatgtttcttgaaaaggtatggggcaagactggagcaaaattgtatggtcctactactggaactgactatcgagataaccagttgaggttctgccttttgtgccttgctgctttggaggctccaagagttctcaatttcaacaattctgaatatttctctggaccatatggggaagatgttgtcttcgtagccaatgattggcacactgctattttgccatgttatttgaagagcatgtataagccaaatggaatttataaaaatgctaaggttgctttctgcatacataatattgcctatcaaggtagatttgcccgagcagacttcgatcttcttaatctacctgacagtttcttgccatcatttgattttattgatggacatgttaagccttttctagggagaaagcttaactggatgaaggcagggatcattgagagtgatctggttctaacagtcagtccacattatgtcaaggaactcacatctggcccagataagggtgttgagttggatggtgtccttcgcacaaagcctctagaaattggaatcgttaatggcatggatgtttatgaatgggatccttcaacagataagtacatcagcgtgaaatatgatgcaacaacggtaactgaagcaagggctctcaataaagagagtttgcaagcagaagtcggattgcctgtggactcgagcatccctgttatagttttcgtcgggcgtctcgaagaacagaaagggtccgacatactcattgcagccattccagagttcgtgggcgagaatgtccagataatcgttcttggcacgggaaagaagaagatggaggaggaactaacgcagctggaagtgaaatatccaaacaacgctagaggcatagcgaaattcaatgttccattggcacacatgatgtttgccggggctgacttcattatcgtcccaagcaggtttgagccatgtggtctcattcagctgcaagggatgagatatggagtgattcctatctgttcatccactggaggacttgtcgacacggttgaggagggcgtcaccggattccacatgggttctttcaatgtcgagtgtgaaactgtagacccagccgacgtgacagcagtggcgtcaaccgtcacgcgagccctgaagcagtacgacaccccggcattccatgagatggttcagaactgcatggcgaaagacctgtcctggaaggggcctgcgaagaagtgggaggaggtgcttctgggccttggagtcgaggggagtcgagctggcatcgacgacgcagaggagatcgccccacttgccaaggaaaacgtagccactccgtgagggcttggtggtgcctcgactcggaaacacgcgttggtgataggaagcgtcttctaggatcctcctgggcggccttgtggctggtggagtgaggtgtccagtcagacacggtttcgcctctactactagtctactactactacctcattgtaatataatccttggcattctaaaaaatgccatgcctgctctaattcttctgttcttgcgcaacatacacttcccgcttccgttcggtcgacaacggttatgtaaatatagcgaatgctagcgggcagctcgaatcatcccaagtggtagggtcacgatggagttgtttgg

SEQ ID NO: 18031 - protein, 609 aa, Zea mays subsp. mays
  misc_feature (1)..(609): Ceres Seq. ID no. 12362463
MAATMGSISANGSYQTNRPSALKQAPHMQFQQCCNGGLRFLSKHSQSTRSKIQVAKRRATDNGIHPKTTGHRAPIVCSAGMTIVFVATEVHPWCKTGGLGDVVGGLPPALAAMGHRVMTIAPRYDQYKDAWDTSVLVEVNIGDTVETVRFFHCYKRGVDRVFVDHPMFLEKVWGKTGAKLYGPTTGTDYRDNQLRFCLLCLAALEAPRVLNFNNSEYFSGPYGEDVVFVANDWHTAILPCYLKSMYKPNGIYKNAKVAFCIHNIAYQGRFARADFDLLNLPDSFLPSFDFIDGHVKPFLGRKLNWMKAGIIESDLVLTVSPHYVKELTSGPDKGVELDGVLRTKPLEIGIVNGMDVYEWDPSTDKYISVKYDATTVTEARALNKESLQAEVGLPVDSSIPVIVFVGRLEEQKGSDILIAAIPEFVGENVQIIVLGTGKKKMEEELTQLEVKYPNNARGIAKFNVPLAHMMFAGADFIIVPSRFEPCGLIQLQGMRYGVIPICSSTGGLVDTVEEGVTGFHMGSFNVECETVDPADVTAVASTVTRALKQYDTPAFHEMVQNCMAKDLSWKGPAKKWEEVLLGLGVEGSRAGIDDAEEIAPLAKENVATP

SEQ ID NO: 18032 - protein, 605 aa, Zea mays subsp. mays
  misc_feature (1)..(605): Ceres Seq. ID no. 12362464
MGSISANGSYQTNRPSALKQAPHMQFQQCCNGGLRFLSKHSQSTRSKIQVAKRRATDNGIHPKTTGHRAPIVCSAGMTIVFVATEVHPWCKTGGLGDVVGGLPPALAAMGHRVMTIAPRYDQYKDAWDTSVLVEVNIGDTVETVRFFHCYKRGVDRVFVDHPMFLEKVWGKTGAKLYGPTTGTDYRDNQLRFCLLCLAALEAPRVLNFNNSEYFSGPYGEDVVFVANDWHTAILPCYLKSMYKPNGIYKNAKVAFCIHNIAYQGRFARADFDLLNLPDSFLPSFDFIDGHVKPFLGRKLNWMKAGIIESDLVLTVSPHYVKELTSGPDKGVELDGVLRTKPLEIGIVNGMDVYEWDPSTDKYISVKYDATTVTEARALNKESLQAEVGLPVDSSIPVIVFVGRLEEQKGSDILIAAIPEFVGENVQIIVLGTGKKKMEEELTQLEVKYPNNARGIAKFNVPLAHMMFAGADFIIVPSRFEPCGLIQLQGMRYGVIPICSSTGGLVDTVEEGVTGFHMGSFNVECETVDPADVTAVASTVTRALKQYDTPAFHEMVQNCMAKDLSWKGPAKKWEEVLLGLGVEGSRAGIDDAEEIAPLAKENVATP

SEQ ID NO: 18033 - protein, 582 aa, Zea mays subsp. mays
  misc_feature (1)..(582): Ceres Seq. ID no. 12362465
MQFQQCCNGGLRFLSKHSQSTRSKIQVAKRRATDNGIHPKTTGHRAPIVCSAGMTIVFVATEVHPWCKTGGLGDVVGGLPPALAAMGHRVMTIAPRYDQYKDAWDTSVLVEVNIGDTVETVRFFHCYKRGVDRVFVDHPMFLEKVWGKTGAKLYGPTTGTDYRDNQLRFCLLCLAALEAPRVLNFNNSEYFSGPYGEDVVFVANDWHTAILPCYLKSMYKPNGIYKNAKVAFCIHNIAYQGRFARADFDLLNLPDSFLPSFDFIDGHVKPFLGRKLNWMKAGIIESDLVLTVSPHYVKELTSGPDKGVELDGVLRTKPLEIGIVNGMDVYEWDPSTDKYISVKYDATTVTEARALNKESLQAEVGLPVDSSIPVIVFVGRLEEQKGSDILIAAIPEFVGENVQIIVLGTGKKKMEEELTQLEVKYPNNARGIAKFNVPLAHMMFAGADFIIVPSRFEPCGLIQLQGMRYGVIPICSSTGGLVDTVEEGVTGFHMGSFNVECETVDPADVTAVASTVTRALKQYDTPAFHEMVQNCMAKDLSWKGPAKKWEEVLLGLGVEGSRAGIDDAEEIAPLAKENVATP

SEQ ID NO: 18034 - DNA, 2752 bp, Zea mays subsp. mays
  misc_feature (1)..(2752): Ceres Seq. ID no. 12362466
gcacgagaccattacctagaacatcctaatcgaaaactcgtctcgtcacacactccactcgaacgcactacttgatcggccaaagccaaacgaactgggctccctcccctccacttcctctccccatggcgcagaagctcccctgcgtctcgtcgccgcgcccgctgctcgccgtgcccgcgggccggtggcgcgccggcgtgcggggccggcccaatgtggcgggactggggcgggggcggttgtctctccacgccgccgccgcgcggcccgtggccgaggcggtgcaggcggaggaggacgacgacgacgacgacgaggaggtggccgaggagaggttcgcgctgggcggcgcgtgccgggtgctcgcgggaatgcccgcgccgctcggcgccaccgcgctccgcggcggtgtcaacttcgccgtctactccagcggtgcctccgccgcgtcgctgagcctcttcgctcccggcgacctcaaggcggatagggtgaccgaggaggtgcccctcgatcccctgctcaaccgaacgggaaacgtgtggcacgtgttcatccacggggacgagctgcacggcatgctctgcggatacaggttcgatggcgtgttcgcccctgagcgcggacagtactacgatgtgtccaacgttgtggtggatccatacgctaaggcagtggtaagccgaggtgaatatggtgtgcctgcgcctggtggtagttgttggcctcaaatggctggtatgatccctcttccctataataagtttgattggcaaggtgacctaccccttgggtaccatcagaaggaccttgtcatatatgaaatgcatttgcgtggattcacaaagcacaactcaagcaagacaaaacacccaggaacttacattggtgctgtgtcaaagcttgaccatctaaaggaacttggagtgaactgtatagagctaatgccctgccatgagttcaatgagctagagtacttcagctcctcttcgaagatgaacttctggggatattccacaataaattttttctcaccaatggcaagatattcttcaagtggcataagagactctggatgtggtgccataaatgaatttaaagcttttgtaagggaggcccacaaacggggaattgaggtgatcatggatgttgtcttcaatcatacagctgaaggtaatgagaaaggcccaatattatcctttagggggatagataatagtacatactacatgcttgcacctaagggagagttttataattattctggttgtggaaataccttcaattgtaatcatcctgtagtccgtgaatttatagtggattgcttgagatactgggtaacagaaatgcatgttgatggttttcgttttgaccttgcatctatactgaccagaggatgcagtctatgggatccagttaatgtgtatggaagtccaatggaaggtgacatgattacgacagggacacctcttgttgccccaccacttattgacatgattagcaatgacccaattcttggaaatgtcaagctcattgctgaagcatgggatgcaggaggtctctatcaagaaggtcagtttcctcactggaacgtttggtcagagtggaatggaaagtatcgcgataccgtgcgtcagttcatcaaaggcacagatggatttgctggtgcttttgctgaatgcctatgtggaagtccacagttataccaggcaggggggaggaagccttggcacagtatcggctttgtatgtgcacacgatggatttacactggctgatttggtcacatacaatagcaagtacaacttgtcaaatggtgaggacttcagagatggggaaaatcataatcttagctggaattgtggggaggaaggagaatttgcaagtctgtcagtccgaagattaaggaagaggcaaatgcgcaatttctttgtttgtcttatggtttctcagggagttccaatgttctacatgggcgatgaatatggtcacacaaagggagggaacaacaatacgtactgccatgaccattatgtcaattatttccgttgggataagaaggaagaacaatcctctgatttgtacagattctgccgtctcatgaccgaattccgcaaagaatgtgaatctcttggccttgaggacttcccgacttcagaacggttgaaatggcacggtcatcagcccgggaagcctgactggtcagaggcaagccgattcgttgccttcaccatgaaggacgaaaccaaaggcgagatctacgtggccttcaacaccagtcaccttccggtggttgttgggcttccagagcgctctgggttccgatgggagccggtggtggacaccggcaaggaggcaccatatgacttcctcaccgatggcctgccagatcgtgctgtcaccgtctaccagttctctcatttcctcaactccaatctctatcctatgctcagctactcctccatcatccttgtattgcgccctgatgtctgaaagaagcagatacaatagagtatactatagcggttgttctctaggctgtagcatgcagtggaaactggaaaatgttggggttgctctgttgtcggtagtttacatgcgcatgtcggtatgtgtacataaagctggtggatctcagttctcagatcggactcgagacggggaaaaccattgcccagttggctggttctctgaagttttgtttggtgtaaagaaatggtggtccatcatctactctttttttttttttt

SEQ ID NO: 18035 - protein, 789 aa, Zea mays subsp. mays
  misc_feature (1)..(789): Ceres Seq. ID no. 12362467
MAQKLPCVSSPRPLLAVPAGRWRAGVRGRPNVAGLGRGRLSLHAAAARPVAEAVQAEEDDDDDDEEVAEERFALGGACRVLAGMPAPLGATALRGGVNFAVYSSGASAASLSLFAPGDLKADRVTEEVPLDPLLNRTGNVWHVFIHGDELHGMLCGYRFDGVFAPERGQYYDVSNVVVDPYAKAVVSRGEYGVPAPGGSCWPQMAGMIPLPYNKFDWQGDLPLGYHQKDLVIYEMHLRGFTKHNSSKTKHPGTYIGAVSKLDHLKELGVNCIELMPCHEFNELEYFSSSSKMNFWGYSTINFFSPMARYSSSGIRDSGCGAINEFKAFVREAHKRGIEVIMDVVFNHTAEGNEKGPILSFRGIDNSTYYMLAPKGEFYNYSGCGNTFNCNHPVVREFIVDCLRYWVTEMHVDGFRFDLASILTRGCSLWDPVNVYGSPMEGDMITTGTPLVAPPLIDMISNDPILGNVKLIAEAWDAGGLYQEGQFPHWNVWSEWNGKYRDTVRQFIKGTDGFAGAFAECLCGSPQLYQAGGRKPWHSIGFVCAHDGFTLADLVTYNSKYNLSNGEDFRDGENHNLSWNCGEEGEFASLSVRRLRKRQMRNFFVCLMVSQGVPMFYMGDEYGHTKGGNNNTYCHDHYVNYFRWDKKEEQSSDLYRFCRLMTEFRKECESLGLEDFPTSERLKWHGHQPGKPDWSEASRFVAFTMKDETKGEIYVAFNTSHLPVVVGLPERSGFRWEPVVDTGKEAPYDFLTDGLPDRAVTVYQFSHFLNSNLYPMLSYSSIILVLRPDV

SEQ ID NO: 18036 - protein, 706 aa, Zea mays subsp. mays
  misc_feature (1)..(706): Ceres Seq. ID no. 12362468
MPAPLGATALRGGVNFAVYSSGASAASLSLFAPGDLKADRVTEEVPLDPLLNRTGNVWHVFIHGDELHGMLCGYRFDGVFAPERGQYYDVSNVVVDPYAKAVVSRGEYGVPAPGGSCWPQMAGMIPLPYNKFDWQGDLPLGYHQKDLVIYEMHLRGFTKHNSSKTKHPGTYIGAVSKLDHLKELGVNCIELMPCHEFNELEYFSSSSKMNFWGYSTINFFSPMARYSSSGIRDSGCGAINEFKAFVREAHKRGIEVIMDVVFNHTAEGNEKGPILSFRGIDNSTYYMLAPKGEFYNYSGCGNTFNCNHPVVREFIVDCLRYWVTEMHVDGFRFDLASILTRGCSLWDPVNVYGSPMEGDMITTGTPLVAPPLIDMISNDPILGNVKLIAEAWDAGGLYQEGQFPHWNVWSEWNGKYRDTVRQFIKGTDGFAGAFAECLCGSPQLYQAGGRKPWHSIGFVCAHDGFTLADLVTYNSKYNLSNGEDFRDGENHNLSWNCGEEGEFASLSVRRLRKRQMRNFFVCLMVSQGVPMFYMGDEYGHTKGGNNNTYCHDHYVNYFRWDKKEEQSSDLYRFCRLMTEFRKECESLGLEDFPTSERLKWHGHQPGKPDWSEASRFVAFTMKDETKGEIYVAFNTSHLPVVVGLPERSGFRWEPVVDTGKEAPYDFLTDGLPDRAVTVYQFSHFLNSNLYPMLSYSSIILVLRPDV

SEQ ID NO: 18037 - protein, 637 aa, Zea mays subsp. mays
  misc_feature (1)..(637): Ceres Seq. ID no. 12362469
MLCGYRFDGVFAPERGQYYDVSNVVVDPYAKAVVSRGEYGVPAPGGSCWPQMAGMIPLPYNKFDWQGDLPLGYHQKDLVIYEMHLRGFTKHNSSKTKHPGTYIGAVSKLDHLKELGVNCIELMPCHEFNELEYFSSSSKMNFWGYSTINFFSPMARYSSSGIRDSGCGAINEFKAFVREAHKRGIEVIMDVVFNHTAEGNEKGPILSFRGIDNSTYYMLAPKGEFYNYSGCGNTFNCNHPVVREFIVDCLRYWVTEMHVDGFRFDLASILTRGCSLWDPVNVYGSPMEGDMITTGTPLVAPPLIDMISNDPILGNVKLIAEAWDAGGLYQEGQFPHWNVWSEWNGKYRDTVRQFIKGTDGFAGAFAECLCGSPQLYQAGGRKPWHSIGFVCAHDGFTLADLVTYNSKYNLSNGEDFRDGENHNLSWNCGEEGEFASLSVRRLRKRQMRNFFVCLMVSQGVPMFYMGDEYGHTKGGNNNTYCHDHYVNYFRWDKKEEQSSDLYRFCRLMTEFRKECESLGLEDFPTSERLKWHGHQPGKPDWSEASRFVAFTMKDETKGEIYVAFNTSHLPVVVGLPERSGFRWEPVVDTGKEAPYDFLTDGLPDRAVTVYQFSHFLNSNLYPMLSYSSIILVLRPDV

SEQ ID NO: 18038 - DNA, 2740 bp, Zea mays subsp. mays
  misc_feature (1)..(2740): Ceres Seq. ID no. 12362470
gcacgagaccattacctagaacatcctaatcgaaaaacactcctgaagtgcggaaatccaaagtgtgttgcgttgcctgcccgccgccaaaacccataaaccctaccctctacagcgcctccgtcgctcgctcccggcggcgatggggggtgggccgcgcacgttcccgggcgggctgtctaagtggcagtacaaacgcatgcacgagaagctggcgcggcagaagcagcgggggctcctccgccacgagaagcagctctacctagcccgcctccgctccgagatccgcgcctcccgcctccctggcgccgccgcggaagctccaccggggggcgaggggcccacctcgtcgcgcgcccacatccgcgcccttgccgaccgcttccgcaggcccggcgccgaggacctctggaacgaggacgacgggcccctccgccgcgtcaagcggccgcccactgggatcgcgtcgggtgtccggcaccagcagcagcagttggactcggggaagccccgcggaggaccgagttgggaggacctgacctctctggatcaaccgaggcctttagacaggggaaaagggccgacctcggccgcgttcaatccgagaagagagtacctaacggtggtggcgccctggtgcccgcgttgggatccgcgacctctcggtttcgttgctcccaaaaagtcttatccggtgatgactcgttgctccgtgagttgccagccatgtgtcgacctgaggccattggttgctagtgggcttactgaggatgggaatggaaggaaggacacgccattggcacagtttaatcaggagaggttctactcggtggctgcgaggcgattcggcaggaaatggagaccagattcgtcggaccaggatgacaagggcacgtctgcgcccaagaagaatctgaggttcggaaaaaagtttggggcttcgagcgaagaggattcagaaattgacgagtctggggacacaggtgccatcaggaggaggtggagcagtgctgctctcaggaactgcgatgtgaagaaggaaaggcgggtgctcaagtcttacgaggaggaaagcaatgatctcgcgggtagaatccaagagctgcgagaggagattagaaatagggaggttttgggcactgagaggaggcgttacgagtccaggggtgaatctctgcttaccagtaaaagatttgatcagtgtggtgtctccgcgctgacagtcaaagcacttactgatgctggatatgtacagacaactgtggttcaagaggcagctcttcctatatgtcttgaaggtaaagatgttcttgtcaaggccaaaactggaaccggcaaaagtgcagcttttctgcttcctgcaattgaatcagtcttgaatgctatgaagagcaatacaaatcagcgagtatctccaatatttgctcttgtcctatgccctacaagagagcttgctattcagcttacagctgaagcaaatgtcttgttaaagtaccatgaaggaattggtgttcaatctcttattggtggcactagattcaagccgatcagagacgattagaatctgatccatgccagattttagttgcaacacctggtagactgctggatcacattgaaaacaaatcatcattctctgttcgtttgatgagattgaaattgcttgtgttggatgaagctgatcatttgctagatctgggtttccgtaaagacatagaaaagattgtcgataccttgccacgtcaaagacaaacattgctcttctcagctactattccaaaagaggttcgaagagtttcacagctagtattaaagagggatcacgttttttgttgacacagtgggccttggagctgttgaaaccccaactaaggttcagcagtcatgtcttgtggtgccacatgagctgcattttcatacggttcatcacctgcttcgagagcatattgatcgtgaagttgattacaaggttattgttttctgcacgacagccatggtgactgagtttatgtatatcatgcttcgagatttgaagttaaatgtcagggaaattcactcgaggaaacctcagctctatagaactcgcatatctgaagagttccggggctctaaccgcatagttctcgtaacgtcagatgtttctactcgtggggtgaactatccagatgtcacccttgtgattcaggttggtgttcctcccgatagagagcattacatccatcggcttggaaggactgcaagggaaggtaaatctggcaagggaattcttttgcttgcgccatgggaacaatacttcttggacgagataggcgatctcccgattgacaagtatccagcaccagacgttgaccaggagatgaagcaaaaggttgacgattcaatagagatggttgacatgagcatcaaagaagcagcataccatgcgtggctgggttactacaactccatcgctgacataggtagagataaaagaatggttgttgacctagcaaatcgatttggtgcctcgattggcctggagaagcctccagcgatataccggaagaccgctctgaagatggggctcaaagatgtccctgggattcgaataaggaaatgacatgttcctccacagcaataagggaccttttagcctcgacattggattggaggacatgtaattgaattgggttcaaaatatacaaaattactcacctctgttgcaatgacctaactccttaaatgcatcttcgatttcttc

SEQ ID NO: 18039 - protein, 472 aa, Zea mays subsp. mays
  misc_feature (1)..(472): Ceres Seq. ID no. 12362471
MGGGPRTFPGGLSKWQYKRMHEKLARQKQRGLLRHEKQLYLARLRSEIRASRLPGAAAEAPPGGEGPTSSRAHIRALADRFRRPGAEDLWNEDDGPLRRVKRPPTGIASGVRHQQQQLDSGKPRGGPSWEDLTSLDQPRPLDRGKGPTSAAFNPRREYLTVVAPWCPRWDPRPLGFVAPKKSYPVMTRCSVSCQPCVDLRPLVASGLTEDGNGRKDTPLAQFNQERFYSVAARRFGRKWRPDSSDQDDKGTSAPKKNLRFGKKFGASSEEDSEIDESGDTGAIRRRWSSAALRNCDVKKERRVLKSYEEESNDLAGRIQELREEIRNREVLGTERRRYESRGESLLTSKRFDQCGVSALTVKALTDAGYVQTTVVQEAALPICLEGKDVLVKAKTGTGKSAAFLLPAIESVLNAMKSNTNQRVSPIFALVLCPTRELAIQLTAEANVLLKYHEGIGVQSLIGGTRFKPIRDD

SEQ ID NO: 18040 - protein, 453 aa, Zea mays subsp. mays
  misc_feature (1)..(453): Ceres Seq. ID no. 12362472
MHEKLARQKQRGLLRHEKQLYLARLRSEIRASRLPGAAAEAPPGGEGPTSSRAHIRALADRFRRPGAEDLWNEDDGPLRRVKRPPTGIASGVRHQQQQLDSGKPRGGPSWEDLTSLDQPRPLDRGKGPTSAAFNPRREYLTVVAPWCPRWDPRPLGFVAPKKSYPVMTRCSVSCQPCVDLRPLVASGLTEDGNGRKDTPLAQFNQERFYSVAARRFGRKWRPDSSDQDDKGTSAPKKNLRFGKKFGASSEEDSEIDESGDTGAIRRRWSSAALRNCDVKKERRVLKSYEEESNDLAGRIQELREEIRNREVLGTERRRYESRGESLLTSKRFDQCGVSALTVKALTDAGYVQTTVVQEAALPICLEGKDVLVKAKTGTGKSAAFLLPAIESVLNAMKSNTNQRVSPIFALVLCPTRELAIQLTAEANVLLKYHEGIGVQSLIGGTRFKPIRDD

SEQ ID NO: 18041 - protein, 287 aa, Zea mays subsp. mays
  misc_feature (1)..(287): Ceres Seq. ID no. 12362473
MTRCSVSCQPCVDLRPLVASGLTEDGNGRKDTPLAQFNQERFYSVAARRFGRKWRPDSSDQDDKGTSAPKKNLRFGKKFGASSEEDSEIDESGDTGAIRRRWSSAALRNCDVKKERRVLKSYEEESNDLAGRIQELREEIRNREVLGTERRRYESRGESLLTSKRFDQCGVSALTVKALTDAGYVQTTVVQEAALPICLEGKDVLVKAKTGTGKSAAFLLPAIESVLNAMKSNTNQRVSPIFALVLCPTRELAIQLTAEANVLLKYHEGIGVQSLIGGTRFKPIRDD

SEQ ID NO: 18042 - DNA, 1745 bp, Zea mays subsp. mays
  misc_feature (1)..(1745): Ceres Seq. ID no. 12362494
gcacgagaccattacctagaacatcctaatcgaaaaagccttctcgtctgtccccttaatttttcaacctgctctggtggctggtttggccaccaatttcctctcaaagatacagcgaaatgcgcattattatatgtactgccgccgtcgtttaatcggtgtgttcatctcagctgtcgtgcagggcagcaggtggcgaggaggtcgtctcgtcgcggacagccgaggccgttgacctctccagctgctggacgcaacacggcaacgcgcaaacgcctctcctctgtgcgtaccggactaccggtaccgcgcgttcagtttccacttccacccgcgtcgtccgtctctctccgctcagcttgaggtgtccggatcacggcggttgcaacctgcagccgcaccagcaagccgctgctccctctcctaaccggccgctgcagctgccataccagccggaggagatgccggcggcgccggccatccgcctggggcctccgcacccgtacctgaagacccacgggggcaaggtcgcgaggctgcaccggctggactgggccgtgctgctgctcatcgccgccgccgacgtcgggctcaacctcgtcgagccgttccaccgcttcgtcggcgaggacatgctcgcggacctccggtacccgctgaagagcaacaccgtgcccgtctgggccgtgccggtgtacgcggtgatcggcccgatcgtcgtgttcgtcgggttatacctgaagcggaggaacgtgtacgacatgcaccacgccattctaggccttctcttctccgtgctcatcaccggcgtcctcaccgacgccatcaaggacggcgttggccggccgcgccccaacttcttctggcgctgcttccctgacggagtgccgaagtacgacaacatcacaagaggagtcctgtgcgacggcgtcgcgagcgtgatcaaagaagggcacaagagcttcccaagcggccattcttcgtggtccttcgctggcctaggcttcctgtcgtggtacctggcgggcaaggtcaaggcgttcgaccggcgcggccacgtggccaagctgtgcgtcgtgctcctgccgctgctgctcgcggccatggtggcggtgtcgcgggtggacgactactggcaccactggcaggacgtgtttgccggtgggattcttgggttggtggttgcgtctttctgctaccttcagtttttcccaccgccatctggtgaacaaggattctggccccatgcgtactccgagcacattctcaacaaccctgagcgcgagggccgagcgcagtccacagcgagctcgaaccaccaccgacgcctgtccagccgaggccacgtggcagtggagatgagcaccgcgaccgcgagcgcgagccaggacgcatcgtcgttaggtcccatggaggagatggagatggaggaaggacgcggcggagcccggtacgaacagcgctagctgcagcttcagtcttcaaagtcgcttcgtttccttccttcattcctttctttttttcttcttcttcttctttttgctcgtttggttgatagatgtgtgtgtctatctagtagtaaggtgctgtttgttgtgtcggtcctgctgtaaattagatgtaggtaggtaggtaggtagccaggtaggtaggtgaaccatgcatgtttcatatgtttgatgcagtacgatgatgattagcacgtactgtacaacggaagcatgcgtgcgtgcgtgccccggttc

SEQ ID NO: 18043 - protein, 334 aa, Zea mays subsp. mays
  misc_feature (1)..(334): Ceres Seq. ID no. 12362495
MPAAPAIRLGPPHPYLKTHGGKVARLHRLDWAVLLLIAAADVGLNLVEPFHRFVGEDMLADLRYPLKSNTVPVWAVPVYAVIGPIVVFVGLYLKRRNVYDMHHAILGLLFSVLITGVLTDAIKDGVGRPRPNFFWRCFPDGVPKYDNITRGVLCDGVASVIKEGHKSFPSGHSSWSFAGLGFLSWYLAGKVKAFDRRGHVAKLCVVLLPLLLAAMVAVSRVDDYWHHWQDVFAGGILGLVVASFCYLQFFPPPSGEQGFWPHAYSEHILNNPEREGRAQSTASSNHHRRLSSRGHVAVEMSTATASASQDASSLGPMEEMEMEEGRGGARYEQR

SEQ ID NO: 18044 - protein, 277 aa, Zea mays subsp. mays
  misc_feature (1)..(277): Ceres Seq. ID no. 12362496
MLADLRYPLKSNTVPVWAVPVYAVIGPIVVFVGLYLKRRNVYDMHHAILGLLFSVLITGVLTDAIKDGVGRPRPNFFWRCFPDGVPKYDNITRGVLCDGVASVIKEGHKSFPSGHSSWSFAGLGFLSWYLAGKVKAFDRRGHVAKLCVVLLPLLLAAMVAVSRVDDYWHHWQDVFAGGILGLVVASFCYLQFFPPPSGEQGFWPHAYSEHILNNPEREGRAQSTASSNHHRRLSSRGHVAVEMSTATASASQDASSLGPMEEMEMEEGRGGARYEQR

SEQ ID NO: 18045 - protein, 234 aa, Zea mays subsp. mays
  misc_feature (1)..(234): Ceres Seq. ID no. 12362497
MHHAILGLLFSVLITGVLTDAIKDGVGRPRPNFFWRCFPDGVPKYDNITRGVLCDGVASVIKEGHKSFPSGHSSWSFAGLGFLSWYLAGKVKAFDRRGHVAKLCVVLLPLLLAAMVAVSRVDDYWHHWQDVFAGGILGLVVASFCYLQFFPPPSGEQGFWPHAYSEHILNNPEREGRAQSTASSNHHRRLSSRGHVAVEMSTATASASQDASSLGPMEEMEMEEGRGGARYEQR

SEQ ID NO: 18046 - DNA, 2817 bp, Zea mays subsp. mays
  misc_feature (1)..(2817): Ceres Seq. ID no. 12362502
gcacgagaccattacctagaacatcctaatcgaaaaccactccccatcttcccaaaccgccccacgcttcatcctcgcaagcctccccgaccccccagctcaacgagatccggcgagcgaattccatcttccccgaccaccagatcgcagcgatggagccggatcgggtcgccgcgggggcatcctcctcgccgcagccctcaccagcgccggccatgttcctgccggggcaaacgcgagaccatgagcggggagcggtcgactgcgcggatcccggcggagacctgaatcccgcaccgcctcagcaggctacagttgaggatgccgcggtgggcggcgatgtggagcaggaggagccaaagaaggaggcgatggcaggagtaggggaggctctccggagcttcatggaggagtttggggatcaaggagaggactccattatcttgtcaccgcggctgcaggagatttgtactcctgaccgccccactgccctgcgcttcttagggaagaaatataataacctcatggagagatacaagaagcaggtggtcaagtgttctgaggagtgtgaccctagatataacggcttgaagaagaagtacacagacgagtgtgcagagaggcggcgtctgtacaatgagcttattgagctaagaggtaacattagggtgttctgcagatgcagacctctgagctccaatgagctcgcccgtgggtgttcatcagtagttgagattgactcatcacaggagactgagctgcagtttgtccccaatgaaaaagaaaggaagccctttaagttcgaccatgtttttggcccagacgatgaccaagaggccgtgttttcagaaacagtgcccgttgttgggtcagtgatggatggtttcaacgtatgcatctttgcatatgggcaaacaggaaccgggaaaactttcacaatggaaggggttccagaaaataggggtgtaaattatagggctttggaagaattgttcagaatctcagagaaaagaagtgcatctgttgcatacacattttccgtaagcatcttggaagtttacaatgaaaagatcagggatcttcttgatgagagcaatgatcaatcaaaaaggttggatattaagcaaaatgctgatggaacacaagaagttcatggtttggttgaggctccaatttataacatagatggtgtgtgggagaaactgaagtttggcgctcaaaataggtctgttggctcaaccaatgctaatgaactcagcagccgctcccacagtttggttagggtcactgttaggagcgagcacttggtgacttatcagaggagcagaagccacatgtggttggttgaccttgctggaagtgagagaatagctaaaactggggtagaaggagataggctgaaagaatcacagttcatcaacaaatcactatctgccttgggtgatgttatatctgcccttgcctcaaaaaattcccatattccatacaggaattccaagctgactcatttgctccaaagctctttaggcggagattgcaagactctaatgttcgtgcagataagcccaagctcaatggattcaggagaaactctcagttcactcaattttgcgagtagagtccgagctgtagaacatggccctgctgctcgtaagcaagcggatccagctgggagtttgaagttaaagcagatgactgaaaaacttcagcatgaggaaaaggagaatgcacagctgaatcaaagcttgcagctgatgcaactgaagtatgcttctcgtgagaatgtcttcaggacactaaatgaaaaggtgaaggatgctgaacaagcatgcagaaattatcagcagcggattagagagctggaaaatgaattaggcaatgagaagagggcttctagggattctgctagatcctcaaggcccccacttgttcctacgagacagagacaacctcagggaaggactaacagcttcgcaccaccttcaggcccttctagatggaggctcaaagcccccgcaaaacacaacaaagagaacattcctgtggcgatgaataaaccaaatgctggggatgatcctaataagcctgtcggcagagcaaggcgtgtttcacttgctccggtgattcgacaaatccccatccagcccaagaggcgatcttcgatggcagtgctaccatccgtgagagagcatctttctgtgctaaacgacaagaaagcaggatctcgactgtcgcaagccaacatggcaagaggatcacttggggcatttggcttgaatttggttccaggaacacccctagcaggacatggtggacctgttgatgctacaccagatggagcaaagttcaggagatttgatttcggaagcagcagcaagttcacaagccctgccccaaatgtgggcatgtggaacaaaatggtcacgccgcagcagaagctgggaatggcaccggcaggagcgaagctgtgtttcagcatccagaaaagagttacgcctccacatgttcgggcgaaacctggattgggcatcttcgacccagctctgcgtgagaatatggtcgtggggagagccggcaatgcgctgcgggtgctcaaccccaagcgaaggcaatctgttatctaactcttgaagccaaaggtacagcagatgtttggacgttcaaacggagcgtgtggttcttagtgaaaccgtgaagatgttcttttcagcatctttaaatggattctgcttggttgttactagttgataggaaagctatgttaatactgttaatggaagttgttaattgtatttgttcgttactaagaatcgcttc

SEQ ID NO: 18047 - protein, 823 aa, Zea mays subsp. mays
  misc_feature (1)..(823): Ceres Seq. ID no. 12362503
MEPDRVAAGASSSPQPSPAPAMFLPGQTRDHERGAVDCADPGGDLNPAPPQQATVEDAAVGGDVEQEEPKKEAMAGVGEALRSFMEEFGDQGEDSIILSPRLQEICTPDRPTALRFLGKKYNNLMERYKKQVVKCSEECDPRYNGLKKKYTDECAERRRLYNELIELRGNIRVFCRCRPLSSNELARGCSSVVEIDSSQETELQFVPNEKERKPFKFDHVFGPDDDQEAVFSETVPVVGSVMDGFNVCIFAYGQTGTGKTFTMEGVPENRGVNYRALEELFRISEKRSASVAYTFSVSILEVYNEKIRDLLDESNDQSKRLDIKQNADGTQEVHGLVEAPIYNIDGVWEKLKFGAQNRSVGSTNANELSSRSHSLVRVTVRSEHLVTYQRSRSHMWLVDLAGSERIAKTGVEGDRLKESQFINKSLSALGDVISALASKNSHIPYRNSKLTHLLQSSLGGDCKTLMFVQISPSSMDSGETLSSLNFASRVRAVEHGPAARKQADPAGSLKLKQMTEKLQHEEKENAQLNQSLQLMQLKYASRENVFRTLNEKVKDAEQACRNYQQRIRELENELGNEKRASRDSARSSRPPLVPTRQRQPQGRTNSFAPPSGPSRWRLKAPAKHNKENIPVAMNKPNAGDDPNKPVGRARRVSLAPVIRQIPIQPKRRSSMAVLPSVREHLSVLNDKKAGSRLSQANMARGSLGAFGLNLVPGTPLAGHGGPVDATPDGAKFRRFDFGSSSKFTSPAPNVGMWNKMVTPQQKLGMAPAGAKLCFSIQKRVTPPHVRAKPGLGIFDPALRENMVVGRAGNALRVLNPKRRQSVI

SEQ ID NO: 18048 - protein, 802 aa, Zea mays subsp. mays
  misc_feature (1)..(802): Ceres Seq. ID no. 12362504
MFLPGQTRDHERGAVDCADPGGDLNPAPPQQATVEDAAVGGDVEQEEPKKEAMAGVGEALRSFMEEFGDQGEDSIILSPRLQEICTPDRPTALRFLGKKYNNLMERYKKQVVKCSEECDPRYNGLKKKYTDECAERRRLYNELIELRGNIRVFCRCRPLSSNELARGCSSVVEIDSSQETELQFVPNEKERKPFKFDHVFGPDDDQEAVFSETVPVVGSVMDGFNVCIFAYGQTGTGKTFTMEGVPENRGVNYRALEELFRISEKRSASVAYTFSVSILEVYNEKIRDLLDESNDQSKRLDIKQNADGTQEVHGLVEAPIYNIDGVWEKLKFGAQNRSVGSTNANELSSRSHSLVRVTVRSEHLVTYQRSRSHMWLVDLAGSERIAKTGVEGDRLKESQFINKSLSALGDVISALASKNSHIPYRNSKLTHLLQSSLGGDCKTLMFVQISPSSMDSGETLSSLNFASRVRAVEHGPAARKQADPAGSLKLKQMTEKLQHEEKENAQLNQSLQLMQLKYASRENVFRTLNEKVKDAEQACRNYQQRIRELENELGNEKRASRDSARSSRPPLVPTRQRQPQGRTNSFAPPSGPSRWRLKAPAKHNKENIPVAMNKPNAGDDPNKPVGRARRVSLAPVIRQIPIQPKRRSSMAVLPSVREHLSVLNDKKAGSRLSQANMARGSLGAFGLNLVPGTPLAGHGGPVDATPDGAKFRRFDFGSSSKFTSPAPNVGMWNKMVTPQQKLGMAPAGAKLCFSIQKRVTPPHVRAKPGLGIFDPALRENMVVGRAGNALRVLNPKRRQSVI

SEQ ID NO: 18049 - protein, 750 aa, Zea mays subsp. mays
  misc_feature (1)..(750): Ceres Seq. ID no. 12362505
MAGVGEALRSFMEEFGDQGEDSIILSPRLQEICTPDRPTALRFLGKKYNNLMERYKKQVVKCSEECDPRYNGLKKKYTDECAERRRLYNELIELRGNIRVFCRCRPLSSNELARGCSSVVEIDSSQETELQFVPNEKERKPFKFDHVFGPDDDQEAVFSETVPVVGSVMDGFNVCIFAYGQTGTGKTFTMEGVPENRGVNYRALEELFRISEKRSASVAYTFSVSILEVYNEKIRDLLDESNDQSKRLDIKQNADGTQEVHGLVEAPIYNIDGVWEKLKFGAQNRSVGSTNANELSSRSHSLVRVTVRSEHLVTYQRSRSHMWLVDLAGSERIAKTGVEGDRLKESQFINKSLSALGDVISALASKNSHIPYRNSKLTHLLQSSLGGDCKTLMFVQISPSSMDSGETLSSLNFASRVRAVEHGPAARKQADPAGSLKLKQMTEKLQHEEKENAQLNQSLQLMQLKYASRENVFRTLNEKVKDAEQACRNYQQRIRELENELGNEKRASRDSARSSRPPLVPTRQRQPQGRTNSFAPPSGPSRWRLKAPAKHNKENIPVAMNKPNAGDDPNKPVGRARRVSLAPVIRQIPIQPKRRSSMAVLPSVREHLSVLNDKKAGSRLSQANMARGSLGAFGLNLVPGTPLAGHGGPVDATPDGAKFRRFDFGSSSKFTSPAPNVGMWNKMVTPQQKLGMAPAGAKLCFSIQKRVTPPHVRAKPGLGIFDPALRENMVVGRAGNALRVLNPKRRQSVI

SEQ ID NO: 18050 - DNA, 2068 bp, Zea mays subsp. mays
  misc_feature (1)..(2068): Ceres Seq. ID no. 12362514
  misc_feature (1654)..(1654): n is a, c, t, g, unknown, or other
gcacgagaccattacctagaacatcctaatcgaaaaattcccttccttccttgctcctcccctgcctcgcctctctctctcccctctcctcgcctccagctcctgctcggcccgctcgcgtcgagctgcgcgcgcgcctgcggtggccgtgaaggacagcccgagggacgcgccgggtgcactgatctgggggccgcgtgtccccggtggtggggcgaggcggcgccggcttccaggaatgggcaacttgtagcgtcggtttcttttgcatatgcactttctattgttgttgtcatttcaaaggaggccatagtctcctggattttgtatgccttgttatctggaattggtgaccatagatgtcattccgtagcatagtccgtgatgttagggatggctttggcagcttgtcgaggagaagctttgaggtgaccctcgcaagcatttatggccttactgggcatcacaaagggaagacccagagctcatcacatgttctcgacgactcaccttccataattcgtgaaagtcgatgggcgaatctacctcctgaactcatccgtgatatcatacggagactggaggctgatgagagcacctggccagcgcggaagcacgtcgtttgcttcgcagctgtttgtaggacatggagagaaatgtgtaaagagattgtgttgagcccagagttctgtggcaagctcaccttccctgtgtctctaaaacagcctggtcctcgagatggaaatacaatggtccagtgttttataaagaggaataagtcaaaatccacttaccatctctacctgtgccttagcaatgttgttacttcagaaagtgggaaattcctcttatcagctaaacgacaccgcaaaaccacatgcaccgagtacactatatcaatggattctggcaacatctcaagatcaaaaagaacctacattggaaaaataaggtctaacttcctaggcacaagatttttaatttatgatacacaagccccctataatggggctgtagttcctcctgccggaaggaccagcaggaggttcaactccacaaaagtctctccaaagctgccttcagtcagttacaacatcgcacaggtatcgtatgagctaaatgtccttggcacaagaggtcctaggcggatgcgttgcatcatgcactccatacctgcatcatcagtggagccaggtggcacagtgcctggacagccagagcagattgtacctcgagccctggaggattcattccgcagcacggcttccttctcgcagtcgttccgtagcactgcctcattctccaagtccatcatggactcgtccatggatttcaatagcgctcgcttctctgacatagctggcagcagcgctcgcttcacgggcgttcctggtagcagtgctcgctttgcgggcgttcctggcagcagcgctcgcttctcgggcattgctggcgccagattggacaacgacgaggagagtgaaaccaaggagaggccactggtgcttcgtaataagccgcctaggtggcacgaacagctgcagtgttggtgcctcaacttccggggccgtgtgacaattgcctcggtgaagaacttccagctgatcgccgcggctaccccgccacccgcaggtgcgccaaccccctcgcagcntgctccgtcagatcctgacaaggtgattctccagtttggcaaagtggcaagggatatgttcacgatggactatcgctaccctctctcggctttccaggcctttgccatttgtctgagtagctttgatacaaaattagcctgtgaataaatggagaagaacaaaggtaaaggagaacagcaggttgcttgcattaggccatcagtgtacctctttccatctggctctcgtgttgccttggttgtatttgtgcttaatgtagccatgaagttggtggccatatatggacgcatgtgttgttgttggccctctcccttagaagtgattaaaagttgcatttggaccacatgttacccgatctgtaatatacttgcagtggcattgcatgccgcgtgataacaaagttcccgttcgtg

SEQ ID NO: 18051 - protein, 480 aa, Zea mays subsp. mays
  misc_feature (1)..(480): Ceres Seq. ID no. 12362515
  misc_feature (432)..(432): Xaa is any aa, unknown or other
MSFRSIVRDVRDGFGSLSRRSFEVTLASIYGLTGHHKGKTQSSSHVLDDSPSIIRESRWANLPPELIRDIIRRLEADESTWPARKHVVCFAAVCRTWREMCKEIVLSPEFCGKLTFPVSLKQPGPRDGNTMVQCFIKRNKSKSTYHLYLCLSNVVTSESGKFLLSAKRHRKTTCTEYTISMDSGNISRSKRTYIGKIRSNFLGTRFLIYDTQAPYNGAVVPPAGRTSRRFNSTKVSPKLPSVSYNIAQVSYELNVLGTRGPRRMRCIMHSIPASSVEPGGTVPGQPEQIVPRALEDSFRSTASFSQSFRSTASFSKSIMDSSMDFNSARFSDIAGSSARFTGVPGSSARFAGVPGSSARFSGIAGARLDNDEESETKERPLVLRNKPPRWHEQLQCWCLNFRGRVTIASVKNFQLIAAATPPPAGAPTPSQXAPSDPDKVILQFGKVARDMFTMDYRYPLSAFQAFAICLSSFDTKLACE

SEQ ID NO: 18052 - protein, 381 aa, Zea mays subsp. mays
  misc_feature (1)..(381): Ceres Seq. ID no. 12362516
  misc_feature (333)..(333): Xaa is any aa, unknown or other
MCKEIVLSPEFCGKLTFPVSLKQPGPRDGNTMVQCFIKRNKSKSTYHLYLCLSNVVTSESGKFLLSAKRHRKTTCTEYTISMDSGNISRSKRTYIGKIRSNFLGTRFLIYDTQAPYNGAVVPPAGRTSRRFNSTKVSPKLPSVSYNIAQVSYELNVLGTRGPRRMRCIMHSIPASSVEPGGTVPGQPEQIVPRALEDSFRSTASFSQSFRSTASFSKSIMDSSMDFNSARFSDIAGSSARFTGVPGSSARFAGVPGSSARFSGIAGARLDNDEESETKERPLVLRNKPPRWHEQLQCWCLNFRGRVTIASVKNFQLIAAATPPPAGAPTPSQXAPSDPDKVILQFGKVARDMFTMDYRYPLSAFQAFAICLSSFDTKLACE

SEQ ID NO: 18053 - protein, 350 aa, Zea mays subsp. mays
  misc_feature (1)..(350): Ceres Seq. ID no. 12362517
  misc_feature (302)..(302): Xaa is any aa, unknown or other
MVQCFIKRNKSKSTYHLYLCLSNVVTSESGKFLLSAKRHRKTTCTEYTISMDSGNISRSKRTYIGKIRSNFLGTRFLIYDTQAPYNGAVVPPAGRTSRRFNSTKVSPKLPSVSYNIAQVSYELNVLGTRGPRRMRCIMHSIPASSVEPGGTVPGQPEQIVPRALEDSFRSTASFSQSFRSTASFSKSIMDSSMDFNSARFSDIAGSSARFTGVPGSSARFAGVPGSSARFSGIAGARLDNDEESETKERPLVLRNKPPRWHEQLQCWCLNFRGRVTIASVKNFQLIAAATPPPAGAPTPSQXAPSDPDKVILQFGKVARDMFTMDYRYPLSAFQAFAICLSSFDTKLACE

SEQ ID NO: 18054 - DNA, 1583 bp, Zea mays subsp. mays
  misc_feature (1)..(1583): Ceres Seq. ID no. 12362521
gcacgagaccattacctagaacatcctaatcgaaaagaccaatcgttcctatgaagatcaccgtgcagtcgtcgaagctggtcacgggcagctccagcggcggtcgtccttcttccgccgatgccgccgaggcggtcccgctcacggtgttcgacaagctccactacgatctgtacgtgcatgccttatacttcttccacccgccagcgccgcccagctccgtcctcgaggccgggctcgccgccgcgctggccgagtacccggagtaggccgggcggctcggcgtggacgcgcgcggcaaccgcgccatcctgctcaacggcgcgggcgcgcggctcgtcgaagccacggccgccgccgccgacgtctgctcgctcgacagcgtcgtgccgccggagccagcgactcccgcgaccatgagcctgcaccccagcgccgaggacgccgtcgacggcgaggtcctgctgctccaggtcacgcggttcgcctgcggctccttcgtcgtgggcacggcggtgcagcatgtcgtcggcgacggcgccgccttccactgcttcgtgagcgcctggggccaggcctcgcgcggcgccgccgtggaccccgcgcccgtgcacgaccgcgtgtccttcttcgtgccccggcacccgcccttggtcgagttcgagcaccgcggcgcggagtacaagcggccgcctcgccctcgcgagggcgaggagaaggccgggggcagcgagtcaggggccaaggccaaggccaacgccgacgtcggcgaaaagcagctggtgacgcgtagggtgaactttagccgagagttcgtcgccgagctcaagacgagggcgtcagcgggggcgcccttgccgcggcggtacagcacgctgcagtgcgtggcggcgcacctgtggcggtgcgtgacgagggcgcggaggctcgacgcgcgcgcccgcaccaccctccgcatcgccgtgaacgggcggtcgcggatgaggaacccgcgggtgcccgaggcgtacgccggcaacgtcgtgctctgggcgcgggcgaccgcggccgcaggcggcctggtacggagcccgctcccggaggccgtgcggctcgtgtccgaggcggtggcggccgtggacgacgcctacttcaggtccgtcatcgacttcgccagctccggggccctggaggaggaaggcctggtgccggcggccgacccgttggagacggtgttcagcccggacgtcgaggtgtacagcctgctgggggcctcgttccaggacttcgacttcggcggtggcccgcccttcttcttcatgccgagctactcgcccgtggagggcgccgtattcgtcgtgtcgtctttctccggcgacggcagtatcgacgcctacgtccctctcttcagccacgcgatggacatcttcgacaaatgctgccactccctgcctgctgcggacgcacgactttaggcgcgttgactttgcttcgtccgagatgatacatttcgtgaaataatcatttgcaaaaaaaagaagtaagatggattcggttatcatgtcaggagatgaatattaaggtagataattaagatatttcct

SEQ ID NO: 18055 - protein, 345 aa, Zea mays subsp. mays
  misc_feature (1)..(345): Ceres Seq. ID no. 12362522
MSLHPSAEDAVDGEVLLLQVTRFACGSFVVGTAVQHVVGDGAAFHCFVSAWGQASRGAAVDPAPVHDRVSFFVPRHPPLVEFEHRGAEYKRPPRPREGEEKAGGSESGAKAKANADVGEKQLVTRRVNFSREFVAELKTRASAGAPLPRRYSTLQCVAAHLWRCVTRARRLDARARTTLRIAVNGRSRMRNPRVPEAYAGNVVLWARATAAAGGLVRSPLPEAVRLVSEAVAAVDDAYFRSVIDFASSGALEEEGLVPAADPLETVFSPDVEVYSLLGASFQDFDFGGGPPFFFMPSYSPVEGAVFVVSSFSGDGSIDAYVPLFSHAMDIFDKCCHSLPAADARL

SEQ ID NO: 18056 - DNA, 1306 bp, Zea mays subsp. mays
  misc_feature (1)..(1306): Ceres Seq. ID no. 12362545
aaatccagttgggaatcccacgaagattcaccggagctggtgaggttgtaagccgggactgccgccactgccaaattgcgtgggtgccgccgtttggggcctggaaccgtgccagggagcttcgcggtgtagtaaggatgctggacggttgatgcttcgggctcgggaccatgtggaacaacagcaatccctcgccggagcacttttgtcgggccagaaccgccgtgcgccgtggccatggtatttagctgcgcgatttctgcaaggttacgagtcacctgaagagcaagtttgtacctggaatctcaagtcccaggtgacaagaagagctatcggatggagctcaacgagttcgccgacatgaccaacgacgagttcatggccatgtacactggcttgagaccagtcccggcaggggcaaagaagatggccggtttcaagtacgggaacgtgactctttcagacgccgacgacgaccagcagacggttgactggcggcagaaaggcgcggtcaccggtatcaaggaccagcgccagtgtggttgttgctgggccttcgctgcggtggcggccgtggagggcatccaccagatcacgacgggcaacttggtgtccttatcggagcagcaggtgctggactgcgacaccgacgggaacaacggctgcaacggcggctacatcgacaacgccttccaatacatcgtcggcaacggcggcctcgccaccgaggacgcctacccgtacaccgccgcgcaggccatgtgccagtccgtgcagccggtggccgccatcagcggctaccaggacgtgccgagcggcgacgaggcagcgctcgccgcggccgtcgccaaccagccggtgtcggttgccatcgacgcacataacttccagctctacggtggcggggtgatgaccgcagccagctgcagcacgccaccgaacctgaaccacgccgtcacggcggtaggctacggcacggcggaggatgggaccccgtactggctgctcaagaaccagtggggccagaactggggagagggaggatacctcaggcttgagagaggcgcaaacgcctgtggggtcgcccagcaagcctcctacccagtcgcatgatgaatatatagataacgtacgggtcgaaacgaaaacatatatattctacatacacgaaggcatgcataagaatgactactaaggaataaagcatgtacacacattgatagtacatacatacatagcgtaaacttgtaacacaattgtcatgcaacattccaaatataatttatttctacttggccttcttttc

SEQ ID NO: 18057 - protein, 258 aa, Zea mays subsp. mays
  misc_feature (1)..(258): Ceres Seq. ID no. 12362546
MELNEFADMTNDEFMAMYTGLRPVPAGAKKMAGFKYGNVTLSDADDDQQTVDWRQKGAVTGIKDQRQCGCCWAFAAVAAVEGIHQITTGNLVSLSEQQVLDCDTDGNNGCNGGYIDNAFQYIVGNGGLATEDAYPYTAAQAMCQSVQPVAAISGYQDVPSGDEAALAAAVANQPVSVAIDAHNFQLYGGGVMTAASCSTPPNLNHAVTAVGYGTAEDGTPYWLLKNQWGQNWGEGGYLRLERGANACGVAQQASYPVA

SEQ ID NO: 18058 - protein, 250 aa, Zea mays subsp. mays
  misc_feature (1)..(250): Ceres Seq. ID no. 12362547
MTNDEFMAMYTGLRPVPAGAKKMAGFKYGNVTLSDADDDQQTVDWRQKGAVTGIKDQRQCGCCWAFAAVAAVEGIHQITTGNLVSLSEQQVLDCDTDGNNGCNGGYIDNAFQYIVGNGGLATEDAYPYTAAQAMCQSVQPVAAISGYQDVPSGDEAALAAAVANQPVSVAIDAHNFQLYGGGVMTAASCSTPPNLNHAVTAVGYGTAEDGTPYWLLKNQWGQNWGEGGYLRLERGANACGVAQQASYPVA

SEQ ID NO: 18059 - protein, 244 aa, Zea mays subsp. mays
  misc_feature (1)..(244): Ceres Seq. ID no. 12362548
MAMYTGLRPVPAGAKKMAGFKYGNVTLSDADDDQQTVDWRQKGAVTGIKDQRQCGCCWAFAAVAAVEGIHQITTGNLVSLSEQQVLDCDTDGNNGCNGGYIDNAFQYIVGNGGLATEDAYPYTAAQAMCQSVQPVAAISGYQDVPSGDEAALAAAVANQPVSVAIDAHNFQLYGGGVMTAASCSTPPNLNHAVTAVGYGTAEDGTPYWLLKNQWGQNWGEGGYLRLERGANACGVAQQASYPVA

SEQ ID NO: 18060 - DNA, 1000 bp, Zea mays subsp. mays
  misc_feature (1)..(1000): Ceres Seq. ID no. 12362563
atagcaaaactcgtgctgacacaacacacaagcacaaattgtgaagtgcgtgacgccgcgaggggttaagtcagcaagcaagcaggcagatagccatggcagtcgcaagcgccgagaacacgtcgtcgctgctcccgctcgacggccgcgtagcgctggtcactggcggctcccgcggcattggccgcgaggtgtcctcccaactcgccaccctgggcgcgcgcgtcgtggtcaactacgcgtccaattccgccagggcagacgagctcgtcgcggagctcgcctcccgcggccaccaggccgtggccgtccgcgccgacgtgtcggacccggacgccgtgcacgcgctcttcgaccgcgccgaggaggcgttcgggtccccgccgcacatcgtcgtctgctgcgcgggcctcctcaatgccaagtacccggcgctcgcggacaccgccgtcgacgacttcgacgccatgttcgcggtgaacgtgcgcgggacgttcctcgtgtgccgcgaggcggcgaaccgcgtcccagccaacagcggcggccgcatcgtgacgttctcgtcgtccatcgttggcacgctcctgccgggatacgcggcgtacacggcgaccaacgccgccgtggaggcgatgacgaagatcctggccaaggaggtggcggcgaagggggtgaccgcgaacgtggtcgcgccggggcccgtgcgcaccgagctgttcttggccgggaaggacgaagcgttcctgcggagggtggagcagcagtccatgggccgcatcgccgagacgacggacgtggcgccggtggtggcgttcctggccagcgacgccgcggcttgggtcaacggccaggtcatcagggtcaacggcggttttgtctaataagggtccaaatgcgccagatgttcagatatagtggtatctgccatacgcaagtttaaaaaaaaacgcaaaaatgtgagtggcgtgtgtgtgttttaataaaaaaaatcaagttatgc

SEQ ID NO: 18061 - protein, 261 aa, Zea mays subsp. mays
  misc_feature (1)..(261): Ceres Seq. ID no. 12362564
MAVASAENTSSLLPLDGRVALVTGGSRGIGREVSSQLATLGARVVVNYASNSARADELVAELASRGHQAVAVRADVSDPDAVHALFDRAEEAFGSPPHIVVCCAGLLNAKYPALADTAVDDFDAMFAVNVRGTFLVCREAANRVPANSGGRIVTFSSSIVGTLLPGYAAYTATNAAVEAMTKILAKEVAAKGVTANVVAPGPVRTELFLAGKDEAFLRRVEQQSMGRIAETTDVAPVVAFLASDAAAWVNGQVIRVNGGFV

SEQ ID NO: 18062 - protein, 137 aa, Zea mays subsp. mays
  misc_feature (1)..(137): Ceres Seq. ID no. 12362565
MFAVNVRGTFLVCREAANRVPANSGGRIVTFSSSIVGTLLPGYAAYTATNAAVEAMTKILAKEVAAKGVTANVVAPGPVRTELFLAGKDEAFLRRVEQQSMGRIAETTDVAPVVAFLASDAAAWVNGQVIRVNGGFV

SEQ ID NO: 18063 - DNA, 2200 bp, Zea mays subsp. mays
  misc_feature (1)..(2200): Ceres Seq. ID no. 12362570
gcacgagaccattacctagaacatcctaatcgaaaaaccataccctagttcttccttcccgaaccctcgcgccgccaccgccgccgtctagcattttcctacacccaatctgatctgaccaagccctctgaacaccaccgcccatcctcctcctcctccgccgccgccgcccaagatgggcttcgacgtgggcctcgtcccctacaaccccgacgggtggggtccacctgaagttgccgccgcgccgccttccctcggtggtggctcctcgtctgtccccttcgctcccttctcccgctccgacaagctgggccgcatcgccgactggacgcgcaacccgccgggccccggggctttcgccgcagctcgcgacgccgtcttcgatttcgcggggctcgaggactccatcgggctcgcgtccgcggacgactcgtccttccgcctcgtcgatggcaaaccgccgccgcggcacccgcggtttggacctcgctggcgcttccagcagcggccccaactcccgcagcgccgcgacgaagaggtcgaggctcggcgtcgcgaggccgagaaggagcgcgcccgccgcgaccgccactggcagcagaaccgccgcacgcaccaccagttcaaccgcggcgggccctcctcgtcgtctgccaaaccgtccgttgacatccagcccgagtggtcggtgaaggagcagatccctttctcatccttctccaagctctccttcgccgtcgccgaccagcccgaggatctcctcgtctgtggcgcagtcgagtactacgaccggacctacgatcgcgtcacccccagggccgagcgtcgcctcgagcgcttcaagtcgcggaacttcttcaaggtcaccactaccgacgaccccgtcatccgccgtcttgctgagaatgacacggccacggtcttcgccaatgacaccatcctggccgcactcatgtgtgcgccccgtagcgtccagtcctgggatatcgtaattcagcgtgttggcaacaagttgttcttcgacaagcgtgatggctctcagcttgatcttctcaccgtcaacgaaaccgcccaggaggcactccctgaggccaaggaagacatcaactccgcgcattcgctggcggttgaagccacatacgtcaatcagaacttctcgcagcaggtgctgctccgcaatggtgagaaggtcacgttcgacgagcctaacccgtttgccactgaaggggaggaagctgcttccgttgcttaccgctaccgccgctggaagcttgatgaggagacaagcttggttgctcggtgcgaggttcatgccgtgagcgttgatctacgcggcgagcaccagttccttacactcaacgccctcaacgagttcgatcccaaggtcactggtgttgactggaggaagaagcttgagacccagcggggtgctgtgcttgccactgagctcaagaacaatgccaacaagcttgcacgctggactgcccaggcgctgcttgccggcgcagacatgatgaagttgggttatgtgtcacggctgcacccacgcgaccagtacaaccattccattctcagtgtgatcgggtacaagccaagggatttcgctgcacagatcaatctcaacaccgcaaatatgtgggggatcgtgaagtctattgtggatgtctgcatgaagcttggagaggggaagtatgtgcttgtgaaggacccagtgaaaccacaggtccggctttatgaagtgccaaatgatgcattcgagaatgactacgttgaggaaccactccctgaggaagagcaagtgcgtcccttctccgaggatgttgatgccagcgcgaaggaaatggatgctgccgcagaagcggaggctactggaacaactgcaggcgctgagaagagtggtgatgtcgctgctgtgtgaaggcggtggctacaacctgaagaggtctttttcggaccttgaataaggttaccttggctagctatctactacaatcatgggcatctggatacaggtttgatgtttctaccatcgaaggttatgctattattgttcgctgaatcttgagttgtgttccctttatgtgtccttatggctggacttaaatggaatcctcaaactatattgcactttccaagactcacatgttgtggattgccagttctgtttactgtgatttgagttgtggtgattgcatttgcc

SEQ ID NO: 18064 - protein, 580 aa, Zea mays subsp. mays
  misc_feature (1)..(580): Ceres Seq. ID no. 12362571
MGFDVGLVPYNPDGWGPPEVAAAPPSLGGGSSSVPFAPFSRSDKLGRIADWTRNPPGPGAFAAARDAVFDFAGLEDSIGLASADDSSFRLVDGKPPPRHPRFGPRWRFQQRPQLPQRRDEEVEARRREAEKERARRDRHWQQNRRTHHQFNRGGPSSSSAKPSVDIQPEWSVKEQIPFSSFSKLSFAVADQPEDLLVCGAVEYYDRTYDRVTPRAERRLERFKSRNFFKVTTTDDPVIRRLAENDTATVFANDTILAALMCAPRSVQSWDIVIQRVGNKLFFDKRDGSQLDLLTVNETAQEALPEAKEDINSAHSLAVEATYVNQNFSQQVLLRNGEKVTFDEPNPFATEGEEAASVAYRYRRWKLDEETSLVARCEVHAVSVDLRGEHQFLTLNALNEFDPKVTGVDWRKKLETQRGAVLATELKNNANKLARWTAQALLAGADMMKLGYVSRLHPRDQYNHSILSVIGYKPRDFAAQINLNTANMWGIVKSIVDVCMKLGEGKYVLVKDPVKPQVRLYEVPNDAFENDYVEEPLPEEEQVRPFSEDVDASAKEMDAAAEAEATGTTAGAEKSGDVAAV

SEQ ID NO: 18065 - protein, 321 aa, Zea mays subsp. mays
  misc_feature (1)..(321): Ceres Seq. ID no. 12362572
MCAPRSVQSWDIVIQRVGNKLFFDKRDGSQLDLLTVNETAQEALPEAKEDINSAHSLAVEATYVNQNFSQQVLLRNGEKVTFDEPNPFATEGEEAASVAYRYRRWKLDEETSLVARCEVHAVSVDLRGEHQFLTLNALNEFDPKVTGVDWRKKLETQRGAVLATELKNNANKLARWTAQALLAGADMMKLGYVSRLHPRDQYNHSILSVIGYKPRDFAAQINLNTANMWGIVKSIVDVCMKLGEGKYVLVKDPVKPQVRLYEVPNDAFENDYVEEPLPEEEQVRPFSEDVDASAKEMDAAAEAEATGTTAGAEKSGDVAAV

SEQ ID NO: 18066 - DNA, 1683 bp, Zea mays subsp. mays
  misc_feature (1)..(1683): Ceres Seq. ID no. 12362573
aacagctcaccacggcgcagcaaccgcagcccacgcaggcgacgaaaagctgccgaaccaccagcagaggagagcgagggaccgcgcaaccgagccactccctagtccctccttctccctctctctctcttcgcctccggatctcgcatgcgcggtggccaccgccgcgcccgacggtggagggtgaggagttagcgaggggccctgaccctgagtgctggacggcggcgtgatggggggagcgcagctggtggggagatgggtggagtcgtacacggggatgtcgacggacaacatcaagggcctgctgctcgcgctctcctccagcctcttcatcggtgccagcttcatcgtgaagaagaaggggctcaagaaggccgccgcgtccggcgtccgagcaggcgttggtggctactcatacttgcttgagccactgtggtgggcaggaatggtaacaatgattgttggcgaaatcgctaactttgcagcttatgcatttgctcctgctatcttagtcactccacttggtgcacttagcataattatcagtgctgttcttgcccatataatgttgcgggagaaacttcatacatttggtatacttggctgtattctttgtgtggtcggttcgacaacaattgtgcttcatgcccctccagagcgtcaaattgagtctgtggcagaagtgtgggatcttgcgactgaaccagcattcctgtgctatgcagctgttgtgcttgcagcagcttttgtgctcatattccattttgtccctgagtatggtcagacacatatcatggtatatgttggcatatgttctcttgtgggatctttatcggtcatgagtgtcaaagctcttgggatagccttgaagctgacattttctgggatgaaccagctagtctatccacaaacatgggtgttctcatccgttgtaaccttatgcattgtaacacagatgaactatctgaacaaggccctcgacacattcaacactgcagttgtttcacccatatattacacaatgtttacatccttgaccatcttggctagtgtaataatgttcaaggattgggatcgtcaaaatccaacacaaattgtaaggagatgtgcggcttcgttacaatcctttctggaacttttcttcttcacaagacaaaggatatggtggatggtctcccaccaaatttaccgattcggcttcctaaacatgcggatgaggacggctacgctgctgaaggaattcctctcagatccgctgctgacggtattccgctcaggtcaccaagggctacagattcatttcgctcgtcatgatgccccgctgagatttgcatgcgcactcaaatcgtgtcacttgaaggctcatacccagcaggcgtcagtcctatatatacatgggaagggaaagataaccctccattcactcggttggatacacaacgtaggtttagctgtaggattcaaaaggtaacagctcggctgcccccttgtaaattctgaggcattggtacagaattttgaggattatatcagttatactcgtccgggtaagatcaccaggatgaccaagagcccaagtttttgggttgtatacttgtatgtatattgcggtgagccatataggtcactatcttgaattgctgtattttttcaacacaactctcagagtacaggatgttg

SEQ ID NO: 18067 - protein, 413 aa, Zea mays subsp. mays
  misc_feature (1)..(413): Ceres Seq. ID no. 12362574
MGGAQLVGRWVESYTGMSTDNIKGLLLALSSSLFIGASFIVKKKGLKKAAASGVRAGVGGYSYLLEPLWWAGMVTMIVGEIANFAAYAFAPAILVTPLGALSIIISAVLAHIMLREKLHTFGILGCILCVVGSTTIVLHAPPERQIESVAEVWDLATEPAFLCYAAVVLAAAFVLIFHFVPEYGQTHIMVYVGICSLVGSLSVMSVKALGIALKLTFSGMNQLVYPQTWVFSSVVTLCIVTQMNYLNKALDTFNTAVVSPIYYTMFTSLTILASVIMFKDWDRQNPTQIVRRCAASLQSFLELFFFTRQRIWWMVSHQIYRFGFLNMRMRTATLLKEFLSDPLLTVFRSGHQGLQIHFARHDAPLRFACALKSCHLKAHTQQASVLYIHGKGKITLHSLGWIHNVGLAVGFKR

SEQ ID NO: 18068 - protein, 397 aa, Zea mays subsp. mays
  misc_feature (1)..(397): Ceres Seq. ID no. 12362575
MSTDNIKGLLLALSSSLFIGASFIVKKKGLKKAAASGVRAGVGGYSYLLEPLWWAGMVTMIVGEIANFAAYAFAPAILVTPLGALSIIISAVLAHIMLREKLHTFGILGCILCVVGSTTIVLHAPPERQIESVAEVWDLATEPAFLCYAAVVLAAAFVLIFHFVPEYGQTHIMVYVGICSLVGSLSVMSVKALGIALKLTFSGMNQLVYPQTWVFSSVVTLCIVTQMNYLNKALDTFNTAVVSPIYYTMFTSLTILASVIMFKDWDRQNPTQIVRRCAASLQSFLELFFFTRQRIWWMVSHQIYRFGFLNMRMRTATLLKEFLSDPLLTVFRSGHQGLQIHFARHDAPLRFACALKSCHLKAHTQQASVLYIHGKGKITLHSLGWIHNVGLAVGFKR

SEQ ID NO: 18069 - protein, 341 aa, Zea mays subsp. mays
  misc_feature (1)..(341): Ceres Seq. ID no. 12362576
MVTMIVGEIANFAAYAFAPAILVTPLGALSIIISAVLAHIMLREKLHTFGILGCILCVVGSTTIVLHAPPERQIESVAEVWDLATEPAFLCYAAVVLAAAFVLIFHFVPEYGQTHIMVYVGICSLVGSLSVMSVKALGIALKLTFSGMNQLVYPQTWVFSSVVTLCIVTQMNYLNKALDTFNTAVVSPIYYTMFTSLTILASVIMFKDWDRQNPTQIVRRCAASLQSFLELFFFTRQRIWWMVSHQIYRFGFLNMRMRTATLLKEFLSDPLLTVFRSGHQGLQIHFARHDAPLRFACALKSCHLKAHTQQASVLYIHGKGKITLHSLGWIHNVGLAVGFKR

SEQ ID NO: 18070 - DNA, 1102 bp, Zea mays subsp. mays
  misc_feature (1)..(1102): Ceres Seq. ID no. 12362589
aactccccccatcctccccgccacctctcaccccccgcaagcgagtcagccaagccaagcgacgcccaacccccgcctccattcccgggccggagacgcgcctgcctggccgcgacgccgccagccatgggaatggggccgctcgacaacgccgcgtcggccgcgctggaggccgccgccgccgccgccgccgccccctcgcgggcgggctcgtacgcggtgctgcagtgcggcgaggactcggagtacgtgcggcagaagtacggcggctacttcgccgtcttccgcgcgctgctggaggaggacggcgagaggtggcgggtgtacagcggccgtccgcggggagctccccgccgacgccgaggcagccgggttcgacgggttcgtcatctccgggagctgcgccgacgcgcacggcgacgagccctggatcctcgcgctcgtcgacctcacccgccgcgtccacgccgccggcaagcgcgtcctcggcgtctgcttcggccaccagatcctgtgccgggcgctgggcgggcgcacggggcggtcggccaagggctgggacatcggggtgagctgcatccacccgacggcggcggcggcgcggctgttcgcgccgctgaagctgcccgtgcacatgccggtgatcgagttccaccaggacgaggtgtgggagctgccccccggcgccgaggcgctggcgcggtcggacaagacccgcgtcgagatgttccgcctcggcgcccgcgccatgggcgtccagggccacccggagtacagcaaggacgtcctcatgagcatcgccgaccgcctcctccgccacaaccacatactggactgccaggtggacgtggccaaggcgagcttcgacgtgcggcagccggacaaggagttgtggagcaaggtgtgcaggggcttcctcaagggaaggctccagtcgtcgcagcagcaaggtgtggcgctatagcaggaggaaattggggggcattggatgcctaggttaatccgtcatattgtttgtttttttattatatgtgcttcagaactcaagagttgtacagaaactgctatcttcgtccgaagcattaataaaaaaaaaggaggg

SEQ ID NO: 18071 - protein, 331 aa, Zea mays subsp. mays
  misc_feature (1)..(331): Ceres Seq. ID no. 12362590
NSPHPPRHLSPPASESAKPSDAQPPPPFPGRRRACLAATPPAMGMGPLDNAASAALEAAAAAAAAPSRAGSYAVLQCGEDSEYVRQKYGGYFAVFRALLEEDGERWRVYSGRPRGAPRRRRGSRVRRVRHLRELRRRARRRALDPRARRPHPPRPRRRQARPRRLLRPPDPVPGAGRAHGAVGQGLGHRGELHPPDGGGGAAVRAAEAARAHAGDRVPPGRGVGAAPRRRGAGAVGQDPRRDVPPRRPRHGRPGPPGVQQGRPHEHRRPPPPPQPHTGLPGGRGQGELRRAAAGQGVVEQGVQGLPQGKAPVVAAARCGAIAGGNWGALDA

SEQ ID NO: 18072 - protein, 320 aa, Zea mays subsp. mays
  misc_feature (1)..(320): Ceres Seq. ID no. 12362591
TPPILPATSHPPQASQPSQATPNPRLHSRAGDAPAWPRRRQPWEWGRSTTPRRPRWRPPPPPPPPPRGRARTRCCSAARTRSTCGRSTAATSPSSARCWRRTARGGGCTAAVRGELPADAEAAGFDGFVISGSCADAHGDEPWILALVDLTRRVHAAGKRVLGVCFGHQILCRALGGRTGRSAKGWDIGVSCIHPTAAAARLFAPLKLPVHMPVIEFHQDEVWELPPGAEALARSDKTRVEMFRLGARAMGVQGHPEYSKDVLMSIADRLLRHNHILDCQVDVAKASFDVRQPDKELWSKVCRGFLKGRLQSSQQQGVAL

SEQ ID NO: 18073 - protein, 289 aa, Zea mays subsp. mays
  misc_feature (1)..(289): Ceres Seq. ID no. 12362592
MGMGPLDNAASAALEAAAAAAAAPSRAGSYAVLQCGEDSEYVRQKYGGYFAVFRALLEEDGERWRVYSGRPRGAPRRRRGSRVRRVRHLRELRRRARRRALDPRARRPHPPRPRRRQARPRRLLRPPDPVPGAGRAHGAVGQGLGHRGELHPPDGGGGAAVRAAEAARAHAGDRVPPGRGVGAAPRRRGAGAVGQDPRRDVPPRRPRHGRPGPPGVQQGRPHEHRRPPPPPQPHTGLPGGRGQGELRRAAAGQGVVEQGVQGLPQGKAPVVAAARCGAIAGGNWGALDA

SEQ ID NO: 18074 - DNA, 1968 bp, Zea mays subsp. mays
  misc_feature (1)..(1968): Ceres Seq. ID no. 12362596
gcacgagaccattacctagaacatcctaatcaaaacccgactccctcggctgcctcccgcagccgcccgctgctccggtccttccgaacgctggcctgttcttccctgcctttggcccattcgtcaggcggcccctccgcaggcgacgcaggcgcggtcacgacggcgcgtggccccgactacgtagacagctaaccggtctccgcctccggcccttctcctgtcgcccgattgagtcgctgctgcaactgccaacttcacccccggcgagctcaccacagtcttccggaaaggtgctatcaatttggaagatggcagatgaggagcaggccccaagctctaggaaaagggttgcaggtactcaaatcaacaaggataatccggaacctgatgatgaaggaacagaacaagagatgggtacatttaagaaagctactgaagaagttatggcaacacggaggattgtaaaggttcggcgccagcagacgtcatcagcttcttctaaccctttctctgcaatcagatttgcccccactgattctagtgctcaaacaagtgctcctgtcccagaggtccaaccttcagatgtcaaagttgacgagggaagcaatggtagcgggaaagatactttgtctctgcccgacaagactgctggctctggggtaaatacggactctagtgcctcaactgaagcaccacctcagcctgttgaaaccagtgacaaggcagaagacacaaaggacgaatctagtggagacaaagtggtagttggagaacccaatgaaggcagttgcatgccatctgaagttgagggcaaaacaaaagagggagatgctgaagaaaaggaaaggacagatgaagctggaaatatcgataaaattagcaaggatgacactgggaagaaagatggagatgacactgagaagaaagatggaggtgatgatactggaggtgaatcagagcagaaagggcaaacaccatcagcaacaccccttttctcgtttaagaatctgtcaagtggtcaaaatgctttcacaggtctgaccggaactggattttcaagcacatcattctcgtttggctcagcctctaaagatggctcaagtgctggtcccctatttgggctgaaagctgatggttcttcgttcccttcttttaatcttggtgctgccaccaatgggggttctgccacagctcttgctacttcagcagaggcacccaagatgtttgctatgacagagggccctgtcgaaaccggtgaagaaaatgagaaggctgtattcagcgctgattctgctttgtacgagtacttagatgggggctggaaagaaagaggaaaaggtgaactgaagctgaacgtccccgtatctgggggcgagcgagcccggcctcgtcatgaggacaaaaggcaactaccggctggtcctgaatgcaagcctctacaacgacatgtcgctcaaggacatggacaagaagggcgtgacatttgcctgtatgaacagcattggggagtcgccgagcagcctcgctacatttgctctgaagttcaaggacacggccaccagggaggaattcaaggatgcggtggagtctcacaagacaagcaaggcacaggaactgccgctgaagacgcccgagaactctccgaaggcagcagaagtctgaagccgcacccgagtcacgcttgctcgtgtcttttgtacgtgtccaggaaggaaggaactgagagagtttctgttgttgcggagtttttaagaatgtcgcgtcatgacatatgatgtcctgagttgtattttgcgtacgggttccctggtgctgtttttgggaacttaccattactacaggcgcataatcttgggatcctggacaagggactcgttttatctatttgctcgtcttgtgctccgttatgttctatcggttaagttgcgcgtgacgctattatgtcatgaataaatgtatgcaatt

SEQ ID NO: 18075 - protein, 488 aa, Zea mays subsp. mays
  misc_feature (1)..(488): Ceres Seq. ID no. 12362597
MADEEQAPSSRKRVAGTQINKDNPEPDDEGTEQEMGTFKKATEEVMATRRIVKVRRQQTSSASSNPFSAIRFAPTDSSAQTSAPVPEVQPSDVKVDEGSNGSGKDTLSLPDKTAGSGVNTDSSASTEAPPQPVETSDKAEDTKDESSGDKVVVGEPNEGSCMPSEVEGKTKEGDAEEKERTDEAGNIDKISKDDTGKKDGDDTEKKDGGDDTGGESEQKGQTPSATPLFSFKNLSSGQNAFTGLTGTGFSSTSFSFGSASKDGSSAGPLFGLKADGSSFPSFNLGAATNGGSATALATSAEAPKMFAMTEGPVETGEENEKAVFSADSALYEYLDGGWKERGKGELKLNVPVSGGERARPRHEDKRQLPAGPECKPLQRHVAQGHGQEGRDICLYEQHWGVAEQPRYICSEVQGHGHQGGIQGCGGVSQDKQGTGTAAEDARELSEGSRSLKPHPSHACSCLLYVSRKEGTERVSVVAEFLRMSRHDI

SEQ ID NO: 18076 - protein, 454 aa, Zea mays subsp. mays
  misc_feature (1)..(454): Ceres Seq. ID no. 12362598
MGTFKKATEEVMATRRIVKVRRQQTSSASSNPFSAIRFAPTDSSAQTSAPVPEVQPSDVKVDEGSNGSGKDTLSLPDKTAGSGVNTDSSASTEAPPQPVETSDKAEDTKDESSGDKVVVGEPNEGSCMPSEVEGKTKEGDAEEKERTDEAGNIDKISKDDTGKKDGDDTEKKDGGDDTGGESEQKGQTPSATPLFSFKNLSSGQNAFTGLTGTGFSSTSFSFGSASKDGSSAGPLFGLKADGSSFPSFNLGAATNGGSATALATSAEAPKMFAMTEGPVETGEENEKAVFSADSALYEYLDGGWKERGKGELKLNVPVSGGERARPRHEDKRQLPAGPECKPLQRHVAQGHGQEGRDICLYEQHWGVAEQPRYICSEVQGHGHQGGIQGCGGVSQDKQGTGTAAEDARELSEGSRSLKPHPSHACSCLLYVSRKEGTERVSVVAEFLRMSRHDI

SEQ ID NO: 18077 - protein, 443 aa, Zea mays subsp. mays
  misc_feature (1)..(443): Ceres Seq. ID no. 12362599
MATRRIVKVRRQQTSSASSNPFSAIRFAPTDSSAQTSAPVPEVQPSDVKVDEGSNGSGKDTLSLPDKTAGSGVNTDSSASTEAPPQPVETSDKAEDTKDESSGDKVVVGEPNEGSCMPSEVEGKTKEGDAEEKERTDEAGNIDKISKDDTGKKDGDDTEKKDGGDDTGGESEQKGQTPSATPLFSFKNLSSGQNAFTGLTGTGFSSTSFSFGSASKDGSSAGPLFGLKADGSSFPSFNLGAATNGGSATALATSAEAPKMFAMTEGPVETGEENEKAVFSADSALYEYLDGGWKERGKGELKLNVPVSGGERARPRHEDKRQLPAGPECKPLQRHVAQGHGQEGRDICLYEQHWGVAEQPRYICSEVQGHGHQGGIQGCGGVSQDKQGTGTAAEDARELSEGSRSLKPHPSHACSCLLYVSRKEGTERVSVVAEFLRMSRHDI

SEQ ID NO: 18078 - DNA, 1763 bp, Zea mays subsp. mays
  misc_feature (1)..(1763): Ceres Seq. ID no. 12362600
gcacgagaccattacctagaacatcctaatcgaaaagagatagacagctagcttcatcagtaggatgggcagcgacgaggaagcggcgctgctggtgccggcggtggaggagggttgccccgggtgcgtgatggagcagcggaaggcgagcagcaacggcaggatcccctacagggagctgttcttcgtcgccgccacctccctcgcctcagctttaccgatcacgtgcctcttccccttcttgtatttcatggtaagggacttccgcgtcgctgaaacagaggaagacatcggattctatgctggttttcttgctgcgtcgtacatggtgggcagaggcttctcttccatcttctggggcgtcatcgcagaccgcgttggacggaagcctgtcatcacgttttcgatactgtccgtggtcgtattcagcgcgctgtttggtctgagcacgacgtactggatggcgatcgccacgaggctcgtgctgggcgctctcaacggcctgctcgccccgataaaggcgtactgcgttgaagtttgccagacccagcaccaggcgcttggactctcgcttgtgaacacggcatgggctctgggtctcattgttggtccagctcttggaggctacctttcgcagccagctgagaaatatcctcacgtgttttccaaagactctgtatttggcagatttccataccttttgccctgtctaagtgtatcagcgtttgctacacttgtcctgataagctgtgagtggcttccggagactatacacaagcataaggttcccgaaatggacaccaaagcattcaaagccctgtcgtcaaaagagggctattgcgatccacctcgcaagaagaagagcttgctccagaacaggccttggatatcaaccctgctaccttactgctttttcagtcttcatgacacagcatatagtgagatactttccttatgggctgtgagcgaccggaagtatggcggccttagcttctcgactgaagatactggtcaggttcttgctatggcaggcgctagtcttctagtgtaccagcttgtcatttatcgctgggtccataggattcttgggacagtcaactcagcacgtattgcatctgctgtgtccatacttgttcttgcaacttatccctttatgacatacctgtcgggagtgaaactttccttggctctttgttctgcagccatgatgagaagtgctcttgcgatcactgtcaccacaggaatttcacttctacagaataatgctgtgtgccaagaacaaagaggcaccgcaaatggtatatcgacaactgcaatgtcattcttcaagtcaattgctccagtaggtgcaggggctctattctcatgggcacaaaaacgtcaagatgttgctttcctgccaggtgatcaagtggtgttcatggtgctgaatttggtgcagcttctcgggctgatatccacctttgagccctttctagtgttacctgcactaccagagtagtagtagtgttaaggctacaggacattatgaaaataaatgtaccttggcacatagttacagttgatcgagtgcaagacagaaggaacatgattgtagccacttgttacactactaatgatgtctgattagcccaagattaaaaaagaagaatgttttattaattagcaaacttgatctattgtaatatcactgtgacacaaaacccatatttctaatcatatggtcgtggatgctcaaaatgtgcaataaagttgtgatattc

SEQ ID NO: 18079 - protein, 478 aa, Zea mays subsp. mays
  misc_feature (1)..(478): Ceres Seq. ID no. 12362601
MGSDEEAALLVPAVEEGCPGCVMEQRKASSNGRIPYRELFFVAATSLASALPITCLFPFLYFMVRDFRVAETEEDIGFYAGFLAASYMVGRGFSSIFWGVIADRVGRKPVITFSILSVVVFSALFGLSTTYWMAIATRLVLGALNGLLAPIKAYCVEVCQTQHQALGLSLVNTAWALGLIVGPALGGYLSQPAEKYPHVFSKDSVFGRFPYLLPCLSVSAFATLVLISCEWLPETIHKHKVPEMDTKAFKALSSKEGYCDPPRKKKSLLQNRPWISTLLPYCFFSLHDTAYSEILSLWAVSDRKYGGLSFSTEDTGQVLAMAGASLLVYQLVIYRWVHRILGTVNSARIASAVSILVLATYPFMTYLSGVKLSLALCSAAMMRSALAITVTTGISLLQNNAVCQEQRGTANGISTTAMSFFKSIAPVGAGALFSWAQKRQDVAFLPGDQVVFMVLNLVQLLGLISTFEPFLVLPALPE

SEQ ID NO: 18080 - protein, 456 aa, Zea mays subsp. mays
  misc_feature (1)..(456): Ceres Seq. ID no. 12362602
MEQRKASSNGRIPYRELFFVAATSLASALPITCLFPFLYFMVRDFRVAETEEDIGFYAGFLAASYMVGRGFSSIFWGVIADRVGRKPVITFSILSVVVFSALFGLSTTYWMAIATRLVLGALNGLLAPIKAYCVEVCQTQHQALGLSLVNTAWALGLIVGPALGGYLSQPAEKYPHVFSKDSVFGRFPYLLPCLSVSAFATLVLISCEWLPETIHKHKVPEMDTKAFKALSSKEGYCDPPRKKKSLLQNRPWISTLLPYCFFSLHDTAYSEILSLWAVSDRKYGGLSFSTEDTGQVLAMAGASLLVYQLVIYRWVHRILGTVNSARIASAVSILVLATYPFMTYLSGVKLSLALCSAAMMRSALAITVTTGISLLQNNAVCQEQRGTANGISTTAMSFFKSIAPVGAGALFSWAQKRQDVAFLPGDQVVFMVLNLVQLLGLISTFEPFLVLPALPE

SEQ ID NO: 18081 - protein, 416 aa, Zea mays subsp. mays
  misc_feature (1)..(416): Ceres Seq. ID no. 12362603
MVRDFRVAETEEDIGFYAGFLAASYMVGRGFSSIFWGVIADRVGRKPVITFSILSVVVFSALFGLSTTYWMAIATRLVLGALNGLLAPIKAYCVEVCQTQHQALGLSLVNTAWALGLIVGPALGGYLSQPAEKYPHVFSKDSVFGRFPYLLPCLSVSAFATLVLISCEWLPETIHKHKVPEMDTKAFKALSSKEGYCDPPRKKKSLLQNRPWISTLLPYCFFSLHDTAYSEILSLWAVSDRKYGGLSFSTEDTGQVLAMAGASLLVYQLVIYRWVHRILGTVNSARIASAVSILVLATYPFMTYLSGVKLSLALCSAAMMRSALAITVTTGISLLQNNAVCQEQRGTANGISTTAMSFFKSIAPVGAGALFSWAQKRQDVAFLPGDQVVFMVLNLVQLLGLISTFEPFLVLPALPE

SEQ ID NO: 18082 - DNA, 2046 bp, Zea mays subsp. mays
  misc_feature (1)..(2046): Ceres Seq. ID no. 12362604
gcacgagaccattacctagaacatcctaatcgaaaaatctttttcaatcctcaggcaggcgcagcgcaggcagcatccacagcctgaatccaccacaccagcaccacccagcaccgatggccggcgacgacggacgtgctccctccggcctccgcgtcgtgatgttccccttcccgttctggagccacattaaccagatgctccagctcgggaagctcctccgtgcgcggggcctgggcgtcaccatgctccacaccgacttcaacgcgcccgaccccgcactccacccggacatcaccttcgtgtccatccgcgagtccctccccgccgaggtcgtcgccaaccccgacatggtagagcagatgatgcagctcaacgccgtctgcgaggcgccgttccaggcggccctcgccggggagctgctggcgcgcggtacaacaaccggtggcccgcgcgaggtcgcctgcgtggtggtcgacgggcagtggtacaagatgctgggcgcggccacgcgtgtcgctgtccccgcgctcgtgctgcgcgccgacggcgccgccaccttactcagcatgctcgccaccccgcgcctccgcgccgacggttacctccccatcaaaggcactcgatccaccaccctcttctcctccccttctccgcgtgacgatcttgtgccaccggcacggcaccgaccggttactcgttttttcttgtcttgcatgcagaagagcggctggacgaggtggtgccgggcctggagcccctgcgcgtgcgggacctgatccgcgtggacggcagcgacgacgagacggtgctccgtttcatcacccgcaacgccgaggccgtgcgggcctcgtcgtcgggcgtggtgctgaacacgttcgagggcatcgagggcgcggcgctggccaagatccggcgcgagctgtccggccgcccggtcttcgccgtggggccgctgcacctggcgtcgccggaccccgcggcggcggcggccgcggggtaccaggacgcgccggaccccacctgcttggcgtggctggacgcgcgcccgccgcgctccgttctgtacgtcagcatgggaagcgtggcgcgcgtcgaccgcgccgtgttcgaggagacggcgtgggcgctggccggcagcggcgtgccgttcctgtgggtcctccgccgcggctccgtccgcggcgcggatgaggaggtgccgccggtcccggaggagctccgcgagacggtgaggcacaggggcaagatcgtggcgtgggcaccgcagagggaggtcctggcgcacccggcggtgggtgggttctggacgcactgcgggtggaaatccatggtggaggccatatccgaaggggtgcccatgctcgtgcagccgtgcttcgccgagcagatagtgaacgcgaggtatgtgacgcaccagtggggcatcgggtacgaggtcgggaagccgcttgagaggacagccatggcgaaggcggctagaaagctgatggccggcgagctggggccacaggggccaagggagagggctcggcttcttaaggcgcaggcgaagcagtgcgttgcagaaagaggaggaattagtttggctctcgacggtctggtggactacatttgctcgctgtgatgtttgatcagctttcaggtttcagcatgacgatggcgctctgaataatgaactgcatgttatatgtccgatgcaataaggaatagaatgtggacagcattttggtttacttaattctctggcaaatatatcgttggagtttatgagctaaggtctatttattagtatcacattgataattgataatggaagagaaacaacttaaatagcttctttattgtcactcttcgctacttctttttgtgtgagttctactcgcctataaattagtggaacatcctcctcttaaacacaagaaaaaaatcaatctactatattttagtgagagagctatcttagggaggctccagcatgccatgtcagcgtctagtttcagcaaacccggtttttgatgattttgcacgagtcggatagttcgg

SEQ ID NO: 18083 - protein, 220 aa, Zea mays subsp. mays
  misc_feature (1)..(220): Ceres Seq. ID no. 12362605
MAGDDGRAPSGLRVVMFPFPFWSHINQMLQLGKLLRARGLGVTMLHTDFNAPDPALHPDITFVSIRESLPAEVVANPDMVEQMMQLNAVCEAPFQAALAGELLARGTTTGGPREVACVVVDGQWYKMLGAATRVAVPALVLRADGAATLLSMLATPRLRADGYLPIKGTRSTTLFSSPSPRDDLVPPARHRPVTRFFLSCMQKSGWTRWCRAWSPCACGT

SEQ ID NO: 18084 - protein, 205 aa, Zea mays subsp. mays
  misc_feature (1)..(205): Ceres Seq. ID no. 12362606
MFPFPFWSHINQMLQLGKLLRARGLGVTMLHTDFNAPDPALHPDITFVSIRESLPAEVVANPDMVEQMMQLNAVCEAPFQAALAGELLARGTTTGGPREVACVVVDGQWYKMLGAATRVAVPALVLRADGAATLLSMLATPRLRADGYLPIKGTRSTTLFSSPSPRDDLVPPARHRPVTRFFLSCMQKSGWTRWCRAWSPCACGT

SEQ ID NO: 18085 - protein, 193 aa, Zea mays subsp. mays
  misc_feature (1)..(193): Ceres Seq. ID no. 12362607
MLQLGKLLRARGLGVTMLHTDFNAPDPALHPDITFVSIRESLPAEVVANPDMVEQMMQLNAVCEAPFQAALAGELLARGTTTGGPREVACVVVDGQWYKMLGAATRVAVPALVLRADGAATLLSMLATPRLRADGYLPIKGTRSTTLFSSPSPRDDLVPPARHRPVTRFFLSCMQKSGWTRWCRAWSPCACGT

SEQ ID NO: 18086 - DNA, 1508 bp, Zea mays subsp. mays
  misc_feature (1)..(1508): Ceres Seq. ID no. 12362611
gcacgagaccattacctagaacatcctaatcaaaaaggccgctctctctgccacactcgggtgcctccaccaccaccagtagcagcagcagcaggatcaaaaggccaatgggggcgcacgccaccgcggccgcggccgccgtcctgctcgtcgccacctgcgttgcggcggtggcggcggcggcggcggcggcgctgctgcagcacgagcccggcaggatctcaggggacgcggtgggcgtgctggacgacgaccccgtggggaagctgaaggtgttcgtgtacgagatgccgcgcaagtacaacaggatgctgctggacaaggacagccggtgcctgcaccacatgttcgcggcggagatcttcatgcaccagttcctgctgtcgagcgcggtgcggacgctggacccggaggaggccgactggttctacacgcccgcgtacaccacctgcgacctcacgccgcagggcttcccgctgccgttccgggcgccgcggatcatgcgcagcgccatccgctacgtggccaccacgtggccnttctggaaccgcaccgacggcgccgaccacttcttcctcacgccgcacgacttcggcgcctgcttccactaccaggaggagcgcgccatggagcggggcatcctgccgctgctccgccgcgccacgctggtgcagacgttcggccagcgcaaccacgtgtgcctgcaggacggctccatcaccgtcccgccctacgccgacccgcgcaagatgcaggcgcacctcatcagccccggcacgccgcgctccatcttcgtctacttcaggggcctcttctacgacatgggcaacgaccccgagggcggctactacgccaggggcgctcgcgcgtcggtgtgggagaacttcaaggacaacccgctgttcgacatctcgacggagcacccgtcgacgtactacgaggacatgcagcgcgccatcttctgcctgtgcccgctggggtgggcgccctggagcccccggctggtggaggcggtggtgttcgggtgcatccccgtcatcatcgccgacgacatcgtgctgccgttcgcggacgccatcccctgggaggacatcagcgtgttcgtggcggagcgggacgtgccgcgcctcgactccatcctcacctccatcccgctgcccgacatcctgcggaggcagcgcctgctggcgcgggactccgtcaagcaggcgctgctgttccaccagcccgccaggcccggggacgccttccaccaggtgctcaacgggctggcgcggaagctgccgcacggcgagggcgtgttcctgcagcccggggagaaggcgctcgactgggacgccggactccagagcgacctcaagccctggtagtggactggactcgttgtacatctcttcgtgttcctttgtactctttcatttgacatgacatggatggatcacgcattagtttttgtaccacggcccgtttacatgcagcagcaatatactaatatatagtgtatttcc

SEQ ID NO: 18087 - protein, 420 aa, Zea mays subsp. mays
  misc_feature (1)..(420): Ceres Seq. ID no. 12362612
  misc_feature (144)..(144): Xaa is any aa, unknown or other
MGAHATAAAAAVLLVATCVAAVAAAAAAALLQHEPGRISGDAVGVLDDDPVGKLKVFVYEMPRKYNRMLLDKDSRCLHHMFAAEIFMHQFLLSSAVRTLDPEEADWFYTPAYTTCDLTPQGFPLPFRAPRIMRSAIRYVATTWXFWNRTDGADHFFLTPHDFGACFHYQEERAMERGILPLLRRATLVQTFGQRNHVCLQDGSITVPPYADPRKMQAHLISPGTPRSIFVYFRGLFYDMGNDPEGGYYARGARASVWENFKDNPLFDISTEHPSTYYEDMQRAIFCLCPLGWAPWSPRLVEAVVFGCIPVIIADDIVLPFADAIPWEDISVFVAERDVPRLDSILTSIPLPDILRRQRLLARDSVKQALLFHQPARPGDAFHQVLNGLARKLPHGEGVFLQPGEKALDWDAGLQSDLKPW

SEQ ID NO: 18088 - protein, 360 aa, Zea mays subsp. mays
  misc_feature (1)..(360): Ceres Seq. ID no. 12362613
  misc_feature (84)..(84): Xaa is any aa, unknown or other
MPRKYNRMLLDKDSRCLHHMFAAEIFMHQFLLSSAVRTLDPEEADWFYTPAYTTCDLTPQGFPLPFRAPRIMRSAIRYVATTWXFWNRTDGADHFFLTPHDFGACFHYQEERAMERGILPLLRRATLVQTFGQRNHVCLQDGSITVPPYADPRKMQAHLISPGTPRSIFVYFRGLFYDMGNDPEGGYYARGARASVWENFKDNPLFDISTEHPSTYYEDMQRAIFCLCPLGWAPWSPRLVEAVVFGCIPVIIADDIVLPFADAIPWEDISVFVAERDVPRLDSILTSIPLPDILRRQRLLARDSVKQALLFHQPARPGDAFHQVLNGLARKLPHGEGVFLQPGEKALDWDAGLQSDLKPW

SEQ ID NO: 18089 - protein, 353 aa, Zea mays subsp. mays
  misc_feature (1)..(353): Ceres Seq. ID no. 12362614
  misc_feature (77)..(77): Xaa is any aa, unknown or other
MLLDKDSRCLHHMFAAEIFMHQFLLSSAVRTLDPEEADWFYTPAYTTCDLTPQGFPLPFRAPRIMRSAIRYVATTWXFWNRTDGADHFFLTPHDFGACFHYQEERAMERGILPLLRRATLVQTFGQRNHVCLQDGSITVPPYADPRKMQAHLISPGTPRSIFVYFRGLFYDMGNDPEGGYYARGARASVWENFKDNPLFDISTEHPSTYYEDMQRAIFCLCPLGWAPWSPRLVEAVVFGCIPVIIADDIVLPFADAIPWEDISVFVAERDVPRLDSILTSIPLPDILRRQRLLARDSVKQALLFHQPARPGDAFHQVLNGLARKLPHGEGVFLQPGEKALDWDAGLQSDLKPW

SEQ ID NO: 18090 - DNA, 2539 bp, Zea mays subsp. mays
  misc_feature (1)..(2539): Ceres Seq. ID no. 12362630
gcacgagaccattacctagaacatcctaatcgaaaaaccagtcagtccacacagcctacggcctgctctggctctgcctgtagagggctagagctacaagctacaactctgaaagtctgaacagtgcgccgcccaaccagagatggcgccgcataccaccgcagccgccggcggcggcggcggcgaggaggcgctggaggaggccagcactctccggcaccgccacagcgctgccaaggacggcggcgaggagggccaggccaacaacggggtcgccgccgccgccgacgacgacggggaggggaacgcgctgtcggtggagcgcgcgttcgcggaccaggcggttccgtcgtggcgggagcagctgacggtgcgcgccttcgtggtcagcttcttcctggccatcatgttcagcgtcatcgtgatgaagctcaacctcacccacgggggatcatcccctcgctcaacgtctccgccggggctcctcggcttcttcttcgtacgcctctggaccgccgccatcgagagggttggcctcctcaggcagcccttcacgcgccaggagaacaccgtcatccagacctgcgtcgtcgcagcctacgacatcgccttcagcggtgggtttggtacatacttgtttggcatgagcgaaaccatcgccaagcaagcaacagaggctgacaatcctcagaatgtcaaaaaccctcacatcggatggatgatagggtttctcttccttgtcagtttcattggcctatttgctcttgtgcctctgagaaaggttatgatcgtcgactacaaacttacgtatcctagtggcacggcgactgcttatctcatcaacggtttctacacgccagagggtgccaagcttgcaaagaaacaagtgaagactctggggaaattcttcttgatgagcttcctctggggcttcttccagtggttctacactggtggagataattgtggattccagaacttccctacattaggccttcaagcttataagaacaagttttacttcgatttctctcctacctatgttggagttgggatgatctgcccccacattgtgaacgtttctgttctactgggaggcatactttcctggggaataatgtggcctctaattggcaaccagaaggggaattggtacgacgccagtctcccagaaagcagtctccatggactgcagggttacagggtttttatatccatcgcaataattcttggagacggcctgtacaacttcgtgaaggtgctcattcgcaccaccgcggggttcatatcgatgatgaagaaaaacagcacgcttccggtttcaaacaatggcagccccatcactgaaggtgtttccttcgatgacgaacgccgcagggacctgttcctgaaagaccagatccccagatcagttgcctacggagggtacgtggctgtcgctgccatctcaatcggcacccttcctcaggtcttcccgcagctcaagtggtactacatcctggtggcgtacatcttcgcgcctgtgctggccttctgcaacgcgtacgggactggccttaccgactggtccctcgcgtccacctacggcaagctcgccatcttcatcttcggcgcgtgggccggcgcgtcgaacgtcggcgtcctcgtcgggctagctgcctgcggcgtgatgatgagcatcgtgtcgacggccgccgacctgatgcaggacttgaagaccgggtacctgacgctggcatcgcccaggtccatgttcatcagccaggtgatcggcacggcgatgggctgcgtcatcgcgccctgtgtcttctggctcttctacaaggccttcgccgacatcggcctcagcggcagcgagtacccggcgccctacgccatcgtgtaccggaacatggccatcctcggcgtggacggcttctcgtcgctccccaagaactgcctcaccctctgctacatcttcttcgcggcggccatcgtcgtcaacctggtcagggacctggtgccgaagaaggtcgccaggttcatcccgctcccgatggccatgggcgatcccgttctacctcgggtcattcttcgccatcgacatgttcatcggcaccgtgatcctcttcgcgtgggagacgatcaacaaggccaaagccaacgccttcgcgccagcgtttgcgtcggggctgatctgcggccgacggcatctggaccctgccgcagtccattcttgcgcttgccaaggtgaagccgcccatctgcatgaagttcttgtccaggtcggtgaatgcccaggtggacggcttcctcggaagttgaaaactgttgaaatcgtgacgtgcatgtatattgtgttgatgcaccatgcgtgctgtaaaacgtaccgggtaatgttgtgtcgacacgttctggttttgatgtacatgagtaagtacactagtcgtagggattgctaaattaatgtttggcgtatacgcgtcagcattagtaatgtacatgagtaagtaccaacatctgtatgttacctgggttcaaatttcataactactttccc

SEQ ID NO: 18091 - protein, 696 aa, Zea mays subsp. mays
  misc_feature (1)..(696): Ceres Seq. ID no. 12362631
MAPHTTAAAGGGGGEEALEEASTLRHRHSAAKDGGEEGQANNGVAAAADDDGEGNALSVERAFADQAVPSWREQLTVRAFVVSFFLAIMFSVIVMKLNLTHGGSSPRSTSPPGLLGFFFVRLWTAAIERVGLLRQPFTRQENTVIQTCVVAAYDIAFSGGFGTYLFGMSETIAKQATEADNPQNVKNPHIGWMIGFLFLVSFIGLFALVPLRKVMIVDYKLTYPSGTATAYLINGFYTPEGAKLAKKQVKTLGKFFLMSFLWGFFQWFYTGGDNCGFQNFPTLGLQAYKNKFYFDFSPTYVGVGMICPHIVNVSVLLGGILSWGIMWPLIGNQKGNWYDASLPESSLHGLQGYRVFISIAIILGDGLYNFVKVLIRTTAGFISMMKKNSTLPVSNNGSPITEGVSFDDERRRDLFLKDQIPRSVAYGGYVAVAAISIGTLPQVFPQLKWYYILVAYIFAPVLAFCNAYGTGLTDWSLASTYGKLAIFIFGAWAGASNVGVLVGLAACGVMMSIVSTAADLMQDLKTGYLTLASPRSMFISQVIGTAMGCVIAPCVFWLFYKAFADIGLSGSEYPAPYAIVYRNMAILGVDGFSSLPKNCLTLCYIFFAAAIVVNLVRDLVPKKVARFIPLPMAMGDPVLPRVILRHRHVHRHRDPLRVGDDQQGQSQRLRASVCVGADLRPTASGPCRSPFLRLPR

SEQ ID NO: 18092 - protein, 608 aa, Zea mays subsp. mays
  misc_feature (1)..(608): Ceres Seq. ID no. 12362632
MFSVIVMKLNLTHGGSSPRSTSPPGLLGFFFVRLWTAAIERVGLLRQPFTRQENTVIQTCVVAAYDIAFSGGFGTYLFGMSETIAKQATEADNPQNVKNPHIGWMIGFLFLVSFIGLFALVPLRKVMIVDYKLTYPSGTATAYLINGFYTPEGAKLAKKQVKTLGKFFLMSFLWGFFQWFYTGGDNCGFQNFPTLGLQAYKNKFYFDFSPTYVGVGMICPHIVNVSVLLGGILSWGIMWPLIGNQKGNWYDASLPESSLHGLQGYRVFISIAIILGDGLYNFVKVLIRTTAGFISMMKKNSTLPVSNNGSPITEGVSFDDERRRDLFLKDQIPRSVAYGGYVAVAAISIGTLPQVFPQLKWYYILVAYIFAPVLAFCNAYGTGLTDWSLASTYGKLAIFIFGAWAGASNVGVLVGLAACGVMMSIVSTAADLMQDLKTGYLTLASPRSMFISQVIGTAMGCVIAPCVFWLFYKAFADIGLSGSEYPAPYAIVYRNMAILGVDGFSSLPKNCLTLCYIFFAAAIVVNLVRDLVPKKVARFIPLPMAMGDPVLPRVILRHRHVHRHRDPLRVGDDQQGQSQRLRASVCVGADLRPTASGPCRSPFLRLPR

SEQ ID NO: 18093 - protein, 602 aa, Zea mays subsp. mays
  misc_feature (1)..(602): Ceres Seq. ID no. 12362633
MKLNLTHGGSSPRSTSPPGLLGFFFVRLWTAAIERVGLLRQPFTRQENTVIQTCVVAAYDIAFSGGFGTYLFGMSETIAKQATEADNPQNVKNPHIGWMIGFLFLVSFIGLFALVPLRKVMIVDYKLTYPSGTATAYLINGFYTPEGAKLAKKQVKTLGKFFLMSFLWGFFQWFYTGGDNCGFQNFPTLGLQAYKNKFYFDFSPTYVGVGMICPHIVNVSVLLGGILSWGIMWPLIGNQKGNWYDASLPESSLHGLQGYRVFISIAIILGDGLYNFVKVLIRTTAGFISMMKKNSTLPVSNNGSPITEGVSFDDERRRDLFLKDQIPRSVAYGGYVAVAAISIGTLPQVFPQLKWYYILVAYIFAPVLAFCNAYGTGLTDWSLASTYGKLAIFIFGAWAGASNVGVLVGLAACGVMMSIVSTAADLMQDLKTGYLTLASPRSMFISQVIGTAMGCVIAPCVFWLFYKAFADIGLSGSEYPAPYAIVYRNMAILGVDGFSSLPKNCLTLCYIFFAAAIVVNLVRDLVPKKVARFIPLPMAMGDPVLPRVILRHRHVHRHRDPLRVGDDQQGQSQRLRASVCVGADLRPTASGPCRSPFLRLPR

SEQ ID NO: 18094 - DNA, 2187 bp, Zea mays subsp. mays
  misc_feature (1)..(2187): Ceres Seq. ID no. 12362634
gcacgagaccattacctagaacatcctaatcgaaaactgcctctgacgaaaactctcctctgactccgctccacccccttctctcacttgtctatcggcggccgtcacctccgctgggctgctggcctcctcactttgcagttgctgcacaggcaagacacggaggcaggcaccacgagtccacgacgctcgctcgcgcgctccgtgaatcccctcgtgactcgtgagggctcgaggcccgacgggaggacgaggaggcaagaaccctagcgccggcgccggcggcccgtaaggctgctgagtgaaaatgggagtggcaggtcacaacgatccattgttaggtgaaacgacatgtgggtctttgctgcagcaacttcagctgatatgggatgaggttggcgaaagtgatgaagatcgtgacaagatgttacttcagctagagcaagagtgcttagatgtttataggagaaaggttgatcaggcttctagcctccaggtcatgtctcctccaacagctttccaactccaaatcggaactgactagactcctttctgcattaggagagtcatctatttctggtgctcctgacaagacatctggtacaatcaaggagcaactagcagctatatcaccatctttagagacactccgcaggaaaaaagagagtagggtgaaagagtttgctcatgtacaacttcagattcagatacttcgtgatgaaattgctggggatctacatattggtgaacagttggaaacaccccatgttaatgcggatgatctttcagtgaggagattaaatgaatatctttctgaactacaagccctgcaaaaggaaaagagtactaggctctcaaggattcttgaatccgtgagttcagtgcacgatctctgttctgtacttggcatggattttgtgggcactgttactaaagttcatccaagtcttgatgactctgttggtgtccaatccaagagcattagtggcgaaacaatatccaagctgtctaaaatggtgattgtacttgaagaagaaaaatcgaagaggtttgcaaagattcaagctctagcttcccagctatctgatctttggaacttaatggattctcctgtggaggaacagcaaccttttcgtcacgtaacatgcataatgtcctcagcattggatgatgtgatagttccaggagctctggctcttgatgtaattcagcaggcggaactcgaagttgaaaggcttgatcagctaaaagctagtaggatgaaggatattgcattcaagaaacagactgaacttgaagatatatatgcccgggctcatgttgcagtagattctagtgctgcaagagataggataatgtctattattgagtccagtagtttcgagccttcagaactactggctgatatggagaaccagatacttaaagcaaatgaggagtccttaagcagaaaggacatattggagagggttgataggtggatgtcagcatgtgaagaagaaagctggcttgaagactacagccgggacgataacaggtacagtgcaactcggggtgcacatctgaatctgaagcgtgcagaaaaggcccgtgttttggtcaataaaattccggctattgttgacacactgcttgcaaagacccgggcatgggaacaagagcatggcgtggccttcacctacgacggcgtccctcttcttgcgatgctggacgaatacaaaatcctgaggcaggagaaggaagacgagaagcgacgaatgagggaccagaaaaagatgaacgaacagctagccgccgaacaggagaagctgttcgggtcaaaaccgagccccgcgcggccgcagtcgtcctcgaggaaggtggctggcgcacggaccaacggcggtggcacgccagctcgcaggctgtcggccctccagagcggcggcaggaccgctagccgggatgggaggagggatgcgagcaggcccgtggcccccgtgaactacgtcgccatcgccaaggaggacgtggcctcgcaggcgtccagcaaccacactgggccgtccaccccctgaccgggccgtgccagcagtaactgaactgttgtggcggtgcttagatatatatataccagtgcagtgcagtagtcagagctgattgtagatcggataatggaaaaaaacaaacgaagctggatatggtatc

SEQ ID NO: 18095 - protein, 533 aa, Zea mays subsp. mays
  misc_feature (1)..(533): Ceres Seq. ID no. 12362635
MFIGERLIRLLASRSCLLQQLSNSKSELTRLLSALGESSISGAPDKTSGTIKEQLAAISPSLETLRRKKESRVKEFAHVQLQIQILRDEIAGDLHIGEQLETPHVNADDLSVRRLNEYLSELQALQKEKSTRLSRILESVSSVHDLCSVLGMDFVGTVTKVHPSLDDSVGVQSKSISGETISKLSKMVIVLEEEKSKRFAKIQALASQLSDLWNLMDSPVEEQQPFRHVTCIMSSALDDVIVPGALALDVIQQAELEVERLDQLKASRMKDIAFKKQTELEDIYARAHVAVDSSAARDRIMSIIESSSFEPSELLADMENQILKANEESLSRKDILERVDRWMSACEEESWLEDYSRDDNRYSATRGAHLNLKRAEKARVLVNKIPAIVDTLLAKTRAWEQEHGVAFTYDGVPLLAMLDEYKILRQEKEDEKRRMRDQKKMNEQLAAEQEKLFGSKPSPARPQSSSRKVAGARTNGGGTPARRLSALQSGGRTASRDGRRDASRPVAPVNYVAIAKEDVASQASSNHTGPSTP

SEQ ID NO: 18096 - protein, 382 aa, Zea mays subsp. mays
  misc_feature (1)..(382): Ceres Seq. ID no. 12362636
MDFVGTVTKVHPSLDDSVGVQSKSISGETISKLSKMVIVLEEEKSKRFAKIQALASQLSDLWNLMDSPVEEQQPFRHVTCIMSSALDDVIVPGALALDVIQQAELEVERLDQLKASRMKDIAFKKQTELEDIYARAHVAVDSSAARDRIMSIIESSSFEPSELLADMENQILKANEESLSRKDILERVDRWMSACEEESWLEDYSRDDNRYSATRGAHLNLKRAEKARVLVNKIPAIVDTLLAKTRAWEQEHGVAFTYDGVPLLAMLDEYKILRQEKEDEKRRMRDQKKMNEQLAAEQEKLFGSKPSPARPQSSSRKVAGARTNGGGTPARRLSALQSGGRTASRDGRRDASRPVAPVNYVAIAKEDVASQASSNHTGPSTP

SEQ ID NO: 18097 - protein, 347 aa, Zea mays subsp. mays
  misc_feature (1)..(347): Ceres Seq. ID no. 12362637
MVIVLEEEKSKRFAKIQALASQLSDLWNLMDSPVEEQQPFRHVTCIMSSALDDVIVPGALALDVIQQAELEVERLDQLKASRMKDIAFKKQTELEDIYARAHVAVDSSAARDRIMSIIESSSFEPSELLADMENQILKANEESLSRKDILERVDRWMSACEEESWLEDYSRDDNRYSATRGAHLNLKRAEKARVLVNKIPAIVDTLLAKTRAWEQEHGVAFTYDGVPLLAMLDEYKILRQEKEDEKRRMRDQKKMNEQLAAEQEKLFGSKPSPARPQSSSRKVAGARTNGGGTPARRLSALQSGGRTASRDGRRDASRPVAPVNYVAIAKEDVASQASSNHTGPSTP

SEQ ID NO: 18098 - DNA, 2083 bp, Zea mays subsp. mays
  misc_feature (1)..(2083): Ceres Seq. ID no. 12362638
gcacgagaccattacctagaacatcctaatcaaaaaatctcaactctctcccttcctctctctccagcgcacaaggatcttttcttcgggcagggacggccaaggaagcgcccgcggagagagatgatgctggcgatcctagcgaggcggcgtgccgcggaggccgtgctgcggcggccgcaggcggcggcgggggcggccgtgtccgcctggagggcgtacgcggcggcgggcgaggagagcgatgtggtggtggtgggtggcgggcccggagggtacgtggcggcgatcaaggccgcgcagctggggctcaagaccacctgcatcgagaagaggggcaccctcggcgggacctgtctcaacgtcggatgcattccatccaaggctcttctgcattcatcacatatgtaccatgaagcaaagagttcttttgcacatcatggagttaagttttcaaatctggaagtggacctcccagccatgatggctcagaaagacaaagctgtggcaggactaacaaaaggaattgaagggctctttaaaaagaacaaggtgacttatgttaaaggctttggaaaattgtcatccccctcagaagtgtcagttgacttgattgatggtggtagcactgttgtcaaaggcaaaaacataataattgcaactgggtctgatgtaaaatcacttccaggaataacaattgatgagaagaaagttgtttcatctactggtgcactgtgcttgtcagagatcccgaagaaactggtggtaattggagcaggttatattggccttgagatgggttcagtctggaaccgccttggttcagaggtcactgttgttgaatttgcgccagatatagtaccatcaatggatggcgaagtcaggaagcagttccaacgcatgctagaaaaacaaaagttcaagttcatgctcaagacaaaggttgttgggtgtgataccagtggagatggcgtaaagctgacacttgagcctgcagctggtggtgagcagaacatccttgaagcagatgttgtccttgtctctgctggcagaaccccatttacttctgggattgggcttgaaactcttggcgttgagacagataaagctggcaggatccttgttgataagcgcttcatgaccaatgtgaagggagtctatgcaattggggatgcgatccctggtcccatgcttgcccataaagctgaagaggatggtgtcgcttgcgtagagttcattgctggaaaggaaggccatgttgactatgacacagttcctggtgtggtttatacgcatccagaagttgcatctgttggcaagactgaggagcaggtgacggctctaggaattccctatcgtgtgggcaagtttccacttttggctaacagtcgtgcgaaggccattgatgatgctgaaggggtagttaaggtgatcgcggagaaggaaaccgataagattctaggtgtgcacataatggcacccaatgctggtgaaatcatccatgaagctgtcatcgccttgcagtatggagcatccagtgaggatgttgctcgaacatgccacgcacaccctaccgtgagcgaggccctcaaggaggcttgcttgcaaaccttcaataaagcaatccacatataatttctcattttctatttccttgccatccaaacttttggctcaacaagatccaaagtttatggtaattttgggcctgttggaacagaaggcctccagttgtccttttgttttgttggcaataatgtgaattcgatgacaagaccaacgtcaaggccgcctggggtaaggtcggcgcgcacgctggcgagtatggtgcggaggccctggagaggatgttcctgtccttccccaccaccaagacctacttcccgcacttcgacctgagccacggctctgcccaggttaagggccacggcaagaaggtggccgacgcgctgaccaacgccgtggcgcacgtggacgacatgcccaacgcgctgtccgccctgagcgacctgcacgcgcacaagcttcgggtggacccggtcaacttcaagctcctaagccactgcctgctggtgagcccatc

SEQ ID NO: 18099 - protein, 544 aa, Zea mays subsp. mays
  misc_feature (1)..(544): Ceres Seq. ID no. 12362639
ARDHYLEHPNQKISTLSLPLSPAHKDLFFGQGRPRKRPRREMMLAILARRRAAEAVLRRPQAAAGAAVSAWRAYAAAGEESDVVVVGGGPGGYVAAIKAAQLGLKTTCIEKRGTLGGTCLNVGCIPSKALLHSSHMYHEAKSSFAHHGVKFSNLEVDLPAMMAQKDKAVAGLTKGIEGLFKKNKVTYVKGFGKLSSPSEVSVDLIDGGSTVVKGKNIIIATGSDVKSLPGITIDEKKVVSSTGALCLSEIPKKLVVIGAGYIGLEMGSVWNRLGSEVTVVEFAPDIVPSMDGEVRKQFQRMLEKQKFKFMLKTKVVGCDTSGDGVKLTLEPAAGGEQNILEADVVLVSAGRTPFTSGIGLETLGVETDKAGRILVDKRFMTNVKGVYAIGDAIPGPMLAHKAEEDGVACVEFIAGKEGHVDYDTVPGVVYTHPEVASVGKTEEQVTALGIPYRVGKFPLLANSRAKAIDDAEGVVKVIAEKETDKILGVHIMAPNAGEIIHEAVIALQYGASSEDVARTCHAHPTVSEALKEACLQTFNKAIHI

SEQ ID NO: 18100 - protein, 503 aa, Zea mays subsp. mays
  misc_feature (1)..(503): Ceres Seq. ID no. 12362640
MMLAILARRRAAEAVLRRPQAAAGAAVSAWRAYAAAGEESDVVVVGGGPGGYVAAIKAAQLGLKTTCIEKRGTLGGTCLNVGCIPSKALLHSSHMYHEAKSSFAHHGVKFSNLEVDLPAMMAQKDKAVAGLTKGIEGLFKKNKVTYVKGFGKLSSPSEVSVDLIDGGSTVVKGKNIIIATGSDVKSLPGITIDEKKVVSSTGALCLSEIPKKLVVIGAGYIGLEMGSVWNRLGSEVTVVEFAPDIVPSMDGEVRKQFQRMLEKQKFKFMLKTKVVGCDTSGDGVKLTLEPAAGGEQNILEADVVLVSAGRTPFTSGIGLETLGVETDKAGRILVDKRFMTNVKGVYAIGDAIPGPMLAHKAEEDGVACVEFIAGKEGHVDYDTVPGVVYTHPEVASVGKTEEQVTALGIPYRVGKFPLLANSRAKAIDDAEGVVKVIAEKETDKILGVHIMAPNAGEIIHEAVIALQYGASSEDVARTCHAHPTVSEALKEACLQTFNKAIHI

SEQ ID NO: 18101 - protein, 502 aa, Zea mays subsp. mays
  misc_feature (1)..(502): Ceres Seq. ID no. 12362641
MLAILARRRAAEAVLRRPQAAAGAAVSAWRAYAAAGEESDVVVVGGGPGGYVAAIKAAQLGLKTTCIEKRGTLGGTCLNVGCIPSKALLHSSHMYHEAKSSFAHHGVKFSNLEVDLPAMMAQKDKAVAGLTKGIEGLFKKNKVTYVKGFGKLSSPSEVSVDLIDGGSTVVKGKNIIIATGSDVKSLPGITIDEKKVVSSTGALCLSEIPKKLVVIGAGYIGLEMGSVWNRLGSEVTVVEFAPDIVPSMDGEVRKQFQRMLEKQKFKFMLKTKVVGCDTSGDGVKLTLEPAAGGEQNILEADVVLVSAGRTPFTSGIGLETLGVETDKAGRILVDKRFMTNVKGVYAIGDAIPGPMLAHKAEEDGVACVEFIAGKEGHVDYDTVPGVVYTHPEVASVGKTEEQVTALGIPYRVGKFPLLANSRAKAIDDAEGVVKVIAEKETDKILGVHIMAPNAGEIIHEAVIALQYGASSEDVARTCHAHPTVSEALKEACLQTFNKAIHI

SEQ ID NO: 18102 - DNA, 1658 bp, Zea mays subsp. mays
  misc_feature (1)..(1658): Ceres Seq. ID no. 12362642
ccctttccctttctggccgcattccctcgtcctccggcagccgtcgccagcttccgatggtccggaaggagacggccatgaggctgcccccgcagcaccagggcctggaggtcaagatccccagcttcttccgctgccccatctcgctggacgtcatgcgctcgcccgttagcctctgcaccggcgtcacctacgaccgcgcctccatccagcagtggctcgactccggcaacaccacgtgcccggccaccatgctcccgctcccctccaccgacctcgtccccaacctcactctccgcagcctcatcgcccactgggccgcctccgccgcctcctgttcccccaccgccgccggcggcgccggagtcgccgactcctcttcggcacgtacttcttctcccgcgagcctcgtccgccaggtggcttcgtccggcgtggacccctcgccggccctccgcgagctggcagcctatctctccgacgacgacgtcgacgacttcgaaaagaacgcgcttgtgggcgccggccgcgccgccgagaccgtcgcgtcagttcttcggagaagagccgaggaaaccggcgtcgaaggcgtggaggcggccacgagagtgctagccttgatcttggcctcggacggcatcgacgactcgaacaagaagcgggtggccactggcctcgccgcggacgcggcggcctcgaccgcgtcgctggcgcgcgtgatgcgcggcgggagcgacctggaggcgaggatcgacgcggccaagctggcggagctgttgctcgccaatgcggccggcgaggcgaaggcggcggcgaccaaatcgtccgagttgctggccgagctggtacgcctcgtgggcaccgtcgacgagacgggcgccctggacaggaacgccgtggacgccggcctctcctgcctggccgccatctgcgggtcgtgccgtgccgcgcgtggcgagatggtgcgccttggcgcggtcccggccgctgtgcgcgctctgcgcgcctcgacggagtccggcgcgtccgcgaaggcgctccgggtcctcgagtccgccgtgggctgcgccgagggccgtgccgcgctgtgcgccaacgcggaggacgccatccctgcggtggtgggcaagatgatgaaggctgggcgcgacggcgcggaggccgccgtggccgtgctctgggcggtctgccaccggtaccaggaccgccgggcggcggacgcggctgcggcggccgagggcgggctgacgaggctgctcctcctgatgcagagcgggtgctcgccggcggcgagacagatggcgctggagctgctgaagatatacagggtgaacgccaagagctgtctcgccggctacgactccaagaccacccacatcatgccgttctgaggaaccgaagcggacgagagtggtttgccgcgatcctgggtggctgttttgacatgatgaaatggattcaattcagtgaatcaattaaatcgcatggaacaggggaatgtgttcttgttcctgtgatgtttattgatttccactcccccctcctcttttctttggatgtaagtcggtagagaaacaaacaagaattagttcacgaggtgagatgaagaataatctgtacagacatgatcagaacaggcatagtggacaatttaaccg

SEQ ID NO: 18103 - protein, 462 aa, Zea mays subsp. mays
  misc_feature (1)..(462): Ceres Seq. ID no. 12362643
LSLSGRIPSSSGSRRQLPMVRKETAMRLPPQHQGLEVKIPSFFRCPISLDVMRSPVSLCTGVTYDRASIQQWLDSGNTTCPATMLPLPSTDLVPNLTLRSLIAHWAASAASCSPTAAGGAGVADSSSARTSSPASLVRQVASSGVDPSPALRELAAYLSDDDVDDFEKNALVGAGRAAETVASVLRRRAEETGVEGVEAATRVLALILASDGIDDSNKKRVATGLAADAAASTASLARVMRGGSDLEARIDAAKLAELLLANAAGEAKAAATKSSELLAELVRLVGTVDETGALDRNAVDAGLSCLAAICGSCRAARGEMVRLGAVPAAVRALRASTESGASAKALRVLESAVGCAEGRAALCANAEDAIPAVVGKMMKAGRDGAEAAVAVLWAVCHRYQDRRAADAAAAAEGGLTRLLLLMQSGCSPAARQMALELLKIYRVNAKSCLAGYDSKTTHIMPF

SEQ ID NO: 18104 - protein, 444 aa, Zea mays subsp. mays
  misc_feature (1)..(444): Ceres Seq. ID no. 12362644
MVRKETAMRLPPQHQGLEVKIPSFFRCPISLDVMRSPVSLCTGVTYDRASIQQWLDSGNTTCPATMLPLPSTDLVPNLTLRSLIAHWAASAASCSPTAAGGAGVADSSSARTSSPASLVRQVASSGVDPSPALRELAAYLSDDDVDDFEKNALVGAGRAAETVASVLRRRAEETGVEGVEAATRVLALILASDGIDDSNKKRVATGLAADAAASTASLARVMRGGSDLEARIDAAKLAELLLANAAGEAKAAATKSSELLAELVRLVGTVDETGALDRNAVDAGLSCLAAICGSCRAARGEMVRLGAVPAAVRALRASTESGASAKALRVLESAVGCAEGRAALCANAEDAIPAVVGKMMKAGRDGAEAAVAVLWAVCHRYQDRRAADAAAAAEGGLTRLLLLMQSGCSPAARQMALELLKIYRVNAKSCLAGYDSKTTHIMPF

SEQ ID NO: 18105 - protein, 437 aa, Zea mays subsp. mays
  misc_feature (1)..(437): Ceres Seq. ID no. 12362645
MRLPPQHQGLEVKIPSFFRCPISLDVMRSPVSLCTGVTYDRASIQQWLDSGNTTCPATMLPLPSTDLVPNLTLRSLIAHWAASAASCSPTAAGGAGVADSSSARTSSPASLVRQVASSGVDPSPALRELAAYLSDDDVDDFEKNALVGAGRAAETVASVLRRRAEETGVEGVEAATRVLALILASDGIDDSNKKRVATGLAADAAASTASLARVMRGGSDLEARIDAAKLAELLLANAAGEAKAAATKSSELLAELVRLVGTVDETGALDRNAVDAGLSCLAAICGSCRAARGEMVRLGAVPAAVRALRASTESGASAKALRVLESAVGCAEGRAALCANAEDAIPAVVGKMMKAGRDGAEAAVAVLWAVCHRYQDRRAADAAAAAEGGLTRLLLLMQSGCSPAARQMALELLKIYRVNAKSCLAGYDSKTTHIMPF

SEQ ID NO: 18106 - DNA, 2276 bp, Zea mays subsp. mays
  misc_feature (1)..(2276): Ceres Seq. ID no. 12362650
gcacgagaccattacctagaacatcctaatcgaaaacacccactgcaaatgcaaaaaccctagccgcaactccctccgcctccacggttctcatccgcgacctatctctatctctccaaggcatcggccacgggctcgaaggtgatggcgggcggcggaaagaaggagaagggtgaggggctcgggcgcgcgctgatccggcagcggaacaaggcggccgcggccgctaaggaacggggcgaggcgctcgcctttggccgccgccgcgcgatgccgctcgagtctgtcattgacgtcagtgacatcgatgccgtgctccagcgggccgcagaggccgaccagctcgctgaggccgcgtccgtctcttccgactccgacctcgtcatcgacctggatgcgacgggggagacggaagacgacaggcggcggcttcgcaaggagcaggaggccctgcacgccagcagcctcagggtccccaggcgaccgccatggcatagtcagatgactgtggaggagcttgatgtgaacgagcgtcgggcctttctggtgtggcgcaggaatcttgcaagattggaagagaatgataagcttatcctgactccctttgagaagaatattgacatctggagacaactctggagagtgcttgaacgcagtgatttgttggttatggtggttgatgctcgggatcctttgttctaccgctgccctgaccttgaggcatatgcaaaggaaattgatgaacacaagagaacaatactccttgttaacaaggctgatctgttgccgttaagtatcaggaagagatgggctgattattttaaggcacatgccattctctatgtgttctggtcggctaaggctgccactgccacattagaaggcaaaaagttaagtggatactctgaaggagaatctgcttcacttgatttggataccaagatatatgaaagggatgaactcttgatgaagctgcaagctgaggcagaatctattgtagctcagaggagggtctcacctactgtagatgatcacgaagccagttcttcagattctgtttcttcagtgactaagcatgtagttgttggatttgttggctatccaaatgttgggaagagttcaactataaatgctttggttggcgagaagaggactggtgttactcacacacctggcaagacaaaacatttccagacactgataatctctgaagagctcactctttgtgattgccctggtctggtcttcccttccttttcaagctcaaggcatgagatggtggcatgtggtgtgttgccgattgataggatgacaaagcaccgggaagctattcaagtggtggcagatcgtgtcccaagggacatccttgagcagatttacaaaattgcattgccaaagccaaagccatatgaaccccagtcccggccgccaactgctgctgagctgttgcgggcctactgcgcgtctcgtgggcatgtcagccatgctgggctgcctgatgagaccagggctgctcgacaaatactgaaggattacattgatgttaaaatcccacactttgagctccctcctggcgtgacaggccctgaggtggactttgaacaaatcgctggatcagaaagtccaactacttcagcagctaatgaatcagttactgatgatctcgatgaagaggatgatgatgcagttgatcctgctgaatcaaacatgagagatgtcctagatgaccttgaatcttttgacttgggtaatggagggtccaaaactacagcaaagaagaaagaggcgtcccacaagcaccacaagaagccccagcggaagaaggatcggtcctggagggttggcaatgatggtggcgacggaacagcagttgtaagagtgtaccagaaacccgcagttaatttgtccacgggctctttaagtggcagggtctgatgccctaacttttactgctcgcgcaaccccggcacacatgggcaagggcatgggacctcttactgtagcaacggctgaactctgaagctagttcgatggaaggaagaaaggagtactgagcatacgagagtttgaaaaccttagaaacaacattggtagtcgttgccggaacttgtgctgcccttccggcctttctcgtatgtatatgctgtgagttgtagcacggtagattcatactaaacgtggtggtatgtgttgttttgtttttttcatgtctcacatagctgcagatacagctttggggatgcagatttgatgtgaaaaaaatatgtagacgattt

SEQ ID NO: 18107 - protein, 596 aa, Zea mays subsp. mays
  misc_feature (1)..(596): Ceres Seq. ID no. 12362651
MAGGGKKEKGEGLGRALIRQRNKAAAAAKERGEALAFGRRRAMPLESVIDVSDIDAVLQRAAEADQLAEAASVSSDSDLVIDLDATGETEDDRRRLRKEQEALHASSLRVPRRPPWHSQMTVEELDVNERRAFLVWRRNLARLEENDKLILTPFEKNIDIWRQLWRVLERSDLLVMVVDARDPLFYRCPDLEAYAKEIDEHKRTILLVNKADLLPLSIRKRWADYFKAHAILYVFWSAKAATATLEGKKLSGYSEGESASLDLDTKIYERDELLMKLQAEAESIVAQRRVSPTVDDHEASSSDSVSSVTKHVVVGFVGYPNVGKSSTINALVGEKRTGVTHTPGKTKHFQTLIISEELTLCDCPGLVFPSFSSSRHEMVACGVLPIDRMTKHREAIQVVADRVPRDILEQIYKIALPKPKPYEPQSRPPTAAELLRAYCASRGHVSHAGLPDETRAARQILKDYIDVKIPHFELPPGVTGPEVDFEQIAGSESPTTSAANESVTDDLDEEDDDAVDPAESNMRDVLDDLESFDLGNGGSKTTAKKKEASHKHHKKPQRKKDRSWRVGNDGGDGTAVVRVYQKPAVNLSTGSLSGRV

SEQ ID NO: 18108 - protein, 554 aa, Zea mays subsp. mays
  misc_feature (1)..(554): Ceres Seq. ID no. 12362652
MPLESVIDVSDIDAVLQRAAEADQLAEAASVSSDSDLVIDLDATGETEDDRRRLRKEQEALHASSLRVPRRPPWHSQMTVEELDVNERRAFLVWRRNLARLEENDKLILTPFEKNIDIWRQLWRVLERSDLLVMVVDARDPLFYRCPDLEAYAKEIDEHKRTILLVNKADLLPLSIRKRWADYFKAHAILYVFWSAKAATATLEGKKLSGYSEGESASLDLDTKIYERDELLMKLQAEAESIVAQRRVSPTVDDHEASSSDSVSSVTKHVVVGFVGYPNVGKSSTINALVGEKRTGVTHTPGKTKHFQTLIISEELTLCDCPGLVFPSFSSSRHEMVACGVLPIDRMTKHREAIQVVADRVPRDILEQIYKIALPKPKPYEPQSRPPTAAELLRAYCASRGHVSHAGLPDETRAARQILKDYIDVKIPHFELPPGVTGPEVDFEQIAGSESPTTSAANESVTDDLDEEDDDAVDPAESNMRDVLDDLESFDLGNGGSKTTAKKKEASHKHHKKPQRKKDRSWRVGNDGGDGTAVVRVYQKPAVNLSTGSLSGRV

SEQ ID NO: 18109 - protein, 477 aa, Zea mays subsp. mays
  misc_feature (1)..(477): Ceres Seq. ID no. 12362653
MTVEELDVNERRAFLVWRRNLARLEENDKLILTPFEKNIDIWRQLWRVLERSDLLVMVVDARDPLFYRCPDLEAYAKEIDEHKRTILLVNKADLLPLSIRKRWADYFKAHAILYVFWSAKAATATLEGKKLSGYSEGESASLDLDTKIYERDELLMKLQAEAESIVAQRRVSPTVDDHEASSSDSVSSVTKHVVVGFVGYPNVGKSSTINALVGEKRTGVTHTPGKTKHFQTLIISEELTLCDCPGLVFPSFSSSRHEMVACGVLPIDRMTKHREAIQVVADRVPRDILEQIYKIALPKPKPYEPQSRPPTAAELLRAYCASRGHVSHAGLPDETRAARQILKDYIDVKIPHFELPPGVTGPEVDFEQIAGSESPTTSAANESVTDDLDEEDDDAVDPAESNMRDVLDDLESFDLGNGGSKTTAKKKEASHKHHKKPQRKKDRSWRVGNDGGDGTAVVRVYQKPAVNLSTGSLSGRV

SEQ ID NO: 18110 - DNA, 617 bp, Zea mays subsp. mays
  misc_feature (1)..(617): Ceres Seq. ID no. 12362776
atacactcctgaaattgctgtcagctttggtgcagggttgattggatcattggtgtatctccgcatgcttggaaccagtatagattccctagcaggtggaactggagaaactgtcaagagtgctgctgcacaaccaaggttgcttattccagtggtacttgtgatgatgtataacagatggaatcagatattagttccggattatggtttcatgcagcttgagttaataccaatgcttgttgggttttttacctataagattgctacattcgctcaagcaatccaggattctatgcctccagtcggaaatcgtgaaggttgaaaagtgtcatgttgtatataaacgaaggtggtagccatggtccctggtcagtggtcacccagatagtaaggtctgtatagaagaatctggtctggtgtcatcaccaagtagatgagatgctcgttgaggacgccatttgaaaatctcgagtgcttaactatgttctgcacaaatattttgacgaaaggtgatgttaccacattcattccatattacacgcagatcatcagtgtataaatttacggctccgaacttttaccacaacgattaattgacaaaacaattgtatgattgc

SEQ ID NO: 18111 - protein, 106 aa, Zea mays subsp. mays
  misc_feature (1)..(106): Ceres Seq. ID no. 12362777
YTPEIAVSFGAGLIGSLVYLRMLGTSIDSLAGGTGETVKSAAAQPRLLIPVVLVMMYNRWNQILVPDYGFMQLELIPMLVGFFTYKIATFAQAIQDSMPPVGNREG

SEQ ID NO: 18112 - protein, 85 aa, Zea mays subsp. mays
  misc_feature (1)..(85): Ceres Seq. ID no. 12362778
MLGTSIDSLAGGTGETVKSAAAQPRLLIPVVLVMMYNRWNQILVPDYGFMQLELIPMLVGFFTYKIATFAQAIQDSMPPVGNREG

SEQ ID NO: 18113 - DNA, 864 bp, Zea mays subsp. mays
  misc_feature (1)..(864): Ceres Seq. ID no. 12362860
gcacgagaccattacctagaacatcctaatcgaaaaacctgcttattctggccttcgtctgacggacgcggcgctgcctcggccgccgctgccgcctccttctggccttcctccgacgccgcggagtcggaggcggcttcttgggcctgaaaggcctcgaggtccgcagccatggcgcgctcggcccggaggataggctcgtagtaggcggcgtgcgcgtccatgcacttccgcagcgcggccgtgacgtcttggcaccgctccacgacgtcaatgctggcatccgcggcatccgtctcctccacgcacttctcccacgcgacgaactcgtccttgcagccgccgcccttcatgaagagacagaacccgcactccccttgctcctcctcctcctccccctcccctgctccgctggccaccgcggaggcatcgatgaccaccgtctcagcagcctcttccgcgccgcctccaacagaaggagccgccgccgcatcgtctgcgccgccgccagctgcggcggtcgcggcgtcggaggcggagtgctggtgatcttctttggctggtgtagcggtggcctccggggaaggaggatcaggacgggaggcggctgtgtctagggaaagtgagggagaaggagaagcggcggttcccattgagctagggttcgggggctagcagatcgcggcggctgcgagactgtgatagggcgacgaacaaaagctagttatgatctgtaacgactaatgagtccgtcgataggggtgggcctaaacgtgtacaataccccatctattgaagaaacaaagcccaggccagcctagcccatatccattttgtaaaggtcattacgttctcatggaatgg

SEQ ID NO: 18114 - protein, 108 aa, Zea mays subsp. mays
  misc_feature (1)..(108): Ceres Seq. ID no. 12362861
MHFRSAAVTSWHRSTTSMLASAASVSSTHFSHATNSSLQPPPFMKRQNPHSPCSSSSSPSPAPLATAEASMTTVSAASSAPPPTEGAAAASSAPPPAAAVAASEAECW

SEQ ID NO: 18115 - protein, 91 aa, Zea mays subsp. mays
  misc_feature (1)..(91): Ceres Seq. ID no. 12362862
MLASAASVSSTHFSHATNSSLQPPPFMKRQNPHSPCSSSSSPSPAPLATAEASMTTVSAASSAPPPTEGAAAASSAPPPAAAVAASEAECW

SEQ ID NO: 18116 - protein, 65 aa, Zea mays subsp. mays
  misc_feature (1)..(65): Ceres Seq. ID no. 12362863
MKRQNPHSPCSSSSSPSPAPLATAEASMTTVSAASSAPPPTEGAAAASSAPPPAAAVAASEAECW

SEQ ID NO: 18117 - DNA, 1630 bp, Zea mays subsp. mays
  misc_feature (1)..(1630): Ceres Seq. ID no. 12362880
gcacgagaccattacctagaacatcctaatcgaaaaaattggatcttggatccatctccatgggtgcctccagtacttgcccttgccaccacttcagctcgtcttccatcctcaccaagcgggccatcgccttcgtgctctacgccctcgtccccctcgccctcatccactacctcctatctcttcctccccgtctcccctctcctcccaccaccggcgccgccacctccccgtcacggccgcagcaggcggaggaggctccggcagcgcggtgcgattactcggacggggagtgggtgcgggccgcggcaggtcctcggtacaacgggtcgagctgcggcgagacgatcaaggccggccagaactgcgaggcgcacgggcggccggacacggggtacatctactggcggtggcgcccgcgcgggtgcgcgctgccgccgttcgacccggaggagttcctgagcgcggtgcgcggtcgccacgtggccttcgttggcgactcgctcgcgcggaaccagtgcgagtccctggtgtgcctgctcgcctccgcgttcccggcccagctggtgcgcggcgctggcggcggcgacggggacggggacggcgacgagctccgcaagttccggcgctgggcgttcccgtcgcacaacgcgacggtgtcggtgttctggtcgccgttcctagtgaacggcacggagaggcccaagtcgccggcggcggcgggagggctggaccacaaccggatctacttcgaccagcccgacgagcggtgggcggcggcggtcccggggttcgacgtggtggtgctgtcggcggggcagtggtacctgaactcggccatgttctacgaccgtggcgccgtcatcggctgccatcgatgcccggagcccaaccgcaccgagacgggcttcttcggcgtgttccgcctcgccgtccgcaacgcgctccgcgaggtcatagcccgcgtcgccgccacgtcctcgcccgcgcgcccccggctggctgtgatgacgacgttctcgcccgcgcacttccagggggattgggacagcccgaccgcgtgcgtgcgcactcagccgtacgcgcgcggggagcgggagatggagtacatggatctggagatgctgcgcgccggggtggaggaggtcgccgcggccggcgaggacgcgagggtgcgcgggggcggcctggcggtggaggcgctgcaggtgacgcggctggcggcgatgcgcccggacgggcacccgggcctgtacacccgggcgttcccgttcgccaagggtgcgagggatcggatgcccaacgactgtgtgcactggtgcctgcccgggcccatcgacacgtggaacgagatcctgctgcagctcgtcaagcgatgggccatcggcgtcggcaccgacacctcgtcgccatcgccatgaactggtcttaccatgagaggttcgaagctaccgagtggccgtttggatgggcgattttggtccaaatccttgcgatggatttcgaattatttactcactcaagcgctttagattttgtagagttggcctttcgttcaagcgctcagtcaggtatctttcgcttgtattttaatgataccagaactggaatcagcttaattagtcagctt

SEQ ID NO: 18118 - protein, 453 aa, Zea mays subsp. mays
  misc_feature (1)..(453): Ceres Seq. ID no. 12362881
MGASSTCPCHHFSSSSILTKRAIAFVLYALVPLALIHYLLSLPPRLPSPPTTGAATSPSRPQQAEEAPAARCDYSDGEWVRAAAGPRYNGSSCGETIKAGQNCEAHGRPDTGYIYWRWRPRGCALPPFDPEEFLSAVRGRHVAFVGDSLARNQCESLVCLLASAFPAQLVRGAGGGDGDGDGDELRKFRRWAFPSHNATVSVFWSPFLVNGTERPKSPAAAGGLDHNRIYFDQPDERWAAAVPGFDVVVLSAGQWYLNSAMFYDRGAVIGCHRCPEPNRTETGFFGVFRLAVRNALREVIARVAATSSPARPRLAVMTTFSPAHFQGDWDSPTACVRTQPYARGEREMEYMDLEMLRAGVEEVAAAGEDARVRGGGLAVEALQVTRLAAMRPDGHPGLYTRAFPFAKGARDRMPNDCVHWCLPGPIDTWNEILLQLVKRWAIGVGTDTSSPSP

SEQ ID NO: 18119 - protein, 251 aa, Zea mays subsp. mays
  misc_feature (1)..(251): Ceres Seq. ID no. 12362882
MPGAQPHRDGLLRRVPPRRPQRAPRGHSPRRRHVLARAPPAGCDDDVLARALPGGLGQPDRVRAHSAVRARGAGDGVHGSGDAARRGGGGRRGRRGREGARGRPGGGGAAGDAAGGDAPGRAPGPVHPGVPVRQGCEGSDAQRLCALVPARAHRHVERDPAAARQAMGHRRRHRHLVAIAMNWSYHERFEATEWPFGWAILVQILAMDFELFTHSSALDFVELAFRSSAQSGIFRLYFNDTRTGISLISQL

SEQ ID NO: 18120 - DNA, 1152 bp, Zea mays subsp. mays
  misc_feature (1)..(1152): Ceres Seq. ID no. 12362891
atatatctttttctccccaagaaaaaaaaggcggcgagagcataagaaaaaaacacacacacacacacacacacaaagcgcacttttcaaatcgacaaaggggaaaggttcgcttcttctcgcatcttgctttacttcgagtgccatggccgatccggcggaggagaacgttgtctcgccgccaccgacccctgcggccccagccgtgggcgcctcagactcgcccctgcagcctgttgctgacggcgcctcaacggagaaggtgtctgccccggcgccggaggtaaggtcccggggattcaggcttcttggagaggacacttccgtgcacaaatcccttgggggcggtaaaactgctgacgttctgttatggaaagacaagaaaacttctgctgttgtaataggcggcgcaactgtcatctgggttctgttcgaagtgcttgattaccacctcctgaccctgatatcccatgtactgattggtgtgcttgccaccttattcctgtggtccaaagcaaccacgttcatcaagaagagtccaccggatattccagtagtgcaggtatctgaggaccttgttgtgaatgtttcacgggcattacggaatgacatcaacagagcgcttcacttgttccgtgagatcgcaatggggcatgatctgaagaagtttttgggtgtgatcgtgggtctgtgggttctctccggagttggaagcagctgtgacttcctcacgttgacatacattgccgtcctgatgctccacacggtgccaatcttgtacgacaagtaccaggacaaggtggaccatgtcgctggaagggcacacaccgaggccctcaagcagtacaaggtgctggatgccaaggtcctgagcaaaatccccaggggtgcggtcaaatccaaaaagcagaactagttaggataagccgcagattgtgaatgcccgtatcatgagtatcgggcttgtggtttgcatggcatatgtaaatctgtctgttggcttcagcttggttcttctgcgactactttgttgatgttattatagtcctatgtatgtactgtgtacatgacagatgttcggacgtctcggctactgctgtagcttgtaaattccagtggtgcgttgctaagcacgatgctccccttgttttg

SEQ ID NO: 18121 - protein, 304 aa, Zea mays subsp. mays
  misc_feature (1)..(304): Ceres Seq. ID no. 12362892
YIFFSPRKKRRREHKKKTHTHTHTQSALFKSTKGKGSLLLASCFTSSAMADPAEENVVSPPPTPAAPAVGASDSPLQPVADGASTEKVSAPAPEVRSRGFRLLGEDTSVHKSLGGGKTADVLLWKDKKTSAVVIGGATVIWVLFEVLDYHLLTLISHVLIGVLATLFLWSKATTFIKKSPPDIPVVQVSEDLVVNVSRALRNDINRALHLFREIAMGHDLKKFLGVIVGLWVLSGVGSSCDFLTLTYIAVLMLHTVPILYDKYQDKVDHVAGRAHTEALKQYKVLDAKVLSKIPRGAVKSKKQN

SEQ ID NO: 18122 - protein, 256 aa, Zea mays subsp. mays
  misc_feature (1)..(256): Ceres Seq. ID no. 12362893
MADPAEENVVSPPPTPAAPAVGASDSPLQPVADGASTEKVSAPAPEVRSRGFRLLGEDTSVHKSLGGGKTADVLLWKDKKTSAVVIGGATVIWVLFEVLDYHLLTLISHVLIGVLATLFLWSKATTFIKKSPPDIPVVQVSEDLVVNVSRALRNDINRALHLFREIAMGHDLKKFLGVIVGLWVLSGVGSSCDFLTLTYIAVLMLHTVPILYDKYQDKVDHVAGRAHTEALKQYKVLDAKVLSKIPRGAVKSKKQN

SEQ ID NO: 18123 - DNA, 1795 bp, Zea mays subsp. mays
  misc_feature (1)..(1795): Ceres Seq. ID no. 12362950
gcacgagaccattacctagaacatcctaatcgaaaaaggccatcaagacgtagcagctccccttgcgtctgcgcacgccaccgaaggatcctcgccgcgcgtgcagtgcgatccgaggggaggggtccaaggccatgatgaagagcgtcagcggcaccggctcggccgggagccgtagcgatccgggcggcagcggcgagctgtcccgcttctccgtcgccaccacggcgtcgtccgcctcgcagccttccgcgaacggtggcgcgcgcgggatctccttcctcgacgccttccggtcctgcttcgttcccccggaggcgcgctcgccggagaactccatgtccgacgaatcccacccctcccaccaactctcgcagtctttgagctcacaaggttctaacagtgggagcgtgtttgggagcaagcgatcgattaaaggaatgtatagtcccatgcacaggagttctttagatagggagatccctggcagcacaaaattctccttgccacagatccagaaagcaacaaagaacttctcgccaaacttcaagattgggcagggtggttctgggactgtatacaagggtcagcttgctgatggtactcttgtcgctgtcaaacgtgccaagaagaatgtgtatgacaagtatatgggtcgtgagttctggaacgagattgagacattgcaacgcattgagcacctgaatttggttaggttccatgggtacctggagtttggtggcgagcagttgattattgtggagtatgttcccaatgggaatcttcgagagcacctcgactgtataaatggtaaaatattggaattctcactgagattggaaattgcaattgatgtggctcatgctattacatatcttcatacctattcagatcatccagtcatccacagagacatcaaatcctcaaacattcttctaatgaacaattgtcgagccaaggttgctgactttggattcgccaaattggctccaactgattctagtcatatatctactcaagtcaaaggaacagcaggctatctcgatccagaatatctcagaacataccagctcaatgagaagagtgatgtctactcctttggagtccttctggtggagttggttactgggaggcgccctatagagccaaaaaaggcaatcattgagcgtgttaccacaaaatgggcaatggaaaattttgtggagggcaatgctatccaaacactagatccgaatctggaagcgaccgatgcgatcaatctagcggtcgagaagctgtatgagctggctctgcaatgcttagccccaactaagaggaaccgaccgagcatgaagcggtgcgcagagattctgtggagcatccgtaaagattacagggagttggttgtacccacctctgcgatgaactgaagcaggtcgtctggagcagtcaagtgaacaaaaagatgtatcactccagtttgcctctcttgattcgcttcaaagattggtggttgaaatcatccgattgctgggattctttcagttaccgcaagtggtcgtgaacaggactgatggccttcctagatgctttgtttgtgctagaaaccagaaaagtcccttacaggtcttactatgctgtgtgaaagtgttgctgagtaaacatgtacgagtatatatcagatatctaatggtgtgtatatcttgtaggttctcttatacaggtaattgcatcacgcatgaagaaatctagttgtttccattgcatcttttttttttgtctatgatgaacaatattcagcgtatgattagcaagc

SEQ ID NO: 18124 - protein, 424 aa, Zea mays subsp. mays
  misc_feature (1)..(424): Ceres Seq. ID no. 12362951
MMKSVSGTGSAGSRSDPGGSGELSRFSVATTASSASQPSANGGARGISFLDAFRSCFVPPEARSPENSMSDESHPSHQLSQSLSSQGSNSGSVFGSKRSIKGMYSPMHRSSLDREIPGSTKFSLPQIQKATKNFSPNFKIGQGGSGTVYKGQLADGTLVAVKRAKKNVYDKYMGREFWNEIETLQRIEHLNLVRFHGYLEFGGEQLIIVEYVPNGNLREHLDCINGKILEFSLRLEIAIDVAHAITYLHTYSDHPVIHRDIKSSNILLMNNCRAKVADFGFAKLAPTDSSHISTQVKGTAGYLDPEYLRTYQLNEKSDVYSFGVLLVELVTGRRPIEPKKAIIERVTTKWAMENFVEGNAIQTLDPNLEATDAINLAVEKLYELALQCLAPTKRNRPSMKRCAEILWSIRKDYRELVVPTSAMN

SEQ ID NO: 18125 - protein, 423 aa, Zea mays subsp. mays
  misc_feature (1)..(423): Ceres Seq. ID no. 12362952
MKSVSGTGSAGSRSDPGGSGELSRFSVATTASSASQPSANGGARGISFLDAFRSCFVPPEARSPENSMSDESHPSHQLSQSLSSQGSNSGSVFGSKRSIKGMYSPMHRSSLDREIPGSTKFSLPQIQKATKNFSPNFKIGQGGSGTVYKGQLADGTLVAVKRAKKNVYDKYMGREFWNEIETLQRIEHLNLVRFHGYLEFGGEQLIIVEYVPNGNLREHLDCINGKILEFSLRLEIAIDVAHAITYLHTYSDHPVIHRDIKSSNILLMNNCRAKVADFGFAKLAPTDSSHISTQVKGTAGYLDPEYLRTYQLNEKSDVYSFGVLLVELVTGRRPIEPKKAIIERVTTKWAMENFVEGNAIQTLDPNLEATDAINLAVEKLYELALQCLAPTKRNRPSMKRCAEILWSIRKDYRELVVPTSAMN

SEQ ID NO: 18126 - protein, 356 aa, Zea mays subsp. mays
  misc_feature (1)..(356): Ceres Seq. ID no. 12362953
MSDESHPSHQLSQSLSSQGSNSGSVFGSKRSIKGMYSPMHRSSLDREIPGSTKFSLPQIQKATKNFSPNFKIGQGGSGTVYKGQLADGTLVAVKRAKKNVYDKYMGREFWNEIETLQRIEHLNLVRFHGYLEFGGEQLIIVEYVPNGNLREHLDCINGKILEFSLRLEIAIDVAHAITYLHTYSDHPVIHRDIKSSNILLMNNCRAKVADFGFAKLAPTDSSHISTQVKGTAGYLDPEYLRTYQLNEKSDVYSFGVLLVELVTGRRPIEPKKAIIERVTTKWAMENFVEGNAIQTLDPNLEATDAINLAVEKLYELALQCLAPTKRNRPSMKRCAEILWSIRKDYRELVVPTSAMN

SEQ ID NO: 18127 - DNA, 2397 bp, Zea mays subsp. mays
  misc_feature (1)..(2397): Ceres Seq. ID no. 12363062
gcacgagaccattacctagaacatcctaatcaaaaaattccatttcttcttcgtcctcgcaccagtccctcctccttggaagcgagggaggagagtggagggagagggaggagcgaggcaccggtgagctcgggaggcggcgtggggcttgcacgccggccctacccccagctcactcaccacgctcttgtctgaccaactctctctctctcttatctccttccaagattcccccatttttttgttgttgtccccccattcttgctaggatcattccttgatctttcgctcgctccagtacgcctgttttccagctccggagatcccatctcggccacctcctgcggtctccaagctccaagaggccagattccagcacaaatttgaggtcaatttgcccgctgagctcgaatcaatccgctcggcaacaagtgtcatttgttcccccgatccccgggcttcgattcgatcgaatccgacctaattttattgtgtgtgtgtgtgtttaaccttctctcgctgcacttttcctttctcctccctgtcgcaaacgcaaagtgggttccatcgcgtcacccgcacggctcctctgatcgggcggagaaagaaagcgcataaaaggcgagctcttgatgcggtcttggtcgtagcaacagcagctccactgctcccggcatcgcctgctgttgtttatccatatacggacggagcagcgggcgctccggcagaggcagtggcagcgcgctccccccgtcagcgcgtgctgatgcttgcccccctgctcgccgccttcgctgtcgtcttcctgctcctcctgtccaggccatgcgcccgtgacatgagactgttcctcgcctccctgtgccagcagctcgtgctgtccctgctcgggttcctggcaggcctccgcctgctcagcggcgtcgcggccgcctccgcggccacagagaccatgccgctcatgccctccttcaagaggaagcgggcctcggccacggtggagaatgcggaggaggcggccgccacggccggcggcggcgagacgtcggtgctcgacctgccggagctggccatcgattgcattctggagaagctgcggccggcggagctgcggagcatggccgccgtctgccgctccatgcgcgagcgctgccgcggcgaccacctctgggagcgccacatgacaaacaggtggggccgtgtcctgggccgcgccgccagggacgaatggaggacgcacctggcgtccgccagcgagtcccgcgcggcgggcggcggcggcggcggcggcaagcgccggaggtggctcgccgcgctgtcctgcgtttgcccggtggtgtcctggatgcggcccagggccgacggtggcaagtcgtccgcccccgtgctggacgattccatcatgtcgtggtacctgtccgtggagagcggcaagttctggttcccggctcaggtctacaaccgcgagcatgggcatgttgggttcatgatgtcatgctacgatgcagcgctcagttacgatttgcataccgacacattccgtgcaaggtacccaccacacggtcgacgaaccgtggtgttggaggatggcgtgcaatgggacagggtgagggcaccgcctgttgacacccttgcgcattacctgcacacctctgactgcctgcatgagctccggcccggcgaccacatcgagattcagtggagaaggaacaaagaattcccatacggctggtggtatggagttgttgggcacttggagtcatgtgatggaagcgaacacttttgtcggtgccatcttagtgataccgtggtgctggagtttaatcagtacacgccgggctcaaggtggaggcaagccgttggtgaaacggaaggagcatagggaggagggcaacgagggcgacgggttctacggcggcataaggaagctccgcggcaacgatgacatctccaagtggaggcagctgtggccaacagacgtcctggagtaagcaggaaccgcatcccttctcacaccgacattgatccatcgctcaaatgacacgcctttctttcatcatcatattgaccaaattcgtcgtctctgtcgcgctgttgtaaacgggttagtagaagaacaaatcccgtagctggacaagggtgtaacacttactctctccgtttcgttttagttgtcgctggatagtgcaaaattgaactatccagctacaactaaaaagaaacggatggagtatttgttaggcgtaccaggcgcagactgcttcctatttgttcgtggggctgtaactgtaagccttgtttgtgacccctaagcagtctgcgtcttgtgcctgctgctgtagcggtagagcagagagagatcaaatgtaaattacatttttttagctcaaattcacg

SEQ ID NO: 18128 - protein, 371 aa, Zea mays subsp. mays
  misc_feature (1)..(371): Ceres Seq. ID no. 12363063
MLAPLLAAFAVVFLLLLSRPCARDMRLFLASLCQQLVLSLLGFLAGLRLLSGVAAASAATETMPLMPSFKRKRASATVENAEEAAATAGGGETSVLDLPELAIDCILEKLRPAELRSMAAVCRSMRERCRGDHLWERHMTNRWGRVLGRAARDEWRTHLASASESRAAGGGGGGGKRRRWLAALSCVCPVVSWMRPRADGGKSSAPVLDDSIMSWYLSVESGKFWFPAQVYNREHGHVGFMMSCYDAALSYDLHTDTFRARYPPHGRRTVVLEDGVQWDRVRAPPVDTLAHYLHTSDCLHELRPGDHIEIQWRRNKEFPYGWWYGVVGHLESCDGSEHFCRCHLSDTVVLEFNQYTPGSRWRQAVGETEGA

SEQ ID NO: 18129 - protein, 347 aa, Zea mays subsp. mays
  misc_feature (1)..(347): Ceres Seq. ID no. 12363064
MRLFLASLCQQLVLSLLGFLAGLRLLSGVAAASAATETMPLMPSFKRKRASATVENAEEAAATAGGGETSVLDLPELAIDCILEKLRPAELRSMAAVCRSMRERCRGDHLWERHMTNRWGRVLGRAARDEWRTHLASASESRAAGGGGGGGKRRRWLAALSCVCPVVSWMRPRADGGKSSAPVLDDSIMSWYLSVESGKFWFPAQVYNREHGHVGFMMSCYDAALSYDLHTDTFRARYPPHGRRTVVLEDGVQWDRVRAPPVDTLAHYLHTSDCLHELRPGDHIEIQWRRNKEFPYGWWYGVVGHLESCDGSEHFCRCHLSDTVVLEFNQYTPGSRWRQAVGETEGA

SEQ ID NO: 18130 - protein, 309 aa, Zea mays subsp. mays
  misc_feature (1)..(309): Ceres Seq. ID no. 12363065
MPLMPSFKRKRASATVENAEEAAATAGGGETSVLDLPELAIDCILEKLRPAELRSMAAVCRSMRERCRGDHLWERHMTNRWGRVLGRAARDEWRTHLASASESRAAGGGGGGGKRRRWLAALSCVCPVVSWMRPRADGGKSSAPVLDDSIMSWYLSVESGKFWFPAQVYNREHGHVGFMMSCYDAALSYDLHTDTFRARYPPHGRRTVVLEDGVQWDRVRAPPVDTLAHYLHTSDCLHELRPGDHIEIQWRRNKEFPYGWWYGVVGHLESCDGSEHFCRCHLSDTVVLEFNQYTPGSRWRQAVGETEGA

SEQ ID NO: 18131 - DNA, 1003 bp, Zea mays subsp. mays
  misc_feature (1)..(1003): Ceres Seq. ID no. 12363103
gatggctgcgttcttgggctgggaaccaatggccaaaggcccaaaggccaaagctgaagaatggtgcgcgtgcgtgcaggagctccagtgaagctggagaaccactcgttccggctggccgagtcgatgccccccatggacgccgtcttcctggcgtggaactacatgggcaaccgcgacgtcgagcgcatggtcttccactacctgaccaccactgcgtgggccgccgtggctaaggcggacgtcgtcctctgcaacaccttcgaggacctcgagccggacatcttcggcgcccactccccggcggccgcctccatcctcccgatcggcccgctgcgcacctggcagcgccggacgagcgaggcgccggccgggcacttttggcgcgccgacgacgaggcctgcgcgtccttcctggacgcgcagccccgtgggtccgtgacgtacgtggcgttcgggagcctgacggtcatgagccccgcgcagctccaggagctcgcgctggccctgctggcctccgcccgccccttcctgtgggtgttccggccagggctggcggccgagctcccgcccgcgttcacggatctcctgccacgccatgcgaggggcaaggtggtggagtgggcgccgcaggagaaagtgctcgcgcaccctgctgtcggctgcttcctgacgcattgcgggtggaactcgacgctggagggcgtccgccatggcgtgcctttgctttgctggccctactttagcgaccagttcacgaaccaggcatacatttgtgatatctggaaggtggggttaagggtggtgcccgacggtggtgatggcattgtcgccaaggaaaggatcatggagaggttgacgagcctaatgggtgacagtggtgtgaaggaaagggtgaaaagattgaaggaattggcagagaggagcatggggcctgagggcaaatctttgaagaacatcaacgccttcatggaatccatgacgaagtgattgttattgtgtt

SEQ ID NO: 18132 - protein, 309 aa, Zea mays subsp. mays
  misc_feature (1)..(309): Ceres Seq. ID no. 12363104
MVRVRAGAPVKLENHSFRLAESMPPMDAVFLAWNYMGNRDVERMVFHYLTTTAWAAVAKADVVLCNTFEDLEPDIFGAHSPAAASILPIGPLRTWQRRTSEAPAGHFWRADDEACASFLDAQPRGSVTYVAFGSLTVMSPAQLQELALALLASARPFLWVFRPGLAAELPPAFTDLLPRHARGKVVEWAPQEKVLAHPAVGCFLTHCGWNSTLEGVRHGVPLLCWPYFSDQFTNQAYICDIWKVGLRVVPDGGDGIVAKERIMERLTSLMGDSGVKERVKRLKELAERSMGPEGKSLKNINAFMESMTK

SEQ ID NO: 18133 - protein, 287 aa, Zea mays subsp. mays
  misc_feature (1)..(287): Ceres Seq. ID no. 12363105
MPPMDAVFLAWNYMGNRDVERMVFHYLTTTAWAAVAKADVVLCNTFEDLEPDIFGAHSPAAASILPIGPLRTWQRRTSEAPAGHFWRADDEACASFLDAQPRGSVTYVAFGSLTVMSPAQLQELALALLASARPFLWVFRPGLAAELPPAFTDLLPRHARGKVVEWAPQEKVLAHPAVGCFLTHCGWNSTLEGVRHGVPLLCWPYFSDQFTNQAYICDIWKVGLRVVPDGGDGIVAKERIMERLTSLMGDSGVKERVKRLKELAERSMGPEGKSLKNINAFMESMTK

SEQ ID NO: 18134 - protein, 284 aa, Zea mays subsp. mays
  misc_feature (1)..(284): Ceres Seq. ID no. 12363106
MDAVFLAWNYMGNRDVERMVFHYLTTTAWAAVAKADVVLCNTFEDLEPDIFGAHSPAAASILPIGPLRTWQRRTSEAPAGHFWRADDEACASFLDAQPRGSVTYVAFGSLTVMSPAQLQELALALLASARPFLWVFRPGLAAELPPAFTDLLPRHARGKVVEWAPQEKVLAHPAVGCFLTHCGWNSTLEGVRHGVPLLCWPYFSDQFTNQAYICDIWKVGLRVVPDGGDGIVAKERIMERLTSLMGDSGVKERVKRLKELAERSMGPEGKSLKNINAFMESMTK

SEQ ID NO: 18135 - DNA, 1035 bp, Zea mays subsp. mays
  misc_feature (1)..(1035): Ceres Seq. ID no. 12363140
gttcccagcagcgctgccagcctgccaccgtcttcccggaaccccaccgagccgacgaccgaagccgacgcgaccctcctcgcgtcaccgcgcgcaagagtcccatggccacggcgggttcgtccccccctgccagccagcagcccttcaagctgatcctagggtcgtcttcggtggcgcggaagcacatcctcgaggagatggggctggagttccaagtcatgactgctgacatcgacgagaagagcatcaggagggagaatcccgatgacctggtaacggtcctcgcggaggccaaggctgatgctatcatgtccagattgaacattgatgattatcagaaagaaggcagtcaaccaacactcctgatcacatctgacatagtggtcgtccatgaagggattattagagaaaaaccaaccaccaaggaagaagcacggcaattcctgaaaggctattccggaggtcacgtgtcaactgttgggtctgttgttgtaactaatcttacaactgggaagagacttggaagtttggacaaagctgaggtttatttccacgatataccagatgaggtcatcaagagcttgatcgatgagggagtagtatttagggtcgcaggtggtttgctgcttgaacatccattgacgctgccgtttgtcgaagcagtggttggttctagtgacagtgtcatggggctgtcaaaggaggttgcaaacaagttaattcacgacgcactgtctacttagcgtagcaatttcagcactactgtttctgatcaaattcttactgcactcacctggagatgtgatcaagcagagagcatatctggggatacccatagtgattcatgtatttttaaacgttaaaccaagacaggcgcacctggcattgcaaattgtgatcaggttgtacttgtcttctgtttcacttgaaggatacgttgatgcttcttttagtgggtcagttgggtatgatttgtaatatactgatatacataatctcgtctctgatatgtgactgttcgttgcaattgtt

SEQ ID NO: 18136 - protein, 247 aa, Zea mays subsp. mays
  misc_feature (1)..(247): Ceres Seq. ID no. 12363141
SQQRCQPATVFPEPHRADDRSRRDPPRVTARKSPMATAGSSPPASQQPFKLILGSSSVARKHILEEMGLEFQVMTADIDEKSIRRENPDDLVTVLAEAKADAIMSRLNIDDYQKEGSQPTLLITSDIVVVHEGIIREKPTTKEEARQFLKGYSGGHVSTVGSVVVTNLTTGKRLGSLDKAEVYFHDIPDEVIKSLIDEGVVFRVAGGLLLEHPLTLPFVEAVVGSSDSVMGLSKEVANKLIHDALST

SEQ ID NO: 18137 - protein, 213 aa, Zea mays subsp. mays
  misc_feature (1)..(213): Ceres Seq. ID no. 12363142
MATAGSSPPASQQPFKLILGSSSVARKHILEEMGLEFQVMTADIDEKSIRRENPDDLVTVLAEAKADAIMSRLNIDDYQKEGSQPTLLITSDIVVVHEGIIREKPTTKEEARQFLKGYSGGHVSTVGSVVVTNLTTGKRLGSLDKAEVYFHDIPDEVIKSLIDEGVVFRVAGGLLLEHPLTLPFVEAVVGSSDSVMGLSKEVANKLIHDALST

SEQ ID NO: 18138 - protein, 181 aa, Zea mays subsp. mays
  misc_feature (1)..(181): Ceres Seq. ID no. 12363143
MGLEFQVMTADIDEKSIRRENPDDLVTVLAEAKADAIMSRLNIDDYQKEGSQPTLLITSDIVVVHEGIIREKPTTKEEARQFLKGYSGGHVSTVGSVVVTNLTTGKRLGSLDKAEVYFHDIPDEVIKSLIDEGVVFRVAGGLLLEHPLTLPFVEAVVGSSDSVMGLSKEVANKLIHDALST

SEQ ID NO: 18139 - DNA, 1655 bp, Zea mays subsp. mays
  misc_feature (1)..(1655): Ceres Seq. ID no. 12363163
gcacgagaccattacctagaacatcctaatcgaaaaatcctgatccgctcgctcccaaatcctactgccgtgcgcgtcccgctcctgcggctgcgccccccgcgaggagaaagccggttagccacagccccacacgcgcgcatcacgccacaaccacaccacacggcaccagcctcctccgtcgtcaccgcctcgggcctcggccgatcgatcgggtctggcggcggccacaagcgtcgctgtttaataaatagccctgagcggcctccccctgcccctcagttcagcctcggctggacatcgagtttgtaccgggaaacagcttggtagtataaccactgaagatggtcagtgggaggccgcatggtgaattggactcatggttcaagagcctcatggtgacctctagcagcgagagggggcaggctgggagtggtggtccagcgccaacattaacaggatggaaggaccttccgatggagctcctggtgcggataatatccacagttggagatgataggatggtcatcgtggcgtctggtgtttgcacaggctggcgtgacgcgctgggatggggggtcactaatctttcacttacatggtgcaaactgagcatgaataatttaatgatatctcttgcccacaagttcacgaagttgcaagttctcactctccggcaaaacaaacctcagcttgaagacagtgccgtagaggctgttgccaactactgccatgacctacgtgagttagacctcagcagaagcttcaggcttagtgaccgctccttgtatgcgctggcccatggatgcccacggcttacaagactgaacattagtggatgttccagtttcagcgacactgcgttgatttaccttacctgccgctgtaaaaacctcaagtgcctgaacttgtgtggatgcgtgaaggctgttactgacagagctttgcaggctattgctcagaactgtgggcagctgcagtctttgaacctaggctggtgtgatgatgttacagataagggagtgaccagcttagcgtcaggatgccctgatctcagagccgtagactcgtgcggttgtgttcttataacagatgagagtgtggttgctcttgccaacggatgtccgcacctgcgctcgctgggcctctacttctgccagaacatcacggaccgcgccatgtactccctcgcaaacagccgcgtgaagagcaagcgtgggaggtgggatgcagtgaaagacgggctcgcgaacctcaacatcagccagtgcaccgccctgacgcccccggcggtgcaggccgtctgcgactccttcccggcgctgcacacctgccccgagaggcactccctcatcatcagtggctgcctcagcctcacgtcagtccactgcgcctgcgccctccacccacaccgtgccgggagagccctgatggccaaccatgcgtactaataaacatgttggtggctttgcgctgatagttctcgcgaatggggacgcatgcctggggggtgatggcgtcgtccaggtgtagaggaagctccctgtgtacataaactcgaaacttggcggtgtgataaggcactgctgtggtaggactttgtgtgataatcatggagtggcgaatttctagagaatggcatgtactccagtgct

SEQ ID NO: 18140 - protein, 368 aa, Zea mays subsp. mays
  misc_feature (1)..(368): Ceres Seq. ID no. 12363164
MVSGRPHGELDSWFKSLMVTSSSERGQAGSGGPAPTLTGWKDLPMELLVRIISTVGDDRMVIVASGVCTGWRDALGWGVTNLSLTWCKLSMNNLMISLAHKFTKLQVLTLRQNKPQLEDSAVEAVANYCHDLRELDLSRSFRLSDRSLYALAHGCPRLTRLNISGCSSFSDTALIYLTCRCKNLKCLNLCGCVKAVTDRALQAIAQNCGQLQSLNLGWCDDVTDKGVTSLASGCPDLRAVDSCGCVLITDESVVALANGCPHLRSLGLYFCQNITDRAMYSLANSRVKSKRGRWDAVKDGLANLNISQCTALTPPAVQAVCDSFPALHTCPERHSLIISGCLSLTSVHCACALHPHRAGRALMANHAY

SEQ ID NO: 18141 - protein, 351 aa, Zea mays subsp. mays
  misc_feature (1)..(351): Ceres Seq. ID no. 12363165
MVTSSSERGQAGSGGPAPTLTGWKDLPMELLVRIISTVGDDRMVIVASGVCTGWRDALGWGVTNLSLTWCKLSMNNLMISLAHKFTKLQVLTLRQNKPQLEDSAVEAVANYCHDLRELDLSRSFRLSDRSLYALAHGCPRLTRLNISGCSSFSDTALIYLTCRCKNLKCLNLCGCVKAVTDRALQAIAQNCGQLQSLNLGWCDDVTDKGVTSLASGCPDLRAVDSCGCVLITDESVVALANGCPHLRSLGLYFCQNITDRAMYSLANSRVKSKRGRWDAVKDGLANLNISQCTALTPPAVQAVCDSFPALHTCPERHSLIISGCLSLTSVHCACALHPHRAGRALMANHAY

SEQ ID NO: 18142 - protein, 324 aa, Zea mays subsp. mays
  misc_feature (1)..(324): Ceres Seq. ID no. 12363166
MELLVRIISTVGDDRMVIVASGVCTGWRDALGWGVTNLSLTWCKLSMNNLMISLAHKFTKLQVLTLRQNKPQLEDSAVEAVANYCHDLRELDLSRSFRLSDRSLYALAHGCPRLTRLNISGCSSFSDTALIYLTCRCKNLKCLNLCGCVKAVTDRALQAIAQNCGQLQSLNLGWCDDVTDKGVTSLASGCPDLRAVDSCGCVLITDESVVALANGCPHLRSLGLYFCQNITDRAMYSLANSRVKSKRGRWDAVKDGLANLNISQCTALTPPAVQAVCDSFPALHTCPERHSLIISGCLSLTSVHCACALHPHRAGRALMANHAY

SEQ ID NO: 18143 - DNA, 1231 bp, Zea mays subsp. mays
  misc_feature (1)..(1231): Ceres Seq. ID no. 12363179
gcacgagaccattacctagaacatcctaatcgaaaaaaaggaaaaccacacaccggccaaaccacgactgcaggaggcgggtagtagcaagagaaaggaaacgctctcccagccccaaagaaaaaggcagcacaccaactcaccaagaaagtgtggaactgctcctgcctgcagcctcctgctcatcgaccctttcgccccacaagctcgattcctcgctcggccatggctgcacccgcggaggagacgcttgccgccgaggatacggcgtcaccaccgccgccggcgaggtctgcggggttctggttccttggcgaggataagtctgtccacaaggctctcggcgggggtaaaactgctgatgtacttttgtggaaagacaagaagacctctgctgcggtagttggtggtgcaactgtcctatgggttctgttcgaaattgtagaataccatctcctgaccctggtttctcatgtgctgatcgctgcactgaccatcttgttcctgtggtccaatgcgactgtctttatcaaaaagagtcctcctgatgttcctgaagtgcagatatctgaagaccttgctgtaaacattgcgctagcattgcgtgctgacatcaacaaggcacttgccctgcttcgggagattgctctgggccataacctgatgaagttcctaggcgtggtcgtcgccctttggattctttcagagatcggggagctatgtgatctcctgagattgatgtacattgtggtcttgatcctccacacagtgccgatactgtaccacaagtatcaggaccaggtggacaatttcgctgcaaaggcgcacagggagctctgcaagcaatacgcggtcctggatgccaaagttctgagcaagattccaagagctccaccaaaagataagaaacagaactagaacgtggaggatgacaagcgccttgttttcggcttgggcgacgagagtttgtagccaatggtctgatgtggttcgtgggctttgtgtaggtgcacagtttcacgtatatgttctggtcgtgtaatctatatgtttatataaacctgtaggggtgttgatgaccatcgaaagtgtcgtaaatattcagtagtatatgtagcttagggcttaagcggttgtgtttataaggtcattgtcgttgtcgatgggaagtattatcatgttattttcaggactcaggagtataaaatgaaataaaatgtgaattcatctg

SEQ ID NO: 18144 - protein, 230 aa, Zea mays subsp. mays
  misc_feature (1)..(230): Ceres Seq. ID no. 12363180
MAAPAEETLAAEDTASPPPPARSAGFWFLGEDKSVHKALGGGKTADVLLWKDKKTSAAVVGGATVLWVLFEIVEYHLLTLVSHVLIAALTILFLWSNATVFIKKSPPDVPEVQISEDLAVNIALALRADINKALALLREIALGHNLMKFLGVVVALWILSEIGELCDLLRLMYIVVLILHTVPILYHKYQDQVDNFAAKAHRELCKQYAVLDAKVLSKIPRAPPKDKKQN

SEQ ID NO: 18145 - DNA, 1321 bp, Zea mays subsp. mays
  misc_feature (1)..(1321): Ceres Seq. ID no. 12363181
tcttcctcgtcgtcggcgactgcctccttgttggtctccagcccatcctagtgttcatgtcaaaggttgatgggaagtttcagttcagtcccatcagtgttaactttctgacggaggttatgaaagtcatctttgctgtcgtcatgctcataattcagtctagaaagcaaaaggttggagaaaagccacttttggcacgttcaaccttcatacaggcagcccgtaataatgtacttctagctgttcctgctcttctatatgcaatcaacaattacctaaaattcatcatgcagttgtacttcaatcctgcaactgtgaaaatgctaagtaacctaaaggtactggttatagcttttcttctgaaatttataatgagaaggagattctcagttattcagtgggaagctcttgctctattgcttattggaatcagcatcaatcaactccgaactgtacctgtgggcaacacagcatttggtcttcctgtcactgctattgcgtacatatatacattgatttttgtaactgttccttcagtggcttctgtctacaatgaatatgccttgaaaagtcaatatgacactagcatctatctccagaacttgtttctgtacggatatggagcaatattcaacttgcttggcattcttgggactgtcctattccaagggccagagagttttaatattcttcgaggccattcaagggccacaatatttctcatatgtaacaatgctgcacaaggcattctatcttcattcttctttaagtatgcagacacaattttgaagaaatattcgtcaactgttgccacaatatttactggcctagcttctgctgcatttttggggcattccttgaccattaattttctcctgggcatatcagtggtgtttatttcaatgcaccagttcttctctccgcttgcaaaagtcaaagatgacaaaccagctgactcaatagagttggaagatacacaaaatgaccgcccatctgaatcttcttttgtaaatatgactgctggtgccgctgatgatgcaagccatcggattggaactgatgagaggcagccgctattgcctatatgaacttgtttgttgaggtaggacagaagagaggggatagaagaagaggctcctttttgccgtgtgagcaacagatttgatgtagcattgttaggcgaataaacagctattgtacactgtagaggcaaaagaaacaaataaacgtggtttccattttctttaaattttttggggataccttgggagcggcagaaatcatacattttgatagacataattcaatagggatttctagg

SEQ ID NO: 18146 - protein, 361 aa, Zea mays subsp. mays
  misc_feature (1)..(361): Ceres Seq. ID no. 12363182
FLVVGDCLLVGLQPILVFMSKVDGKFQFSPISVNFLTEVMKVIFAVVMLIIQSRKQKVGEKPLLARSTFIQAARNNVLLAVPALLYAINNYLKFIMQLYFNPATVKMLSNLKVLVIAFLLKFIMRRRFSVIQWEALALLLIGISINQLRTVPVGNTAFGLPVTAIAYIYTLIFVTVPSVASVYNEYALKSQYDTSIYLQNLFLYGYGAIFNLLGILGTVLFQGPESFNILRGHSRATIFLICNNAAQGILSSFFFKYADTILKKYSSTVATIFTGLASAAFLGHSLTINFLLGISVVFISMHQFFSPLAKVKDDKPADSIELEDTQNDRPSESSFVNMTAGAADDASHRIGTDERQPLLPI

SEQ ID NO: 18147 - protein, 343 aa, Zea mays subsp. mays
  misc_feature (1)..(343): Ceres Seq. ID no. 12363183
MSKVDGKFQFSPISVNFLTEVMKVIFAVVMLIIQSRKQKVGEKPLLARSTFIQAARNNVLLAVPALLYAINNYLKFIMQLYFNPATVKMLSNLKVLVIAFLLKFIMRRRFSVIQWEALALLLIGISINQLRTVPVGNTAFGLPVTAIAYIYTLIFVTVPSVASVYNEYALKSQYDTSIYLQNLFLYGYGAIFNLLGILGTVLFQGPESFNILRGHSRATIFLICNNAAQGILSSFFFKYADTILKKYSSTVATIFTGLASAAFLGHSLTINFLLGISVVFISMHQFFSPLAKVKDDKPADSIELEDTQNDRPSESSFVNMTAGAADDASHRIGTDERQPLLPI

SEQ ID NO: 18148 - protein, 322 aa, Zea mays subsp. mays
  misc_feature (1)..(322): Ceres Seq. ID no. 12363184
MKVIFAVVMLIIQSRKQKVGEKPLLARSTFIQAARNNVLLAVPALLYAINNYLKFIMQLYFNPATVKMLSNLKVLVIAFLLKFIMRRRFSVIQWEALALLLIGISINQLRTVPVGNTAFGLPVTAIAYIYTLIFVTVPSVASVYNEYALKSQYDTSIYLQNLFLYGYGAIFNLLGILGTVLFQGPESFNILRGHSRATIFLICNNAAQGILSSFFFKYADTILKKYSSTVATIFTGLASAAFLGHSLTINFLLGISVVFISMHQFFSPLAKVKDDKPADSIELEDTQNDRPSESSFVNMTAGAADDASHRIGTDERQPLLPI

SEQ ID NO: 18149 - DNA, 1180 bp, Zea mays subsp. mays
  misc_feature (1)..(1180): Ceres Seq. ID no. 12363224
gcacgagaccattacctagaacatcctaatcaaaaaaaggggcggcattcagtgattcagccgccagtcccgctcgtctctgccaagtcccgcgcgctcgagcatcgatcagccgctggcgccgcgacgagcgacgacgccgcgccagtcgcgcgcagatggccgccgtctcgctcctgcgagccgcggcgctcgggctggttgtcctcgcgtcggcgctgccgtcggctcggccgtggagcaaggagggtcacgtgctcacatgccaaatcgcgcagggtctgctggagcctgacgccgcgcacgccgtgcggaacctgctcccggacgacgccggcggcgacctgtccggcgctgtgcgtgtggccggaccaggtgaggcactggtacaggtacatgtggacgggcccgctccacttcatcgacacccctgacgaggcctgcagcttcgactactcgagggactgccacggccccgacggcgccaaggacatgtgcgtcgccggcgccatcgccaacttcacgtcccagctgctgcactacaggcacggcagcgccgacaggagatacaacctgactgaagcccttctgttcctgtcgcacttcatgggagatgttcatcagccaatgcacgtggggttcaccagcgaccaaggcggcaactccatagagctgcggtggttccggcacaaatccaacctccaccacgtgtgggacagggagatcatacagacggctctcgccgacttctacggcaaggacatggacgccttccgcaagcagctcgagcacaacctcaccaagggtacctggtccgacgatgtatcggcttggacagactgccaagacctctcgtcttgcccaaccaagtacgcgaccgagagcataggcctggcgtgcaaatgggcgtacagcggcgtccgcgaaggggagacactgtccgacgactactttgactcgaggctgccgatcgtgtcgcggcggatcgcgcagggcggggtgcggctggccatgttcctcaaccggatcttcggcgcgcacaaccgcgacgtgccgccgccgtcttcttgattgatggatggacccgatcccgatctgcctgtcgcgtcacagactcgaagtctaatctaatccatgtggttgtagtgtctttgcttctttttaagtaaataagtaattc

SEQ ID NO: 18150 - protein, 356 aa, Zea mays subsp. mays
  misc_feature (1)..(356): Ceres Seq. ID no. 12363225
ARDHYLEHPNQKKGRHSVIQPPVPLVSAKSRALEHRSAAGAATSDDAAPVARRWPPSRSCEPRRSGWLSSRRRCRRLGRGARRVTCSHAKSRRVCWSLTPRTPCGTCSRTTPAATCPALCVWPDQVRHWYRYMWTGPLHFIDTPDEACSFDYSRDCHGPDGAKDMCVAGAIANFTSQLLHYRHGSADRRYNLTEALLFLSHFMGDVHQPMHVGFTSDQGGNSIELRWFRHKSNLHHVWDREIIQTALADFYGKDMDAFRKQLEHNLTKGTWSDDVSAWTDCQDLSSCPTKYATESIGLACKWAYSGVREGETLSDDYFDSRLPIVSRRIAQGGVRLAMFLNRIFGAHNRDVPPPSS

SEQ ID NO: 18151 - protein, 224 aa, Zea mays subsp. mays
  misc_feature (1)..(224): Ceres Seq. ID no. 12363226
MWTGPLHFIDTPDEACSFDYSRDCHGPDGAKDMCVAGAIANFTSQLLHYRHGSADRRYNLTEALLFLSHFMGDVHQPMHVGFTSDQGGNSIELRWFRHKSNLHHVWDREIIQTALADFYGKDMDAFRKQLEHNLTKGTWSDDVSAWTDCQDLSSCPTKYATESIGLACKWAYSGVREGETLSDDYFDSRLPIVSRRIAQGGVRLAMFLNRIFGAHNRDVPPPSS

SEQ ID NO: 18152 - protein, 192 aa, Zea mays subsp. mays
  misc_feature (1)..(192): Ceres Seq. ID no. 12363227
MCVAGAIANFTSQLLHYRHGSADRRYNLTEALLFLSHFMGDVHQPMHVGFTSDQGGNSIELRWFRHKSNLHHVWDREIIQTALADFYGKDMDAFRKQLEHNLTKGTWSDDVSAWTDCQDLSSCPTKYATESIGLACKWAYSGVREGETLSDDYFDSRLPIVSRRIAQGGVRLAMFLNRIFGAHNRDVPPPSS

SEQ ID NO: 18153 - DNA, 1097 bp, Zea mays subsp. mays
  misc_feature (1)..(1097): Ceres Seq. ID no. 12363241
gcacgagaccattacctagaacatcctaatcgaaaagatcacgtactggcacgagctagcgagcagactcactcgaacacacactgaccaaccgctcctctctccttccgttccgtcattccgtgtgcagcagacgcggcgttctgcgtgtgcaagacgggcgtgcccgaccaggcgatgcaggcggcgatcgactacgcctgcgccaagggggccgactgcgcctccgcctccaagggcgcgccctgctacggcaacggcaacaaggtggccgtctgctcctacatctgcaacagctactaccagagccgcagcgccacgggcgccacctgcgacttcaacggcgtcgccacgctcaccggcaccgaccccagctccggcacctgcaagttcgcctccggccccagcagcgcaggcaccggcggtggcatgggcgctggcgcgggtaccggcggtggcatgggcgctggcgctggcaccggcgccgggacaggcgttggcaccggagcaggcacgggcatgggcactgggacggggaccagcaccggcaccggcgccggcgcaggggtcgcgacccccgggagcgccctgagcccaccgttcggcggcactggcgcgtacggcccgtcaggggcaggcagcacggactacaacgacgccgtcgccccgcgcgccgccgggctgcacgtggtggctgccctcgctctcgccgtcgccgtcgccgcacctctccaccgctaggggcggtgccatggcaactgggagctggcgggcacgacactcgcagacgggatcccgcctcggcggcccgccagcgcgggctctggtcgatgtccggcgttagtgcgtgcgcgtacctgatgaagtgatgatgggttttgatcgaccagccgtcagcgtagtgcggtcacggggtttacagtgttattcgaactgacctctctgcttcctcgtgctagtagtggtggctgccatgtgtgtgtgctgctggtagagaactagggattcttttttttttctgtcgcttccttgcttatatgtcccgtcgtgttaggctatgtttactatgcagtgtttggtggtggccgctttccatg

SEQ ID NO: 18154 - protein, 187 aa, Zea mays subsp. mays
  misc_feature (1)..(187): Ceres Seq. ID no. 12363242
MQAAIDYACAKGADCASASKGAPCYGNGNKVAVCSYICNSYYQSRSATGATCDFNGVATLTGTDPSSGTCKFASGPSSAGTGGGMGAGAGTGGGMGAGAGTGAGTGVGTGAGTGMGTGTGTSTGTGAGAGVATPGSALSPPFGGTGAYGPSGAGSTDYNDAVAPRAAGLHVVAALALAVAVAAPLHR

SEQ ID NO: 18155 - protein, 103 aa, Zea mays subsp. mays
  misc_feature (1)..(103): Ceres Seq. ID no. 12363243
MGAGAGTGGGMGAGAGTGAGTGVGTGAGTGMGTGTGTSTGTGAGAGVATPGSALSPPFGGTGAYGPSGAGSTDYNDAVAPRAAGLHVVAALALAVAVAAPLHR

SEQ ID NO: 18156 - protein, 93 aa, Zea mays subsp. mays
  misc_feature (1)..(93): Ceres Seq. ID no. 12363244
MGAGAGTGAGTGVGTGAGTGMGTGTGTSTGTGAGAGVATPGSALSPPFGGTGAYGPSGAGSTDYNDAVAPRAAGLHVVAALALAVAVAAPLHR

SEQ ID NO: 18157 - DNA, 1726 bp, Zea mays subsp. mays
  misc_feature (1)..(1726): Ceres Seq. ID no. 12363262
gcacgagaccattacctagaacatcctaatcgaaaaacactctcctcgcgtttcccgccattaactctgcaacctattctcttcctcgcgaaaccgcttccttcgattcattccccctctcccctctccaagacccaaaaccctaacccctacgacccccgtgaccgccgccgccgtcgatgcctgcgctctccgacgtcgcgcttcaggctgccatcgccggcaacctccgcctcctgaagctggtggcgagcaagatgaatctgcgcgaagcgaaggacgccgctgggcggaacgcgctccacctggccgcggagatgggccgtcttgaggtttgcaggttcctggtggaggaatcgggcttcgaggtgaacttcgcctgcgccgaaggcgggtcgccggtccactgcgccgcggccgggggcagcgagagcgtcttgggctaccttctcgaccacggtggcgaccctgtgatgccggactccatgggctccactccactgcatgatgcggcagaggaagggcattgtgcggctgtgaggatgctgctgtccaagggtgtcgatgtggatccacacggctgtcgtgggacgccgctgcacttggcctgctccaatgaccgggatcaggttgttaggatcctgctggaacatggcgcagatcccaacaaagttgtcggtcatgtcctcccaccactcatgatggcatactgtggcggttctttgagatgcatgaagctactgattgaggctggtgcggatgtgaacttgattgctccttctggagtaattttggctcaggcagtttgtgatgggtcaactgagattgtcaagtttttgctagaggttggagctgatcctaacattcctgatgaggatgggaaaatcccgatcatgtacccagcatttaatgggcatcgggagcttgttgaaattctatttcctaagacaagaccagtttcatctttgccagactggagcgttgatgggattattagaagtatgaaagatctgtttttcaagcctcaggatgcagctgtggtggaaaaaaagatagctgatgcgaagtcacaagggaaggaagctttcgcaaggggagagtaccctgcagcagtatacttctataccatggtactagagaacgaccttgatgctactgcgtttgccaaccggagcctgtgctggttgcggctgagggagggggccaaggctctgttagatgctcaacagtgcaaaatgatacggcctcgttggtcgaaggcatggtatcgcgagggcgcggctctcagcttgctgaaggactaccaaggggcagtcaacgcgttcacggaagcattgaaactggatcctgcaagtttagagatcaagaaagccttaagggaggccaccgattccctggcgaacgttggccgctccggagaacagaacccatgagctgctgctgcatccatgtgctttatctcacgttaagaatcctctaacactatgtggctcagcctcatattatatgttgatatatgtcgccttaacgcactgctggagatactagtttcgatctcagcctatatgttttgctccttcgggatgcagcctaagatacatgtggcaaccaagtgaggttgggcagggtagcatatctatggactggttgaactattatatgtatctggatatctaagtgcacctgttgctcctagtaaagttgcagttctaatgaccccttcgtc

SEQ ID NO: 18158 - protein, 417 aa, Zea mays subsp. mays
  misc_feature (1)..(417): Ceres Seq. ID no. 12363263
MPALSDVALQAAIAGNLRLLKLVASKMNLREAKDAAGRNALHLAAEMGRLEVCRFLVEESGFEVNFACAEGGSPVHCAAAGGSESVLGYLLDHGGDPVMPDSMGSTPLHDAAEEGHCAAVRMLLSKGVDVDPHGCRGTPLHLACSNDRDQVVRILLEHGADPNKVVGHVLPPLMMAYCGGSLRCMKLLIEAGADVNLIAPSGVILAQAVCDGSTEIVKFLLEVGADPNIPDEDGKIPIMYPAFNGHRELVEILFPKTRPVSSLPDWSVDGIIRSMKDLFFKPQDAAVVEKKIADAKSQGKEAFARGEYPAAVYFYTMVLENDLDATAFANRSLCWLRLREGAKALLDAQQCKMIRPRWSKAWYREGAALSLLKDYQGAVNAFTEALKLDPASLEIKKALREATDSLANVGRSGEQNP

SEQ ID NO: 18159 - protein, 391 aa, Zea mays subsp. mays
  misc_feature (1)..(391): Ceres Seq. ID no. 12363264
MNLREAKDAAGRNALHLAAEMGRLEVCRFLVEESGFEVNFACAEGGSPVHCAAAGGSESVLGYLLDHGGDPVMPDSMGSTPLHDAAEEGHCAAVRMLLSKGVDVDPHGCRGTPLHLACSNDRDQVVRILLEHGADPNKVVGHVLPPLMMAYCGGSLRCMKLLIEAGADVNLIAPSGVILAQAVCDGSTEIVKFLLEVGADPNIPDEDGKIPIMYPAFNGHRELVEILFPKTRPVSSLPDWSVDGIIRSMKDLFFKPQDAAVVEKKIADAKSQGKEAFARGEYPAAVYFYTMVLENDLDATAFANRSLCWLRLREGAKALLDAQQCKMIRPRWSKAWYREGAALSLLKDYQGAVNAFTEALKLDPASLEIKKALREATDSLANVGRSGEQNP

SEQ ID NO: 18160 - protein, 371 aa, Zea mays subsp. mays
  misc_feature (1)..(371): Ceres Seq. ID no. 12363265
MGRLEVCRFLVEESGFEVNFACAEGGSPVHCAAAGGSESVLGYLLDHGGDPVMPDSMGSTPLHDAAEEGHCAAVRMLLSKGVDVDPHGCRGTPLHLACSNDRDQVVRILLEHGADPNKVVGHVLPPLMMAYCGGSLRCMKLLIEAGADVNLIAPSGVILAQAVCDGSTEIVKFLLEVGADPNIPDEDGKIPIMYPAFNGHRELVEILFPKTRPVSSLPDWSVDGIIRSMKDLFFKPQDAAVVEKKIADAKSQGKEAFARGEYPAAVYFYTMVLENDLDATAFANRSLCWLRLREGAKALLDAQQCKMIRPRWSKAWYREGAALSLLKDYQGAVNAFTEALKLDPASLEIKKALREATDSLANVGRSGEQNP

SEQ ID NO: 18161 - DNA, 1522 bp, Zea mays subsp. mays
  misc_feature (1)..(1522): Ceres Seq. ID no. 12363287
gcacgagaccattacctagaacatcctaatcgaaaaaccactcgctgcctggttatggactccaccaggagcaaccaggtcgccggcagatgcaacagcaccatcgcgtcaagggctgccacggtcccgccgtcgctgaccatgccgcgcggcgaactcgctgacgccatcgtgggcggaggcggaggaggaggagcggacggggacccccgggccgccctcctccgtctgtctgctctcggggaccgcatggccgccgtccggggccgtatctgcgcctctatctcgggcgaagcccggcctctctcctacgccgacatccaatctgtctcctccgagatctccgccgctgcccagctcgtcgtcctcaacgccgccgagctcctcgcttcctccgtcccctttcccgccccacctccacctcctccttccgccgctccctctcccgctcccgtccgagagatcccagttgtggccgcttccgcccaagagcaacccctggaggccgccaaggacgacggtggctacgaggtcgtggagctcgacgccgccgagctgctagcggagcacgtccacttctgcgagatctgcggcaagggcttccgccgcgacgccaacctcaggatgcacatgcgcgcccacggcgaccgcttcaagaccctagacgcgctctcccgccctggtcacggccagccgaagccgcccgttggcagcaacgtgcgcttctcctgcccctttgcgggctgcaacaggaaccgcacacaccgccgcttccggccgctcaagtcggcggtgtgcgcgcggaaccacttccggcgcagccactgccccaagctctacgcctgcgagcgatgtggcggcaagaagcgcttcactgtcctggcggacctccgcagccacctccgccactgcggcgaggaggcacagtggcgctgctcctgcggcaccaccttctcccgcaaggacaagctcttcggtcatctagcgctctttgaaggccacacgccagcagttactaagccaaacaaggatgtggtgacagggcctacagagtccaccattgatgctatggaggaagggggatttgaagaaggcattcctgaccgggaggaggatgaagagggcggttatgatccagagttcttcaaggagtggatggatgagctcagaggtggtgctggtggctccaattggcctggaccagcagcagatggacattagcaatgttgcgagggttaataggatggtttgacaagggacatctgcttacatcaagtgaccaggaggatcaataaagactgaataaaggtgatagtaaagaaaagaggtgctttgggatagtttgtaggatttctctttaccattgtgtttgtgcgttcgttctaaccagtagcttgtatggtatggtgtgcgtgtgttgtttagttgctgttcactgggcctctcccttgccattctcggttgctttcatgttatcctgtgaatttgtgatctaccaggtaatacagtggagaaatgtgtc

SEQ ID NO: 18162 - protein, 406 aa, Zea mays subsp. mays
  misc_feature (1)..(406): Ceres Seq. ID no. 12363288
ARDHYLEHPNRKTTRCLVMDSTRSNQVAGRCNSTIASRAATVPPSLTMPRGELADAIVGGGGGGGADGDPRAALLRLSALGDRMAAVRGRICASISGEARPLSYADIQSVSSEISAAAQLVVLNAAELLASSVPFPAPPPPPPSAAPSPAPVREIPVVAASAQEQPLEAAKDDGGYEVVELDAAELLAEHVHFCEICGKGFRRDANLRMHMRAHGDRFKTLDALSRPGHGQPKPPVGSNVRFSCPFAGCNRNRTHRRFRPLKSAVCARNHFRRSHCPKLYACERCGGKKRFTVLADLRSHLRHCGEEAQWRCSCGTTFSRKDKLFGHLALFEGHTPAVTKPNKDVVTGPTESTIDAMEEGGFEEGIPDREEDEEGGYDPEFFKEWMDELRGGAGGSNWPGPAADGH

SEQ ID NO: 18163 - protein, 388 aa, Zea mays subsp. mays
  misc_feature (1)..(388): Ceres Seq. ID no. 12363289
MDSTRSNQVAGRCNSTIASRAATVPPSLTMPRGELADAIVGGGGGGGADGDPRAALLRLSALGDRMAAVRGRICASISGEARPLSYADIQSVSSEISAAAQLVVLNAAELLASSVPFPAPPPPPPSAAPSPAPVREIPVVAASAQEQPLEAAKDDGGYEVVELDAAELLAEHVHFCEICGKGFRRDANLRMHMRAHGDRFKTLDALSRPGHGQPKPPVGSNVRFSCPFAGCNRNRTHRRFRPLKSAVCARNHFRRSHCPKLYACERCGGKKRFTVLADLRSHLRHCGEEAQWRCSCGTTFSRKDKLFGHLALFEGHTPAVTKPNKDVVTGPTESTIDAMEEGGFEEGIPDREEDEEGGYDPEFFKEWMDELRGGAGGSNWPGPAADGH

SEQ ID NO: 18164 - protein, 359 aa, Zea mays subsp. mays
  misc_feature (1)..(359): Ceres Seq. ID no. 12363290
MPRGELADAIVGGGGGGGADGDPRAALLRLSALGDRMAAVRGRICASISGEARPLSYADIQSVSSEISAAAQLVVLNAAELLASSVPFPAPPPPPPSAAPSPAPVREIPVVAASAQEQPLEAAKDDGGYEVVELDAAELLAEHVHFCEICGKGFRRDANLRMHMRAHGDRFKTLDALSRPGHGQPKPPVGSNVRFSCPFAGCNRNRTHRRFRPLKSAVCARNHFRRSHCPKLYACERCGGKKRFTVLADLRSHLRHCGEEAQWRCSCGTTFSRKDKLFGHLALFEGHTPAVTKPNKDVVTGPTESTIDAMEEGGFEEGIPDREEDEEGGYDPEFFKEWMDELRGGAGGSNWPGPAADGH

SEQ ID NO: 18165 - DNA, 1667 bp, Zea mays subsp. mays
  misc_feature (1)..(1667): Ceres Seq. ID no. 12363303
acgggagcggacggagaaaattttgaaacgcgggcgaggccgccaccaccgcgccaaatcgagccatccagattccattcgacggccggaagtcagatccgtgcatctataatacttccaggaattctctcctctcccaagacccgcaccgcaccacgcgaaatcaagtcctgcaaaagcctcgcggctacctcacgtggatcggcgacggcgatgacggcgtccttctcttccgtcgccgaggtagcggttcccgctgctgcggcggtgatggcatcagctttgccgcaggagcagcagcaggcgcggccgcggccgcggccgatgcacgctggtggtggtggtggtggcggcggcggcgccaatggccgccaccacgcgtacagccgcaaggacaagtcactcggcctcctctgctccaacttcgtggttctctacaaccgcgacgacgtggagtccatcgggctggacgaagcggccaaatgcctcggcgtggagaggcgccggatctacgacattgtcaacgtgctcgagagcgttggaattcttgtgaggaaagccaagaatcgctacacctggataggtttcggcggagtctcaatatccttgcgagaactcaaggaaagggcgttaagggagaagtctggcttggctcctctgcaaaccgagcagcaatctgctgccacaatttctgaagacgaagatgatgatacattggccaatccgggtgcttatatcgagactgagagattgagtcaaactgtggacaaaccttctggcaaaccgggcgcatccggttgccgccttagatctgatcataggaaggaaaagtcacttgggctgctcacacagaatttcgtgaagctcttcctcaccatggaggttgacacgatctcactcgatgaagctgcaaaactgctccttggagaaggccacgaggagaccaatatgagaactaaagttcggaggttatatgacattgccaatgtcctgtcttcactgaatctaattgagaagatacatcaaggggactcgagaaagcctgcgtttcgttggttgggtagggcaacgctgaacacagaaaatggtgtcacagttgctgtgcccccaccagggaagatcgcatcaaagaaaagagcgtttggaacagaactcactaacattgacatgcatagaagtaatctagattcaaaaaataagaagaaagcaaaacttgtacagagtagtggtgatgtcttgacgaattgcaaattagctgtgcgtagtcggctggggcagggtaaacaaagtggctttgtttatggtcctttccacccttctggcgcaaggaaacatggacttgatggcggcaataagcctgggcaaagggagagggctgaggactgggagagcctttctgcttcatttcgaccacagtaccagaaccaagcactcagtgatctatttgtccattatgtcgacgcgtggaagacatggtattctgaatttgctcaaggcagcagcatcatgcaacaacactttggtcatcctgttaaccattttttgtaggcaaattttagggccaagcattgcagttcttagtgcatgcttgtgtattttacctgtacaatctgttaaaacggaggaaacaaagacatgattgagcctagggttcattgtatttaccc

SEQ ID NO: 18166 - protein, 515 aa, Zea mays subsp. mays
  misc_feature (1)..(515): Ceres Seq. ID no. 12363304
TGADGENFETRARPPPPRQIEPSRFHSTAGSQIRASIILPGILSSPKTRTAPREIKSCKSLAATSRGSATAMTASFSSVAEVAVPAAAAVMASALPQEQQQARPRPRPMHAGGGGGGGGGANGRHHAYSRKDKSLGLLCSNFVVLYNRDDVESIGLDEAAKCLGVERRRIYDIVNVLESVGILVRKAKNRYTWIGFGGVSISLRELKERALREKSGLAPLQTEQQSAATISEDEDDDTLANPGAYIETERLSQTVDKPSGKPGASGCRLRSDHRKEKSLGLLTQNFVKLFLTMEVDTISLDEAAKLLLGEGHEETNMRTKVRRLYDIANVLSSLNLIEKIHQGDSRKPAFRWLGRATLNTENGVTVAVPPPGKIASKKRAFGTELTNIDMHRSNLDSKNKKKAKLVQSSGDVLTNCKLAVRSRLGQGKQSGFVYGPFHPSGARKHGLDGGNKPGQRERAEDWESLSASFRPQYQNQALSDLFVHYVDAWKTWYSEFAQGSSIMQQHFGHPVNHFL

SEQ ID NO: 18167 - protein, 444 aa, Zea mays subsp. mays
  misc_feature (1)..(444): Ceres Seq. ID no. 12363305
MTASFSSVAEVAVPAAAAVMASALPQEQQQARPRPRPMHAGGGGGGGGGANGRHHAYSRKDKSLGLLCSNFVVLYNRDDVESIGLDEAAKCLGVERRRIYDIVNVLESVGILVRKAKNRYTWIGFGGVSISLRELKERALREKSGLAPLQTEQQSAATISEDEDDDTLANPGAYIETERLSQTVDKPSGKPGASGCRLRSDHRKEKSLGLLTQNFVKLFLTMEVDTISLDEAAKLLLGEGHEETNMRTKVRRLYDIANVLSSLNLIEKIHQGDSRKPAFRWLGRATLNTENGVTVAVPPPGKIASKKRAFGTELTNIDMHRSNLDSKNKKKAKLVQSSGDVLTNCKLAVRSRLGQGKQSGFVYGPFHPSGARKHGLDGGNKPGQRERAEDWESLSASFRPQYQNQALSDLFVHYVDAWKTWYSEFAQGSSIMQQHFGHPVNHFL

SEQ ID NO: 18168 - protein, 425 aa, Zea mays subsp. mays
  misc_feature (1)..(425): Ceres Seq. ID no. 12363306
MASALPQEQQQARPRPRPMHAGGGGGGGGGANGRHHAYSRKDKSLGLLCSNFVVLYNRDDVESIGLDEAAKCLGVERRRIYDIVNVLESVGILVRKAKNRYTWIGFGGVSISLRELKERALREKSGLAPLQTEQQSAATISEDEDDDTLANPGAYIETERLSQTVDKPSGKPGASGCRLRSDHRKEKSLGLLTQNFVKLFLTMEVDTISLDEAAKLLLGEGHEETNMRTKVRRLYDIANVLSSLNLIEKIHQGDSRKPAFRWLGRATLNTENGVTVAVPPPGKIASKKRAFGTELTNIDMHRSNLDSKNKKKAKLVQSSGDVLTNCKLAVRSRLGQGKQSGFVYGPFHPSGARKHGLDGGNKPGQRERAEDWESLSASFRPQYQNQALSDLFVHYVDAWKTWYSEFAQGSSIMQQHFGHPVNHFL

SEQ ID NO: 18169 - DNA, 1635 bp, Zea mays subsp. mays
  misc_feature (1)..(1635): Ceres Seq. ID no. 12363343
gcacgagaccattacctagaacatcctaatcaaaaccccttcttccccgactcgcccggcgctgaataagattcccctgtattctgttccagagatgagctgatcgagcagcccgtcgccaagccaaccggacatggtgagcgacggcgcgcgcgggctgctgggcgcgtacgagctcgggcggacgctcggggagggcaacttcgggaaggtgaagcaggcgcggcaccgcggcagcggcgggcagtttgccgtgaagatcatggagcgcgccagggtgctgtcgcagcgcgcggacgagcagatatgccgcgagatcgccacgctcaagctgctcgcgcaccccaacgtcgtccgcctccacgaggtggctgccagcaagacgaagatctacatggtgcttgagctcgtcaacggcggcgagctgctggacaggattgcggccagtgagggaaagctcccggagcaggaggcaaggaggctcttccagcagctggttgatggtgtaagctactgccatgaaaagggcgtctgtcacagagacctcaagctggagaacgttcttgtcgaccggaagggaaacatcaagatctctgatttcgggctcagcgctttaccgcaacatctcgggaacgatgggttgctgcacacgacctgcggtagccccaactacattgcccctgaggttctgcagaacagagggtacgacgggtcgctatcggacatctggtcatgcggggtgattctctacgtgatgctcgtagggcacctcccgttcgacgaccggaacatcgtcgttctctaccagaagattttcaagggcgatgctcagatcccggagtggctctctcccggcgcacggaaccttctccggaggatccttgagccctacccggcggagcggatcgccatggcagagatcaaggcgcacccatggttccaggagcactacgtccctgtccttcctccgtacgacgacgacgacgattcagtgaagcaaatcggtgcgggtagtaaaaccactcatcacatcaacgcgtttcagttgatcggaatggcgtcgtccctagacctatcagggttttttgaggaagaggacgtgtcccaaaggaagatcaggttcacgtccgcacaaccgcctgaggatttgttcgccgagatcgaacgctctgcgactgacatgggcttccatgttcacagagggcatagtaagcttaggctgacgcgaaactgcgaccggtcgaagaatcagaagaaccctatgtcgtcgtcgtcgtcgtcgtttctagtctgcaccgaggtttttgagcttagcccctctttgtacgtcgtggagctcaacaagtcccatggcgaccctgcactgtacaggcagtgaggttacgagtcacctgatgagcaagttggtacctagaatctcaagtcccaggtcaagaacaggtaccacaggatgaggcgcatggaggatgctgcgatgtgttcgtgagaggtctagaacatcgtctcccagtcaactttgggttgttggatcgttgtctccttacgatgtaatttatttattttgttttgtacataactcctattatatagtaaagttgtaacattcgtttctgtaccatgattcatcatatgtgt

SEQ ID NO: 18170 - protein, 414 aa, Zea mays subsp. mays
  misc_feature (1)..(414): Ceres Seq. ID no. 12363344
MVSDGARGLLGAYELGRTLGEGNFGKVKQARHRGSGGQFAVKIMERARVLSQRADEQICREIATLKLLAHPNVVRLHEVAASKTKIYMVLELVNGGELLDRIAASEGKLPEQEARRLFQQLVDGVSYCHEKGVCHRDLKLENVLVDRKGNIKISDFGLSALPQHLGNDGLLHTTCGSPNYIAPEVLQNRGYDGSLSDIWSCGVILYVMLVGHLPFDDRNIVVLYQKIFKGDAQIPEWLSPGARNLLRRILEPYPAERIAMAEIKAHPWFQEHYVPVLPPYDDDDDSVKQIGAGSKTTHHINAFQLIGMASSLDLSGFFEEEDVSQRKIRFTSAQPPEDLFAEIERSATDMGFHVHRGHSKLRLTRNCDRSKNQKNPMSSSSSSFLVCTEVFELSPSLYVVELNKSHGDPALYRQ

SEQ ID NO: 18171 - protein, 371 aa, Zea mays subsp. mays
  misc_feature (1)..(371): Ceres Seq. ID no. 12363345
MERARVLSQRADEQICREIATLKLLAHPNVVRLHEVAASKTKIYMVLELVNGGELLDRIAASEGKLPEQEARRLFQQLVDGVSYCHEKGVCHRDLKLENVLVDRKGNIKISDFGLSALPQHLGNDGLLHTTCGSPNYIAPEVLQNRGYDGSLSDIWSCGVILYVMLVGHLPFDDRNIVVLYQKIFKGDAQIPEWLSPGARNLLRRILEPYPAERIAMAEIKAHPWFQEHYVPVLPPYDDDDDSVKQIGAGSKTTHHINAFQLIGMASSLDLSGFFEEEDVSQRKIRFTSAQPPEDLFAEIERSATDMGFHVHRGHSKLRLTRNCDRSKNQKNPMSSSSSSFLVCTEVFELSPSLYVVELNKSHGDPALYRQ

SEQ ID NO: 18172 - protein, 327 aa, Zea mays subsp. mays
  misc_feature (1)..(327): Ceres Seq. ID no. 12363346
MVLELVNGGELLDRIAASEGKLPEQEARRLFQQLVDGVSYCHEKGVCHRDLKLENVLVDRKGNIKISDFGLSALPQHLGNDGLLHTTCGSPNYIAPEVLQNRGYDGSLSDIWSCGVILYVMLVGHLPFDDRNIVVLYQKIFKGDAQIPEWLSPGARNLLRRILEPYPAERIAMAEIKAHPWFQEHYVPVLPPYDDDDDSVKQIGAGSKTTHHINAFQLIGMASSLDLSGFFEEEDVSQRKIRFTSAQPPEDLFAEIERSATDMGFHVHRGHSKLRLTRNCDRSKNQKNPMSSSSSSFLVCTEVFELSPSLYVVELNKSHGDPALYRQ

SEQ ID NO: 18173 - DNA, 1523 bp, Zea mays subsp. mays
  misc_feature (1)..(1523): Ceres Seq. ID no. 12363351
atttttccgtctcgccccaactgccgaccgccgccctcgccccggctcctccctttccctctagctagcaccaatcgttcatccagtctcacaaccgagctccccgaccaccagcacgcctcgcgcgtccctcccaacagcgtgctccagttccttcaatggcatctcgggcgcgcctgccgggcaccccggcctcgatcgccgtcctcatcctctccttcttccaaggtacgtacgtggtggctctgatccacttgcccgccgtggactgacgggctgcttgggtttgtgggtggtggtggatggaacccggtgcggcaccacgttcaccttcagcaaccgctgcggcgacacggtgtggccgggcctgctcgccggctcggggacgccgccgctggagaccacgggcttcgcgctggcgccggggcagtcgcgcgcgctgtacgcgccgcaggggtggtcgggccgcttctggggccgctccggctgcgacttcgacgccgcctccgccaagggctcctgcgccacgggcgactgcggctccggcgaggtcgagtgccgcggcgcgggggcgtccccgcccgccacgctcgccgagttcacgctcgacggcgccggcggcaaggacttctacgacgtcagcctcgtcgacggctacaacctgcccatgctcgtgcgggccaccgcgcccgaatgccccgacacggggtgcctcgtcgacctcaacgggctctgccccgacgagctccgcgccgcccacggccgcgcctgccgcagcgcctgcgaggcgttcggcagccccgagtactgctgcaacggcgcctacggcaaccccaacacctgccacccgtcacagtactcccagctcttcaagtcggcgtgccccaactcctacagctacgcctacgacgacgccacctccaccttcacctgcaaccacaccgattacaccatcaccttctgccccaaatccactccaaccagcgacaaatccgaacattcgtctcggaggccaagccacgagcaactggaagattcggtgtggcttgcatccttgaaggcaagtgacgccagtgctctggcaacaacgtcatggtcggcgtccattgtgctccgatctgccttggcaattgcagtggcgaccttgcttgctgcacaacttgcaccagatcatcctatggtcagcttgctatgattcatcatggttgcggttcttgatcggtaggagtcatctaagttattttctgacaagaagaggattagagcagtagcagtgatcagcaatgggaagagaatattgtgtaggctttttgtttgtggataggtgctagagaaggaatgatgtgttacaagttggcaactggaatttcatgaacgcattgcaaggcgattcaggttgctctgttgtcatcggcccctttttctatttttgcagtaaagcgcataaaaaacatctcgaatggatactgtaaccatttgatgtgcagaggttcacagagtaatgtgattttggttagaactcc

SEQ ID NO: 18174 - protein, 251 aa, Zea mays subsp. mays
  misc_feature (1)..(251): Ceres Seq. ID no. 12363352
MEPGAAPRSPSATAAATRCGRACSPARGRRRWRPRASRWRRGSRARCTRRRGGRAASGAAPAATSTPPPPRAPAPRATAAPARSSAAARGRPRPPRSPSSRSTAPAARTSTTSASSTATTCPCSCGPPRPNAPTRGASSTSTGSAPTSSAPPTAAPAAAPARRSAAPSTAATAPTATPTPATRHSTPSSSSRRAPTPTATPTTTPPPPSPATTPITPSPSAPNPLQPATNPNIRLGGQATSNWKIRCGLHP

SEQ ID NO: 18175 - protein, 175 aa, Zea mays subsp. mays
  misc_feature (1)..(175): Ceres Seq. ID no. 12363353
MLVRATAPECPDTGCLVDLNGLCPDELRAAHGRACRSACEAFGSPEYCCNGAYGNPNTCHPSQYSQLFKSACPNSYSYAYDDATSTFTCNHTDYTITFCPKSTPTSDKSEHSSRRPSHEQLEDSVWLASLKASDASALATTSWSASIVLRSALAIAVATLLAAQLAPDHPMVSLL

SEQ ID NO: 18176 - DNA, 1979 bp, Zea mays subsp. mays
  misc_feature (1)..(1979): Ceres Seq. ID no. 12363354
gcacgagaccattacctagaacatcctaatcgaaaaatcttcgtctctctccgactctccctcgcccgcgcacctttccgcgccgcctccttcctttcctcgcgtgctctggcgcgcgcaaggatcaaaaggcgccggccactagaggcgagtgagtcgcatgtaaacgaccaccagctgctgtgatctcaaaagggagcgagagacaaaggagaggcgagcaggtcgtggcggcagcaatcgttgcgaatccgcgcgggattctgtcctctgcaccactgcttcccgctttcctgcccggcggaagtggtataattctccaacgcggttgactgtattgcctctcgctctcggtgggtgggggcatggacgaggcagaggagatgcaggtggagaggctgcacgaggaggccgatgcggggggagccgacacggacaagctcagctacgagatattctccatcctcgagagcaagttcctgttcggctataccgacccgcaccagctctggctgcccaagccagcggcggaactgccggcgcaggcgtccgcggcggcgccgggtaaggcggcgcagcgcgggaaggtctgcgtgctctgcgtggacggcggcgggggcggcctgcgggcgctgctgcccggccgcgcgcttgcgcacctggaggccgcgctgcgccgcgcgtctggggaccccgacgcccgggtcgccgactacttcgacctcgctgcgggcaccggcgccggcggcgtgttcgccgcgatgctcttctccacgcactcgcgcggcgcnccgctgttccacgccnacgacacgtggcggctcgtcgcggaccacgcgccgcgcatgttccgcaggcccgcggcctcctcgtccacttccctcttctgccgcggcaagaagcggcccctggccgcgccaacggcggcgctggaggcggcaatgaagnnggcgttcggccaggagctcaccctgcgggacaccatcaagcccgtgctcatctcttgctacgacctcaagacgtccgcgccgctggtgttctctcgcgccgacgcactggagaacgggagctacgacttccgcctctgcgaggtcgggcgcgccgcgtggtccgaggccggacgcttcgagcccgccgaggtggcgtcggtggacggcgccacgtcctgcgccgctgtagacggcggccccaccatgggcagcccggcggccgccgccatcacgcacgtgctacacaacaagcacgagttcccgttcgtgcgcggggtcgaggacctcctcgtgctctccatcggcggctgctctggcggaggctctggcgccgctggcgaggcggaactccggcgcatgcgtcggtggggtcccaaggagtgggcacgccccatcgcccgtattgcggccgacggcgccgccgaccttgtcgaccacgccgtggcgcgcgccttcggccaatgccgcgcatccaactacctgcgcatccaggcgaagcgggagagcatgccgccgtgcggtacggacggggagtacgacccgaccccaggcaacgtgcgcgcgctgctcgcggcggcggacgagatgctcaagcagcggaacgtggagtcggtgctgttcgaggggaggcgagtcggggagcagacgaacgcggagaagctggactggttcgcggcagagctcgtcgccgagcaccgcagcagagcctcccggatcgcacccaccgttgcgttcaagcaggcgccgcagaagccgtaggcgctggactgagctggtggccgtaagaccgtggcgttaagggcatgtaggcctctctttcttcttgcttgggctggcggctggaattcctgctgcatatttttgacgcggcagcatggcatatcaatatggcattgctctgtgatggagcatttgccgctgtgaaatcgtttcaagggaggatggaatatgaaaggaacgaacgttgccgatataaaaattctaatcttc

SEQ ID NO: 18177 - protein, 460 aa, Zea mays subsp. mays
  misc_feature (1)..(460): Ceres Seq. ID no. 12363355
  misc_feature (142)..(142): Xaa is any aa, unknown or other
  misc_feature (148)..(148): Xaa is any aa, unknown or other
  misc_feature (195)..(195): Xaa is any aa, unknown or other
MDEAEEMQVERLHEEADAGGADTDKLSYEIFSILESKFLFGYTDPHQLWLPKPAAELPAQASAAAPGKAAQRGKVCVLCVDGGGGGLRALLPGRALAHLEAALRRASGDPDARVADYFDLAAGTGAGGVFAAMLFSTHSRGXPLFHAXDTWRLVADHAPRMFRRPAASSSTSLFCRGKKRPLAAPTAALEAAMKXAFGQELTLRDTIKPVLISCYDLKTSAPLVFSRADALENGSYDFRLCEVGRAAWSEAGRFEPAEVASVDGATSCAAVDGGPTMGSPAAAAITHVLHNKHEFPFVRGVEDLLVLSIGGCSGGGSGAAGEAELRRMRRWGPKEWARPIARIAADGAADLVDHAVARAFGQCRASNYLRIQAKRESMPPCGTDGEYDPTPGNVRALLAAADEMLKQRNVESVLFEGRRVGEQTNAEKLDWFAAELVAEHRSRASRIAPTVAFKQAPQKP

SEQ ID NO: 18178 - protein, 454 aa, Zea mays subsp. mays
  misc_feature (1)..(454): Ceres Seq. ID no. 12363356
  misc_feature (136)..(136): Xaa is any aa, unknown or other
  misc_feature (142)..(142): Xaa is any aa, unknown or other
  misc_feature (189)..(189): Xaa is any aa, unknown or other
MQVERLHEEADAGGADTDKLSYEIFSILESKFLFGYTDPHQLWLPKPAAELPAQASAAAPGKAAQRGKVCVLCVDGGGGGLRALLPGRALAHLEAALRRASGDPDARVADYFDLAAGTGAGGVFAAMLFSTHSRGXPLFHAXDTWRLVADHAPRMFRRPAASSSTSLFCRGKKRPLAAPTAALEAAMKXAFGQELTLRDTIKPVLISCYDLKTSAPLVFSRADALENGSYDFRLCEVGRAAWSEAGRFEPAEVASVDGATSCAAVDGGPTMGSPAAAAITHVLHNKHEFPFVRGVEDLLVLSIGGCSGGGSGAAGEAELRRMRRWGPKEWARPIARIAADGAADLVDHAVARAFGQCRASNYLRIQAKRESMPPCGTDGEYDPTPGNVRALLAAADEMLKQRNVESVLFEGRRVGEQTNAEKLDWFAAELVAEHRSRASRIAPTVAFKQAPQKP

SEQ ID NO: 18179 - protein, 328 aa, Zea mays subsp. mays
  misc_feature (1)..(328): Ceres Seq. ID no. 12363357
  misc_feature (10)..(10): Xaa is any aa, unknown or other
  misc_feature (16)..(16): Xaa is any aa, unknown or other
  misc_feature (63)..(63): Xaa is any aa, unknown or other
MLFSTHSRGXPLFHAXDTWRLVADHAPRMFRRPAASSSTSLFCRGKKRPLAAPTAALEAAMKXAFGQELTLRDTIKPVLISCYDLKTSAPLVFSRADALENGSYDFRLCEVGRAAWSEAGRFEPAEVASVDGATSCAAVDGGPTMGSPAAAAITHVLHNKHEFPFVRGVEDLLVLSIGGCSGGGSGAAGEAELRRMRRWGPKEWARPIARIAADGAADLVDHAVARAFGQCRASNYLRIQAKRESMPPCGTDGEYDPTPGNVRALLAAADEMLKQRNVESVLFEGRRVGEQTNAEKLDWFAAELVAEHRSRASRIAPTVAFKQAPQKP

SEQ ID NO: 18180 - DNA, 1570 bp, Zea mays subsp. mays
  misc_feature (1)..(1570): Ceres Seq. ID no. 12363375
gcacgagaccattacctagaacatcctaatcaaaaatatataaaataatgtcctactcctaccccgccaccacgccgcggcagcacaagcccctctccgcccccagccagccctcctcagatctcaatcccggcgctccctccctccctcctcgcctcgggacagcgagcgccgccgtccgccgtccatggagcacgacgccgaggcgcgccgcgggttcgccaggatgggcttcgggtgcaagcactaccggaggcggtgccggatccgcgcgccctgctgcggcgacgtcttccactgccgccattgccacaacgagtccacgaaagacgggcacgagctggatcggcacgacgtccaatcggttatctgcctcgtctgtgacaccgagcagccgatcgcgcaggtgtgctgcaactgcggcgtctgcatgggggagtacttctgcgcagcctgcaacttcttggacgatgacgttgacaaggagcagttccattgcgacgattgcggcatctgcaggtgcgtgcgtgcgtgtgtctgtccctcttttttttgtttcttgttttcttttcttccttccattgcggtcactgagttacaggatctgagtcgccgcgcacaaatcgcgattttagtaggaaccccccccctctgattaactaactaagctactactacctattgatgatgatccaacaaagctgacagaaactgtggtgcatttgcatttgttcgaacagagtaggaggaaaggagaacttcttccactgccaaaagtgtggtaaaaaaataaacaaatccatcaccagccatattcaccacccgaggatgttctggtttcccatcaccagccatacatcatcctgttgttttttttctttacacacgcaggatcctgctactcgacgacccttcgcgacaggcactgctgcatcgagaactcgatgaagaacaactgccccatctgctacgaggcagtacctgttcgattcgctgagggagacgtcggtgctccgctgcggccacaccatgcacctggagtgcttccacgagatgttgaagcacgacaagttctcgtgccccatatgcgccacgcccatcttcgacatggacaagttcttcaaggccctcgacgcagagatggaggcaagctacttgtacacgggaaagggatgggtcgtgtgcaacgactgcagggacacgacgcaggtcttctccggcgtggcgggccacaagtgctgccactgccagtcccacaacacctgccgggtggcaccccccgtccttccgtagccaccaccaacaccacatcattgttgttggaattggatgcagccagccaagatacccccccagcagctacgctattattaccagtagcgcctgcgcttttacacaccgctccgttccagtccatgatgaactgcataatttcgtgccatgcaggtatgtacgtacactgtttggagatcggaagatttatccgactcgggacgtattatttgtaccacaacaaaacacgtgttactattgtaataccagatccggatatatacgaaactatttttag

SEQ ID NO: 18181 - protein, 208 aa, Zea mays subsp. mays
  misc_feature (1)..(208): Ceres Seq. ID no. 12363376
MKNNCPICYEAVPVRFAEGDVGAPLRPHHAPGVLPRDVEARQVLVPHMRHAHLRHGQVLQGPRRRDGGKLLVHGKGMGRVQRLQGHDAGLLRRGGPQVLPLPVPQHLPGGTPRPSVATTNTTSLLLELDAASQDTPPAATLLLPVAPALLHTAPFQSMMNCIISCHAGMYVHCLEIGRFIRLGTYYLYHNKTRVTIVIPDPDIYETIF

SEQ ID NO: 18182 - protein, 186 aa, Zea mays subsp. mays
  misc_feature (1)..(186): Ceres Seq. ID no. 12363377
MSYSYPATTPRQHKPLSAPSQPSSDLNPGAPSLPPRLGTASAAVRRPWSTTPRRAAGSPGWASGASTTGGGAGSARPAAATSSTAAIATTSPRKTGTSWIGTTSNRLSASSVTPSSRSRRCAATAASAWGSTSAQPATSWTMTLTRSSSIATIAASAGACVRVSVPLFFVSCFLFFLPLRSLSYRI

SEQ ID NO: 18183 - protein, 161 aa, Zea mays subsp. mays
  misc_feature (1)..(161): Ceres Seq. ID no. 12363378
MRHAHLRHGQVLQGPRRRDGGKLLVHGKGMGRVQRLQGHDAGLLRRGGPQVLPLPVPQHLPGGTPRPSVATTNTTSLLLELDAASQDTPPAATLLLPVAPALLHTAPFQSMMNCIISCHAGMYVHCLEIGRFIRLGTYYLYHNKTRVTIVIPDPDIYETIF

SEQ ID NO: 18184 - protein, 155 aa, Zea mays subsp. mays
  misc_feature (1)..(155): Ceres Seq. ID no. 12363379
MEHDAEARRGFARMGFGCKHYRRRCRIRAPCCGDVFHCRHCHNESTKDGHELDRHDVQSVICLVCDTEQPIAQVCCNCGVCMGEYFCAACNFLDDDVDKEQFHCDDCGICRCVRACVCPSFFCFLFSFLPSIAVTELQDLSRRAQIAILVGTPPL

SEQ ID NO: 18185 - DNA, 1633 bp, Zea mays subsp. mays
  misc_feature (1)..(1633): Ceres Seq. ID no. 12363380
gcacgagaccattacctagaacatcctaatcgaaaaaatatagaaccctgttcccaccggcgctcactgcaccttccccagcggccaccacccgaggccggtccccgctgacccgcctccgtggaccggggacacgcggcggcgaccggcgaggcggtccctgcttcctctttctactcctcacaagtatgtatgacacgcaccacccgcaccgcacccacccaccaacccgaccttccgctgctctcacacacacacacacactctacacgcgagcgagaccacgcgccggaccgccgcaagccggtcgccgccgccgcgacctggagcttgcgagctagctctggcctcgctgcctgcgccgactgagatggacccgcggtttccgctgccggccgcggcggcgccgtccacgggcggcggcggcggcgccagagggcaccaccggcgggcccactcggagacgttcctcagcttccacgacgcggacctgctcctcgacccggacggcgacttcttctccgacctcgacttcccctccctctccgacgactctccggccgccttcgaccccaccccgccgccgcatccgcagcagcagccgccgcaggcttccccggccccacgtccgcccggcgggacccacacgcggagcctctccctcgacgccgccttcttcgagggcctcgcgtttcagggacccagtgggagcgccgggggtggaggtgggcccggccacaagaggagcggctcgatggatggggacacctcgccgttcgagggcgagtcggcgctctccagcggcctgccggactacgccaagaaggccatgcccgccgagaggatcgccgagctcgcgctcatcgaccccaagcgcgcaaagaggattctggcgaacaggcagtcggcagcgaggtcaaaggagaggaagatcatgtacactagtgaactggagaagaaggtccagactctgcaaacggaggccactacgctgtcagcacagctgaccctgctccagagggatacaactggtttaactgccgaaaacagagagctcaagcttcggttgcagtccatggaagagcaagctaaactgcgggacgctttgaatgaagccctgcgagaagaagtccagcgacttaagatagccgcaggacaagtcgggaacatgaatgggaaccccttcaatggtggactccagcagcagattccatcctatttcgtgcagcagcagcagatgccgtacttcggtggccaccaggctcagcatcacagtcaaaatcaaaaccatcgtcaccagatctcatcaaatgtggggcagacgctcagtggtcagtccctaaacgactccatggatttcatgtgaggagtacaatatcagggccagtactacatcgtataccgactgcatttcagcactgtaaagatagctaaatgtacaatgtatgcatgtgcctcattggtagtgtgtagttagctcttctttgtatcattattctgaaaatggctcgtgtatgtcaaaatgatgtctcttttctttgctggtttctggagtaatgtgttagactgactagctacctttaacaatttattatgtaaatctttagctttttttaatggtggaaggttcttc

SEQ ID NO: 18186 - protein, 331 aa, Zea mays subsp. mays
  misc_feature (1)..(331): Ceres Seq. ID no. 12363381
MDPRFPLPAAAAPSTGGGGGARGHHRRAHSETFLSFHDADLLLDPDGDFFSDLDFPSLSDDSPAAFDPTPPPHPQQQPPQASPAPRPPGGTHTRSLSLDAAFFEGLAFQGPSGSAGGGGGPGHKRSGSMDGDTSPFEGESALSSGLPDYAKKAMPAERIAELALIDPKRAKRILANRQSAARSKERKIMYTSELEKKVQTLQTEATTLSAQLTLLQRDTTGLTAENRELKLRLQSMEEQAKLRDALNEALREEVQRLKIAAGQVGNMNGNPFNGGLQQQIPSYFVQQQQMPYFGGHQAQHHSQNQNHRHQISSNVGQTLSGQSLNDSMDFM

SEQ ID NO: 18187 - protein, 203 aa, Zea mays subsp. mays
  misc_feature (1)..(203): Ceres Seq. ID no. 12363382
MDGDTSPFEGESALSSGLPDYAKKAMPAERIAELALIDPKRAKRILANRQSAARSKERKIMYTSELEKKVQTLQTEATTLSAQLTLLQRDTTGLTAENRELKLRLQSMEEQAKLRDALNEALREEVQRLKIAAGQVGNMNGNPFNGGLQQQIPSYFVQQQQMPYFGGHQAQHHSQNQNHRHQISSNVGQTLSGQSLNDSMDFM

SEQ ID NO: 18188 - protein, 178 aa, Zea mays subsp. mays
  misc_feature (1)..(178): Ceres Seq. ID no. 12363383
MPAERIAELALIDPKRAKRILANRQSAARSKERKIMYTSELEKKVQTLQTEATTLSAQLTLLQRDTTGLTAENRELKLRLQSMEEQAKLRDALNEALREEVQRLKIAAGQVGNMNGNPFNGGLQQQIPSYFVQQQQMPYFGGHQAQHHSQNQNHRHQISSNVGQTLSGQSLNDSMDFM

SEQ ID NO: 18189 - DNA, 2501 bp, Zea mays subsp. mays
  misc_feature (1)..(2501): Ceres Seq. ID no. 12363395
gcacgagaccattacctagaacatcctaatcgaaaaatcggagctctataaatcgccccaaccccctccctcgttctgccaccattgccatatcctcgatcacaagagcagctactagctgcctctagctcgatcggttagtttgtcgtgttgcttacgtacgtcagcagaggccatcgtcgagtgtatccagtggtcgagaagagggaagaaatgtctgcgaacgacggcgccggcgacacgaagatgagggcgatcgtcgtcgtagaggaaggggagatgagcgcgccggcggcgacgccgaagcagggcaagtgctgcgagtacacgctggacggctccgtcgacatgaagggccggccggcggtcaaggggaaatcaggagggtggcttgccggtgctctaatcctcgtgaaccagggcctggcgacgctggctttcttcggcgtgaacgtgaacctggtgctgttccctgacccgggtgctggggcagagcaatggcgacgccgccaacaacgtcagcaagtggacgggcaccgtgtacatgttctccctcatcggcgccttcctcagcgactcctattggggacgctacaagacctgcgccatcttccaggccatctttgtcctcggcctcgcgctgctgtcggtgtcgtcgcacctctacctaatcaggccggacgggtgcggcatggagcacgcgccctgcggcccgcactccggcaaggagctggggatcttctacatcgcgctgtacatgatcgccttcggcaacggcgggtaccagcccaacatcgccaccctgggcgccgaccagttcgacgaggaggaccccgccgaggcgcactccaaggtctccttcttcagctacttctacctcgccctcaacctcggctcgctcttctccaacaccttcctcagctacctcgaggacaagggcagctgggcgctcggcttctgggcctccaccgccgccgccgccacagcgctcctgcttttcctcagcggcacgctccggtaccgctatttccagcccggagggaacccgatcggaaggattggccaggtcgccatcgccgcgtgcaggaactggaaggcgggcgtgtcgaccgaagtggtaagcctgtacgagggcgacgagaaggcggatgccggtggcaggaagcttctgcacacgcaagggttcagtttcttggaccgcgcggcgcacgcggacactgactccaagctcggcgcgcgcgatccctggaagctgtgctcggtgacgcaggtggaggaggtcaagagcatcctgaggctcctccccatctggctctgcaccatcctctactccgttgtcttcacccagatggcctcgctctttgtcgtgcagggcgccgcgatgcgccgcaccaccccgttctccggcttctccgtcccgccctccagcatgtcggccttcgacattctcacagtcgccgccacgattttcctgtaccgccgcactatctgcccgttcctagcgcggctcagcggccgcccggctggccccaccgagctgcagaggatgggcctcggcctggtcgtgggtgccctggccatgaccacggccgggacggtcgagcacttccggaaggccagggccaccgcagcgatgagcagcgacctgcatatcatgtggcaggtgccgcagtatgcgctgatcggcgtgtcggaggtgatgatgtacgtcgggcagctcgagttcttcaacggccagatgcccgacgggctcaaaagcttcggagcgcgctgtgcatgatgtccatgtcgctcggcaactacttcagtgacatcatcgtgagcgcggtgaccaggctcaccacgacgcgagggcggtccgggtggatcccggctgacctcaacgaggggcacctcgacaagttctacttcctgctcgccgtgctggccgtcgcggacttcgcggtgtacctcgtatgcgcgagccgctacgggagcggcaaagtggacgggaggagcagcgacgacgaggaggagggagcggccggtcaggtgacatccccggcttacgcatgaccatcaccggccgcccggccggcgggcatcgtacgtatgttgttcttgtcttcttgaggtggaggctggcaggctgcaaatctcgagggccattggttatttggttgacggagttcttccattgacgacgatagcacaagcatggggcgagcatggacatagtgatatgactaattaaagaataagcacttaagcaggactagctaaacactacatgctgcagcatcatgctcgcggtttttggccagtgtaacaacagacgacgattgttactgaccacgactgttctttgcgtggtctacagagttcgcttctgcaaaattcaataatgggcgagtgctgtatcatataaagtcgcaggttgcgccacgtagctacgatgtgactaacaaacaaatatgtattcaagttatgtattaaacggttaaccgtgtctttttaccgtt

SEQ ID NO: 18190 - protein, 411 aa, Zea mays subsp. mays
  misc_feature (1)..(411): Ceres Seq. ID no. 12363396
MFSLIGAFLSDSYWGRYKTCAIFQAIFVLGLALLSVSSHLYLIRPDGCGMEHAPCGPHSGKELGIFYIALYMIAFGNGGYQPNIATLGADQFDEEDPAEAHSKVSFFSYFYLALNLGSLFSNTFLSYLEDKGSWALGFWASTAAAATALLLFLSGTLRYRYFQPGGNPIGRIGQVAIAACRNWKAGVSTEVVSLYEGDEKADAGGRKLLHTQGFSFLDRAAHADTDSKLGARDPWKLCSVTQVEEVKSILRLLPIWLCTILYSVVFTQMASLFVVQGAAMRRTTPFSGFSVPPSSMSAFDILTVAATIFLYRRTICPFLARLSGRPAGPTELQRMGLGLVVGALAMTTAGTVEHFRKARATAAMSSDLHIMWQVPQYALIGVSEVMMYVGQLEFFNGQMPDGLKSFGARCA

SEQ ID NO: 18191 - protein, 362 aa, Zea mays subsp. mays
  misc_feature (1)..(362): Ceres Seq. ID no. 12363397
MEHAPCGPHSGKELGIFYIALYMIAFGNGGYQPNIATLGADQFDEEDPAEAHSKVSFFSYFYLALNLGSLFSNTFLSYLEDKGSWALGFWASTAAAATALLLFLSGTLRYRYFQPGGNPIGRIGQVAIAACRNWKAGVSTEVVSLYEGDEKADAGGRKLLHTQGFSFLDRAAHADTDSKLGARDPWKLCSVTQVEEVKSILRLLPIWLCTILYSVVFTQMASLFVVQGAAMRRTTPFSGFSVPPSSMSAFDILTVAATIFLYRRTICPFLARLSGRPAGPTELQRMGLGLVVGALAMTTAGTVEHFRKARATAAMSSDLHIMWQVPQYALIGVSEVMMYVGQLEFFNGQMPDGLKSFGARCA

SEQ ID NO: 18192 - protein, 340 aa, Zea mays subsp. mays
  misc_feature (1)..(340): Ceres Seq. ID no. 12363398
MIAFGNGGYQPNIATLGADQFDEEDPAEAHSKVSFFSYFYLALNLGSLFSNTFLSYLEDKGSWALGFWASTAAAATALLLFLSGTLRYRYFQPGGNPIGRIGQVAIAACRNWKAGVSTEVVSLYEGDEKADAGGRKLLHTQGFSFLDRAAHADTDSKLGARDPWKLCSVTQVEEVKSILRLLPIWLCTILYSVVFTQMASLFVVQGAAMRRTTPFSGFSVPPSSMSAFDILTVAATIFLYRRTICPFLARLSGRPAGPTELQRMGLGLVVGALAMTTAGTVEHFRKARATAAMSSDLHIMWQVPQYALIGVSEVMMYVGQLEFFNGQMPDGLKSFGARCA

SEQ ID NO: 18193 - DNA, 1588 bp, Zea mays subsp. mays
  misc_feature (1)..(1588): Ceres Seq. ID no. 12363408
cccggcttaggaaccctcgaaaagacgcctcaccatctcctttgtgtccttgctaactaactccccattagatccggccttcttcctccccgtctccgtcctttgtgtccagttgcttcataagctacccatcgccaattcgccatatacgcacatacccaacgacgacgcacgcgcgtgcgcaaaccaccaaccggagcgagtaccaaccggccggcccgcccaacaagcaggcggctagccatcgacgaccgagcacatcgagctgcccccggccggtcatatatatatgcagggcggcggcggtgatcaagcaggagggagcctgggcatgggcatgggcgtggggtacgccggcggcggaggcgccgagtgctcgtcgtcctcggtggcggccgcggctgccgccgccgcggcggcggcggaggcggaggagcggcagctgctcaagggggagatcgcggtgcacccgctgtgcgagcagctggtggcggcgcacgtggggtgcctgcgcgtggccacgcccatcgaccacctccccctcatcgacgcccagctcgcgcagtccagcggcctcctccactcctacgccgcccaccacagccccttcctctccccgcacgacaagcacgacctcgactccttcctcgcgcagtacctgatgctgctgtgctcgttccgggagcagctgcagcagcacgtccgggtgcacgccgtggaggccgtcatggcatgccgcgagatcgagcagtccctgcaagacctaactggggtgacgctggaggaagggacgggagcgaccatgtcggaggaggacgaggacgaggcgccgatgctggaggtgggtctggtggacatgggctccgacgggcacgacatgatgggcttcggcccgctcctgcccaccgactccgagcgctcgctcatggatagggtccgacaggagcttaagatcgagctcaagcagggtttcaagtcaagaatagaggatgtgagggaggagattctgaggaaaaggagggccgggaagctgcctggggacaccaccagcatcctcaagcaatggtggcagcagcactccaagtggccataccccacggaggacgataaggcgaggctcgttgaagagaccggcctgcagctgaaacaaatcaacaactggttcatcaaccagaggaagaggaactggcacaacaactcccagacgtcaaccctcaaatcaaagcgtaaaaggtgatggagagctgcgccaccatgtactgcacacctgacacgtataccaattaccaacacgctaatcagacgacgtacggccatgcatggcgactcacaagaaataaagaggatcgatcgattcaactgtatatttctagtcattagtcagagaggtgacaggttcatgacacacacaaacacacgtacactagtctgaccactggcatatttgcttgctgtgattaatattttgagccgatcatttgctcggagcatactttattcttgttattattgtacagccatagtttgtcctcccagcgtacgtacataatctttgaggttgcattcatatatacagtgatctgatctg

SEQ ID NO: 18194 - protein, 315 aa, Zea mays subsp. mays
  misc_feature (1)..(315): Ceres Seq. ID no. 12363409
MQGGGGDQAGGSLGMGMGVGYAGGGGAECSSSSVAAAAAAAAAAAEAEERQLLKGEIAVHPLCEQLVAAHVGCLRVATPIDHLPLIDAQLAQSSGLLHSYAAHHSPFLSPHDKHDLDSFLAQYLMLLCSFREQLQQHVRVHAVEAVMACREIEQSLQDLTGVTLEEGTGATMSEEDEDEAPMLEVGLVDMGSDGHDMMGFGPLLPTDSERSLMDRVRQELKIELKQGFKSRIEDVREEILRKRRAGKLPGDTTSILKQWWQQHSKWPYPTEDDKARLVEETGLQLKQINNWFINQRKRNWHNNSQTSTLKSKRKR

SEQ ID NO: 18195 - protein, 301 aa, Zea mays subsp. mays
  misc_feature (1)..(301): Ceres Seq. ID no. 12363410
MGMGVGYAGGGGAECSSSSVAAAAAAAAAAAEAEERQLLKGEIAVHPLCEQLVAAHVGCLRVATPIDHLPLIDAQLAQSSGLLHSYAAHHSPFLSPHDKHDLDSFLAQYLMLLCSFREQLQQHVRVHAVEAVMACREIEQSLQDLTGVTLEEGTGATMSEEDEDEAPMLEVGLVDMGSDGHDMMGFGPLLPTDSERSLMDRVRQELKIELKQGFKSRIEDVREEILRKRRAGKLPGDTTSILKQWWQQHSKWPYPTEDDKARLVEETGLQLKQINNWFINQRKRNWHNNSQTSTLKSKRKR

SEQ ID NO: 18196 - protein, 299 aa, Zea mays subsp. mays
  misc_feature (1)..(299): Ceres Seq. ID no. 12363411
MGVGYAGGGGAECSSSSVAAAAAAAAAAAEAEERQLLKGEIAVHPLCEQLVAAHVGCLRVATPIDHLPLIDAQLAQSSGLLHSYAAHHSPFLSPHDKHDLDSFLAQYLMLLCSFREQLQQHVRVHAVEAVMACREIEQSLQDLTGVTLEEGTGATMSEEDEDEAPMLEVGLVDMGSDGHDMMGFGPLLPTDSERSLMDRVRQELKIELKQGFKSRIEDVREEILRKRRAGKLPGDTTSILKQWWQQHSKWPYPTEDDKARLVEETGLQLKQINNWFINQRKRNWHNNSQTSTLKSKRKR

SEQ ID NO: 18197 - DNA, 1955 bp, Zea mays subsp. mays
  misc_feature (1)..(1955): Ceres Seq. ID no. 12363415
ggcgaatccctgactttcttctccacgccgtgctctgcttcgagtgaggcctggttcagattttacaggggttcggttcgatctggtgtccgacggaggcggcggcggcggctcctctgctgttcgattgagggagaggggccatggaaaacccggcgccgccgaccaacccggcctccgccacgccgtcgccgtcgcggcagctgccggacttccagcagtcggttcgtctcaagtacgtgaagctggggtaccattacctcatcacccacggcatgtacctgctgctcaccccgctgatggtgctcgtggccgtgtacctctccacgctctccccgcgcgacgtcgccgacctgtgggcccacctccgcctcaacctcatctccgtgctggcctgctccacgctcctcgtcttcctcggcacggcctacttcctcacccgcccgcggcccgtgtacctggtcgacttcgcctgctacaagcccgggccggagcgtcggtgcacgcgcgacaccttcatgcgctgctccaggctcaccggctgcttcactgacgccagcctcgagttccagcgcaagatcctggagcgctcggggctgggcgaggacacgtaccttccccccgccgtcacgcgggtgccgcccaacccgtccatggacgaggcgcgcgcggaggcgcgggaggtcatgttcggcgccgtcgacgagctgctcgccaagacgggggtcaagcccaaggacatcgggatcctcgtggtgaactgcagcctgttcaacccgacgccgtcgctgtcggccatggtggtcaaccactacaagctgcgcgggaacgtggtgagctacaacctcggcgggatggggtgcagcgccgggctgctgtccgtggacctcgccaaggacctgctgcagacgcacccggggtcgtacgcgctggtcatcagcacggagaacatcacgctcaactggtactcggggaacgaccgctccaagctggtgtccaactgcctgttccggatgggcggcgccgcggtgctgctctcgaatcggcggtccgaccggcggcgggccaagtacgagctggtgcacacggtgcgcacgcacaagggcgcggacgaccggtgcttcggctgcgtgacgcaggaggaggacggcgagggcgtcgtgggcgtgtcgctgtcgagggacctgatggcggtggcgggcgacgcgctcaagacgaacataacaacgctgggcccgctggtgctgccgctgtcggagcagctgctgttcatggcgacgctggtcgccaagaagctgctcaagatgaagaaggtgaagccgtacatcccggatttcaaactggcgttcgagcacttctgcatccacgccggcggccgtgccgtgctggacgagctggagagcaacctggcgctcacggattggcacatggagccgtcgcggatgatgctgcaccggttcgggaacacgtccagcagctcgctctggtacgagctggcctacagcgaggccaaggggaggatccggcgccgccaccgggtgtggcagatcgcgttcgggtcagggttcaagtgcaacagcgccgtgtggagggcgctccggtcggtgaacccggcggaggagacgaacccgtggatggacgagatcgacaggtttcccgtggatgttcccaaggtctctaaggtttcaagcgactgaaatgcattgctagttgcgtgaatgatggagcttgcaattgtttggatagaagatctggttggaatttttcatagttcattactatatagttgtaggagataggaaaggcgatcgacttctctaatcttgaattatacatctgttaatgttgtttctgtatggcactcggtccctggcctatctatatagttgactgctcggtgttctgacagttctactatatctgttcattctccaactgttgatcactgttcttcc

SEQ ID NO: 18198 - protein, 517 aa, Zea mays subsp. mays
  misc_feature (1)..(517): Ceres Seq. ID no. 12363416
MENPAPPTNPASATPSPSRQLPDFQQSVRLKYVKLGYHYLITHGMYLLLTPLMVLVAVYLSTLSPRDVADLWAHLRLNLISVLACSTLLVFLGTAYFLTRPRPVYLVDFACYKPGPERRCTRDTFMRCSRLTGCFTDASLEFQRKILERSGLGEDTYLPPAVTRVPPNPSMDEARAEAREVMFGAVDELLAKTGVKPKDIGILVVNCSLFNPTPSLSAMVVNHYKLRGNVVSYNLGGMGCSAGLLSVDLAKDLLQTHPGSYALVISTENITLNWYSGNDRSKLVSNCLFRMGGAAVLLSNRRSDRRRAKYELVHTVRTHKGADDRCFGCVTQEEDGEGVVGVSLSRDLMAVAGDALKTNITTLGPLVLPLSEQLLFMATLVAKKLLKMKKVKPYIPDFKLAFEHFCIHAGGRAVLDELESNLALTDWHMEPSRMMLHRFGNTSSSSLWYELAYSEAKGRIRRRHRVWQIAFGSGFKCNSAVWRALRSVNPAEETNPWMDEIDRFPVDVPKVSKVSSD

SEQ ID NO: 18199 - protein, 473 aa, Zea mays subsp. mays
  misc_feature (1)..(473): Ceres Seq. ID no. 12363417
MYLLLTPLMVLVAVYLSTLSPRDVADLWAHLRLNLISVLACSTLLVFLGTAYFLTRPRPVYLVDFACYKPGPERRCTRDTFMRCSRLTGCFTDASLEFQRKILERSGLGEDTYLPPAVTRVPPNPSMDEARAEAREVMFGAVDELLAKTGVKPKDIGILVVNCSLFNPTPSLSAMVVNHYKLRGNVVSYNLGGMGCSAGLLSVDLAKDLLQTHPGSYALVISTENITLNWYSGNDRSKLVSNCLFRMGGAAVLLSNRRSDRRRAKYELVHTVRTHKGADDRCFGCVTQEEDGEGVVGVSLSRDLMAVAGDALKTNITTLGPLVLPLSEQLLFMATLVAKKLLKMKKVKPYIPDFKLAFEHFCIHAGGRAVLDELESNLALTDWHMEPSRMMLHRFGNTSSSSLWYELAYSEAKGRIRRRHRVWQIAFGSGFKCNSAVWRALRSVNPAEETNPWMDEIDRFPVDVPKVSKVSSD

SEQ ID NO: 18200 - protein, 465 aa, Zea mays subsp. mays
  misc_feature (1)..(465): Ceres Seq. ID no. 12363418
MVLVAVYLSTLSPRDVADLWAHLRLNLISVLACSTLLVFLGTAYFLTRPRPVYLVDFACYKPGPERRCTRDTFMRCSRLTGCFTDASLEFQRKILERSGLGEDTYLPPAVTRVPPNPSMDEARAEAREVMFGAVDELLAKTGVKPKDIGILVVNCSLFNPTPSLSAMVVNHYKLRGNVVSYNLGGMGCSAGLLSVDLAKDLLQTHPGSYALVISTENITLNWYSGNDRSKLVSNCLFRMGGAAVLLSNRRSDRRRAKYELVHTVRTHKGADDRCFGCVTQEEDGEGVVGVSLSRDLMAVAGDALKTNITTLGPLVLPLSEQLLFMATLVAKKLLKMKKVKPYIPDFKLAFEHFCIHAGGRAVLDELESNLALTDWHMEPSRMMLHRFGNTSSSSLWYELAYSEAKGRIRRRHRVWQIAFGSGFKCNSAVWRALRSVNPAEETNPWMDEIDRFPVDVPKVSKVSSD

SEQ ID NO: 18201 - DNA, 1314 bp, Zea mays subsp. mays
  misc_feature (1)..(1314): Ceres Seq. ID no. 12363419
gcacgagaccattacctagaacatcctaatcgaaaaatttttcgacatgccgcgcgagctggaggtccggtacggtggctggctggacgctgggatccgggaggagtacgagcactacgcggacgtctgcttcggggcgttcggcgaccgggtgcggctctggacgaccttcaacgagcccaacctgctggtcaagttccagtacatgctgggcgcgtacccgcccagccgctgctccccgccgttcggcagctgcgggagcggcgactcgcgccgggagccgtacgccgcggcgcacaacatcatcatgtcccccgccgccgtccgcgcctacagggacaagtaccaggcgacgcagggcggctccgtcgggatcgtggccgccatgaaatggtacgagccgctgacgaactccacggacgacatcctggccgcgcggcgcgcgcaggctttcgagacggactggtttctggagccgatattcttgggcgattaccccggagcgatgcgggagatcctgggatcggacctgccgaccttcaccgcggaggagaaggcgctgctgctgcggtacaaggcggacttcatcgggctgaaccactacacggcgatctacgccagggactgcctgcgctccccgtgcaacctcgggtcgtacgaagggaacgccttcgtctcggcgactggggaaagggacgacggggtcaagatcgggggagatactgcgctggcaggtttcttcgacgtcccagaggccatagagctggctatccagtacgtgaacgggaggtacaagggcacgcctgtgtatattactgagaacggttactcgcagtggagtgatgccagcagggaggagctgatcaacgatgtgaggagaaagaactacctgcagggctacatcacgtatctatccaaagcagtcaggaacggagcaaacgtgcggggctacttcgtgtggacgctgctggacaacttcgagtgggcgttcggttacaggttgaagtacgggctgtaccacgtcgacttcgacacacaggagaggacgccccggatgtctgcgaggtggtaccagggcttcctcacggcccgcaccagccagcgcgacgaagcagcgcaggcacggagagcagactcgtgatgaaccattcccacttccaccgatatatatcatcgaacgccttgctagacagccgagggtctcatgactcgtgctcatttccgtcctcgcggtatattggaataactgtggctgtggtgtcctaatgtctgtatatgcatatatcatatattttgacctcaaaagaggtttag

SEQ ID NO: 18202 - protein, 364 aa, Zea mays subsp. mays
  misc_feature (1)..(364): Ceres Seq. ID no. 12363420
MPRELEVRYGGWLDAGIREEYEHYADVCFGAFGDRVRLWTTFNEPNLLVKFQYMLGAYPPSRCSPPFGSCGSGDSRREPYAAAHNIIMSPAAVRAYRDKYQATQGGSVGIVAAMKWYEPLTNSTDDILAARRAQAFETDWFLEPIFLGDYPGAMREILGSDLPTFTAEEKALLLRYKADFIGLNHYTAIYARDCLRSPCNLGSYEGNAFVSATGERDDGVKIGGDTALAGFFDVPEAIELAIQYVNGRYKGTPVYITENGYSQWSDASREELINDVRRKNYLQGYITYLSKAVRNGANVRGYFVWTLLDNFEWAFGYRLKYGLYHVDFDTQERTPRMSARWYQGFLTARTSQRDEAAQARRADS

SEQ ID NO: 18203 - protein, 311 aa, Zea mays subsp. mays
  misc_feature (1)..(311): Ceres Seq. ID no. 12363421
MLGAYPPSRCSPPFGSCGSGDSRREPYAAAHNIIMSPAAVRAYRDKYQATQGGSVGIVAAMKWYEPLTNSTDDILAARRAQAFETDWFLEPIFLGDYPGAMREILGSDLPTFTAEEKALLLRYKADFIGLNHYTAIYARDCLRSPCNLGSYEGNAFVSATGERDDGVKIGGDTALAGFFDVPEAIELAIQYVNGRYKGTPVYITENGYSQWSDASREELINDVRRKNYLQGYITYLSKAVRNGANVRGYFVWTLLDNFEWAFGYRLKYGLYHVDFDTQERTPRMSARWYQGFLTARTSQRDEAAQARRADS

SEQ ID NO: 18204 - protein, 277 aa, Zea mays subsp. mays
  misc_feature (1)..(277): Ceres Seq. ID no. 12363422
MSPAAVRAYRDKYQATQGGSVGIVAAMKWYEPLTNSTDDILAARRAQAFETDWFLEPIFLGDYPGAMREILGSDLPTFTAEEKALLLRYKADFIGLNHYTAIYARDCLRSPCNLGSYEGNAFVSATGERDDGVKIGGDTALAGFFDVPEAIELAIQYVNGRYKGTPVYITENGYSQWSDASREELINDVRRKNYLQGYITYLSKAVRNGANVRGYFVWTLLDNFEWAFGYRLKYGLYHVDFDTQERTPRMSARWYQGFLTARTSQRDEAAQARRADS

SEQ ID NO: 18205 - DNA, 1403 bp, Zea mays subsp. mays
  misc_feature (1)..(1403): Ceres Seq. ID no. 12363423
gcacgagaccattacctagaacatcctaatcgaaaaatacatacccaccggccggcgtcacagacacgcgagcagagcacagacacagagcacacagcacagaggcagccaccaccacaggcactcacccgcaccgctcggtcaccgaggagtggaggagctttgcagtcgcagcagcagcagtacagtgtgtgagtgtgaagggactagagcagggcacacagcgcaggccgcatgggcgaggcggaggtggagaagcccaaggaggcggcagaggaggagaagaagaaggaagacaagcccatggacgccacggcggcggcggaggacaagcccaaggacgccgcggcggcggaggacaagcccaaggacggggaggagaagaaggacgacgcgccccctcccccgccgccgccgccgcctgaggaggtcgagatgcgggtctacatgcactgcgagggatgcgcccgcaaggtcaagaagatcctcaagcgcttcgacggagtggaggacgtggtcgccgactccaagtcgcacaaggtggtggtgaaggggaagaaggcggccgccgaccccatgagggtggtggagcgcgtgcagaagaagaccggccgcaaggtggagttgctgtcgccgatcccgccgccaacgccgccggaggagaagaaggcagaggaggagcccgagccgccaaagccggaggagaagaaggagccgccggtgatcgccgtggtgctgaaggtgcacatgcactgcgaggcctgcgcccaggggatcaggaagaggatcctcaagatgaaaggcgtgcaatctgcagagccagacctcaaggcgtcggaggtggcagtgaagggcgtgttcgaggagtccaagctggcggagtacgtgtacaagcgcaccggcaagcacgcggccgtcgtcaagtccgagccggtcccggcgccaccgccggagagcggcgccggcgacaacacgggggccaaggaggaggagaaggggcaggaggaggagaaggagaaggaaggaggaggcgatgncggtggcgaggagaagaagaaggaagggggcaaggaggaagagaagaaggacggcgagaagcaggaggaggagaaggagnncgncggtggcggcgagaaggtggaggaaaaggagggagataaagacgctgccgctgccgccgccgccagcatgtacatgcactacccgaggttcccgttcccgggaggctactacgcgccgcctccggggtacgtctaccagccggtgtacccggcgccggcgtacgcggcgtacgcgccgccgcaccaccagcccatggcgccgcagatcttcagcgacgagaaccccaacgcatgctccgtcatgtaactaaaaaacagaaggagccttggcgagagaggggg

SEQ ID NO: 18206 - protein, 377 aa, Zea mays subsp. mays
  misc_feature (1)..(377): Ceres Seq. ID no. 12363424
  misc_feature (268)..(268): Xaa is any aa, unknown or other
  misc_feature (295)..(295): Xaa is any aa, unknown or other
  misc_feature (296)..(296): Xaa is any aa, unknown or other
MGEAEVEKPKEAAEEEKKKEDKPMDATAAAEDKPKDAAAAEDKPKDGEEKKDDAPPPPPPPPPEEVEMRVYMHCEGCARKVKKILKRFDGVEDVVADSKSHKVVVKGKKAAADPMRVVERVQKKTGRKVELLSPIPPPTPPEEKKAEEEPEPPKPEEKKEPPVIAVVLKVHMHCEACAQGIRKRILKMKGVQSAEPDLKASEVAVKGVFEESKLAEYVYKRTGKHAAVVKSEPVPAPPPESGAGDNTGAKEEEKGQEEEKEKEGGGDXGGEEKKKEGGKEEEKKDGEKQEEEKEXXGGGEKVEEKEGDKDAAAAAAASMYMHYPRFPFPGGYYAPPPGYVYQPVYPAPAYAAYAPPHHQPMAPQIFSDENPNACSVM

SEQ ID NO: 18207 - protein, 354 aa, Zea mays subsp. mays
  misc_feature (1)..(354): Ceres Seq. ID no. 12363425
  misc_feature (245)..(245): Xaa is any aa, unknown or other
  misc_feature (272)..(272): Xaa is any aa, unknown or other
  misc_feature (273)..(273): Xaa is any aa, unknown or other
MDATAAAEDKPKDAAAAEDKPKDGEEKKDDAPPPPPPPPPEEVEMRVYMHCEGCARKVKKILKRFDGVEDVVADSKSHKVVVKGKKAAADPMRVVERVQKKTGRKVELLSPIPPPTPPEEKKAEEEPEPPKPEEKKEPPVIAVVLKVHMHCEACAQGIRKRILKMKGVQSAEPDLKASEVAVKGVFEESKLAEYVYKRTGKHAAVVKSEPVPAPPPESGAGDNTGAKEEEKGQEEEKEKEGGGDXGGEEKKKEGGKEEEKKDGEKQEEEKEXXGGGEKVEEKEGDKDAAAAAAASMYMHYPRFPFPGGYYAPPPGYVYQPVYPAPAYAAYAPPHHQPMAPQIFSDENPNACSVM

SEQ ID NO: 18208 - protein, 310 aa, Zea mays subsp. mays
  misc_feature (1)..(310): Ceres Seq. ID no. 12363426
  misc_feature (201)..(201): Xaa is any aa, unknown or other
  misc_feature (228)..(228): Xaa is any aa, unknown or other
  misc_feature (229)..(229): Xaa is any aa, unknown or other
MRVYMHCEGCARKVKKILKRFDGVEDVVADSKSHKVVVKGKKAAADPMRVVERVQKKTGRKVELLSPIPPPTPPEEKKAEEEPEPPKPEEKKEPPVIAVVLKVHMHCEACAQGIRKRILKMKGVQSAEPDLKASEVAVKGVFEESKLAEYVYKRTGKHAAVVKSEPVPAPPPESGAGDNTGAKEEEKGQEEEKEKEGGGDXGGEEKKKEGGKEEEKKDGEKQEEEKEXXGGGEKVEEKEGDKDAAAAAAASMYMHYPRFPFPGGYYAPPPGYVYQPVYPAPAYAAYAPPHHQPMAPQIFSDENPNACSVM

SEQ ID NO: 18209 - DNA, 1859 bp, Zea mays subsp. mays
  misc_feature (1)..(1859): Ceres Seq. ID no. 12363437
gcacgagaccattacctagaacatcctaatcgaaaacgaactatttaccaatggaggcctgcaagatcgttgaaggccagagatacacgaagaggttgaatgaaaaacagatcacatcgttgctaaaggttacatgccaaaggcctcgagaacaagagatggatattctacagacagttcatcaaaatggatatgagcaagatccatatgcgaaggaatttgggatcaacattagtgagaagctaacctatgttgaagcccgagtccttcctgcaccttggctgaagtatcatgacactggaaaagagaaagagtgcttaccacaggttggtcagtggaacatggtaaacaagaaagtgataaacggatgcaaggtgagccactgggcatgtataaacttctcaaggagtgttccagaagccacagctcggggattttgccaggaattggcacaaatgtgtcaaatttcgggcatggaatttaacagtgagcccgtgatgccaatatattcagctagaccagatcaagtagtgaaggcacttaaaagtgtgtataatattgcactgaacaaactcaagggtaaagaacttgaacttcttctggctatactccccgacaacaatggtccgttatatggtgacatcaaacgtatttgtgaaactgatttgggattgatatcacaatgttgcttaaccaagcatgtttttaagatcagcaaacagtacttggcaaatgtctcactgaaaattaatgttaagatgggaggaagaaacactgtgctcctggacgcaataagttggagcattcctttggtcagtgacatcccaactattatatttggtgcagatgtaacacaccctgaaaccggggaggactcaagtccatcaatcgctgccgttgttgcttctcaagattggccagaagttacaaagtatgctggattggtttgtgctcaggcacaccggcaagagctcattcaggacctttacaaaacatggcacgatcctcagagaggcactgtaacaggcggcatgatcagggagctgttaatatccttcaggaaggccactgggcagaagccattgagaataatattctacagggacggtgttagtgaaggccagttctatcaagttctcctttacgagttagatgccatccgtaaggcatgcgcatccctagaaccaaattaccagcctcctgtaacatttgtggtggttcaaaaacgtcatcatacgagactatttacaaacaatcacaaagacagaagtagcatggacaagagtggaaatattttgccaggaactgttgttgattctaagatatgccacccaacagagtttgatttctacctctgtagtcatgctggaatccagggaacaagtaggcccgctcactaccatgtcctctgggatgagaacaatttcacagcagacgaaatgcaaacactgacaaacaacctttgctacacttatgcccggtgcacacgctcggtttctgttgtccctcctgcatactacgcacacctggcagcattccgggcgcggttctacatggaaccagagatgtcggagaaccagacgtcgaagagctccaatggcacgaacggaggcttggtgaagcccctgcctgctgtgaaggagaaggtgaaaagggtgatgttctactgctgacgaggtgaccgctttaacaaccattcacatgctgtagctaacttggtagggttcagtaggggattagattagctttctccaggaacgaagaggaaacgggatgcgtatttggatcatgaacaatcaatctgttagcgatcgctgtaaaatactcggaaatgcctgtataatagttcttgttggttc

SEQ ID NO: 18210 - protein, 540 aa, Zea mays subsp. mays
  misc_feature (1)..(540): Ceres Seq. ID no. 12363438
MEACKIVEGQRYTKRLNEKQITSLLKVTCQRPREQEMDILQTVHQNGYEQDPYAKEFGINISEKLTYVEARVLPAPWLKYHDTGKEKECLPQVGQWNMVNKKVINGCKVSHWACINFSRSVPEATARGFCQELAQMCQISGMEFNSEPVMPIYSARPDQVVKALKSVYNIALNKLKGKELELLLAILPDNNGPLYGDIKRICETDLGLISQCCLTKHVFKISKQYLANVSLKINVKMGGRNTVLLDAISWSIPLVSDIPTIIFGADVTHPETGEDSSPSIAAVVASQDWPEVTKYAGLVCAQAHRQELIQDLYKTWHDPQRGTVTGGMIRELLISFRKATGQKPLRIIFYRDGVSEGQFYQVLLYELDAIRKACASLEPNYQPPVTFVVVQKRHHTRLFTNNHKDRSSMDKSGNILPGTVVDSKICHPTEFDFYLCSHAGIQGTSRPAHYHVLWDENNFTADEMQTLTNNLCYTYARCTRSVSVVPPAYYAHLAAFRARFYMEPEMSENQTSKSSNGTNGGLVKPLPAVKEKVKRVMFYC

SEQ ID NO: 18211 - protein, 504 aa, Zea mays subsp. mays
  misc_feature (1)..(504): Ceres Seq. ID no. 12363439
MDILQTVHQNGYEQDPYAKEFGINISEKLTYVEARVLPAPWLKYHDTGKEKECLPQVGQWNMVNKKVINGCKVSHWACINFSRSVPEATARGFCQELAQMCQISGMEFNSEPVMPIYSARPDQVVKALKSVYNIALNKLKGKELELLLAILPDNNGPLYGDIKRICETDLGLISQCCLTKHVFKISKQYLANVSLKINVKMGGRNTVLLDAISWSIPLVSDIPTIIFGADVTHPETGEDSSPSIAAVVASQDWPEVTKYAGLVCAQAHRQELIQDLYKTWHDPQRGTVTGGMIRELLISFRKATGQKPLRIIFYRDGVSEGQFYQVLLYELDAIRKACASLEPNYQPPVTFVVVQKRHHTRLFTNNHKDRSSMDKSGNILPGTVVDSKICHPTEFDFYLCSHAGIQGTSRPAHYHVLWDENNFTADEMQTLTNNLCYTYARCTRSVSVVPPAYYAHLAAFRARFYMEPEMSENQTSKSSNGTNGGLVKPLPAVKEKVKRVMFYC

SEQ ID NO: 18212 - protein, 443 aa, Zea mays subsp. mays
  misc_feature (1)..(443): Ceres Seq. ID no. 12363440
MVNKKVINGCKVSHWACINFSRSVPEATARGFCQELAQMCQISGMEFNSEPVMPIYSARPDQVVKALKSVYNIALNKLKGKELELLLAILPDNNGPLYGDIKRICETDLGLISQCCLTKHVFKISKQYLANVSLKINVKMGGRNTVLLDAISWSIPLVSDIPTIIFGADVTHPETGEDSSPSIAAVVASQDWPEVTKYAGLVCAQAHRQELIQDLYKTWHDPQRGTVTGGMIRELLISFRKATGQKPLRIIFYRDGVSEGQFYQVLLYELDAIRKACASLEPNYQPPVTFVVVQKRHHTRLFTNNHKDRSSMDKSGNILPGTVVDSKICHPTEFDFYLCSHAGIQGTSRPAHYHVLWDENNFTADEMQTLTNNLCYTYARCTRSVSVVPPAYYAHLAAFRARFYMEPEMSENQTSKSSNGTNGGLVKPLPAVKEKVKRVMFYC

SEQ ID NO: 18213 - DNA, 1678 bp, Zea mays subsp. mays
  misc_feature (1)..(1678): Ceres Seq. ID no. 12363462
gcacgagaccattacctagaacatcctaattgaaaaacagtcctcaccaccagaccaaatcgcagtcgcgctcgagctcaagccccgccgccgacgccgtcatctgcgccccagaaccccgtatttccctccgccgccttccgatctctcgctcctccccatgtcggagaaaaagcgccgcgccggtgcgagcgcggccggcgccgcatccagctccaagaagccgcgtgcttcctcggccgcgtcgtacgccgagtccctccgctcgaagctccgccccgacgcctccatcctggccaccctccgctccctcgcttctgcctccgcttccaaatccaaggccgacgccaggtccctcgcggaccacgacccgtgcgcggaccccgcctcctcgtacatcgtggtggccgaccaggactccacctccgtcacctcccgcatcaaccgcctcgtccttgccgccgcgcgcagcatcctctccggccggggcttctccttcgcggtgccctcgcgcgccgcctctaaccaggtctacctcccggacctcgaccgcatcgtgctcgtccgccgcgagtccgcgcgccccttcgccaacgtcgccaccgcgcggaaggccaccatcacggcgcgagtcctctccctcgtccacgccgtcctcggcaggggcatccacgtcaccaagcgtgacctcttctacaccgacgtcaagctcttcggcgaccagacccagtctgacgccgtcctcgacgacgtctcctgcatgctcggatgcaccaggtcctcgctccacgtcgtcgcctccgagaagggcgtcgtcgtcggccgccttgtcttcgccgacgacggggaccggatcgactgcacgcgcatgggcgtcggcggcaaggccattccgcccaacgtcgacagggtctcgggcatcgagagcgacgcgctcttcatcctcctggtggagaaggacgctgcattcatgcgactcgccgaggacaggttctacaaccgcttcccctgcatcattctgacggccaaggggcagccagatgtcgccacccggctgttcctgcggaggctcaaggttgagctgaagctgccagtgctcgcgctggtggattctgatccatacgggctcaagatcttgtcggtgtacatgtgtggttccaagaacatgtcgtatgacagtgccaatctgacgacgccggacatcaagtggctcggtgtccggccgagcgacctggacaagtacagagtgccggagcagtgccgtctccccatgaccgatcacgatatcaaggtggggaaagagctgctcgaggaggacttcgtgaagcagaatgagggctgggtgaaggagctggagacgatgctgcgcaccaagcaaaaggctgagatacaggccctcagttccttcgggttccagtacctcaccgaggtctacctgcctcttaagttgcaggagcaggattggatttgagaactctccaatgctagatatcagtaatttccctagccaagataatgccctccgctcagtattttcaaggaccaaattggcatgaatgaagacttcgccatctagttaatcacatgtatttttgaacaccagctgttgtattatttatttctgctggagaactgttctgtggaaaacattgctgccagatatatgtgctggaatttg

SEQ ID NO: 18214 - protein, 436 aa, Zea mays subsp. mays
  misc_feature (1)..(436): Ceres Seq. ID no. 12363463
MSEKKRRAGASAAGAASSSKKPRASSAASYAESLRSKLRPDASILATLRSLASASASKSKADARSLADHDPCADPASSYIVVADQDSTSVTSRINRLVLAAARSILSGRGFSFAVPSRAASNQVYLPDLDRIVLVRRESARPFANVATARKATITARVLSLVHAVLGRGIHVTKRDLFYTDVKLFGDQTQSDAVLDDVSCMLGCTRSSLHVVASEKGVVVGRLVFADDGDRIDCTRMGVGGKAIPPNVDRVSGIESDALFILLVEKDAAFMRLAEDRFYNRFPCIILTAKGQPDVATRLFLRRLKVELKLPVLALVDSDPYGLKILSVYMCGSKNMSYDSANLTTPDIKWLGVRPSDLDKYRVPEQCRLPMTDHDIKVGKELLEEDFVKQNEGWVKELETMLRTKQKAEIQALSSFGFQYLTEVYLPLKLQEQDWI

SEQ ID NO: 18215 - protein, 236 aa, Zea mays subsp. mays
  misc_feature (1)..(236): Ceres Seq. ID no. 12363464
MLGCTRSSLHVVASEKGVVVGRLVFADDGDRIDCTRMGVGGKAIPPNVDRVSGIESDALFILLVEKDAAFMRLAEDRFYNRFPCIILTAKGQPDVATRLFLRRLKVELKLPVLALVDSDPYGLKILSVYMCGSKNMSYDSANLTTPDIKWLGVRPSDLDKYRVPEQCRLPMTDHDIKVGKELLEEDFVKQNEGWVKELETMLRTKQKAEIQALSSFGFQYLTEVYLPLKLQEQDWI

SEQ ID NO: 18216 - DNA, 1487 bp, Zea mays subsp. mays
  misc_feature (1)..(1487): Ceres Seq. ID no. 12363475
gcacgagaccattacctagaacatcctaatcgaaaaatgtgtgtgtatatatatgcacaaataaataaataaataaataatataaagaacaatcgtctacgcgcaggaccgcgccggctggggcgccgccaccgtcgcgctcgccgccgtcatggccgcctcgctcgccgtcttcctcgccggccgccggtactaccgctacagggtgcccgagggcagcccgctcacgccgctgctccaggtcctcgtcgccgccttccggaataggcggctcccgttgccggacgacgacgccgagctgtacgaggtcaggcggccgcagagtagcaagaggaggctgctttgccacacctaccagctgaggttcctcgacaaggcagccatagtggagcccggcgccggcgaggacgcctgcgggccgtggcggctggcgacggtgacgcaggtggaggagacgaagctggtgctggcgatggtgcccatctgggtgtgcacgctgcccttcgggcatggcggtggcgcaggtgtccaccttcttcatcaagcagggcagcgtgatggaccgtcgcctgggcccgcacttggaggccccggcggcgtcggtgttcgcgctgtcggcggtggccatgatcgccacggtggcggcctacgacaaggcgctggtgccgtacctgcggcgcgccacgggaggggagcgcgggatcagcatccttgggcgcgtgggcatcggcatggcgttcgccatcgcggggctgggcgtggcggcggcggtggagcggcggcgcctgctgtcggcgggcgccgcgcggccgtcgacgtcggtgctgtggctggtgccgcagttcgcgctgatgggcgtggccgacgggttcgcgctggtgggcctgcaggagtacttctacgagcaggtccccgacggcatgcgcagcctgggcatcggcctctacctcagcgtcattggcgccgggagcttcctgancagcctggtgatcaacggcggcggaccgcgccagctcccgcggagggcgcnccggctggttcgccaaggacctcaaccgcagcaggctggacctcttctactggctgctggcgtgcatcagcgccgtcaacctggcattctacgcgctggtcgccaccaagtgctcgtacaagcagaccgtcagggccggcagggtcggcgacgaggtcgagtgcgccgccgcgtagctgctgctgtacgtggtggtcatgaaaccaaccatgcatcagccgcacgaccatgtgtattattattattattataggggctaatagtaactagctactcgttgatcgtgttgttgttctagctagcttgggtacaagtagtacattcatgccacgtcgtgttgtatatgctgctcgtagacgttggtgtatatatgtgtactggcgcgtcgtcgaaacaatacgtgtacaagtactgtttggttcgttgtagcagcgatttatcagctaaattaattact

SEQ ID NO: 18217 - protein, 359 aa, Zea mays subsp. mays
  misc_feature (1)..(359): Ceres Seq. ID no. 12363476
  misc_feature (276)..(276): Xaa is any aa, unknown or other
  misc_feature (293)..(293): Xaa is any aa, unknown or other
MAASLAVFLAGRRYYRYRVPEGSPLTPLLQVLVAAFRNRRLPLPDDDAELYEVRRPQSSKRRLLCHTYQLRFLDKAAIVEPGAGEDACGPWRLATVTQVEETKLVLAMVPIWVCTLPFGHGGGAGVHLLHQAGQRDGPSPGPALGGPGGVGVRAVGGGHDRHGGGLRQGAGAVPAARHGRGARDQHPWARGHRHGVRHRGAGRGGGGGAAAPAVGGRRAAVDVGAVAGAAVRADGRGRRVRAGGPAGVLLRAGPRRHAQPGHRPLPQRHWRRELPXQPGDQRRRTAPAPAEGXPAGSPRTSTAAGWTSSTGCWRASAPSTWHSTRWSPPSARTSRPSGPAGSATRSSAPPRSCCCTWWS

SEQ ID NO: 18218 - protein, 257 aa, Zea mays subsp. mays
  misc_feature (1)..(257): Ceres Seq. ID no. 12363477
  misc_feature (157)..(157): Xaa is any aa, unknown or other
  misc_feature (174)..(174): Xaa is any aa, unknown or other
MAVAQVSTFFIKQGSVMDRRLGPHLEAPAASVFALSAVAMIATVAAYDKALVPYLRRATGGERGISILGRVGIGMAFAIAGLGVAAAVERRRLLSAGAARPSTSVLWLVPQFALMGVADGFALVGLQEYFYEQVPDGMRSLGIGLYLSVIGAGSFLXSLVINGGGPRQLPRRAXRLVRQGPQPQQAGPLLLAAGVHQRRQPGILRAGRHQVLVQADRQGRQGRRRGRVRRRVAAAVRGGHETNHASAARPCVLLLLL

SEQ ID NO: 18219 - protein, 252 aa, Zea mays subsp. mays
  misc_feature (1)..(252): Ceres Seq. ID no. 12363478
  misc_feature (169)..(169): Xaa is any aa, unknown or other
  misc_feature (186)..(186): Xaa is any aa, unknown or other
MVPIWVCTLPFGHGGGAGVHLLHQAGQRDGPSPGPALGGPGGVGVRAVGGGHDRHGGGLRQGAGAVPAARHGRGARDQHPWARGHRHGVRHRGAGRGGGGGAAAPAVGGRRAAVDVGAVAGAAVRADGRGRRVRAGGPAGVLLRAGPRRHAQPGHRPLPQRHWRRELPXQPGDQRRRTAPAPAEGXPAGSPRTSTAAGWTSSTGCWRASAPSTWHSTRWSPPSARTSRPSGPAGSATRSSAPPRSCCCTWWS

SEQ ID NO: 18220 - DNA, 1707 bp, Zea mays subsp. mays
  misc_feature (1)..(1707): Ceres Seq. ID no. 12363479
gcacgagaccattacctagaacatcctaatcgaaaacacaagaggctcaggctgagctcatctgcggcagtagccaaggagtggagtgaggtagctcgctctgtgagcagaaaacaatggagacgatggcggcggctcccgcgccgcagcaaaggacggggggcatcgcgcggaggctggccaggctgctccgccgcaagagctccccggcaggtgcggggatggcgtactccgtcgccggggacgagttcgacgactcgcttgacagctcaatcaactcgctcagcaagctcaagctgtccggcaacctggctgctgcctacacgctggacgccatcttcaagaatgccacggagaagaaggcagcggcggcggcgccgcagacgcagaagcagccgtcgccggcgaaggacgccgcgaagcacgcgttcttggcgaccctattcgcgagggcgtccgcggtgaaggcggcctacgcgcagctgcagctctcgctgcatccctacgacgccgagtccatccaggccgccggacgccggcctggtggcagagcttaccaagctgacgagcctcaagcggcggtacacaagggacccggccgccgcggccaggggcgccggtgccctcgcggcgcacgccgacgagcagctccacctcctgcggacctacgagatcacggcgcgcaagctggaggcggagctccgtgcgcgggacgccgaggccgagcgcgcacgcgccgcgctggccgacgagctccgcgccgtgcggggcctggaggagcgcgaccacccgggccgccgcaccctggacggcctccacctctccggcctcaacgccacccacttcctcaccgcgctgcaacacgccgtgaagtccgtccgcgccttcgccagggcaatggtcgacgcgatgcggccggccggttgggatcccgcggcggcggcggcggcggccgtgcacccgggcgccaggctgtgggaccccgcaggcgacgccaggttcgcgctcgagtcctacgtggcgctgaggatgttcgcgggcttccaccgcaaggacttgggcctgagctccctgcacgggcggggctcccacgaccggcgccgcttcttccaggagttcgcggaggcgagggccgcggctgcggcggatcagctccaggacgcgagcgacgcgcggtgggatgcgctccgggagttcctgcgggacaggtacgtgtccgtggtgcacgagagcatggaggcggccttcttcgggcgcggcggggacgcgctgccgcgcgccgcgtggctccgcgagttcgcggagatggcgcgccgcgtgtggctgctgcactgcctgttctgggcgttcgacggcgccgcgtccgtcttccaggcgcgccctggggagcggttctcggaggtgttcatggtgagcgtccgcgacgcggacgccggcaggagcgggcacgtctccgtcgggttcaccgtggtgccggggttcaagctcggcgcgacggtgatacaatgccgggtatacctttcacacccggagcgccgtccctgaggaccgtcacacttgggcggccttgtcgcacaccggcacacgagggaggcggtggggtttaagggtggcaggcaggcagcaatgacccctgtgcaatttgttatgtttatgtatgtatggatggatccaagtatatgtatctagtatgagcattccatttcc

SEQ ID NO: 18221 - protein, 496 aa, Zea mays subsp. mays
  misc_feature (1)..(496): Ceres Seq. ID no. 12363480
METMAAAPAPQQRTGGIARRLARLLRRKSSPAGAGMAYSVAGDEFDDSLDSSINSLSKLKLSGNLAAAYTLDAIFKNATEKKAAAAAPQTQKQPSPAKDAAKHAFLATLFARASAVKAAYAQLQLSLHPYDAESIQAAGRRPGGRAYQADEPQAAVHKGPGRRGQGRRCPRGARRRAAPPPADLRDHGAQAGGGAPCAGRRGRARTRRAGRRAPRRAGPGGARPPGPPHPGRPPPLRPQRHPLPHRAATRREVRPRLRQGNGRRDAAGRLGSRGGGGGGRAPGRQAVGPRRRRQVRARVLRGAEDVRGLPPQGLGPELPARAGLPRPAPLLPGVRGGEGRGCGGSAPGRERRAVGCAPGVPAGQVRVRGAREHGGGLLRARRGRAAARRVAPRVRGDGAPRVAAALPVLGVRRRRVRLPGAPWGAVLGGVHGERPRRGRRQERARLRRVHRGAGVQARRDGDTMPGIPFTPGAPSLRTVTLGRPCRTPAHEGGGGV

SEQ ID NO: 18222 - protein, 493 aa, Zea mays subsp. mays
  misc_feature (1)..(493): Ceres Seq. ID no. 12363481
MAAAPAPQQRTGGIARRLARLLRRKSSPAGAGMAYSVAGDEFDDSLDSSINSLSKLKLSGNLAAAYTLDAIFKNATEKKAAAAAPQTQKQPSPAKDAAKHAFLATLFARASAVKAAYAQLQLSLHPYDAESIQAAGRRPGGRAYQADEPQAAVHKGPGRRGQGRRCPRGARRRAAPPPADLRDHGAQAGGGAPCAGRRGRARTRRAGRRAPRRAGPGGARPPGPPHPGRPPPLRPQRHPLPHRAATRREVRPRLRQGNGRRDAAGRLGSRGGGGGGRAPGRQAVGPRRRRQVRARVLRGAEDVRGLPPQGLGPELPARAGLPRPAPLLPGVRGGEGRGCGGSAPGRERRAVGCAPGVPAGQVRVRGAREHGGGLLRARRGRAAARRVAPRVRGDGAPRVAAALPVLGVRRRRVRLPGAPWGAVLGGVHGERPRRGRRQERARLRRVHRGAGVQARRDGDTMPGIPFTPGAPSLRTVTLGRPCRTPAHEGGGGV

SEQ ID NO: 18223 - protein, 461 aa, Zea mays subsp. mays
  misc_feature (1)..(461): Ceres Seq. ID no. 12363482
MAYSVAGDEFDDSLDSSINSLSKLKLSGNLAAAYTLDAIFKNATEKKAAAAAPQTQKQPSPAKDAAKHAFLATLFARASAVKAAYAQLQLSLHPYDAESIQAAGRRPGGRAYQADEPQAAVHKGPGRRGQGRRCPRGARRRAAPPPADLRDHGAQAGGGAPCAGRRGRARTRRAGRRAPRRAGPGGARPPGPPHPGRPPPLRPQRHPLPHRAATRREVRPRLRQGNGRRDAAGRLGSRGGGGGGRAPGRQAVGPRRRRQVRARVLRGAEDVRGLPPQGLGPELPARAGLPRPAPLLPGVRGGEGRGCGGSAPGRERRAVGCAPGVPAGQVRVRGAREHGGGLLRARRGRAAARRVAPRVRGDGAPRVAAALPVLGVRRRRVRLPGAPWGAVLGGVHGERPRRGRRQERARLRRVHRGAGVQARRDGDTMPGIPFTPGAPSLRTVTLGRPCRTPAHEGGGGV

SEQ ID NO: 18224 - DNA, 1006 bp, Zea mays subsp. mays
  misc_feature (1)..(1006): Ceres Seq. ID no. 12363531
atgatgacgacgatgatgaacagaactcaccccgagtcatcgatccctggcaacgcgctaaccaagctagtagctagcaagcatcggccatgtccaagccaaggttggacgggaaggtggccatcgtgacgggcggcgcgagcgggatcggcgaggcggcggcgcggctgttcgcctcgagcggcgccacggtggtgatcgcggacgtgcaggacgcgctgggggaggcggtggcggcgtcggtggggccccggtgcgcgtacgcgcggtgcgacgtgacggacnaggcgcaggtggaggcgacggtggcncgngcngtgtcggcgcacgnncgnctgnangtnatgctgancaacgccggcgtgctgctcccgacggggtcggtgatgnacatggacctggcggagctggaccgcgtgatggccgtcaacttccggggcgccgcggcgtgnntnaagcacncggcgcgcgcgatggcgtccgncgncgncggcgccatcgtgtgcacggccagcgtggcgtcgctgcagggcgggttcggcccggcgtcgtacacggcgtccaagcacgcgttgctgggcctggtgcgcgccgcggcgggggagctgggacggcacggcgtgcgcgtcaantgcgtgtcccccggcggngtcgccacgcccctcagctgcgcgctcatgggcgtggggccccgcgagctggaggccatgacggtgccgcacaacgtcctgcaggggaaggtgctgcgcgccgaggacgtcgccgaggccgcgctgttcctcgcgtccgaccaggccgccttcatcagcggacacaacctcgttgtcgacggcgccaccaccgccgtcaaccccgccgtgctgcacaccgtcgggctgtgaacgacgagcgctcgctgcgacagtagatacatatatactccacaccttcaatgccatgtttcatctttttcttttctttgtttgtttgcattggttgccatcaagaaaactgcttttgttagctc

SEQ ID NO: 18225 - protein, 263 aa, Zea mays subsp. mays
  misc_feature (1)..(263): Ceres Seq. ID no. 12363532
  misc_feature (66)..(66): Xaa is any aa, unknown or other
  misc_feature (74)..(74): Xaa is any aa, unknown or other
  misc_feature (75)..(75): Xaa is any aa, unknown or other
  misc_feature (76)..(76): Xaa is any aa, unknown or other
  misc_feature (81)..(81): Xaa is any aa, unknown or other
  misc_feature (82)..(82): Xaa is any aa, unknown or other
  misc_feature (84)..(84): Xaa is any aa, unknown or other
  misc_feature (85)..(85): Xaa is any aa, unknown or other
  misc_feature (88)..(88): Xaa is any aa, unknown or other
  misc_feature (101)..(101): Xaa is any aa, unknown or other
  misc_feature (121)..(121): Xaa is any aa, unknown or other
  misc_feature (122)..(122): Xaa is any aa, unknown or other
  misc_feature (125)..(125): Xaa is any aa, unknown or other
  misc_feature (132)..(132): Xaa is any aa, unknown or other
  misc_feature (133)..(133): Xaa is any aa, unknown or other
  misc_feature (134)..(134): Xaa is any aa, unknown or other
  misc_feature (181)..(181): Xaa is any aa, unknown or other
  misc_feature (187)..(187): Xaa is any aa, unknown or other
MSKPRLDGKVAIVTGGASGIGEAAARLFASSGATVVIADVQDALGEAVAASVGPRCAYARCDVTDXAQVEATVXXXVSAHXXLXXMLXNAGVLLPTGSVMXMDLAELDRVMAVNFRGAAAXXKHXARAMASXXXGAIVCTASVASLQGGFGPASYTASKHALLGLVRAAAGELGRHGVRVXCVSPGXVATPLSCALMGVGPRELEAMTVPHNVLQGKVLRAEDVAEAALFLASDQAAFISGHNLVVDGATTAVNPAVLHTVGL

SEQ ID NO: 18226 - protein, 178 aa, Zea mays subsp. mays
  misc_feature (1)..(178): Ceres Seq. ID no. 12363533
  misc_feature (3)..(3): Xaa is any aa, unknown or other
  misc_feature (16)..(16): Xaa is any aa, unknown or other
  misc_feature (36)..(36): Xaa is any aa, unknown or other
  misc_feature (37)..(37): Xaa is any aa, unknown or other
  misc_feature (40)..(40): Xaa is any aa, unknown or other
  misc_feature (47)..(47): Xaa is any aa, unknown or other
  misc_feature (48)..(48): Xaa is any aa, unknown or other
  misc_feature (49)..(49): Xaa is any aa, unknown or other
  misc_feature (96)..(96): Xaa is any aa, unknown or other
  misc_feature (102)..(102): Xaa is any aa, unknown or other
MLXNAGVLLPTGSVMXMDLAELDRVMAVNFRGAAAXXKHXARAMASXXXGAIVCTASVASLQGGFGPASYTASKHALLGLVRAAAGELGRHGVRVXCVSPGXVATPLSCALMGVGPRELEAMTVPHNVLQGKVLRAEDVAEAALFLASDQAAFISGHNLVVDGATTAVNPAVLHTVGL

SEQ ID NO: 18227 - protein, 164 aa, Zea mays subsp. mays
  misc_feature (1)..(164): Ceres Seq. ID no. 12363534
  misc_feature (2)..(2): Xaa is any aa, unknown or other
  misc_feature (22)..(22): Xaa is any aa, unknown or other
  misc_feature (23)..(23): Xaa is any aa, unknown or other
  misc_feature (26)..(26): Xaa is any aa, unknown or other
  misc_feature (33)..(33): Xaa is any aa, unknown or other
  misc_feature (34)..(34): Xaa is any aa, unknown or other
  misc_feature (35)..(35): Xaa is any aa, unknown or other
  misc_feature (82)..(82): Xaa is any aa, unknown or other
  misc_feature (88)..(88): Xaa is any aa, unknown or other
MXMDLAELDRVMAVNFRGAAAXXKHXARAMASXXXGAIVCTASVASLQGGFGPASYTASKHALLGLVRAAAGELGRHGVRVXCVSPGXVATPLSCALMGVGPRELEAMTVPHNVLQGKVLRAEDVAEAALFLASDQAAFISGHNLVVDGATTAVNPAVLHTVGL

SEQ ID NO: 18228 - DNA, 774 bp, Zea mays subsp. mays
  misc_feature (1)..(774): Ceres Seq. ID no. 12363622
gcgagccgaaccggagcgtcaagcaaacatccgtcgatcccgattccgaccactgcgctcgcgccatcgcgccatccacccggcattgtgcgcccgagccgggctcgttggatggcgtccggaggcgccgcccgcggtcgccttgctgaggagcgcaaggcgtggcgcaagagccatcccctcggctttgtggccaagccggcgatgctgccggatggttctgtcaatctcatgctctggaactgcgtcgtccccggcaagtaaggcactgattgggaaggtggatatttcccggtcactctccatttcactgaaaattacccaagtaaccccccaacctgcaagttcccacgaaggtttttccatgtcaatgtctatgattctggggatgtatgcctgtcaatacttggtgatgcatgggcgccttctatcacagtgcggcaaattctaataggcatccaggagctgctggagaacccaaacccagcctctcccgcacaggattttgcttacgatgtttttgcagagaatatgccagaatacaagagacgcgtccgtgagcaagccaagaggtatccgtcgctcgtgtagccgtggacctctgcaacacaattgctgctaaccaagtagtcactcactttggtgtagtggaacttgttcatgacgtgcttaactatggtgtctagttagccgtacgcttgttggaactgctaaagtgcagcttattggaactgctaaaatgcccttgactacgtcttattattatggtttatc

SEQ ID NO: 18229 - protein, 149 aa, Zea mays subsp. mays
  misc_feature (1)..(149): Ceres Seq. ID no. 12363623
RAEPERQANIRRSRFRPLRSRHRAIHPALCARAGLVGWRPEAPPAVALLRSARRGARAIPSALWPSRRCCRMVLSISCSGTASSPASKALIGKVDISRSLSISLKITQVTPQPASSHEGFSMSMSMILGMYACQYLVMHGRLLSQCGKF

SEQ ID NO: 18230 - protein, 87 aa, Zea mays subsp. mays
  misc_feature (1)..(87): Ceres Seq. ID no. 12363624
ASRTGASSKHPSIPIPTTALAPSRHPPGIVRPSRARWMASGGAARGRLAEERKAWRKSHPLGFVAKPAMLPDGSVNLMLWNCVVPGK

SEQ ID NO: 18231 - protein, 78 aa, Zea mays subsp. mays
  misc_feature (1)..(78): Ceres Seq. ID no. 12363625
MVLSISCSGTASSPASKALIGKVDISRSLSISLKITQVTPQPASSHEGFSMSMSMILGMYACQYLVMHGRLLSQCGKF

SEQ ID NO: 18232 - DNA, 1864 bp, Zea mays subsp. mays
  misc_feature (1)..(1864): Ceres Seq. ID no. 12363824
gcacgagaccattacctagaacatcctaatcgaaaaactgtcttgcctgttgcctctgcggctttgcctgcgctcacggacggtcactggctcacgctcccctcgcctgcgtcgcctcgcctagacaagagacaagacgcctagtcgcctccgatcgaaatcgaatcgagtcgggtgggctcgggcccggtcttgttgtcttgtctcccagctaggaatagcgcaacgagatccctcgcgcgcgcggaccccggagaggccgagggagggtgacagggcgtgtcctcgaccgcgaggggaatgggatcggagggacgggcctggaacggcgcgggcatggccgccggcagcggctatggcggcggggtagaggcgaaagcgaccaccacggctgtgtcggccgcggcccccgcggaggttcccacgtcggcggcctccgtcgacatctcgctgccgctcctgaagatgtcgcctcgcatcatagctctctgcaaggaattggtcgaagggtggtcgtcgattgacagctcgctcttctccatcgagaccgtgtccgggggcatcacgaatctattgctgaaggtttctgtcaaagaagacaacggcaatgagtcttctgttactgttcggttgtatggaccaaatacggacttggtgattgataggaaaagggaattgcaggcgataccatatctctcagctgcagggttcggggctcggctacttggaatatttgagaatggagtagttcagtcattcatctatgctcgaacactgtcaccagcagacatgaaagaacctaaaatagcagctgaaattgccaaggagctacgcaaattccatcaagtagacataccagggtctaaataaccacaattgtggaatgatatattcaagtttttgaagaaagctgcagcattgaagtttgaggataacatgaagcagaagagatatgaaaagatctcatttagagaaatacaagatgaagttcaagaacttaaggatctcttggacattctgcgcgcgcctgtggtttatgcacacaatgacttgctttcaggaaatctgatgctcaatgatttggaagggaagctatattttattgattttgagtatgggtcatacagctaccgtggctatgacattgcaaatcatttcaatgagtatgcaggatttgattgtgactataatttgtacccagataaagatgcccagtatcacttcttcaggaattatctacacactgatagacctagtgaggtggatgcacaagatatggaagtactttatgtggaaacaaacactttcagactagcatcgcacatttactgggcattatgggcccttattcaggcaaaggtatccccaattgactttgactatcttggatacttcttcttgcggtatggtgagtacaagaaacaaagggagtcctgcttctccttggcacaaagctttctctccgagctaaaaaatggctagagcctgagaatctgttcacgagtttatactggtgtacgcatgctcggagcgggtacgcgttgtgatcatcgactgctacccagaaactctattatagcggttgtagcagcccctcattgttgtatctgatgttaggttcatcattgtctaaggactagtttggatactctagtatcgagctcaattcatgtgtatgagatggattcgggtgtaacttaaactaatttacacactaatccaactcaacacatgtggattggggtcaatactaaattacccaaacaaagcctaacagggaagtcaccagtggcaaattatgtacttatatttataataataaacacaatcctgatgggttgtgccctgttgaatttgttcttcg

SEQ ID NO: 18233 - protein, 189 aa, Zea mays subsp. mays
  misc_feature (1)..(189): Ceres Seq. ID no. 12363825
MGSEGRAWNGAGMAAGSGYGGGVEAKATTTAVSAAAPAEVPTSAASVDISLPLLKMSPRIIALCKELVEGWSSIDSSLFSIETVSGGITNLLLKVSVKEDNGNESSVTVRLYGPNTDLVIDRKRELQAIPYLSAAGFGARLLGIFENGVVQSFIYARTLSPADMKEPKIAAEIAKELRKFHQVDIPGSK

SEQ ID NO: 18234 - protein, 181 aa, Zea mays subsp. mays
  misc_feature (1)..(181): Ceres Seq. ID no. 12363826
MKQKRYEKISFREIQDEVQELKDLLDILRAPVVYAHNDLLSGNLMLNDLEGKLYFIDFEYGSYSYRGYDIANHFNEYAGFDCDYNLYPDKDAQYHFFRNYLHTDRPSEVDAQDMEVLYVETNTFRLASHIYWALWALIQAKVSPIDFDYLGYFFLRYGEYKKQRESCFSLAQSFLSELKNG

SEQ ID NO: 18235 - protein, 177 aa, Zea mays subsp. mays
  misc_feature (1)..(177): Ceres Seq. ID no. 12363827
MAAGSGYGGGVEAKATTTAVSAAAPAEVPTSAASVDISLPLLKMSPRIIALCKELVEGWSSIDSSLFSIETVSGGITNLLLKVSVKEDNGNESSVTVRLYGPNTDLVIDRKRELQAIPYLSAAGFGARLLGIFENGVVQSFIYARTLSPADMKEPKIAAEIAKELRKFHQVDIPGSK

SEQ ID NO: 18236 - DNA, 971 bp, Zea mays subsp. mays
  misc_feature (1)..(971): Ceres Seq. ID no. 12363847
attccatccccgctgccccatccggccatcccacagcgaatctcccaaaccccggctccctcgattcccaatcccacccctgccacgaagagatcagatgacggcgagctgctgctgatcgagtgcagtggaatcggaggcgatgcgggctagccggccggcggtgcaccctgtggaagcggcccctccgccgccggccgcggcggcggaggggccggaggcccaggtggagggtgccgcgcacccgcgcggggtgcggatgaaggatccgcctggggcaccagggacacctgcggggcttggtctacgccttgcgcaggccttcttcgcagccgctgcgctcgccgtcatggcgtccaccaacgacttcccgtccgtctctgccttcagctaccttgtcgcagcagccattttgcagtgcttgtggagccttttgctagcctttgtcgacatttatgcacttcttgtcaagcgatcgttgagaaatgcccgagctgtatgtatatttactatcggagatgggatcacaggtacaataaccttgggcgcggcatgtgcttcagcaggaatcactgttctcatcggtaatgatctcaacatatgtgcagagaatcactgtgcaagtttcgagaccgccacagcattggcttttataagctggtttgcgctggcgccatcctgtatcttgaatttctggtcgatggcctccagatgataaatataggatgttataaaacatagtatttttgaatggtttctggacaaggtcgctgcttatggtagcagcaaagcaacgcggtgccgtaaagctaattgtaatacccagaaattgttgaatggctgtggaatgtagcacgtgtcgaattgtctgtacaaaatacggagaggccttctttggatctgaaaaaggcttctgaatcttgccagtccttcctttttacgttaacatgtttctcctgtgtggtttgttg

SEQ ID NO: 18237 - protein, 190 aa, Zea mays subsp. mays
  misc_feature (1)..(190): Ceres Seq. ID no. 12363848
MRASRPAVHPVEAAPPPPAAAAEGPEAQVEGAAHPRGVRMKDPPGAPGTPAGLGLRLAQAFFAAAALAVMASTNDFPSVSAFSYLVAAAILQCLWSLLLAFVDIYALLVKRSLRNARAVCIFTIGDGITGTITLGAACASAGITVLIGNDLNICAENHCASFETATALAFISWFALAPSCILNFWSMASR

SEQ ID NO: 18238 - protein, 151 aa, Zea mays subsp. mays
  misc_feature (1)..(151): Ceres Seq. ID no. 12363849
MKDPPGAPGTPAGLGLRLAQAFFAAAALAVMASTNDFPSVSAFSYLVAAAILQCLWSLLLAFVDIYALLVKRSLRNARAVCIFTIGDGITGTITLGAACASAGITVLIGNDLNICAENHCASFETATALAFISWFALAPSCILNFWSMASR

SEQ ID NO: 18239 - protein, 121 aa, Zea mays subsp. mays
  misc_feature (1)..(121): Ceres Seq. ID no. 12363850
MASTNDFPSVSAFSYLVAAAILQCLWSLLLAFVDIYALLVKRSLRNARAVCIFTIGDGITGTITLGAACASAGITVLIGNDLNICAENHCASFETATALAFISWFALAPSCILNFWSMASR

SEQ ID NO: 18240 - DNA, 1714 bp, Zea mays subsp. mays
  misc_feature (1)..(1714): Ceres Seq. ID no. 12363889
gcacgagaccattacctagaacatcctaatcgaaaagatttgccggaaggcgcctcggcggaagctgctatctagttgaagccagccatggccgccgagcccccggcgtacttgctgctccttcccctcatcgccataccgctcatcgtcttcctcgtcctgtcccgccgaagggatgaccagcggcgcttcccaccggcgccgtgggcgctgccggtcatcggccacctgcaccacctcgccggcgcgccaccgcaccgtgccctgcgggaccttgcgaggcgccacggcccgctcatgacgctccgcttctggcgagctccgggtcgtggtcgcctcgtcgccggacgccgcgcgggagatcttgaggacccacgacgtggacttcgcgtcgcggcccatcgggccgatgctgcagctcgtgttccggggcgccgagggcctcatcttcgcgccctacggcgacgggtggcggcagctccgcaagatctgcaccctcgaactcctcagcgcccgccgcgtccactccttccggcccgtccgcgaggacgaggtcggccgcctcctcggctcggtcgcgtccgccgcggcggcggggttgcccgtgaacctgagtgagaggatcacggcgttcgtcgcggacgcagcggtgcgcgccatcatcggcagccgggagcgagcaccgcgacgagttcttgcgcctgctgatggacgggctcaagataattccgggattgagcctgccggacctcttcccgtcgtcacgcctcgcgatgctcgtcagcagcgttcccggtaaaatcgagcgccgccggaaaggcctccttgacatcgtcgaccccatcattctggagcatcaggagaagagagcggccggtggcatagacgaagatgaggacttgcttgacgtgctcttgagactccagaaagacatggactcccagtaccctctcaccaccgacaacatcaaatccgtcctcatcgacatgtttggagcaagcagcgagacgtcggcgacgacgctgaagtggacaatggccgagctgatgcggaacccggcggtgatgcggaaggcgcaagatgaggtcaggggagcactcgccggccacgacgaggtggcggaggacagcctggtcaatctgcggtacctgcagctagtcataaaggagacgctgcggctgcacccgccggcgccattgctgctgccgcgggagtgccgcagcccgtgccaggtgctcggctacgacgtgcctcgtggcaccatggtgctggtgaacgcgtgggcaataggcagggacccagcgctgtgggacgcgccggaggatttcgtgccggaaaggttcgaggagagtggacgagacttcaagggcatggattttgagttcatcccgttcggtgcgggaaggaggatgtgccccggcatggcgttcgggctggcgcacattgagctcgctctcgcggcgttgctgtttcacttcgactggaagctaccggaaggggtggtcggctggtcgccgaggagatagacatggccgaggcggtcgcgatcacggcccctccgcgatctgatttagtggtgctccctgttactaggctaccggtgtcaatataatgtgcttcggcccaaaagcttattttctttcagtatgctagaaatagaacaacaacttttctttcgctttcggcggttgtgaaggtcgaaaccttttcctcg

SEQ ID NO: 18241 - protein, 272 aa, Zea mays subsp. mays
  misc_feature (1)..(272): Ceres Seq. ID no. 12363890
MDGLKIIPGLSLPDLFPSSRLAMLVSSVPGKIERRRKGLLDIVDPIILEHQEKRAAGGIDEDEDLLDVLLRLQKDMDSQYPLTTDNIKSVLIDMFGASSETSATTLKWTMAELMRNPAVMRKAQDEVRGALAGHDEVAEDSLVNLRYLQLVIKETLRLHPPAPLLLPRECRSPCQVLGYDVPRGTMVLVNAWAIGRDPALWDAPEDFVPERFEESGRDFKGMDFEFIPFGAGRRMCPGMAFGLAHIELALAALLFHFDWKLPEGVVGWSPRR

SEQ ID NO: 18242 - protein, 250 aa, Zea mays subsp. mays
  misc_feature (1)..(250): Ceres Seq. ID no. 12363891
MLVSSVPGKIERRRKGLLDIVDPIILEHQEKRAAGGIDEDEDLLDVLLRLQKDMDSQYPLTTDNIKSVLIDMFGASSETSATTLKWTMAELMRNPAVMRKAQDEVRGALAGHDEVAEDSLVNLRYLQLVIKETLRLHPPAPLLLPRECRSPCQVLGYDVPRGTMVLVNAWAIGRDPALWDAPEDFVPERFEESGRDFKGMDFEFIPFGAGRRMCPGMAFGLAHIELALAALLFHFDWKLPEGVVGWSPRR

SEQ ID NO: 18243 - protein, 197 aa, Zea mays subsp. mays
  misc_feature (1)..(197): Ceres Seq. ID no. 12363892
MDSQYPLTTDNIKSVLIDMFGASSETSATTLKWTMAELMRNPAVMRKAQDEVRGALAGHDEVAEDSLVNLRYLQLVIKETLRLHPPAPLLLPRECRSPCQVLGYDVPRGTMVLVNAWAIGRDPALWDAPEDFVPERFEESGRDFKGMDFEFIPFGAGRRMCPGMAFGLAHIELALAALLFHFDWKLPEGVVGWSPRR

SEQ ID NO: 18244 - DNA, 1340 bp, Zea mays subsp. mays
  misc_feature (1)..(1340): Ceres Seq. ID no. 12363910
ggttccattactggtccctagcaggaagcaggatggagttggcgctcagcttgggggagaccatggcggatgccggaagggacctcatgctggggcttgggatgggggtcggggtgcggagggaggaggaagcgcagagagggaggagggacagggaggtgaggcgggagctggagttcacggcgaggagcgcccggtcgtcgccggagccggcggtgcgactcaccctcctgcacggcctcggcctcccgtggccgccgccgccgtcgtccgagaccaaccggcacctggaggcgtcggcgcgtggcttcgacgtgaaccgggcgccgtcgctgtccgcggccggtggcgccgcggaggaggacgaggagcaggacgaggcggcggcggcggcggcatcgtcgtcgcccaacaacagcgcgagctccttcccgacggacttctccgcgcaggggccaggtggcgcccggcgccgaccgcgcgtgctcccgcgccagcgacgaggacgacggcggctccgcgcgcaagaagctgcgcctctccaaggagcagtccgcgttcctggaggatagcttcaaggagcacgccacgctgaacccgaagcagaagctcgcgctggcgaagcagctcaacctccggccgcgccaggtggaggtgtggttccagaaccgcagagccaggacgaagctgaagcagacggaggtggactgcgagtacctcaagcgatgctgcgagacgctgacggaggagaaccggcggctgcagaaggagctatccgagctccgctcgctcaagacggtgcaccccttctacatgcacctcccggccaccaccctttccatgtgcccctcctgcgagcgcgtcgcctccaactccgcgccggcgcccgcgtcatcgccgtcccccgctactggcattgcggccccggcaccggagcagaggccctcgtcgttcgcggctctgttctcgtcccctctgaaccgcccgctggccgcccaggcgcaaccgcaaccgcaggcgccggccaactcgtgaggcgctctctactctatctccggcgacgcgaacggaggtggatctggctgtaaatacgatcacctttttttggcttcctttttcttttgttttcacttgatgcggttcttgagattttttttttgtggattgccgatgggttggtttaccggtttattagagcgcatcatctggccgtcggattggactgcggacggccgggtgcagaaaggaagtgctgcgatagagtttattaacctcagtagcatcgatcatgttttgttaccttgctatctatcttggcgtcaatataggccttgaaatcc

SEQ ID NO: 18245 - protein, 197 aa, Zea mays subsp. mays
  misc_feature (1)..(197): Ceres Seq. ID no. 12363911
VPLLVPSRKQDGVGAQLGGDHGGCRKGPHAGAWDGGRGAEGGGSAEREEGQGGEAGAGVHGEERPVVAGAGGATHPPARPRPPVAAAAVVRDQPAPGGVGAWLRREPGAVAVRGRWRRGGGRGAGRGGGGGGIVVAQQQRELLPDGLLRAGARWRPAPTARAPAPATRTTAAPRARSCASPRSSPRSWRIASRSTPR

SEQ ID NO: 18246 - protein, 189 aa, Zea mays subsp. mays
  misc_feature (1)..(189): Ceres Seq. ID no. 12363912
FHYWSLAGSRMELALSLGETMADAGRDLMLGLGMGVGVRREEEAQRGRRDREVRRELEFTARSARSSPEPAVRLTLLHGLGLPWPPPPSSETNRHLEASARGFDVNRAPSLSAAGGAAEEDEEQDEAAAAAASSSPNNSASSFPTDFSAQGPGGARRRPRVLPRQRRGRRRLRAQEAAPLQGAVRVPGG

SEQ ID NO: 18247 - protein, 179 aa, Zea mays subsp. mays
  misc_feature (1)..(179): Ceres Seq. ID no. 12363913
MELALSLGETMADAGRDLMLGLGMGVGVRREEEAQRGRRDREVRRELEFTARSARSSPEPAVRLTLLHGLGLPWPPPPSSETNRHLEASARGFDVNRAPSLSAAGGAAEEDEEQDEAAAAAASSSPNNSASSFPTDFSAQGPGGARRRPRVLPRQRRGRRRLRAQEAAPLQGAVRVPGG

SEQ ID NO: 18248 - DNA, 912 bp, Zea mays subsp. mays
  misc_feature (1)..(912): Ceres Seq. ID no. 12363928
ctctccattccgaactccaaacgaaccaattcgtgtccatcgaaggttccatgggatcaggcctctcaagcagccaccggaggagcagcgcgtcgcttcaccagccggcggcggccccggccccggccccggcgctggtcatcgcggccgacggctcgttgagggagttcgcgccggcgccactccccgcctccgtctccgacgcgctcgccggcgccaatgcggcggccgacggccggttcttcgtgtgcagctccgacgcgctctgcttcgactccgacgtcccggcgctcggcgccgacgagctgctccggccggggcagatatacttcgtcctccccgcggccatgctcggcaggccgctctcgagcgccggcatggccgcgctcgccgcgcgcgcgagcgaggcgctggcggcgggagcgggctggcgtgggcgccctcgcggccgccgcgggttcacgaaggcgcgcgtcgtgccggcgcaccaccgccacgcggacggcgaccgagaggtcaacgagaagctgaaccagaggactcttggcggcatcgagacggcttcacgtggtccggcgaccaacgccaggaagtccgctgtggcggcgcgaccggctccgcctctgaggagggcgctcagcaccattgaagaggatgccgagcgatcaaattggctttgaagcgcgcgtgttggacgcgaccgagtgatcacagagctgcgcgagggcatgtgccgtattgatgataactttggattgatttttttttgtgtgtgtataggatgttagagattttgtgctattcaaatagcttgaaaggatatggaaatttgttatttggttggtcgacgtttgtgtatttaaacaaatcacaaagattaaatgaaaattttagttgctgacttggttcttt

SEQ ID NO: 18249 - protein, 225 aa, Zea mays subsp. mays
  misc_feature (1)..(225): Ceres Seq. ID no. 12363929
LHSELQTNQFVSIEGSMGSGLSSSHRRSSASLHQPAAAPAPAPALVIAADGSLREFAPAPLPASVSDALAGANAAADGRFFVCSSDALCFDSDVPALGADELLRPGQIYFVLPAAMLGRPLSSAGMAALAARASEALAAGAGWRGRPRGRRGFTKARVVPAHHRHADGDREVNEKLNQRTLGGIETASRGPATNARKSAVAARPAPPLRRALSTIEEDAERSNWL

SEQ ID NO: 18250 - protein, 215 aa, Zea mays subsp. mays
  misc_feature (1)..(215): Ceres Seq. ID no. 12363930
SPFRTPNEPIRVHRRFHGIRPLKQPPEEQRVASPAGGGPGPGPGAGHRGRRLVEGVRAGATPRLRLRRARRRQCGGRRPVLRVQLRRALLRLRRPGARRRRAAPAGADILRPPRGHARQAALERRHGRARRARERGAGGGSGLAWAPSRPPRVHEGARRAGAPPPRGRRPRGQREAEPEDSWRHRDGFTWSGDQRQEVRCGGATGSASEEGAQHH

SEQ ID NO: 18251 - protein, 209 aa, Zea mays subsp. mays
  misc_feature (1)..(209): Ceres Seq. ID no. 12363931
MGSGLSSSHRRSSASLHQPAAAPAPAPALVIAADGSLREFAPAPLPASVSDALAGANAAADGRFFVCSSDALCFDSDVPALGADELLRPGQIYFVLPAAMLGRPLSSAGMAALAARASEALAAGAGWRGRPRGRRGFTKARVVPAHHRHADGDREVNEKLNQRTLGGIETASRGPATNARKSAVAARPAPPLRRALSTIEEDAERSNWL

SEQ ID NO: 18252 - DNA, 748 bp, Zea mays subsp. mays
  misc_feature (1)..(748): Ceres Seq. ID no. 12363969
gcacgagaccattacctagaacatcctaatcgaaaactccccaacagtttcattcctcgagggggatcgcttgtcggcggggaagcaaagcttagttcttgacgcccaacctccccgttgcctattcgcctcaggaatttgggaattatgtctctttgaggggaatcaagggacttgcttttacttgtctgggctccatgtctaagtgggagccagtcacgtttcaggaatctcttagctttgttaagaaagtaaaggcacgtgactacatgctatacatatcattgctcgatgtgctcaaccggaatgatcaaatccctctgcaagcttacagcgagctctcgcttctgtttcagcatcacgaagatctgttagcggagctgtcgaagttcaggcccctcccatgcccaaacaacgtttatacacacggctcgatttggatgatcatattcctcatgccttttctgctcctgagccttgtcctcgccttgagaagccattgaagtgtttcctgctccatagactgttgcgagcctaaatgatttgtcgtagcactaacacctagttgttgtatatagatatatggatggggttctatatcctgtaatttctttatgatctccttgtacgctcgtgcgcacggaaataatcgtacaatattatttcagtcgcggcagtctggcagtatgtaaagcctaaacagagatcgtttgacctcgtccaatcggaaattcagctttgtacaggg

SEQ ID NO: 18253 - protein, 101 aa, Zea mays subsp. mays
  misc_feature (1)..(101): Ceres Seq. ID no. 12363970
MSKWEPVTFQESLSFVKKVKARDYMLYISLLDVLNRNDQIPLQAYSELSLLFQHHEDLLAELSKFRPLPCPNNVYTHGSIWMIIFLMPFLLLSLVLALRSH

SEQ ID NO: 18254 - protein, 77 aa, Zea mays subsp. mays
  misc_feature (1)..(77): Ceres Seq. ID no. 12363971
MLYISLLDVLNRNDQIPLQAYSELSLLFQHHEDLLAELSKFRPLPCPNNVYTHGSIWMIIFLMPFLLLSLVLALRSH

SEQ ID NO: 18255 - DNA, 959 bp, Zea mays subsp. mays
  misc_feature (1)..(959): Ceres Seq. ID no. 12364026
gcacgagaccattacctagaacatcctaatcaaaaatcgtcagagacacgcgtccaaacatacagctagctagcctctgcatgcctacgtacagcatggccaaggccgagctgctgctcctcgccctcgtggcttcgctctccgtgctgccattctcctccctcgccgtgtaccaggacttctgcatcgccgacctatccgccgccgccacgccgggcggctacccgtgcaagcccccgaaggacgtgaccgccgacgacttccactacggcggcctcgccacccccggcacggcgctgaaacccttcaaaatctccctgggctcggccgtcgtcaccacgttccccggcctgaacgggctgggcatctccgccgcgcggatggtgatggtcccgggcggcgtcgcgccgctgcactcccacccgggaggcaccgagctcatcttcgtcatcgagggcagcgtcgtctgcggcttcatcagcgccacgctcaacagggtgtacaccaagacgctgtacgccggcgacctgatggtgctcccgcagggccagctccacttccagtacagccacggcaacaccacggcggtgacgctgtcctcgttcagcagcgacaaccccggcctgcagatcctcgacttcgcgctcttcgccaacgacctgcccacagaggtcgtgaacaaggtgaccaacctggacgaactgcagatcgtcaagctcaaggcactgttcggagggaggggctagacggatatatatgtactccgtatataggaacagtcaacggtgttgatcattgaattgtgtgtgtattattctatacttgtgatggatgtttgtcttgtcattctataaaataaattgtaacgcgcgcagcaggcgtgagagcgaaagtagctgccacatttgatgtactaatatttacatctccattgttgataataatacattattggcctc

SEQ ID NO: 18256 - protein, 221 aa, Zea mays subsp. mays
  misc_feature (1)..(221): Ceres Seq. ID no. 12364027
MPTYSMAKAELLLLALVASLSVLPFSSLAVYQDFCIADLSAAATPGGYPCKPPKDVTADDFHYGGLATPGTALKPFKISLGSAVVTTFPGLNGLGISAARMVMVPGGVAPLHSHPGGTELIFVIEGSVVCGFISATLNRVYTKTLYAGDLMVLPQGQLHFQYSHGNTTAVTLSSFSSDNPGLQILDFALFANDLPTEVVNKVTNLDELQIVKLKALFGGRG

SEQ ID NO: 18257 - protein, 216 aa, Zea mays subsp. mays
  misc_feature (1)..(216): Ceres Seq. ID no. 12364028
MAKAELLLLALVASLSVLPFSSLAVYQDFCIADLSAAATPGGYPCKPPKDVTADDFHYGGLATPGTALKPFKISLGSAVVTTFPGLNGLGISAARMVMVPGGVAPLHSHPGGTELIFVIEGSVVCGFISATLNRVYTKTLYAGDLMVLPQGQLHFQYSHGNTTAVTLSSFSSDNPGLQILDFALFANDLPTEVVNKVTNLDELQIVKLKALFGGRG

SEQ ID NO: 18258 - protein, 121 aa, Zea mays subsp. mays
  misc_feature (1)..(121): Ceres Seq. ID no. 12364029
MVMVPGGVAPLHSHPGGTELIFVIEGSVVCGFISATLNRVYTKTLYAGDLMVLPQGQLHFQYSHGNTTAVTLSSFSSDNPGLQILDFALFANDLPTEVVNKVTNLDELQIVKLKALFGGRG

SEQ ID NO: 18259 - DNA, 2064 bp, Zea mays subsp. mays
  misc_feature (1)..(2064): Ceres Seq. ID no. 12364043
gcacgagaccattacctagaacatcctaatcgaaaaatagtggtctatgtcaaatcttctagcgctcgcaattcttctcctctccaccacgccggcgccgacggccggtgaacagaccatctgcagcgatgccacgtacgagcgaaacagcacatacaagtccagtctgaggtcggtagccggcgcactgaccggggacgccgcgaggctgcactcgtccaccggcgctgcaggggagggccccgacaaggtctacggcgccgtgctctgccgggcggacacagcgggtgctgactgcgccaggcgcctccgggacgcccttgccgccatcaccgacggggacggccgctcgcgttgcgcgctccacagggacgtggccgtctactccgagctgtaccagctccgtttctccgacagggacttcctcgccgacttcagcaacgcgccggaatgggtcgacgtcacgaacccaggccccgtgccgctcgccgtggccgcgcggttcgaccagcgggtcacggagctgctgagcgcgctcgctgacgcggcggcggggcgaccgggcaggtgggccgtcggcgaagcgccgtggtcgtcgtcggggggcagggaccgggcggtgtacgcgctggcgcagtgcacgctggacatgccgccggaccactgccgggcctgcctcgatggcgccatggcagagcggcgacggaaggtcggcggcggcaagatgggcgcggcagtcttcggggcgcggtgcaccctgcggtatgagatggatctgcagttcttcaacgtcactggcaacagcaagatgctgtccctgcttgggaagaagaaagaccgtgcgttcgtcatcgttgcaacagcttacgcttcggcaatcctctgtacacgcttgcttttctggctgctaagcgtctggaggaaacaaaaaaggaaaatggacttgacggaggagccccagaatgtggatgaaatactcaggtcatggagaattgaagatgctagtttagagttctcgctgtatgatttctctcagattgctgatgccacagtcaacttctcacccaaaaatatgataggggagggcggatttggcccagtttacaagggagtacttactgatggacaagaggtagcgataaaaagactgtctgctcggtcacgacaaggtctagtagagttcaagaatgagatccaggttatagcaaagcttcagcacagaaacctcgtcaggctccttggctgttgcatccatgaagaagagaagatgctggtctacgaatacctgacgaacaaaagcttggaccacttcatttttgatccaatcagacaggcatcgcttgattggaagagacggattaaaatagttgatggtatagcccagggactcctgtacctccacaatctctcgagaatacgcatcatccacagggacttgaaagcaggtaacatcctgttagattctgacctaaacccgaaaatctctgatttcgggatggcgaggatatttccatcggatgccactcaagcaacagccagcagactcgtgggcacatatggatacatggctcctgaatatgtgtctgatggccttctctcgatcaagtcagatgttttcagtttcggggtcctgcttcttgagattataagtggaaagaggagctcaggttttcagcacaatggagagttctacaaccttcttgaatacgcctgggaactgtggaaggatagaagatggaatgagttcattgatcaatcctttggtgatgactacgaactggaagagctgatgaaataccttgctgtggcattgctgtgtgttcaagaaaaaacagtagatcgtcccacaatgcctgatgttgttgcagttcttagcagcgatggcgtcactttgccagaaccaaagcagccagcttactcctatgcgaaagtagatgtgtcagtaaatgtcgctgtgttgagtagcagaaatgatgttaccatcactactacaaatggcagataatagaatgtaatactgttaataaagtgtgcgctacaggtcttggtcatcctccttgtgtt

SEQ ID NO: 18260 - protein, 652 aa, Zea mays subsp. mays
  misc_feature (1)..(652): Ceres Seq. ID no. 12364044
MSNLLALAILLLSTTPAPTAGEQTICSDATYERNSTYKSSLRSVAGALTGDAARLHSSTGAAGEGPDKVYGAVLCRADTAGADCARRLRDALAAITDGDGRSRCALHRDVAVYSELYQLRFSDRDFLADFSNAPEWVDVTNPGPVPLAVAARFDQRVTELLSALADAAAGRPGRWAVGEAPWSSSGGRDRAVYALAQCTLDMPPDHCRACLDGAMAERRRKVGGGKMGAAVFGARCTLRYEMDLQFFNVTGNSKMLSLLGKKKDRAFVIVATAYASAILCTRLLFWLLSVWRKQKRKMDLTEEPQNVDEILRSWRIEDASLEFSLYDFSQIADATVNFSPKNMIGEGGFGPVYKGVLTDGQEVAIKRLSARSRQGLVEFKNEIQVIAKLQHRNLVRLLGCCIHEEEKMLVYEYLTNKSLDHFIFDPIRQASLDWKRRIKIVDGIAQGLLYLHNLSRIRIIHRDLKAGNILLDSDLNPKISDFGMARIFPSDATQATASRLVGTYGYMAPEYVSDGLLSIKSDVFSFGVLLLEIISGKRSSGFQHNGEFYNLLEYAWELWKDRRWNEFIDQSFGDDYELEELMKYLAVALLCVQEKTVDRPTMPDVVAVLSSDGVTLPEPKQPAYSYAKVDVSVNVAVLSSRNDVTITTTNGR

SEQ ID NO: 18261 - protein, 451 aa, Zea mays subsp. mays
  misc_feature (1)..(451): Ceres Seq. ID no. 12364045
MPPDHCRACLDGAMAERRRKVGGGKMGAAVFGARCTLRYEMDLQFFNVTGNSKMLSLLGKKKDRAFVIVATAYASAILCTRLLFWLLSVWRKQKRKMDLTEEPQNVDEILRSWRIEDASLEFSLYDFSQIADATVNFSPKNMIGEGGFGPVYKGVLTDGQEVAIKRLSARSRQGLVEFKNEIQVIAKLQHRNLVRLLGCCIHEEEKMLVYEYLTNKSLDHFIFDPIRQASLDWKRRIKIVDGIAQGLLYLHNLSRIRIIHRDLKAGNILLDSDLNPKISDFGMARIFPSDATQATASRLVGTYGYMAPEYVSDGLLSIKSDVFSFGVLLLEIISGKRSSGFQHNGEFYNLLEYAWELWKDRRWNEFIDQSFGDDYELEELMKYLAVALLCVQEKTVDRPTMPDVVAVLSSDGVTLPEPKQPAYSYAKVDVSVNVAVLSSRNDVTITTTNGR

SEQ ID NO: 18262 - protein, 438 aa, Zea mays subsp. mays
  misc_feature (1)..(438): Ceres Seq. ID no. 12364046
MAERRRKVGGGKMGAAVFGARCTLRYEMDLQFFNVTGNSKMLSLLGKKKDRAFVIVATAYASAILCTRLLFWLLSVWRKQKRKMDLTEEPQNVDEILRSWRIEDASLEFSLYDFSQIADATVNFSPKNMIGEGGFGPVYKGVLTDGQEVAIKRLSARSRQGLVEFKNEIQVIAKLQHRNLVRLLGCCIHEEEKMLVYEYLTNKSLDHFIFDPIRQASLDWKRRIKIVDGIAQGLLYLHNLSRIRIIHRDLKAGNILLDSDLNPKISDFGMARIFPSDATQATASRLVGTYGYMAPEYVSDGLLSIKSDVFSFGVLLLEIISGKRSSGFQHNGEFYNLLEYAWELWKDRRWNEFIDQSFGDDYELEELMKYLAVALLCVQEKTVDRPTMPDVVAVLSSDGVTLPEPKQPAYSYAKVDVSVNVAVLSSRNDVTITTTNGR

SEQ ID NO: 18263 - DNA, 692 bp, Zea mays subsp. mays
  misc_feature (1)..(692): Ceres Seq. ID no. 12364056
gctaaagaaagaggtcctgtcacagatatcgatccgattgggaattctcctgtgatcattaagaagacaattcttgagaagattgcccccacatggatgaatgtgtcaattcaaatgaaagaggatgaagagacagataaagtttttggatgggtgttggaaatgtatgcatacgctgttgctagcgcattgcatggagttcatcatatccttcgtaaagatttcatgatccagccaccttttgatacaaagctccagaatacatttataatccacttcacttatggatgtgactactcactaaagggtgaactgacctatggtaaagttggtgaatggcgatttgacaaaagatcattcccagataggccaccaccaagaaatcttacattgccccctcctggagtaccagaaagtgtggttactctagtgaaaatggtcaatgaagctagtgcaaaccttcctcggtgggatgatggaatataaactttggatgatgtcaattatatcttaggttcctttgatctgcccttgtatatggggaatatcaaagtatcaggtgcagtcggttgtttggtttacatccaaaatagctgcttgcacttgcacaccatacctgatagaagaagatacataattttctcattgtactttttaggaaaagaaaagaaatgaaagtaaagttagcatcg

SEQ ID NO: 18264 - protein, 161 aa, Zea mays subsp. mays
  misc_feature (1)..(161): Ceres Seq. ID no. 12364057
AKERGPVTDIDPIGNSPVIIKKTILEKIAPTWMNVSIQMKEDEETDKVFGWVLEMYAYAVASALHGVHHILRKDFMIQPPFDTKLQNTFIIHFTYGCDYSLKGELTYGKVGEWRFDKRSFPDRPPPRNLTLPPPGVPESVVTLVKMVNEASANLPRWDDGI

SEQ ID NO: 18265 - protein, 129 aa, Zea mays subsp. mays
  misc_feature (1)..(129): Ceres Seq. ID no. 12364058
MNVSIQMKEDEETDKVFGWVLEMYAYAVASALHGVHHILRKDFMIQPPFDTKLQNTFIIHFTYGCDYSLKGELTYGKVGEWRFDKRSFPDRPPPRNLTLPPPGVPESVVTLVKMVNEASANLPRWDDGI

SEQ ID NO: 18266 - protein, 123 aa, Zea mays subsp. mays
  misc_feature (1)..(123): Ceres Seq. ID no. 12364059
MKEDEETDKVFGWVLEMYAYAVASALHGVHHILRKDFMIQPPFDTKLQNTFIIHFTYGCDYSLKGELTYGKVGEWRFDKRSFPDRPPPRNLTLPPPGVPESVVTLVKMVNEASANLPRWDDGI

SEQ ID NO: 18267 - DNA, 1070 bp, Zea mays subsp. mays
  misc_feature (1)..(1070): Ceres Seq. ID no. 12364063
gcacgagaccattacctagaacatcctaatcgaaaaactagcagccctcgctcgcattctctcctcccagtcccctagtccttactccttaccatcccatatatccctagctagcgctctcggccgcatcgccggacgtctattaaaccgccgccgctcctcctcggcatgcgcggttctgctcgcctgcgacatggcgcctgcagcttccatcctctcggccaccgccgccgcctccgccaagcgcccggccacttccgacgctgatgagctcccgcacgacgactcctccgcgccccaccagcaggtgcagggcgacgagcccgcgcgcaagggccagcaaccgcggcagcagcagctggagtgcccgcgctgccgctccaccaacaccaagttctgctactacaacaactacagcacggcgcagccgcgccacttctgccgcgcgtgccgccgctactggacgcacgggggcacgctgcgcgacgtccccgtcggcggcgcctcgcgccgcgccgccactggcagcggcggcaagcggcgcagggtctccgccgagccctcatccccgccgccgtcggtcgcggacgcgtgcctgccgtccgccttcccgttcctcagcgacggcagcttcttcccgcagctcgacctcgtcggcggcgttgcgcttgcacccccggccttctcctcctcgtggcagtcggtgctggtcccggacttgtacgacgggctcgcgccgtgggacgacggagcaacggcgggcacgtggggcgacatcggtggcctcgacctcagctggacactgccggggaactgagtgccagccgccgtcgcgcgtcttgaggggctccggttttagcagtgcggcctcgtcaggttcagttcagttcagttcctagcatgcagagctctcacaattctcctatgtcgcctccactgtttcttctcgtccttactgcgaatgaaatggtggggctgctagttagatcagtgcatcttgatctgtagctagagccagagtgtaagatctgtgcagtgatttatcgtgacaataaaattaagtttgtgcc

SEQ ID NO: 18268 - protein, 210 aa, Zea mays subsp. mays
  misc_feature (1)..(210): Ceres Seq. ID no. 12364064
MSSRTTTPPRPTSRCRATSPRARASNRGSSSWSARAAAPPTPSSATTTTTARRSRATSAARAAATGRTGARCATSPSAAPRAAPPLAAAASGAGSPPSPHPRRRRSRTRACRPPSRSSATAASSRSSTSSAALRLHPRPSPPRGSRCWSRTCTTGSRRGTTEQRRARGATSVASTSAGHCRGTECQPPSRVLRGSGFSSAASSGSVQFSS

SEQ ID NO: 18269 - protein, 207 aa, Zea mays subsp. mays
  misc_feature (1)..(207): Ceres Seq. ID no. 12364065
MAPAASILSATAAASAKRPATSDADELPHDDSSAPHQQVQGDEPARKGQQPRQQQLECPRCRSTNTKFCYYNNYSTAQPRHFCRACRRYWTHGGTLRDVPVGGASRRAATGSGGKRRRVSAEPSSPPPSVADACLPSAFPFLSDGSFFPQLDLVGGVALAPPAFSSSWQSVLVPDLYDGLAPWDDGATAGTWGDIGGLDLSWTLPGN

SEQ ID NO: 18270 - DNA, 676 bp, Zea mays subsp. mays
  misc_feature (1)..(676): Ceres Seq. ID no. 12364118
aatcggtgtttgcttccgcagttccgccgtcggcaaggaaggaaaaagagagcagagaaccctagctagagtttggcgagtggtgcggaggcgcggctgctcctgctcgtcgcgacgtcgaatttcagcgccgcccgcgcgatccttggtctcttcgcccgtgaggagaggcgcgacaatggctgggaaaggcgggccgaccaacctggagaaggagcagatgtttgggatggcggagaaggagatggagtacagggttgatcttttcaacaggcttacaaagacctgttttgagaagtgcgttgaaaaaaggtataaagaagctgagctcaatatgggtgagaacagttgcattgatcgatgtgtttcaaagtattggcaggtgactaatttagtaggtcagatgcttgggaaccagcctcagatgtgaaccgagatgcactagttccattttgtagcagaatcctattgctctgtttattctttttggttggtattagaatcccgccacctgctattaagtacaccaatacagcaccagacttgttaatgcgtggatcgctctgaagaaaaatcacggtgtcttgctctttccagtgatgtgcattatctttgaatcatgaacacggagcatgcctgtaataaatttatagagctcgagagtgatcctgtttcg

SEQ ID NO: 18271 - protein, 142 aa, Zea mays subsp. mays
  misc_feature (1)..(142): Ceres Seq. ID no. 12364119
IGVCFRSSAVGKEGKREQRTLARVWRVVRRRGCSCSSRRRISAPPARSLVSSPVRRGATMAGKGGPTNLEKEQMFGMAEKEMEYRVDLFNRLTKTCFEKCVEKRYKEAELNMGENSCIDRCVSKYWQVTNLVGQMLGNQPQM

SEQ ID NO: 18272 - protein, 83 aa, Zea mays subsp. mays
  misc_feature (1)..(83): Ceres Seq. ID no. 12364120
MAGKGGPTNLEKEQMFGMAEKEMEYRVDLFNRLTKTCFEKCVEKRYKEAELNMGENSCIDRCVSKYWQVTNLVGQMLGNQPQM

SEQ ID NO: 18273 - DNA, 1485 bp, Zea mays subsp. mays
  misc_feature (1)..(1485): Ceres Seq. ID no. 12364144
gcacgagaccattacctagaacatcctaatcgaaaaatcgcaactcatactagaacatacagcatttcacaagacacaacataagcaatagccatgggagctgtgaagcatacattgaaaatgctttcatggctcctactcttcgcacaattggctgcggccaccacctccaagtgcacaaatgccacaaatgggactgagactgacagcctgggtgcaatgaaactgaagctgattgccattgcatccatcctcacagctggagcagctggtgtgctagtgccagtacttggccgctccatggccgcgctacatcctgatggtgacatttttttcgctgtcaaggcatttgcagccggtgtcatcctggccacgggcatggtccacattctgccagcagcatttgatgggctgacatccccatgcctctacaaaggtggcagtggtgggaacattttcccctttgcaggactcattgcaatgtctgctgcaatggccactatggtgatagactcactagctgctgggtactaccgccggtctcacttcaagaaggcacggccaatcgacatcctagagatccatgaacaaccaggagatgaggaaaggtctgggcatgcacaacatgtgcatgtgcacacccatgcaacacatgggcattcacacggagaggtggatgtcatcagttcaccagaggaggcttcaatagctgacacgatccggcacagggtggtatctcaggtccttgagctcggaattttggtgcattcagtgataattggggtgtccttaggtgcatctgtgaggtcatcgaccataaggcctcttgttggtgcccttagcttccatcaattctttgaaggcattggcctgggtggttgcattgtgcaggcaaatttcaagttgagggctaccgtcatgatggcaatttttttctccctgactgcacccattggcattgcattagggattggaatttcatcaagctacaatggccatagcactacagcgttcattgttgaaggagtgttcaactcagcctcagcaggaattttgatctacatgtcattagtcgatcttctggccacagatttcaataagcccaaactgcagacgaatacaaagcttcagctgatgacatatcttgcacttttcttaggtgcagggatgatgtccatgcttgctatatgggcatagattttcagaccatcaaaggatggctagagttgaagaaataagtttatttgtccaagagttctccattttctcaaacaagatgcccttggtgaagggttcatcatattaatccacgagttctccatcttccgtacgatatagcctcagatagtccttttgtacttcataatgtgagattacatgatttgtcatttgttggcatagtccattatcctaaagctatgatagtcattagctgtggttcatgtgctgaacattcagtcataaagacagagctaagccaattct

SEQ ID NO: 18274 - protein, 367 aa, Zea mays subsp. mays
  misc_feature (1)..(367): Ceres Seq. ID no. 12364145
MGAVKHTLKMLSWLLLFAQLAAATTSKCTNATNGTETDSLGAMKLKLIAIASILTAGAAGVLVPVLGRSMAALHPDGDIFFAVKAFAAGVILATGMVHILPAAFDGLTSPCLYKGGSGGNIFPFAGLIAMSAAMATMVIDSLAAGYYRRSHFKKARPIDILEIHEQPGDEERSGHAQHVHVHTHATHGHSHGEVDVISSPEEASIADTIRHRVVSQVLELGILVHSVIIGVSLGASVRSSTIRPLVGALSFHQFFEGIGLGGCIVQANFKLRATVMMAIFFSLTAPIGIALGIGISSSYNGHSTTAFIVEGVFNSASAGILIYMSLVDLLATDFNKPKLQTNTKLQLMTYLALFLGAGMMSMLAIWA

SEQ ID NO: 18275 - protein, 358 aa, Zea mays subsp. mays
  misc_feature (1)..(358): Ceres Seq. ID no. 12364146
MLSWLLLFAQLAAATTSKCTNATNGTETDSLGAMKLKLIAIASILTAGAAGVLVPVLGRSMAALHPDGDIFFAVKAFAAGVILATGMVHILPAAFDGLTSPCLYKGGSGGNIFPFAGLIAMSAAMATMVIDSLAAGYYRRSHFKKARPIDILEIHEQPGDEERSGHAQHVHVHTHATHGHSHGEVDVISSPEEASIADTIRHRVVSQVLELGILVHSVIIGVSLGASVRSSTIRPLVGALSFHQFFEGIGLGGCIVQANFKLRATVMMAIFFSLTAPIGIALGIGISSSYNGHSTTAFIVEGVFNSASAGILIYMSLVDLLATDFNKPKLQTNTKLQLMTYLALFLGAGMMSMLAIWA

SEQ ID NO: 18276 - protein, 325 aa, Zea mays subsp. mays
  misc_feature (1)..(325): Ceres Seq. ID no. 12364147
MKLKLIAIASILTAGAAGVLVPVLGRSMAALHPDGDIFFAVKAFAAGVILATGMVHILPAAFDGLTSPCLYKGGSGGNIFPFAGLIAMSAAMATMVIDSLAAGYYRRSHFKKARPIDILEIHEQPGDEERSGHAQHVHVHTHATHGHSHGEVDVISSPEEASIADTIRHRVVSQVLELGILVHSVIIGVSLGASVRSSTIRPLVGALSFHQFFEGIGLGGCIVQANFKLRATVMMAIFFSLTAPIGIALGIGISSSYNGHSTTAFIVEGVFNSASAGILIYMSLVDLLATDFNKPKLQTNTKLQLMTYLALFLGAGMMSMLAIWA

SEQ ID NO: 18277 - DNA, 1388 bp, Zea mays subsp. mays
  misc_feature (1)..(1388): Ceres Seq. ID no. 12364160
aaaacatcctcctctcctcgcagacatcttatccctcccgatcgaggccccgtttcctcctcctccggccaccgcacttagctgtcttaacttgccgttcggttcgcagcctcacgcccatggctaggaagtgctctagctgtgggaacaacggccacaactcgaggacctgcagcgggcacggcgccgggggcgggggcgtgaggctgttcggggtgcagctgcacgtggggtcctcgcccgtggccatgaagaagtgcttcagcatggagtgcctgtcgtcgtcggcgtccgccgcgccggcgtactacgcggccgctctccgccgcgaccaacagcgcctcgncgtcggcctcctcctcctcgtcgctcgtctcggtggaggaggcccccgagaagatggcccacgggtacctctccgacgggctcatgggcagggcggcgcaggagaggaagaagggcgttccatggacggaggacgagcacaggcgattcctggcgggcctggagaagctcgggaagggcgactggcgaggcatctcccggcacttcgtgacgacgcggaccccgacgcaggtggccagccacgcccagaagtacttcctccggcagagcagcctgacgcacaagaagcgcaggtccagcctcttcgacgtggtggagaacgccgagagggcggcgacgagctccatcaagggcatggagcgcctgcggctcaaggacgccatcacgaccgcgaccgcgactggctccgcagaacccggaaccgggacgacggcacagctcccgccggccctgtcgctcggcgtcggcaggcccaccagcgaggcccgaccacgccgcgctgcctccgagcagcctgctgtccctgcagctgccgcggtgctcgggcgggaattgggccgcacggcgccgagcctggcccctggcgccgccgaaacacagccacccttcttcgtcgctgacggcggcaaaggctggtggcctggcgccggacctggagctgaagatctcgaccgcccggcagagcgagcaccagcagcaggtccagatggggccatcgctgccgccgccgccgccgccgccgcagaggacgccctttctggggaccatcagggtcacatgacatgaccggcaaagacggcggcggttagtagggaatatcctgctggtaggagaagagcttttgcccatctgaagctggagaaggttgcttcaaaagataggacggggtgggaaaactggaaagaaggaagcttttggcagcgtgtgcgtgtgtgtgtgttgctggcacctggcagtggcagccgagacgacgatggcgtcgtgtatcatgtgggtgttgtgtatatcatatcatcatcatccgaaagatggaaactttactg

SEQ ID NO: 18278 - protein, 320 aa, Zea mays subsp. mays
  misc_feature (1)..(320): Ceres Seq. ID no. 12364161
  misc_feature (115)..(115): Xaa is any aa, unknown or other
NILLSSQTSYPSRSRPRFLLLRPPHLAVLTCRSVRSLTPMARKCSSCGNNGHNSRTCSGHGAGGGGVRLFGVQLHVGSSPVAMKKCFSMECLSSSASAAPAYYAAALRRDQQRLXVGLLLLVARLGGGGPREDGPRVPLRRAHGQGGAGEEEGRSMDGGRAQAIPGGPGEAREGRLARHLPALRDDADPDAGGQPRPEVLPPAEQPDAQEAQVQPLRRGGERREGGDELHQGHGAPAAQGRHHDRDRDWLRRTRNRDDGTAPAGPVARRRQAHQRGPTTPRCLRAACCPCSCRGARAGIGPHGAEPGPWRRRNTATLLRR

SEQ ID NO: 18279 - protein, 281 aa, Zea mays subsp. mays
  misc_feature (1)..(281): Ceres Seq. ID no. 12364162
  misc_feature (76)..(76): Xaa is any aa, unknown or other
MARKCSSCGNNGHNSRTCSGHGAGGGGVRLFGVQLHVGSSPVAMKKCFSMECLSSSASAAPAYYAAALRRDQQRLXVGLLLLVARLGGGGPREDGPRVPLRRAHGQGGAGEEEGRSMDGGRAQAIPGGPGEAREGRLARHLPALRDDADPDAGGQPRPEVLPPAEQPDAQEAQVQPLRRGGERREGGDELHQGHGAPAAQGRHHDRDRDWLRRTRNRDDGTAPAGPVARRRQAHQRGPTTPRCLRAACCPCSCRGARAGIGPHGAEPGPWRRRNTATLLRR

SEQ ID NO: 18280 - protein, 243 aa, Zea mays subsp. mays
  misc_feature (1)..(243): Ceres Seq. ID no. 12364163
MAHGYLSDGLMGRAAQERKKGVPWTEDEHRRFLAGLEKLGKGDWRGISRHFVTTRTPTQVASHAQKYFLRQSSLTHKKRRSSLFDVVENAERAATSSIKGMERLRLKDAITTATATGSAEPGTGTTAQLPPALSLGVGRPTSEARPRRAASEQPAVPAAAAVLGRELGRTAPSLAPGAAETQPPFFVADGGKGWWPGAGPGAEDLDRPAERAPAAGPDGAIAAAAAAAAAEDALSGDHQGHMT

SEQ ID NO: 18281 - DNA, 1452 bp, Zea mays subsp. mays
  misc_feature (1)..(1452): Ceres Seq. ID no. 12364192
gcacgagaccattacctagaacatcctaatcaaagacgctcgtgccagcaggccattcttctcgccttactccctcacagaacccagtaaaatatcgccagtcccgccgtcgagatggccccacgccgcctgctcgtcctcgccgtcgtcgccctcgcggccaccgccgccgcggccaactccggcttcgcggactccaacccgatccgccccgtcaccgaccgcgcggcctccgcgctcgagtccacggtcttcgccgcgctcggccgcacccgcgacgcgctccgcttcgcacgcttcgccgtcaggtacggcaagagctacgagagcgcggcggaggtccacaagcggttcaggatcttctccgagagcctccagctggtccgctccaccaaccgcaaaggcctctcctaccgcctcggcatcaaccgcttcgcggacatgagctgggaggagttccgtgcgacccggctcggcgcagcccagaactgctccgccacgcttaccggcaaccaccggatgcgcgccgccgccgttgcgctgccggagacgaaagactggagggaggatgggattgtgagcccagtgaaaaaccagggccactgtggatcatgctggaccttcagcactactggtgcacttgaggctgcatatacccaggcaactggcaagcccatctctctctctgagcaacagcttgttgactgtggttttgcattcaacaatttcggatgcaacggaggccttccatcccaggcctttgaatacatcaaatacaatggtggccttgacactgaggaatcttacccttaccaaggtgtcaatggaatctgcaagtttaagaatgagaatgttggagtcaaggttttggactcggttaacatcaccctgggtgctgaggatgaactgaaggatgctgttggtctggttcgcccagttagtgttgccttcgaggtgatcactggtttcaggctgtacaagagcggagtttacactagcgaccattgtggaactacaccgatggatgtgaaccacgctgttctggctgttggctacggtgtcgaagatggtgtaccctactggctcatcaagaactcatggggcgctgactggggtgatgagggttacttcaagatggaaatgggcaagaacatgtgcggtgttgctacgtgtgcatcctaccctattgtcgcatgaggcccttacgaaatgttacatggtctgtttggcatcaataatgcatgtttaacctgagcttggcgatgggttatacagaacggaaactctgtttgtgaatagaaaatcatgaagggaaggagttgaccggattcctgcttgtacgtctccccgactgtgtaggtagattgtcagttggggttccgaagtactctactcatacgtgtgtatgacagtttatttatgaaacaaaatacgcattgatcgttatggtcc

SEQ ID NO: 18282 - protein, 360 aa, Zea mays subsp. mays
  misc_feature (1)..(360): Ceres Seq. ID no. 12364193
MAPRRLLVLAVVALAATAAAANSGFADSNPIRPVTDRAASALESTVFAALGRTRDALRFARFAVRYGKSYESAAEVHKRFRIFSESLQLVRSTNRKGLSYRLGINRFADMSWEEFRATRLGAAQNCSATLTGNHRMRAAAVALPETKDWREDGIVSPVKNQGHCGSCWTFSTTGALEAAYTQATGKPISLSEQQLVDCGFAFNNFGCNGGLPSQAFEYIKYNGGLDTEESYPYQGVNGICKFKNENVGVKVLDSVNITLGAEDELKDAVGLVRPVSVAFEVITGFRLYKSGVYTSDHCGTTPMDVNHAVLAVGYGVEDGVPYWLIKNSWGADWGDEGYFKMEMGKNMCGVATCASYPIVA

SEQ ID NO: 18283 - protein, 251 aa, Zea mays subsp. mays
  misc_feature (1)..(251): Ceres Seq. ID no. 12364194
MSWEEFRATRLGAAQNCSATLTGNHRMRAAAVALPETKDWREDGIVSPVKNQGHCGSCWTFSTTGALEAAYTQATGKPISLSEQQLVDCGFAFNNFGCNGGLPSQAFEYIKYNGGLDTEESYPYQGVNGICKFKNENVGVKVLDSVNITLGAEDELKDAVGLVRPVSVAFEVITGFRLYKSGVYTSDHCGTTPMDVNHAVLAVGYGVEDGVPYWLIKNSWGADWGDEGYFKMEMGKNMCGVATCASYPIVA

SEQ ID NO: 18284 - protein, 225 aa, Zea mays subsp. mays
  misc_feature (1)..(225): Ceres Seq. ID no. 12364195
MRAAAVALPETKDWREDGIVSPVKNQGHCGSCWTFSTTGALEAAYTQATGKPISLSEQQLVDCGFAFNNFGCNGGLPSQAFEYIKYNGGLDTEESYPYQGVNGICKFKNENVGVKVLDSVNITLGAEDELKDAVGLVRPVSVAFEVITGFRLYKSGVYTSDHCGTTPMDVNHAVLAVGYGVEDGVPYWLIKNSWGADWGDEGYFKMEMGKNMCGVATCASYPIVA

SEQ ID NO: 18285 - DNA, 1510 bp, Zea mays subsp. mays
  misc_feature (1)..(1510): Ceres Seq. ID no. 12364196
gcacgagaccattacctagaacatcctaatcgaaaacctgctgcagtgtgcaggactgcagggcaggccctgccgtctgccgcaaaagagagcactaggaaaagaagtgttgcggcgttgcgtggtgggggacgaggccagagcgccccaaaaccaaaaaccccagaaccccgacctagggttacgccatcgccatgggatctgttgcctccgccgctgtgccaccacctcctcctcaatcagcgctgcctcaggcgggcgcgccgccctacgggcccgggctcgccgggatcctcccgcagatgtcgaagggggaggagaagaaggatgagaaggtggactacctcaacctcccctgccccgtgcccttcgaggagatccagcgcgaggctctcatgtctttgaagcctgaactttttgaaggattgagatttgacttcacaaaaggattgaatcagaagttttctcttagccacagcatttttatgggctccttagaagttccagcccaggcatctgaaactattaaagttccaactgcacattatgaatttggcgccaattttttagatccaaagttaatgctcattggaagggtgatgacagatggaaggcttaatgctcgtgtgaaatgtgatttgacagacaatctgacgttgaaagtaaatgcacagcttacccaagaggcacattactcacaagggatgtttaacttcgactacaagggaagtgactatcgagcacaattccaaattgggaacaatgcattctatggtgcaaattatattcagagtgttactccgaacctatcaatgggaactgaaatgttctggcttggtcaccaaaggaagtctggaattggttttgcctctcgctacaacacagacaaaatggtgggcactctacaggtcgcaagcactggaatagttgccttaagttatgtccagaagatttccgagaaggtttcccttgcgtctgacttcatgtataaccatatgtcaagagatgtaactgccagctttggttatgattacttgcttaggcagtgccgcctaagaggcaaaatagactcgaatggtgttgttgccgcatacttggaagagaggttgaacatgggtgtcaacttccttctatctgctgagattgaccattgtaagaagaactacaagtttggttttggaatgaccgtaggagagtaattctgccaaaacaattgctgtgagcgcacatgagatacttatgcagtcggcttcgcgcgtatgttgacttgttaaagatatttcaggtctcagttttgactgatcaggttttgccattgcgccgtggaaaaacacaggccgttgctgctttacagggttttgtgttttttcagctacttgagcatgggggccatgattctttgttcatcttggatgtaactagctgattggtgttccaacaatgttgtattggcggaacaatttttacctttttaaatcactaccaatccacctcactaggccttttctgc

SEQ ID NO: 18286 - protein, 334 aa, Zea mays subsp. mays
  misc_feature (1)..(334): Ceres Seq. ID no. 12364197
MGSVASAAVPPPPPQSALPQAGAPPYGPGLAGILPQMSKGEEKKDEKVDYLNLPCPVPFEEIQREALMSLKPELFEGLRFDFTKGLNQKFSLSHSIFMGSLEVPAQASETIKVPTAHYEFGANFLDPKLMLIGRVMTDGRLNARVKCDLTDNLTLKVNAQLTQEAHYSQGMFNFDYKGSDYRAQFQIGNNAFYGANYIQSVTPNLSMGTEMFWLGHQRKSGIGFASRYNTDKMVGTLQVASTGIVALSYVQKISEKVSLASDFMYNHMSRDVTASFGYDYLLRQCRLRGKIDSNGVVAAYLEERLNMGVNFLLSAEIDHCKKNYKFGFGMTVGE

SEQ ID NO: 18287 - protein, 298 aa, Zea mays subsp. mays
  misc_feature (1)..(298): Ceres Seq. ID no. 12364198
MSKGEEKKDEKVDYLNLPCPVPFEEIQREALMSLKPELFEGLRFDFTKGLNQKFSLSHSIFMGSLEVPAQASETIKVPTAHYEFGANFLDPKLMLIGRVMTDGRLNARVKCDLTDNLTLKVNAQLTQEAHYSQGMFNFDYKGSDYRAQFQIGNNAFYGANYIQSVTPNLSMGTEMFWLGHQRKSGIGFASRYNTDKMVGTLQVASTGIVALSYVQKISEKVSLASDFMYNHMSRDVTASFGYDYLLRQCRLRGKIDSNGVVAAYLEERLNMGVNFLLSAEIDHCKKNYKFGFGMTVGE

SEQ ID NO: 18288 - protein, 267 aa, Zea mays subsp. mays
  misc_feature (1)..(267): Ceres Seq. ID no. 12364199
MSLKPELFEGLRFDFTKGLNQKFSLSHSIFMGSLEVPAQASETIKVPTAHYEFGANFLDPKLMLIGRVMTDGRLNARVKCDLTDNLTLKVNAQLTQEAHYSQGMFNFDYKGSDYRAQFQIGNNAFYGANYIQSVTPNLSMGTEMFWLGHQRKSGIGFASRYNTDKMVGTLQVASTGIVALSYVQKISEKVSLASDFMYNHMSRDVTASFGYDYLLRQCRLRGKIDSNGVVAAYLEERLNMGVNFLLSAEIDHCKKNYKFGFGMTVGE

SEQ ID NO: 18289 - DNA, 1875 bp, Zea mays subsp. mays
  misc_feature (1)..(1875): Ceres Seq. ID no. 12364204
gcacgagaccattacctagaacatcctaatcgaaaaaaaccctaatcctcccccgctacacgttcgcttgatctttacggccgccgctactcgttcgccatggctgcctgctcctccaggctcctatacctcactctgagctcctctttcctccgctcctgccgcctcgcgtccagctccctacttcccaccgcctcccgctgccacccggggtcgctccactccctccgcttctgctctgctgtccccgagtttgtcgatgtcgccgccgaccctgccgaggcggctgtatcctccggacacccgtggccggagtggggcaacttccttgataagctgcgggccaaggggtacttcgagcaaggtttgccctccagcgtgagttctggcgagggagccgccggagatggggatccagcaactgcatctgagaacgcagcaacggctgcttccggtaatacggtggtggatgcggaggatagcgcggtgacctcggaagatatctatcattttctcaaggacgagaacagggtgaagaatgcgtgcctcaaatttgggcgagaccgcttcgatctcctcagcttgcttcccaagcaggatattcaagctattgttatgtctggctgtcctaataacaatcggaagcccgtctattctgcaaaaaggttgagagagtacgtgcaggtcaaagaagaagatgcatgcagcatttgcaaatttaaggcatcttgtgatagagcttatgtcactccaaagggtgaggttgaagttaggactgttgatgttgttcgtatactgttaagttatgcaatggataaaaaccattcaggagataactctgttatcgaagaaagtgtgcaagaatctgcaaaaaagcttctctcaaagcttactgaatttagtgacacaacaatcgatccatctcttccgaaacctgcatttcaagttgctaggaaggctcagggctcagtggggaaggggagagaaacgactgcagttgaaatgaagaagggtgactggttgtgcactaactgtaacttcttaaattttgctcgcaatcgtcactgtctcgaatgcaaagcagatggaccaaagaagatagaagcggccgtggatgcaatgaaaatgggcgattggatctgcacacagtgtcagtttatgaacttctctcgcaacaagatatgttttaaatgtgaagaacctcacccgaagaggcaactcaatcctggagagtgggagtgcccctcatgcgactttgttaacttccgacgcaacgctatctgcaagaagtgcaatcaggaccgccccgaggatgatacccgagatagtcagcggggactgagaaaaaccagaggggctggcaagtttagaagattcgactatattgatcagaagagcgatgacgatgatgacaatgcctggttccagaagcgtggggcaagcatgaggtcgaaaccggaccagagaaccaccactgccaagagcagaggctctgacggtctggatgatattcttgttaccaccaagcgtagaagcaccaagcaagacgaggacgacgaggtcttgccgtacgagggtgcgcgcaagcatgttgtgagcagaagggcaacgccttcccagaggaggttcacggctgcccgtaaccagtaataatacccgagcttggagctttgatgactccgttctgtgaacaaatttcacagcgtcgctcgctctgctgctgtgatgcagacgaatagatgatggacataacacataagcgtgttcgatctgtagtgttattatacaaactagtaactatcgcgcgcaccgcgcgcctacgaaaacagacaatataaatgataatactattataaagtatttgtcattgtgatt

SEQ ID NO: 18290 - protein, 516 aa, Zea mays subsp. mays
  misc_feature (1)..(516): Ceres Seq. ID no. 12364205
MAACSSRLLYLTLSSSFLRSCRLASSSLLPTASRCHPGSLHSLRFCSAVPEFVDVAADPAEAAVSSGHPWPEWGNFLDKLRAKGYFEQGLPSSVSSGEGAAGDGDPATASENAATAASGNTVVDAEDSAVTSEDIYHFLKDENRVKNACLKFGRDRFDLLSLLPKQDIQAIVMSGCPNNNRKPVYSAKRLREYVQVKEEDACSICKFKASCDRAYVTPKGEVEVRTVDVVRILLSYAMDKNHSGDNSVIEESVQESAKKLLSKLTEFSDTTIDPSLPKPAFQVARKAQGSVGKGRETTAVEMKKGDWLCTNCNFLNFARNRHCLECKADGPKKIEAAVDAMKMGDWICTQCQFMNFSRNKICFKCEEPHPKRQLNPGEWECPSCDFVNFRRNAICKKCNQDRPEDDTRDSQRGLRKTRGAGKFRRFDYIDQKSDDDDDNAWFQKRGASMRSKPDQRTTTAKSRGSDGLDDILVTTKRRSTKQDEDDEVLPYEGARKHVVSRRATPSQRRFTAARNQ

SEQ ID NO: 18291 - protein, 344 aa, Zea mays subsp. mays
  misc_feature (1)..(344): Ceres Seq. ID no. 12364206
MSGCPNNNRKPVYSAKRLREYVQVKEEDACSICKFKASCDRAYVTPKGEVEVRTVDVVRILLSYAMDKNHSGDNSVIEESVQESAKKLLSKLTEFSDTTIDPSLPKPAFQVARKAQGSVGKGRETTAVEMKKGDWLCTNCNFLNFARNRHCLECKADGPKKIEAAVDAMKMGDWICTQCQFMNFSRNKICFKCEEPHPKRQLNPGEWECPSCDFVNFRRNAICKKCNQDRPEDDTRDSQRGLRKTRGAGKFRRFDYIDQKSDDDDDNAWFQKRGASMRSKPDQRTTTAKSRGSDGLDDILVTTKRRSTKQDEDDEVLPYEGARKHVVSRRATPSQRRFTAARNQ

SEQ ID NO: 18292 - protein, 279 aa, Zea mays subsp. mays
  misc_feature (1)..(279): Ceres Seq. ID no. 12364207
MDKNHSGDNSVIEESVQESAKKLLSKLTEFSDTTIDPSLPKPAFQVARKAQGSVGKGRETTAVEMKKGDWLCTNCNFLNFARNRHCLECKADGPKKIEAAVDAMKMGDWICTQCQFMNFSRNKICFKCEEPHPKRQLNPGEWECPSCDFVNFRRNAICKKCNQDRPEDDTRDSQRGLRKTRGAGKFRRFDYIDQKSDDDDDNAWFQKRGASMRSKPDQRTTTAKSRGSDGLDDILVTTKRRSTKQDEDDEVLPYEGARKHVVSRRATPSQRRFTAARNQ

SEQ ID NO: 18293 - DNA, 1268 bp, Zea mays subsp. mays
  misc_feature (1)..(1268): Ceres Seq. ID no. 12364236
gcacgagaccattacctagaacatcctaatcgaaaaatcagagataggagagacgaacaagaaaagacgagatcatatataccgtacgttatagagtaggaaaatagaaatacgaatgatgatcacgggacggcagcgaaaccctgcaaggctgcaggtgtcgtcgtccttcctgcttgcccttgttttcgcatcatcggtgctcgtcggcatcgtggccggcggcagcttctacgaggagtgcgacgcgacttgggagccccagaactgctgggcctacgacgatggcaacaggctctccctcgcgctcgtcagcagttcctcaggttccatgatccggtcgaagcggcagttcgtgtacgggaccgtgtccaccatgatccagcttgtccccggcgactccgccggcaccgtcaccacctactatacgtcgtcgctgggcgacaaccacgacgagatcgacttcgagttcttgggcaacgtgagcgggcagccctacaccatccacaccaacgtgtacgctgccggcgtgggcaacaaggagatgcagttcaagccatggttcgaccccaccgccgactaccacaactacaccatctcctggactccctgcatgatcgcgtggtacgtcgacggcgtccccatccgcgtgttccgcaactacgcggcgagccacggcgtggcgttcccgacgagccagcccatgtacgcctactctagcatctgggcggcggaggactgggccacgcagggcggccgcgtcaaggccgactggtccaaggcgcccttcgtcgccagctaccacggcatcgacctcggcgtctgcgagtgctacggcgggggcgcctgcgtctccagctgcgccgcggcgttcgccgccagccactgcagcctgagcgacgcgcaggtgggggagatgcgctgggtgcagggcagctacaggatctacgactactgcgtcgaccccaagcgcttggtcaacggccagaggccggtcgagtgcgacctgccgcagtactgaacggatcggagctccgatcaggtccttgttgcgtatgaatgaggaagcaataatcatacgtatttactcaatcaacagtgcaaggggccggccgggaattccaacaagccgacatatacccaccaggttgggtcgagtcacgacgatcaaagaggccgcccgtctcactcgtctattttcatggataatgcaattggttttgtgctcattttactcttttaccgatatataactatgagtttttgag

SEQ ID NO: 18294 - protein, 301 aa, Zea mays subsp. mays
  misc_feature (1)..(301): Ceres Seq. ID no. 12364237
MMITGRQRNPARLQVSSSFLLALVFASSVLVGIVAGGSFYEECDATWEPQNCWAYDDGNRLSLALVSSSSGSMIRSKRQFVYGTVSTMIQLVPGDSAGTVTTYYTSSLGDNHDEIDFEFLGNVSGQPYTIHTNVYAAGVGNKEMQFKPWFDPTADYHNYTISWTPCMIAWYVDGVPIRVFRNYAASHGVAFPTSQPMYAYSSIWAAEDWATQGGRVKADWSKAPFVASYHGIDLGVCECYGGGACVSSCAAAFAASHCSLSDAQVGEMRWVQGSYRIYDYCVDPKRLVNGQRPVECDLPQY

SEQ ID NO: 18295 - protein, 300 aa, Zea mays subsp. mays
  misc_feature (1)..(300): Ceres Seq. ID no. 12364238
MITGRQRNPARLQVSSSFLLALVFASSVLVGIVAGGSFYEECDATWEPQNCWAYDDGNRLSLALVSSSSGSMIRSKRQFVYGTVSTMIQLVPGDSAGTVTTYYTSSLGDNHDEIDFEFLGNVSGQPYTIHTNVYAAGVGNKEMQFKPWFDPTADYHNYTISWTPCMIAWYVDGVPIRVFRNYAASHGVAFPTSQPMYAYSSIWAAEDWATQGGRVKADWSKAPFVASYHGIDLGVCECYGGGACVSSCAAAFAASHCSLSDAQVGEMRWVQGSYRIYDYCVDPKRLVNGQRPVECDLPQY

SEQ ID NO: 18296 - protein, 229 aa, Zea mays subsp. mays
  misc_feature (1)..(229): Ceres Seq. ID no. 12364239
MIRSKRQFVYGTVSTMIQLVPGDSAGTVTTYYTSSLGDNHDEIDFEFLGNVSGQPYTIHTNVYAAGVGNKEMQFKPWFDPTADYHNYTISWTPCMIAWYVDGVPIRVFRNYAASHGVAFPTSQPMYAYSSIWAAEDWATQGGRVKADWSKAPFVASYHGIDLGVCECYGGGACVSSCAAAFAASHCSLSDAQVGEMRWVQGSYRIYDYCVDPKRLVNGQRPVECDLPQY

SEQ ID NO: 18297 - DNA, 1287 bp, Zea mays subsp. mays
  misc_feature (1)..(1287): Ceres Seq. ID no. 12364248
gcacgagaccattacctagaacatcctaatcgaaaaagcgatcccaatccccgactcctccggcagcccgcaacgactcgcgccgcctccggtcgcgccgggtccaggtaaagcggcttccatctcctcggtctcagcgcgtcatcccctcctccttcctcttccgtttcccttagggttggagtagacacgtcggctcaaggatccttcgagggtcaggacacttattgattttcaacaaagatctagcatggaaccatcctcacagcctcaaccaatgatgggtgttgggtcacaaccttatcctgctgctgctccctatgtgccagtacctggatctcttgctgttcctcctggctcacagccagcagcagcattccccaatccaactcaactcagtgctcagcaccagatggtgtaccagcaggctcagcaatttcatcaacaacttcagcaacagcaggaacaacagctcagggagttctggactacccagatggatgagatcaagcaagcaaatgacttcaagatccacaccttgccacttgcaaggataaagaagataatgaaggctgatgaggatgtgcggatgatctctgcagaagctcctgttgtgtttgcgaaggcatgcgaggtattcatattagagctgacattgaggtcatggatgcacacagaggagaacaagcgccggaccttgcagaagaacgacattgcagctgccatcaccaggactgatatatatgacttcctggtggacataatcccgagggatgaaatgaaagaggaggggctcggacataatcccatagttggcctgccgcctgctatgggggctccagctgatcatggttctcatccatattactatgtgccagctcagcaggtgcaaggagcaggtatgatgtatggtggccagcagggtcacccagtgacttatatgtggcagacgccgcaagggcaagcggcagagccccccgaagaggagcagcagcagtctgcctgaatgtagcaaatagacgataacagcgaagcaattacatcttatctgaagttctgaacttagttctctaaacaaacaaatatgatttggttatgttaattgtgcagatgattgcaggctgaaacaattgtcgctaattaggtgtcatagcctcatagggtttcctaatggtagtttcgactcccgacgctgccacggcagcagtagaaaatgattgtaatttgcagactaatgtagtaagattagccttttctgtctaatccaatatacgattgaggccctcg

SEQ ID NO: 18298 - protein, 251 aa, Zea mays subsp. mays
  misc_feature (1)..(251): Ceres Seq. ID no. 12364249
MEPSSQPQPMMGVGSQPYPAAAPYVPVPGSLAVPPGSQPAAAFPNPTQLSAQHQMVYQQAQQFHQQLQQQQEQQLREFWTTQMDEIKQANDFKIHTLPLARIKKIMKADEDVRMISAEAPVVFAKACEVFILELTLRSWMHTEENKRRTLQKNDIAAAITRTDIYDFLVDIIPRDEMKEEGLGHNPIVGLPPAMGAPADHGSHPYYYVPAQQVQGAGMMYGGQQGHPVTYMWQTPQGQAAEPPEEEQQQSA

SEQ ID NO: 18299 - protein, 242 aa, Zea mays subsp. mays
  misc_feature (1)..(242): Ceres Seq. ID no. 12364250
MMGVGSQPYPAAAPYVPVPGSLAVPPGSQPAAAFPNPTQLSAQHQMVYQQAQQFHQQLQQQQEQQLREFWTTQMDEIKQANDFKIHTLPLARIKKIMKADEDVRMISAEAPVVFAKACEVFILELTLRSWMHTEENKRRTLQKNDIAAAITRTDIYDFLVDIIPRDEMKEEGLGHNPIVGLPPAMGAPADHGSHPYYYVPAQQVQGAGMMYGGQQGHPVTYMWQTPQGQAAEPPEEEQQQSA

SEQ ID NO: 18300 - protein, 241 aa, Zea mays subsp. mays
  misc_feature (1)..(241): Ceres Seq. ID no. 12364251
MGVGSQPYPAAAPYVPVPGSLAVPPGSQPAAAFPNPTQLSAQHQMVYQQAQQFHQQLQQQQEQQLREFWTTQMDEIKQANDFKIHTLPLARIKKIMKADEDVRMISAEAPVVFAKACEVFILELTLRSWMHTEENKRRTLQKNDIAAAITRTDIYDFLVDIIPRDEMKEEGLGHNPIVGLPPAMGAPADHGSHPYYYVPAQQVQGAGMMYGGQQGHPVTYMWQTPQGQAAEPPEEEQQQSA

SEQ ID NO: 18301 - DNA, 1288 bp, Zea mays subsp. mays
  misc_feature (1)..(1288): Ceres Seq. ID no. 12364285
gcacgagaccattacctagaacatcctaatcgaaaaagagacatcgatcagctagctagctgctgccaagagctagccaggggacagagcagcagcttgaagttggtcaccaatgctaaggatgggccgcgccagcgccacagcaggtgtgttgcgcttcgtcagggcgttcgccctctgcgtggctacggcatgcctcctcctggcggccggcatgccctcgcctgtggcggcgcaggacccgtcgaagctgagcctgcagtactactccaagacgtgccccaacgtggagcacgtcgtccggacggagatggagtgcgcggtgcgcgccgacacgcgcaacgccgcgctcatgctccgcctccatttccatgactgcttcgtgcagggctgcgacgggtcggtgctgctcgacgacacggcaaccatgatcggagagaagcaggcggagcagaacgtcaactcgctgaaagggttcgatctggttgacaagatcaaggagaagctggaagccgagtgccctggaaccgtctcctgcgcagacctgctggcgattgcagctagggatgcggttgtgctggttggtgggccttactgggatgtcccagtaggaagactggactccaagaaggcgagcctggacctagcaaacagcgacatccctacggcccagcaaggcctcctcacgctcattgccaagttctgggagaagggccttgatgccactgacatggtggccctcgtcggatcccacacgatcggattcgctaggtgcgagaatttccgggacagaatctacggcgacttcgagatgacgtccaagtacaacccgtcgtccgaggcctacctgagcaagctgaaggaggtgtgcccgcgggacggcggcgacgacaacatcagcgccatggacagccacacctccgacgtgttcgacaaacgcctacttcgagaccctcatcaagggcgagggcctgctcaactccgaccaggcgatgtggtccagcatcgcgggctactccacctccgacacagtcaacaagtactgggccgaccccgaggccttcttcaagcagttctccgactccatggtgaagatgggcaacatcaccaaccctgccggcggcgaggtcaggaagacctgcagatttgtcaacacataggatatgataatatatataggatgctcgagactgcaggagaaactcggtggttgtgattgtactttacgcctgcaccttctttcgatggcttgtttagggtggcttggaaaataaaaaacccctttgcc

SEQ ID NO: 18302 - protein, 367 aa, Zea mays subsp. mays
  misc_feature (1)..(367): Ceres Seq. ID no. 12364286
MLRMGRASATAGVLRFVRAFALCVATACLLLAAGMPSPVAAQDPSKLSLQYYSKTCPNVEHVVRTEMECAVRADTRNAALMLRLHFHDCFVQGCDGSVLLDDTATMIGEKQAEQNVNSLKGFDLVDKIKEKLEAECPGTVSCADLLAIAARDAVVLVGGPYWDVPVGRLDSKKASLDLANSDIPTAQQGLLTLIAKFWEKGLDATDMVALVGSHTIGFARCENFRDRIYGDFEMTSKYNPSSEAYLSKLKEVCPRDGGDDNISAMDSHTSDVFDKRLLRDPHQGRGPAQLRPGDVVQHRGLLHLRHSQQVLGRPRGLLQAVLRLHGEDGQHHQPCRRRGQEDLQICQHIGYDNIYRMLETAGETRWL

SEQ ID NO: 18303 - protein, 364 aa, Zea mays subsp. mays
  misc_feature (1)..(364): Ceres Seq. ID no. 12364287
MGRASATAGVLRFVRAFALCVATACLLLAAGMPSPVAAQDPSKLSLQYYSKTCPNVEHVVRTEMECAVRADTRNAALMLRLHFHDCFVQGCDGSVLLDDTATMIGEKQAEQNVNSLKGFDLVDKIKEKLEAECPGTVSCADLLAIAARDAVVLVGGPYWDVPVGRLDSKKASLDLANSDIPTAQQGLLTLIAKFWEKGLDATDMVALVGSHTIGFARCENFRDRIYGDFEMTSKYNPSSEAYLSKLKEVCPRDGGDDNISAMDSHTSDVFDKRLLRDPHQGRGPAQLRPGDVVQHRGLLHLRHSQQVLGRPRGLLQAVLRLHGEDGQHHQPCRRRGQEDLQICQHIGYDNIYRMLETAGETRWL

SEQ ID NO: 18304 - protein, 333 aa, Zea mays subsp. mays
  misc_feature (1)..(333): Ceres Seq. ID no. 12364288
MPSPVAAQDPSKLSLQYYSKTCPNVEHVVRTEMECAVRADTRNAALMLRLHFHDCFVQGCDGSVLLDDTATMIGEKQAEQNVNSLKGFDLVDKIKEKLEAECPGTVSCADLLAIAARDAVVLVGGPYWDVPVGRLDSKKASLDLANSDIPTAQQGLLTLIAKFWEKGLDATDMVALVGSHTIGFARCENFRDRIYGDFEMTSKYNPSSEAYLSKLKEVCPRDGGDDNISAMDSHTSDVFDKRLLRDPHQGRGPAQLRPGDVVQHRGLLHLRHSQQVLGRPRGLLQAVLRLHGEDGQHHQPCRRRGQEDLQICQHIGYDNIYRMLETAGETRWL

SEQ ID NO: 18305 - DNA, 879 bp, Zea mays subsp. mays
  misc_feature (1)..(879): Ceres Seq. ID no. 12364309
gcacgagaccattacctagaacatcctaatcaaaaacacacctccgaagtcggaacctccctgccccaacacaatggcctcctccctcgccgcgcgccgcctcctctcccgcgcagccgccgtgcatggggtggagcgagtcggccatggtcgcgggggcgagggacgttggcgtgtcccctgccatcgtgggcgcatttccaaggaaggaggccgcccttgtggagtttttcatggatgactgcctccaacaactgatggatcgaattgatgctggagaaggagagcagttgaagaacttgatactgagtgagagactctcaaaacttgttcggatgaggctggaaatgcaggcaccttatatatctaagtggcctcaagcactgagtattcagtctcaaccagcaaacgtctcaacaagcttgaagcagcgagctatcctggtggatgagatatggcatgctgctggagattctgggtcagatattgattggtatgtgaaacgtacagtgcttggtggtatctactcaacctcagaggtgtatatgttgacagacaattctccagagttccgtgatacttggacgtttgtgaaccgcagaataaaggatgctcttgatcttcagaaaaccttccaagaggccgcatacctcgctgaagccgtgggagcaggcatgagcggtaccgtgcagggtgttctcaacagggtcttccagaaccgtagtggatgaactttctttttctcaaacacgtagtgtggatggactaattccgtcttttgcacgctgcacaggataaagcacattttcccgttgaccaactggcgtatgtttataataaagcaaatggtgatgtggttgagatgcatcacgttagggt

SEQ ID NO: 18306 - protein, 201 aa, Zea mays subsp. mays
  misc_feature (1)..(201): Ceres Seq. ID no. 12364310
MGWSESAMVAGARDVGVSPAIVGAFPRKEAALVEFFMDDCLQQLMDRIDAGEGEQLKNLILSERLSKLVRMRLEMQAPYISKWPQALSIQSQPANVSTSLKQRAILVDEIWHAAGDSGSDIDWYVKRTVLGGIYSTSEVYMLTDNSPEFRDTWTFVNRRIKDALDLQKTFQEAAYLAEAVGAGMSGTVQGVLNRVFQNRSG

SEQ ID NO: 18307 - protein, 194 aa, Zea mays subsp. mays
  misc_feature (1)..(194): Ceres Seq. ID no. 12364311
MVAGARDVGVSPAIVGAFPRKEAALVEFFMDDCLQQLMDRIDAGEGEQLKNLILSERLSKLVRMRLEMQAPYISKWPQALSIQSQPANVSTSLKQRAILVDEIWHAAGDSGSDIDWYVKRTVLGGIYSTSEVYMLTDNSPEFRDTWTFVNRRIKDALDLQKTFQEAAYLAEAVGAGMSGTVQGVLNRVFQNRSG

SEQ ID NO: 18308 - protein, 165 aa, Zea mays subsp. mays
  misc_feature (1)..(165): Ceres Seq. ID no. 12364312
MDDCLQQLMDRIDAGEGEQLKNLILSERLSKLVRMRLEMQAPYISKWPQALSIQSQPANVSTSLKQRAILVDEIWHAAGDSGSDIDWYVKRTVLGGIYSTSEVYMLTDNSPEFRDTWTFVNRRIKDALDLQKTFQEAAYLAEAVGAGMSGTVQGVLNRVFQNRSG

SEQ ID NO: 18309 - DNA, 1589 bp, Zea mays subsp. mays
  misc_feature (1)..(1589): Ceres Seq. ID no. 12364378
gcacgagaccattacctagaacatcctaatcaaaaaacttcacgcaccaccctagtacaagagataccacagtccacagcaaaacgtacgccagaacaagctaagcgcgcgcgagccgcagacatcctaacgatggccgtcgtcgaggtcgtcacctccgagctggtggcgccgagcgagcccacgccgcggcgcccgctctggctgtccaacctcgacctcgccgcgcggaacggctacaccccgacgatctacttcttccgccgtccccaggacagcagcgacggccggctgcgtgcggactcctgcttctcgacccacgcgctgcgtgcggcgctggccgccgcgctggtccggttctacccgtttgccggccggctccgcgccgccggccgcggcgggcgcgccgagatcgactgcaacgccgcgggcgcgctcttggtcgtcgcgcggtccgccgcggcgctcgaggacttcctccacgacttcgcgccgtccaaggccatgaacgacacgttcgtgcccacgtacgactccgctggccccgacgcaccgttgctactgcttcaggtcacctttttcaggtgcggcggcgtggcgctcggcacggcgatgcaccacttcgtcatcgacggccgcagcgccttccacttcatctgaacgtggtccagcatcgcccgtggagacaccgccgccgcgcccccgtcgcttgaccgcacggcactccgggcgcgcccactgctcactactgccgccgccctcttcgaccacacccacgagtacggcggccgcgcctccaggccagcagcagtaaccgccggcgccgccggaagcaaggcggagtacgccagcgcgatcctccgcgtgaccggcgcgcaggccgccgccctgcgcgcccgcgcgggcgcggtgtccacgttccgcgcgctggtggcgcacgtctnncggtgcgcgtgcgcggcacgcgcgctggctcacgacgcgagtcccgcctgtacacgatggtggacatgcgngcccgcctgtccccgccgntgccgnacgccttnttcggcaacgcggtggcgcgcacctccgtgtcggcccgcgtcggcgacntccctggccaacccgctgggtttcggcgcacgtcggctccgcgcggcgacggggcacggggacgagtatgtgcgctcgctgctggattacctggagacggcggacctggcgacggtaccgcgccagggcctgcgcggcacggacctgcgggtgatcagctggctggggatgccgtcgtacgacgccgacttcgggtggggcgagccggcgctgctggcgccggcgctcatgtattacccggggttcgtgtacctgttgaactgccccggcaagggtggcgatgttgccgtggccgccgcgctggagcccgagcgcatgcagcgttcaaggagctcttctacgaggagctggctatgctggagtgaacgtacgtgaggcaaaagattcacgcttaacgtgcactttgtgtgcaccagttaatctataatatgtctatgtataactatatttatcgttatatctataatctacatactatatagaaatattct

SEQ ID NO: 18310 - protein, 219 aa, Zea mays subsp. mays
  misc_feature (1)..(219): Ceres Seq. ID no. 12364379
ARDHYLEHPNQKTSRTTLVQEIPQSTAKRTPEQAKRARAADILTMAVVEVVTSELVAPSEPTPRRPLWLSNLDLAARNGYTPTIYFFRRPQDSSDGRLRADSCFSTHALRAALAAALVRFYPFAGRLRAAGRGGRAEIDCNAAGALLVVARSAAALEDFLHDFAPSKAMNDTFVPTYDSAGPDAPLLLLQVTFFRCGGVALGTAMHHFVIDGRSAFHFI

SEQ ID NO: 18311 - protein, 175 aa, Zea mays subsp. mays
  misc_feature (1)..(175): Ceres Seq. ID no. 12364380
MAVVEVVTSELVAPSEPTPRRPLWLSNLDLAARNGYTPTIYFFRRPQDSSDGRLRADSCFSTHALRAALAAALVRFYPFAGRLRAAGRGGRAEIDCNAAGALLVVARSAAALEDFLHDFAPSKAMNDTFVPTYDSAGPDAPLLLLQVTFFRCGGVALGTAMHHFVIDGRSAFHFI

SEQ ID NO: 18312 - protein, 153 aa, Zea mays subsp. mays
  misc_feature (1)..(153): Ceres Seq. ID no. 12364381
  misc_feature (5)..(5): Xaa is any aa, unknown or other
  misc_feature (12)..(12): Xaa is any aa, unknown or other
  misc_feature (14)..(14): Xaa is any aa, unknown or other
  misc_feature (16)..(16): Xaa is any aa, unknown or other
  misc_feature (33)..(33): Xaa is any aa, unknown or other
MVDMXARLSPPXPXAXFGNAVARTSVSARVGDXPGQPAGFRRTSAPRGDGARGRVCALAAGLPGDGGPGDGTAPGPARHGPAGDQLAGDAVVRRRLRVGRAGAAGAGAHVLPGVRVPVELPRQGWRCCRGRRAGARAHAAFKELFYEELAMLE

SEQ ID NO: 18313 - DNA, 1381 bp, Zea mays subsp. mays
  misc_feature (1)..(1381): Ceres Seq. ID no. 12364411
gcacgagaccattacctagaacatcctaatcgaaaaatcatccgtttctgtcagttccttttctaaaagaaaaaaatacagtcgcatctcgcctccagcagggtgagttcgcctcggcagggtgtggcataccatggagagctcgtcgccgtcagtgccgttcccgctgctgcaggcgccggtcgagagcacctaccgcgcctgcaccatcccctaccgtttcccctccgacaacccgcgcaaggccacccctgtcgagatccaatggattgacctctttctcaactctgtcccgtccttcaaacagcgggcggagaacgaccccaccgtacccgatgcgcccgcgaaagcggagaagttcgcgcagaggtacacgtcaatgcttgaagagttgaagaagaatccggagagccatggaggaccaccagattgcatacttctttgtaggcttcgtgagctagtactcagagagctgggatttagggatatcttcaagaaggtcaaggatgaggagaatgccaaggctatgtcactttttgagggagttattaagcggaatgacgaaattgaggatgacggcaaaagaattgagaacttggtccgtggaattttagctggaaacatttttgatctaggatctgcacagcttgcagaagtttttgctaaagatggcatgtcatttttggcaagttgccagaatcttgtatctcgaccatgggttattgatgaccttgatgcttttaagagtaaatggaccaagaaatcatgggaaaaggcagttatttttgttgataactctggtgctgatattatcttgggtatattaccatttgcgagggagttgctccgacgtggcacaaaggtgatacttgctgctaatgatatgccttcgatcaacgatgtcacgtatccagagcttgttgagattataaacaagctcaaggatgcagatggaaaactatcaagtgtggacgcatctggcctccttgttgccaactctggcaacgatctgcctgtaattgatttgtctagtgtatcaccagagcttgcctttatggcaaatgatgctgacctggtggtgctcgaaggcatgggaagggcaattgaaactaacctatatgcgcagatgaaatgtgactcgatcaagattggaatggttaagcatcctgaggtcgcccaatttttaggaggaagactttatgattgcgtcttcaagttcaatgaggcctgaactacgagatacatttgataacacaataccggccgcactagtggtggcttagttctccccaagatcagcttgttaggtgttgcactgaacataattttgttagtatcagcaataatttcaatcaaaataagctacgtatatgtggtggtt

SEQ ID NO: 18314 - protein, 365 aa, Zea mays subsp. mays
  misc_feature (1)..(365): Ceres Seq. ID no. 12364412
MESSSPSVPFPLLQAPVESTYRACTIPYRFPSDNPRKATPVEIQWIDLFLNSVPSFKQRAENDPTVPDAPAKAEKFAQRYTSMLEELKKNPESHGGPPDCILLCRLRELVLRELGFRDIFKKVKDEENAKAMSLFEGVIKRNDEIEDDGKRIENLVRGILAGNIFDLGSAQLAEVFAKDGMSFLASCQNLVSRPWVIDDLDAFKSKWTKKSWEKAVIFVDNSGADIILGILPFARELLRRGTKVILAANDMPSINDVTYPELVEIINKLKDADGKLSSVDASGLLVANSGNDLPVIDLSSVSPELAFMANDADLVVLEGMGRAIETNLYAQMKCDSIKIGMVKHPEVAQFLGGRLYDCVFKFNEA

SEQ ID NO: 18315 - protein, 283 aa, Zea mays subsp. mays
  misc_feature (1)..(283): Ceres Seq. ID no. 12364413
MLEELKKNPESHGGPPDCILLCRLRELVLRELGFRDIFKKVKDEENAKAMSLFEGVIKRNDEIEDDGKRIENLVRGILAGNIFDLGSAQLAEVFAKDGMSFLASCQNLVSRPWVIDDLDAFKSKWTKKSWEKAVIFVDNSGADIILGILPFARELLRRGTKVILAANDMPSINDVTYPELVEIINKLKDADGKLSSVDASGLLVANSGNDLPVIDLSSVSPELAFMANDADLVVLEGMGRAIETNLYAQMKCDSIKIGMVKHPEVAQFLGGRLYDCVFKFNEA

SEQ ID NO: 18316 - protein, 234 aa, Zea mays subsp. mays
  misc_feature (1)..(234): Ceres Seq. ID no. 12364414
MSLFEGVIKRNDEIEDDGKRIENLVRGILAGNIFDLGSAQLAEVFAKDGMSFLASCQNLVSRPWVIDDLDAFKSKWTKKSWEKAVIFVDNSGADIILGILPFARELLRRGTKVILAANDMPSINDVTYPELVEIINKLKDADGKLSSVDASGLLVANSGNDLPVIDLSSVSPELAFMANDADLVVLEGMGRAIETNLYAQMKCDSIKIGMVKHPEVAQFLGGRLYDCVFKFNEA

SEQ ID NO: 18317 - DNA, 871 bp, Zea mays subsp. mays
  misc_feature (1)..(871): Ceres Seq. ID no. 12364438
gcacgagaccattacctagaacatcctaatccaaaaactagcaggcatccacttctcacaggcaaagagaagtctcctagcatcaaagcagatttgcagatagaccttctccaagcgatggagactttcacccaggaacatgtcattggaattccattgacttcgtttgcatatgccgatgaggaaagacaaggaaaatcttcctgttctgccatggttcataaaaaaaataagaagagttccttcattcatcggatgaacaaactgagccataaaacagatagctacatgcaaggattcaaagaacacttaaccatgggaccaaaaatttcagaaactataaaagggaaactaagcttcggtgcaaaggttctccaagctggcggtattgataaagtcttcagagaatactttgcagttgagaaagatgagaaactacggaaggctttccagtgctatctttcaaccacagctggtccaatagctggaatgcttttcatctcaactaagaagattgctttccatagtgataggcctttgagtttcacgtctcctaaaggaagcagtacaagggtgccttacaaggtgttgatccccacagagaggatgaaaagtgcttcagtgcgggaaaatttatacaatccagatgagaagtatattgatgtagtcactgttgatggctttgatttttggttcatgggctttgtcagctatgagaagtcattcaaatatctccaacaagtaattatggagctgagatgatgcacacagttttgtaacgtgaaacatcatagataccatgttgatatggtatatgtacattgaagagatagaattgatctatcacattgattgtgaagcaaagtttttc

SEQ ID NO: 18318 - protein, 253 aa, Zea mays subsp. mays
  misc_feature (1)..(253): Ceres Seq. ID no. 12364439
ARDHYLEHPNPKTSRHPLLTGKEKSPSIKADLQIDLLQAMETFTQEHVIGIPLTSFAYADEERQGKSSCSAMVHKKNKKSSFIHRMNKLSHKTDSYMQGFKEHLTMGPKISETIKGKLSFGAKVLQAGGIDKVFREYFAVEKDEKLRKAFQCYLSTTAGPIAGMLFISTKKIAFHSDRPLSFTSPKGSSTRVPYKVLIPTERMKSASVRENLYNPDEKYIDVVTVDGFDFWFMGFVSYEKSFKYLQQVIMELR

SEQ ID NO: 18319 - protein, 214 aa, Zea mays subsp. mays
  misc_feature (1)..(214): Ceres Seq. ID no. 12364440
METFTQEHVIGIPLTSFAYADEERQGKSSCSAMVHKKNKKSSFIHRMNKLSHKTDSYMQGFKEHLTMGPKISETIKGKLSFGAKVLQAGGIDKVFREYFAVEKDEKLRKAFQCYLSTTAGPIAGMLFISTKKIAFHSDRPLSFTSPKGSSTRVPYKVLIPTERMKSASVRENLYNPDEKYIDVVTVDGFDFWFMGFVSYEKSFKYLQQVIMELR

SEQ ID NO: 18320 - protein, 182 aa, Zea mays subsp. mays
  misc_feature (1)..(182): Ceres Seq. ID no. 12364441
MVHKKNKKSSFIHRMNKLSHKTDSYMQGFKEHLTMGPKISETIKGKLSFGAKVLQAGGIDKVFREYFAVEKDEKLRKAFQCYLSTTAGPIAGMLFISTKKIAFHSDRPLSFTSPKGSSTRVPYKVLIPTERMKSASVRENLYNPDEKYIDVVTVDGFDFWFMGFVSYEKSFKYLQQVIMELR

SEQ ID NO: 18321 - DNA, 1869 bp, Zea mays subsp. mays
  misc_feature (1)..(1869): Ceres Seq. ID no. 12364442
gcacgagaccattacctagaacatcctaatcgcaaaataaagcgacggggcccttgcgctgggcgcggagactggagagggcgagagtcctcccatccacaagttcttagcttttgcgagattgagatccggctggggacagaccgacagaggaaggtgaattgtgggaaagaggacagaaaaatggggattggagatggatcttcaaatgggaaccagcaaccggtgcataaggaaatacgagatgagaccacaccacttcttccagtcaaggtggaggaggacgaggggtttcatgagttcaatggagcttcattctctggggcagttttcaatctgtcgaccaccatagttggggctggaattatggctcttccagcaagtatcaagatgctgggcatcatcccggggattctgttgatcatccttgtggcactgctcacagaggcatccatcgacatgcttgtaaggtgcagccaccagggcaagattacatcatatgggtggctgatgggcgaggttttcgggcagtgggggagaattgcgctgcaggcctccgtcatcataaacaatgttggcgtgctaattgtttacatgattatcattggtgatgtattatctggaacaacatcaggcgatgttcatcatcgtggtatattggagggctggtttggagctcatttgtggaattctcgtgccattgttcttcttgccacagctcttttggtgttcgctccgttggtgagctttaagcgcttggattcattaagatacacatctgcgctatcagttgccctggcagtagtttttgtcgtaattactgctgggattgccatcatcaaactcttcaatggaactgtagcgatgcccaaactttttccagaattagatggtcttaattctatctggaatctttttacagctgtccctgttcttgttacggcctatatctgccactataacgttcacagcattgacaatgaacttgaagacagaacacagatcaagccgattgtgcgaacatcgctgttcctgtgctccagtgtttacattgccacaagtttctttgcttatctcctcttcggtgaaggcacactggacgacgtgctcgccaactttgacgcaaatcttggcattccattcagttcagtcttcgatgacatagtgcgagtgagctatgcagcacatgtcatgcttgtctttcccattgtcttctttgccctccggctcaacttggatgggttgctcttccccacgtcaaggcacatctctcgtgacaacaagagattcgccatcatcaccgtctctctcctcgcagtaatttatcttgctgccattctcataccaagcatctgggacgcgttccagtttactggtgccacagctgctgtcctgattggttttatatttcctgccatggtcatacttagggattcttacggaatcgcgagcaagcgcgacaagattctggctgtaaccatgatcgtgcttgctgtcctgtcaaattctgtcgccctatacagtgacgcgatgaacatcttccgtaagaaggaagtggcctgatctcagatttcaaaagtagtcagtgctggatgaagaatggtctcgcaatgcaagactcgatggtacgaaggaaaacgatgcgcttggattccgtgaaggaacgatttctttgtcagcacctcagaatttggccacttgaaagaatctgatgcttgaagtttcctggttctgtgtacacaagtcggctcaatgtcagaattgagccgcttgaaatatatttagttatattctatgcggagagtaggtcttggaaacagccttttccacaataatgtacagttattatgccaatttctgagttcagtt

SEQ ID NO: 18322 - protein, 520 aa, Zea mays subsp. mays
  misc_feature (1)..(520): Ceres Seq. ID no. 12364443
ARDHYLEHPNRKIKRRGPCAGRGDWRGRESSHPQVLSFCEIEIRLGTDRQRKVNCGKEDRKMGIGDGSSNGNQQPVHKEIRDETTPLLPVKVEEDEGFHEFNGASFSGAVFNLSTTIVGAGIMALPASIKMLGIIPGILLIILVALLTEASIDMLVRCSHQGKITSYGWLMGEVFGQWGRIALQASVIINNVGVLIVYMIIIGDVLSGTTSGDVHHRGILEGWFGAHLWNSRAIVLLATALLVFAPLVSFKRLDSLRYTSALSVALAVVFVVITAGIAIIKLFNGTVAMPKLFPELDGLNSIWNLFTAVPVLVTAYICHYNVHSIDNELEDRTQIKPIVRTSLFLCSSVYIATSFFAYLLFGEGTLDDVLANFDANLGIPFSSVFDDIVRVSYAAHVMLVFPIVFFALRLNLDGLLFPTSRHISRDNKRFAIITVSLLAVIYLAAILIPSIWDAFQFTGATAAVLIGFIFPAMVILRDSYGIASKRDKILAVTMIVLAVLSNSVALYSDAMNIFRKKEVA

SEQ ID NO: 18323 - protein, 459 aa, Zea mays subsp. mays
  misc_feature (1)..(459): Ceres Seq. ID no. 12364444
MGIGDGSSNGNQQPVHKEIRDETTPLLPVKVEEDEGFHEFNGASFSGAVFNLSTTIVGAGIMALPASIKMLGIIPGILLIILVALLTEASIDMLVRCSHQGKITSYGWLMGEVFGQWGRIALQASVIINNVGVLIVYMIIIGDVLSGTTSGDVHHRGILEGWFGAHLWNSRAIVLLATALLVFAPLVSFKRLDSLRYTSALSVALAVVFVVITAGIAIIKLFNGTVAMPKLFPELDGLNSIWNLFTAVPVLVTAYICHYNVHSIDNELEDRTQIKPIVRTSLFLCSSVYIATSFFAYLLFGEGTLDDVLANFDANLGIPFSSVFDDIVRVSYAAHVMLVFPIVFFALRLNLDGLLFPTSRHISRDNKRFAIITVSLLAVIYLAAILIPSIWDAFQFTGATAAVLIGFIFPAMVILRDSYGIASKRDKILAVTMIVLAVLSNSVALYSDAMNIFRKKEVA

SEQ ID NO: 18324 - protein, 398 aa, Zea mays subsp. mays
  misc_feature (1)..(398): Ceres Seq. ID no. 12364445
MALPASIKMLGIIPGILLIILVALLTEASIDMLVRCSHQGKITSYGWLMGEVFGQWGRIALQASVIINNVGVLIVYMIIIGDVLSGTTSGDVHHRGILEGWFGAHLWNSRAIVLLATALLVFAPLVSFKRLDSLRYTSALSVALAVVFVVITAGIAIIKLFNGTVAMPKLFPELDGLNSIWNLFTAVPVLVTAYICHYNVHSIDNELEDRTQIKPIVRTSLFLCSSVYIATSFFAYLLFGEGTLDDVLANFDANLGIPFSSVFDDIVRVSYAAHVMLVFPIVFFALRLNLDGLLFPTSRHISRDNKRFAIITVSLLAVIYLAAILIPSIWDAFQFTGATAAVLIGFIFPAMVILRDSYGIASKRDKILAVTMIVLAVLSNSVALYSDAMNIFRKKEVA

SEQ ID NO: 18325 - DNA, 1296 bp, Zea mays subsp. mays
  misc_feature (1)..(1296): Ceres Seq. ID no. 12364476
gcacgagaccattacctagaacatcctaatcgaaaaatccaattgaggaagagaagaggcgataagcacactaatggctgacgagtcatggagggtgccaaccccagtgcaagaactggccgcaggcgtggtggagccaccgacccagttcgtgctgcaggagcaggatcgtcctggatctgggaccctgctcttcgccactgacatgccggagcccattcccgtcgttgacctcagcaggctggcggctgccgacgaggcttccaagctccggtcagcactggagacctgggggctcttcctggttactaagcatgggatagaagcatctctcatggacgatgtgatggccgcgtcacgcgattttttctaccagccgctcgaagcgaagcaggaatacagtaacctgataggcggcaagcggttccagatggagggttatggtaatgacatggtgaaatccaaagatcagatactggactggcaagatcggctgcagctcagggtggaaccccaagatgagaggaacctcgcttattggcccaaacaccctgattctttcagggatcttctggagaagtatgcatcaaaaaccaagatagttaggaacaaagtcttacgggcgatgggcaaaacattggagcttggcgaagactatttcatcagccagattggtgacagggcctcagcaattgctaggttcaactactaccctccctgtccaaggcctgatcttgtctttggcattaagcctcactctgacggtggcgcggtgacgatacttctcgtcgacaaggatgttgggggcctgcaagttcagaaagatggcgtttggtacactgttccgtccatgcctcacacgctgcttgtcaacttgggtgactccatggagataatgaacaatgggatcttcaaaagtccggtgcacagggttgtgacgaatgcagagaaagagagactctcactcgccatgttctacggcgtggaaggccagagagtgcttgagccagcgcttggtttgctgggtgaggagcgaccagcacggtacaggaaaattatggcctcagactacattattgggctccgtcaaggaattgcggaaggacagagatttatcgagactttgaagatatagtcaatcgtgaatgctcaagaataataaagagttgcttcgcccattgctaaatcagatcagagtccaatgtccattctgtaatgcattaccacattgttatacatgctcggaagacttcagagaagatgtaatcctgctcgttttactaaatttggggcatt

SEQ ID NO: 18326 - protein, 353 aa, Zea mays subsp. mays
  misc_feature (1)..(353): Ceres Seq. ID no. 12364477
MADESWRVPTPVQELAAGVVEPPTQFVLQEQDRPGSGTLLFATDMPEPIPVVDLSRLAAADEASKLRSALETWGLFLVTKHGIEASLMDDVMAASRDFFYQPLEAKQEYSNLIGGKRFQMEGYGNDMVKSKDQILDWQDRLQLRVEPQDERNLAYWPKHPDSFRDLLEKYASKTKIVRNKVLRAMGKTLELGEDYFISQIGDRASAIARFNYYPPCPRPDLVFGIKPHSDGGAVTILLVDKDVGGLQVQKDGVWYTVPSMPHTLLVNLGDSMEIMNNGIFKSPVHRVVTNAEKERLSLAMFYGVEGQRVLEPALGLLGEERPARYRKIMASDYIIGLRQGIAEGQRFIETLKI

SEQ ID NO: 18327 - protein, 309 aa, Zea mays subsp. mays
  misc_feature (1)..(309): Ceres Seq. ID no. 12364478
MPEPIPVVDLSRLAAADEASKLRSALETWGLFLVTKHGIEASLMDDVMAASRDFFYQPLEAKQEYSNLIGGKRFQMEGYGNDMVKSKDQILDWQDRLQLRVEPQDERNLAYWPKHPDSFRDLLEKYASKTKIVRNKVLRAMGKTLELGEDYFISQIGDRASAIARFNYYPPCPRPDLVFGIKPHSDGGAVTILLVDKDVGGLQVQKDGVWYTVPSMPHTLLVNLGDSMEIMNNGIFKSPVHRVVTNAEKERLSLAMFYGVEGQRVLEPALGLLGEERPARYRKIMASDYIIGLRQGIAEGQRFIETLKI

SEQ ID NO: 18328 - protein, 266 aa, Zea mays subsp. mays
  misc_feature (1)..(266): Ceres Seq. ID no. 12364479
MDDVMAASRDFFYQPLEAKQEYSNLIGGKRFQMEGYGNDMVKSKDQILDWQDRLQLRVEPQDERNLAYWPKHPDSFRDLLEKYASKTKIVRNKVLRAMGKTLELGEDYFISQIGDRASAIARFNYYPPCPRPDLVFGIKPHSDGGAVTILLVDKDVGGLQVQKDGVWYTVPSMPHTLLVNLGDSMEIMNNGIFKSPVHRVVTNAEKERLSLAMFYGVEGQRVLEPALGLLGEERPARYRKIMASDYIIGLRQGIAEGQRFIETLKI

SEQ ID NO: 18329 - DNA, 1252 bp, Zea mays subsp. mays
  misc_feature (1)..(1252): Ceres Seq. ID no. 12364488
gcacgagaccattacctagaacatcctaatcgaaaaagcacagcagagcgccactcgactcgactcatcctttcggttcccctcccccctccgcgttccacaaccctcgagaagcttccaccctcccctcctgcgacgccgccagagccgcggaaaccctacccaccccggccgctcacgcaccgggcgcccgccgccgccggtcgcgtacctgccgccgacaccgcccaaagcgattggatctagagatcgtcagtagccacgatggaggactgggattctgaagaattccagccagttgtgcctgttgtgaaagccgagccacttaaaaatcagtgggctgatgaagatgttgaagaagatgatgtaaaagaatcatgggaagaagaggaggaggaggagaaacctaagccagcgccagtggaaaaggtcgctgcaaaacctagcactaaggctcctgctaaaaagggaaaacagcaagcattgacaagtgctgaagaaccagatgagcctcctcttagtcccacttcacagaaaattcgccaacaaagacttgtggaagaagctgacttcaagtctaccaccgagctttttgcaaagaagggcagtgagcaaaagtcactagatacttttattccaaagtccgagagtgactttgcggaatacgcggagcttattgcaaacaaactacgcccctatgagaaaagctttcactacatggctctgcttaagaatgtcatgagactttccatgacatcgttgaaaggtgcggacgccaaagatatatcttcttccgtgacggcaattgctaacgagaagatcaaggctgagaaggaggctgcagcaggcaaaaagaaacaaggagcgaaaaagaagcaactccacatcgagaaaggagacgacgacttcatccccggccggggtggtggctacgatgaccccgatgagtacgacttcatgtgatctggctgggagggatagtaggtttctgttatgtatacctttggcgggcagagaatatatcactagagtttgcggcatactattgcatggaacatgcgttatctattcgagaatgatttttgactctgcaggataagaagagcacttgtgatctggatgcatgggtgttttcttatttatccttgaatctttgggttatttttttttcaacattgcattttttgccaaatgtactatagtaccttgtactatctggttactccgtgagtcatgaaagcaattaaatccc

SEQ ID NO: 18330 - protein, 232 aa, Zea mays subsp. mays
  misc_feature (1)..(232): Ceres Seq. ID no. 12364489
MEDWDSEEFQPVVPVVKAEPLKNQWADEDVEEDDVKESWEEEEEEEKPKPAPVEKVAAKPSTKAPAKKGKQQALTSAEEPDEPPLSPTSQKIRQQRLVEEADFKSTTELFAKKGSEQKSLDTFIPKSESDFAEYAELIANKLRPYEKSFHYMALLKNVMRLSMTSLKGADAKDISSSVTAIANEKIKAEKEAAAGKKKQGAKKKQLHIEKGDDDFIPGRGGGYDDPDEYDFM

SEQ ID NO: 18331 - DNA, 1600 bp, Zea mays subsp. mays
  misc_feature (1)..(1600): Ceres Seq. ID no. 12364490
gcacgagaccattacctagaacatcctaatcgaaaacccagacccagagcttctcttctcaaaagatgcaggagcaggacgtggacgatggcggcggcaggacgacccagcagcaggagaagtcgatcgacgactggctccctatcaactcctccaggaaggccaagtggtggtactccgccttccacaatgtcaccgccatggtcggcgccggcgtgctcggcctcccctacgccatgtccgagcttggctggggccctggcatcgcggtgatgatcctgtcgtggataatcaccctatacacgctatggcagatggtggagatgcacgagatggtgcctgggaagcggttcgaccggtaccacgagctcgggcagcacgtcttcggcgacaggctgggcctctggatcgtggtgccgcagcagctggcagtagaggtgagcctgaacatcatctacatggtcaccggcggccagtccctcaagaagttccacgacgtcatctgcgacggcggcaggtgcggcggcgacttgaagctctcctacttcatcatgatcttcgcctccgtccacctggtcctctcccagctccccaacttcaactccatctccgccgtgtcgctcgccgccgccgtcatgtcgctcagttactccaccattgcgtggggcgcgtcgctgcacagagggaggagagaggacgtggactaccacctgcgcgccacgaccaccccagggaaggtgttcggcttcctgggaggcctaggggacgtggcgttcgcctactcggggcacaacgtggtgctggagatccaggccaccatcccgtccacgccggacaagccgtccaagaaggccatgtggaagggcgcctttgtcgcctacgtcgtcgtcgccatctgctacttccccgtcacgttcgtcgggtactgggccttcggcagcggcgtcgacgagaacatcctcatcacgctctccaagcccaagtggctcattgccctcgccaacatgatggtcgtcgtccatgtcattggcagttaccaggtttatgccatgccggtgtttgacatgatagagacggtgctggtcaagaaaatgaggttcgctccgagcctcacgctccgtcttattgcccggagcgtctatgttgcgttcacaatgtttctaggcatcactttccccttcttcggtggattgctcagtttcttcggcggattagccttcgcaccgacaacttattttcttccctgcatcatgtggctcaaggtttacaagcccaaacggttcggcctttcatggttcatcaactggatctgcatcgttattggagtgctgctgttgattctgggtccgataggagggctccggcagatcattttgtcagccaccacatacaaattctaccagtaaaatcgatcaactggagtcgtatggcgtggctgttttgttagcattacatttcttagggtggattggcttttaatgtacacgagcgagtgagattgatgctagtagctcctaggagtatatatatttctatcatccacagagcttaatgtatcttgtagttgggacattaaaagagcaagtaggctttactcgct

SEQ ID NO: 18332 - protein, 446 aa, Zea mays subsp. mays
  misc_feature (1)..(446): Ceres Seq. ID no. 12364491
MQEQDVDDGGGRTTQQQEKSIDDWLPINSSRKAKWWYSAFHNVTAMVGAGVLGLPYAMSELGWGPGIAVMILSWIITLYTLWQMVEMHEMVPGKRFDRYHELGQHVFGDRLGLWIVVPQQLAVEVSLNIIYMVTGGQSLKKFHDVICDGGRCGGDLKLSYFIMIFASVHLVLSQLPNFNSISAVSLAAAVMSLSYSTIAWGASLHRGRREDVDYHLRATTTPGKVFGFLGGLGDVAFAYSGHNVVLEIQATIPSTPDKPSKKAMWKGAFVAYVVVAICYFPVTFVGYWAFGSGVDENILITLSKPKWLIALANMMVVVHVIGSYQVYAMPVFDMIETVLVKKMRFAPSLTLRLIARSVYVAFTMFLGITFPFFGGLLSFFGGLAFAPTTYFLPCIMWLKVYKPKRFGLSWFINWICIVIGVLLLILGPIGGLRQIILSATTYKFYQ

SEQ ID NO: 18333 - protein, 401 aa, Zea mays subsp. mays
  misc_feature (1)..(401): Ceres Seq. ID no. 12364492
MVGAGVLGLPYAMSELGWGPGIAVMILSWIITLYTLWQMVEMHEMVPGKRFDRYHELGQHVFGDRLGLWIVVPQQLAVEVSLNIIYMVTGGQSLKKFHDVICDGGRCGGDLKLSYFIMIFASVHLVLSQLPNFNSISAVSLAAAVMSLSYSTIAWGASLHRGRREDVDYHLRATTTPGKVFGFLGGLGDVAFAYSGHNVVLEIQATIPSTPDKPSKKAMWKGAFVAYVVVAICYFPVTFVGYWAFGSGVDENILITLSKPKWLIALANMMVVVHVIGSYQVYAMPVFDMIETVLVKKMRFAPSLTLRLIARSVYVAFTMFLGITFPFFGGLLSFFGGLAFAPTTYFLPCIMWLKVYKPKRFGLSWFINWICIVIGVLLLILGPIGGLRQIILSATTYKFYQ

SEQ ID NO: 18334 - protein, 389 aa, Zea mays subsp. mays
  misc_feature (1)..(389): Ceres Seq. ID no. 12364493
MSELGWGPGIAVMILSWIITLYTLWQMVEMHEMVPGKRFDRYHELGQHVFGDRLGLWIVVPQQLAVEVSLNIIYMVTGGQSLKKFHDVICDGGRCGGDLKLSYFIMIFASVHLVLSQLPNFNSISAVSLAAAVMSLSYSTIAWGASLHRGRREDVDYHLRATTTPGKVFGFLGGLGDVAFAYSGHNVVLEIQATIPSTPDKPSKKAMWKGAFVAYVVVAICYFPVTFVGYWAFGSGVDENILITLSKPKWLIALANMMVVVHVIGSYQVYAMPVFDMIETVLVKKMRFAPSLTLRLIARSVYVAFTMFLGITFPFFGGLLSFFGGLAFAPTTYFLPCIMWLKVYKPKRFGLSWFINWICIVIGVLLLILGPIGGLRQIILSATTYKFYQ

SEQ ID NO: 18335 - DNA, 1545 bp, Zea mays subsp. mays
  misc_feature (1)..(1545): Ceres Seq. ID no. 12364513
gcacgagaccattacctagaacatcctaatcgaaaaactgaatctggttgtgaaccaaacacacctcagctgctctgtccaaacgcaccctgacttccgagttccgacccccactgctttgcttgctctgcactccgctaattccttccgcggcgatcccgagcaagaaacccagcagcgcggcggatctcgccgggcggcggccgccactatgatgagcggtagctcgcctccgccgccctcgcttcctgccgggagtggaggcttcttcaggggatacacaaagctgtgcaagggcctcgccgtcatattgctcattgtgcaccttgtagtccagttgtttccgtccgccgtcacctatctcgcgcttatccctggaagaacgatcccttttgcttggaacctgataactgcaggctatgtcgagcaaacaattccagggatggttgtcagcatcattggccttcttttatttgggaagttgttagaacctctatggggttcaaaagagttatcaaagttcatttttattgtcaacctttcaacttctgcttgtgttttcatgactgctattgtgctgtactatataactcagcaagagatctacctctatactcctttttctggattttatggggttctatcaggattgttggtgggcattaaacagcttttacctgatcaagagcttaatctttttgtgctaaaaattaaggcaaagtggattccatctcttgttgcattgatatccattcttggaagcatcttcatatacgactttatgtcttacctcccagttctgttgtttggcatgtatatgagttggatctacctccgttactttcaaaagagacttgagaccagcctgaaaggggatccaagtgaggagttctctttctcaagcttcttccctgaatttgtaagaccatttctcgacccaatagcatctgtattccataggttactttgtggaagatctgatgccaggggagaaacattagacacctcaccattacctggttcagattcgtttgaggcaaacaggaggagagagaggggtcaacgggcactggagcaaagattagctgagaagctggctgcagtcaggagttcagagggcggcacatcactggatgccgctgacaaagtttgagtcttctatgcaacgaacaacgagctgtgcggtgcagtttgtgatttcctggcaatttgtttctatgtgatttcctgaaggattgaacggacgcgaatgtttcatgtaccttcaccagccccagcctcaccgccgagtgcttcattttttttatggtttctcatcctaatcatcatcgggaaccaactaatgaagcactgcgccccattttccccatggtttttctgtaatcaactagaagtgatcaagtaccaagcagtgtacaatgcgatgctccgtaggacaagaactcatctatgttcggtttcctgtttttttccttccaaatggtgaggttgatacttgatagtagttgacacttgacaggaacaaaattatttttgtaacctttt

SEQ ID NO: 18336 - protein, 313 aa, Zea mays subsp. mays
  misc_feature (1)..(313): Ceres Seq. ID no. 12364514
MMSGSSPPPPSLPAGSGGFFRGYTKLCKGLAVILLIVHLVVQLFPSAVTYLALIPGRTIPFAWNLITAGYVEQTIPGMVVSIIGLLLFGKLLEPLWGSKELSKFIFIVNLSTSACVFMTAIVLYYITQQEIYLYTPFSGFYGVLSGLLVGIKQLLPDQELNLFVLKIKAKWIPSLVALISILGSIFIYDFMSYLPVLLFGMYMSWIYLRYFQKRLETSLKGDPSEEFSFSSFFPEFVRPFLDPIASVFHRLLCGRSDARGETLDTSPLPGSDSFEANRRRERGQRALEQRLAEKLAAVRSSEGGTSLDAADKV

SEQ ID NO: 18337 - protein, 312 aa, Zea mays subsp. mays
  misc_feature (1)..(312): Ceres Seq. ID no. 12364515
MSGSSPPPPSLPAGSGGFFRGYTKLCKGLAVILLIVHLVVQLFPSAVTYLALIPGRTIPFAWNLITAGYVEQTIPGMVVSIIGLLLFGKLLEPLWGSKELSKFIFIVNLSTSACVFMTAIVLYYITQQEIYLYTPFSGFYGVLSGLLVGIKQLLPDQELNLFVLKIKAKWIPSLVALISILGSIFIYDFMSYLPVLLFGMYMSWIYLRYFQKRLETSLKGDPSEEFSFSSFFPEFVRPFLDPIASVFHRLLCGRSDARGETLDTSPLPGSDSFEANRRRERGQRALEQRLAEKLAAVRSSEGGTSLDAADKV

SEQ ID NO: 18338 - protein, 236 aa, Zea mays subsp. mays
  misc_feature (1)..(236): Ceres Seq. ID no. 12364516
MVVSIIGLLLFGKLLEPLWGSKELSKFIFIVNLSTSACVFMTAIVLYYITQQEIYLYTPFSGFYGVLSGLLVGIKQLLPDQELNLFVLKIKAKWIPSLVALISILGSIFIYDFMSYLPVLLFGMYMSWIYLRYFQKRLETSLKGDPSEEFSFSSFFPEFVRPFLDPIASVFHRLLCGRSDARGETLDTSPLPGSDSFEANRRRERGQRALEQRLAEKLAAVRSSEGGTSLDAADKV

SEQ ID NO: 18339 - DNA, 1892 bp, Zea mays subsp. mays
  misc_feature (1)..(1892): Ceres Seq. ID no. 12364555
gcacgagaccattacctagaacatcctaatcgaaaaactcgttagtcgttactcccaacaccgggaatccatggagccggcctatgtcgtcaccctctccttcctcttcctcttcttgctccaccatctcctcggccgccaccgccgcaggaccaacggcaagaacaagagaacgcagctgccaccgagccctcccgccatcccggtcttgggtcacctccacctcttacggaagcctatccacgcggcgctcgctcgcctcgcggagcgctacgggccggtgttcttcctccggctcggctcgcggcaagccgtggtggtgtcgtccgcggcttgcgccacggagtgcttcaccgagaatgacgtctgcttcgcgaaccgcccgcggttccccacgctcctgctggtttccttcggcggcgccacgctcccaatgtgccgctacggcccgtactggcgcaacctccgccgcgtcgccacggtgcagctcctgtccgcgcaccgcgtcagctgcatgctccccgtcatatccgccgaggtgcgcgcaatggcgcggaggatgtaccaatccgccgccgccgcccccgccggcgccgcgagggtcgagctgaagcggaggctgttcgagctctcccacagcgccctgatggagaccatcgcgcgaaccaagacgtcccgtgccgtggcggacgacgacacggacatgtctccggaggcccaggaattcatgaaggcgctggacgtgttccttccgcttctcagcggggccaacgcgtgggactacctgccggtgctacggtggctcgacgtgttcggcgtgaggaacaagatcctgcgcgcggtgagcgcaagggacgcgttcctacggcggctcatcgacgcggagcggcggaggctggaggagggcggcgagaacaacgataagaagagcatgattggcgttctgctctcactgcagaagtcagaaccggaggtgtacacggataccatgatcatggctctgtgctcgagcatgttcgctgggggttctgaaacaacagcgacgacggcggaatgggcgatgtcgctgctgctaagccaccccgatgttctgaagaaagcgcaggcggagattgacgcgtccgtggggcactcccggctgctcggcgccgacgacctgccgcgcctcggctacctccactgcatcgtcagcgagaccctgcggctgtacccggtcgtgccgacgctggtcccgcacgagtccaccgccgactgcacggtcggcggccaccgtgtgccgagcgggacgatgctcctcgtcaacgtgtacgccatccacagggaccccgcgatatgggcggacccagccgcgttcaggccggagcggttcgaggacggccgtgccgacgggctgttcgtgatgccgttcgggatgggaaggcggaaatgccccggagaggccctcgcgctgcggacgctggggctggtcctggggacgttgatccagtgcttcgactgggacacggtcggcggcgccgaggtcgatatggccgaagggggcggaatcacgctcccgagggctgtccctctggaggccatctgcaagccgcgccatgctatgcttggcgtcctcaagggactgtgagcgccatgctatgccttgatacataagtaagctttttttctttagtaaagcagtcatcttgcgtctcaagcagttgcttgctttattgcttgaaactcactttcttcctggagtgtagccgccgcagtgtaagcgcgcggggttcaaatgttatttcattcacagccatcagccatgtatatgttgaactagcaatgtgaatgtgacccacgtaaaatcgcatgggtttactagttttttttttcagttatagcatttgtgttttttt

SEQ ID NO: 18340 - protein, 517 aa, Zea mays subsp. mays
  misc_feature (1)..(517): Ceres Seq. ID no. 12364556
MEPAYVVTLSFLFLFLLHHLLGRHRRRTNGKNKRTQLPPSPPAIPVLGHLHLLRKPIHAALARLAERYGPVFFLRLGSRQAVVVSSAACATECFTENDVCFANRPRFPTLLLVSFGGATLPMCRYGPYWRNLRRVATVQLLSAHRVSCMLPVISAEVRAMARRMYQSAAAAPAGAARVELKRRLFELSHSALMETIARTKTSRAVADDDTDMSPEAQEFMKALDVFLPLLSGANAWDYLPVLRWLDVFGVRNKILRAVSARDAFLRRLIDAERRRLEEGGENNDKKSMIGVLLSLQKSEPEVYTDTMIMALCSSMFAGGSETTATTAEWAMSLLLSHPDVLKKAQAEIDASVGHSRLLGADDLPRLGYLHCIVSETLRLYPVVPTLVPHESTADCTVGGHRVPSGTMLLVNVYAIHRDPAIWADPAAFRPERFEDGRADGLFVMPFGMGRRKCPGEALALRTLGLVLGTLIQCFDWDTVGGAEVDMAEGGGITLPRAVPLEAICKPRHAMLGVLKGL

SEQ ID NO: 18341 - protein, 396 aa, Zea mays subsp. mays
  misc_feature (1)..(396): Ceres Seq. ID no. 12364557
MCRYGPYWRNLRRVATVQLLSAHRVSCMLPVISAEVRAMARRMYQSAAAAPAGAARVELKRRLFELSHSALMETIARTKTSRAVADDDTDMSPEAQEFMKALDVFLPLLSGANAWDYLPVLRWLDVFGVRNKILRAVSARDAFLRRLIDAERRRLEEGGENNDKKSMIGVLLSLQKSEPEVYTDTMIMALCSSMFAGGSETTATTAEWAMSLLLSHPDVLKKAQAEIDASVGHSRLLGADDLPRLGYLHCIVSETLRLYPVVPTLVPHESTADCTVGGHRVPSGTMLLVNVYAIHRDPAIWADPAAFRPERFEDGRADGLFVMPFGMGRRKCPGEALALRTLGLVLGTLIQCFDWDTVGGAEVDMAEGGGITLPRAVPLEAICKPRHAMLGVLKGL

SEQ ID NO: 18342 - protein, 369 aa, Zea mays subsp. mays
  misc_feature (1)..(369): Ceres Seq. ID no. 12364558
MLPVISAEVRAMARRMYQSAAAAPAGAARVELKRRLFELSHSALMETIARTKTSRAVADDDTDMSPEAQEFMKALDVFLPLLSGANAWDYLPVLRWLDVFGVRNKILRAVSARDAFLRRLIDAERRRLEEGGENNDKKSMIGVLLSLQKSEPEVYTDTMIMALCSSMFAGGSETTATTAEWAMSLLLSHPDVLKKAQAEIDASVGHSRLLGADDLPRLGYLHCIVSETLRLYPVVPTLVPHESTADCTVGGHRVPSGTMLLVNVYAIHRDPAIWADPAAFRPERFEDGRADGLFVMPFGMGRRKCPGEALALRTLGLVLGTLIQCFDWDTVGGAEVDMAEGGGITLPRAVPLEAICKPRHAMLGVLKGL

SEQ ID NO: 18343 - DNA, 1649 bp, Zea mays subsp. mays
  misc_feature (1)..(1649): Ceres Seq. ID no. 12364563
gcacgagaccattacctagaacatcctaatcaaaaagacttgagttcaccggtactatttatgtaccgtacataaagtaaagtttaacgaaaagaaaagcacgggagacgggacgggaccgctgggcgcgccgggccgcgccgagccgagcgagtcgtccactctccactccgcccgccacgcccacgccccgtcctcgcttccgtctcccacaatccaaggacaccgagcagcaggcggcggaagcaacccgctgtgggggcggcgtggagtccagttttgctcggctcgtcgctgggatccgccggccggcgaagcggggaagggaagaggagcggagattggagagtacaagcaggggaagatgtcagacgcgctgatcaacggcctcgccggcgccggcggcgggatcatcgcccagctccttacctacccgctccagaccgtgaacgcgcggcaacagacggagcgcgacccctccaagccggcgttcaaggacggcgccgctcgccagttgtatctggttgtgaagaacgaggggtgggagcgcctgtatggcgggcttatgccctctctcgtcggcaccgctgcctcccagggtgtctactactacttctaccaaatattccggaacagggccgaggcaagggcccttgagcgatccaggagagggcttggcgatgggtctgtcggcatgctccagtctctcactgtcgctgccctgtctggctgtgtcaatgtactgctcacaaacccgatttgggttgttgttacacgaatgcaaactcacagaaaggcaaacaaacagcaaagacctcagggtttgaattgtgctcttgataagccccttgaagctgctacagctgaaaacgctccatacaaaacgattgatgtttttcaggaactctacaaagaatctggagttcttggcttctggaaaggggtaattccggctcttatcatggttagcaatcccgcaattcagttcatgctatatgagactcttctgaagaaattgaagaagagacgagcctctaattttaagggagctgatggattgactgctcttgaaatttttcttcttggtgctgttgcgaaacttggtgcaaccgtcgttacgtatccccttctagttgttaaggcaagacttcaggcaaagcacatgattaacgatgacaagaggcatcgctacaaaggtacacttgatgcgttcacaaagatggtacgatatgagggtctgtcagggatgtacaaaggaatgggcacaaaaattgtgcaaagtgtttttgcttctgctttgctttttatgattaaggaggagctggtgaagggtgctcgactattggtaactggtaacactagtctggttaagaaactaccatcaaagtcatcaagatgaactacgggcatcgcaagcgttagtatatcatcctaaaaagccatttattatccgcataaaccgtaaacaaggtcgacaagctatagagctcgcctctgctttggatatgtcaactgtaggttacacaatagccagtatgattcacgtagggaccaaagactatgttggatagatatttgtatcattcatgtagaatgtatcgtggaagatcgaaacagaagaaaataaataagtatgataatttgaactc

SEQ ID NO: 18344 - protein, 344 aa, Zea mays subsp. mays
  misc_feature (1)..(344): Ceres Seq. ID no. 12364564
MSDALINGLAGAGGGIIAQLLTYPLQTVNARQQTERDPSKPAFKDGAARQLYLVVKNEGWERLYGGLMPSLVGTAASQGVYYYFYQIFRNRAEARALERSRRGLGDGSVGMLQSLTVAALSGCVNVLLTNPIWVVVTRMQTHRKANKQQRPQGLNCALDKPLEAATAENAPYKTIDVFQELYKESGVLGFWKGVIPALIMVSNPAIQFMLYETLLKKLKKRRASNFKGADGLTALEIFLLGAVAKLGATVVTYPLLVVKARLQAKHMINDDKRHRYKGTLDAFTKMVRYEGLSGMYKGMGTKIVQSVFASALLFMIKEELVKGARLLVTGNTSLVKKLPSKSSR

SEQ ID NO: 18345 - protein, 277 aa, Zea mays subsp. mays
  misc_feature (1)..(277): Ceres Seq. ID no. 12364565
MPSLVGTAASQGVYYYFYQIFRNRAEARALERSRRGLGDGSVGMLQSLTVAALSGCVNVLLTNPIWVVVTRMQTHRKANKQQRPQGLNCALDKPLEAATAENAPYKTIDVFQELYKESGVLGFWKGVIPALIMVSNPAIQFMLYETLLKKLKKRRASNFKGADGLTALEIFLLGAVAKLGATVVTYPLLVVKARLQAKHMINDDKRHRYKGTLDAFTKMVRYEGLSGMYKGMGTKIVQSVFASALLFMIKEELVKGARLLVTGNTSLVKKLPSKSSR

SEQ ID NO: 18346 - protein, 234 aa, Zea mays subsp. mays
  misc_feature (1)..(234): Ceres Seq. ID no. 12364566
MLQSLTVAALSGCVNVLLTNPIWVVVTRMQTHRKANKQQRPQGLNCALDKPLEAATAENAPYKTIDVFQELYKESGVLGFWKGVIPALIMVSNPAIQFMLYETLLKKLKKRRASNFKGADGLTALEIFLLGAVAKLGATVVTYPLLVVKARLQAKHMINDDKRHRYKGTLDAFTKMVRYEGLSGMYKGMGTKIVQSVFASALLFMIKEELVKGARLLVTGNTSLVKKLPSKSSR

SEQ ID NO: 18347 - DNA, 1239 bp, Zea mays subsp. mays
  misc_feature (1)..(1239): Ceres Seq. ID no. 12364583
gcacgagaccattacctagaacatcctaatcgaaaagtcctcctcgttgttttgttccgtttccccccttgcctcgctcgtcgcgtacagctggacgcctcctttctcgctgcgggctgttgccttgcctccgtcccctcccctcgtcgcctccgactccacctcccctccccggtctctgagagagggagcccggacccggagaccgccagcaagcgcgaggcagaggaggagcatggcggccccgccgtcgaggtcgcggggcgactgaccacctgattaagctcctgctcatcggcgacagcggagttggaaagagttgcttgctgctgcggttctctgatgacacattcacgacaagttttatcaccaccatcggcattgatttcaaggttaggacggtcgagctcgatggaaagcgtgtaaaattacaaatttgggacactgctggtcaagaacgtttccgaacaattaccactgcttactacagaggagctatgggcattctgcttgtatacgatgtcacagacgaatcgtccttcgataacattaggaactggattcgcaacatagagcagcacgcatctgataatgtcaacaagatcttggtgggcaacaaggtcgatatggatgcgaagcgggtggtctccacagctcaaggtcagaagctcgcagatgaatacgggatcaagtttttcgagacgagtgcgaaaacgaaccgaaatgtggagcaggtattcttcgccatggcaagggacgtgaagcaaaggctcaccgagaccgttgccgctgcggctgagcccccgaccattcagattagcaggccagaccccgaccaggctgacgcagcctcctcgcggcggtggtcgtcgtcctgctgtaacacctgatctggcgactgccgtggcgaaatcaagcagcgtgaatcttgatgcgcgtgactggactgctaggttactgattgtcgcctgtgttcactttcattccggtgccgtgccaagccaagccgggatgtataaatttcgctgtctagtattcacctcaatcaatgtgttaactcccgctgcttcgcacgtcacgtcgtttgtttgttgagagcaaaacgtgtgtggggcagataaaaaaaaaagccctggtgggtttgctcctgtcacgtactaaacagaacgtgtctgatgattgtgtcgacggtggaacttggaagcgtgcttgtctcactattgttccgtgttttcgtcc

SEQ ID NO: 18348 - protein, 130 aa, Zea mays subsp. mays
  misc_feature (1)..(130): Ceres Seq. ID no. 12364584
MGILLVYDVTDESSFDNIRNWIRNIEQHASDNVNKILVGNKVDMDAKRVVSTAQGQKLADEYGIKFFETSAKTNRNVEQVFFAMARDVKQRLTETVAAAAEPPTIQISRPDPDQADAASSRRWSSSCCNT

SEQ ID NO: 18349 - protein, 92 aa, Zea mays subsp. mays
  misc_feature (1)..(92): Ceres Seq. ID no. 12364585
ARDHYLEHPNRKVLLVVLFRFPPCLARRVQLDASFLAAGCCLASVPSPRRLRLHLPSPVSERGSPDPETASKREAEEEHGGPAVEVAGRLTT

SEQ ID NO: 18350 - protein, 87 aa, Zea mays subsp. mays
  misc_feature (1)..(87): Ceres Seq. ID no. 12364586
MDAKRVVSTAQGQKLADEYGIKFFETSAKTNRNVEQVFFAMARDVKQRLTETVAAAAEPPTIQISRPDPDQADAASSRRWSSSCCNT

SEQ ID NO: 18351 - DNA, 1156 bp, Zea mays subsp. mays
  misc_feature (1)..(1156): Ceres Seq. ID no. 12364587
gcattcagcgtgcgaccgaagctagctagcagttattcttgctttgcattaattattgcgagatcgatgacgatgtccattgttgctgccgtgctgctgttgctgctcgtcgtacatccacgggcggcagcgtcgcagccttctccgggctacttcccgagctccacggtgaggcccatggccttctcggatggatacgacaacctgtgggggccgcagcaccagacgctgtcgcaggacaggatggcgctcacgctcttgatggaccgcacctcaggcagcgggttcaagtccaagcgctcgtaccggaacggctacttcggcgtctccatcaaggtgcagccgggctacaccgccggcgtcaacaccgccttctacctgtccaacaacgagctgtacccggggaggcacgacgagatcgacatggagctgctgggcaccgtgccgggggagccctacacgctgcagaccaacgtgtacgtgcggggcaccggcgacggcgcgcgcctcgtgggccgggagatgcgcttccacctctggttcgacccggccgccgacttccaccactacgccatcctctggaaccccgaccagatcgtcttcctcgtcgacgacgtccccatcaggcgctacgccgccgccagtgcgccgttcttccccgaccgccagatgtgggcgtacggctccatctgggacgcctccgactgggccaccgacggcggccgctacagggccgactaccgctaccagcccttcctggcgggattccgggggttcaggaccgccggatgcgaggacgcccagtgccgtcccgtgccggcgtcccccgccggcgccggactcagcgtgcagcagcgggacgccatgcgctgggcgcagcagacctccatggtctactactactgccaggattacaccaaggatcgctccttgtacccagagtgctcgctcgctagctagcctagctaccactaccagagcaagagcatgcatggaggaggcgtgcgagtgaagaagcgccgccctacgtacgtaccgttctaaaattgtatgtacaattaagtctccatccacatccatatatacatatgtaatgtataattaagtccattattaatttaatcatcaaaaaatggaacatgcctatatatttcct

SEQ ID NO: 18352 - protein, 319 aa, Zea mays subsp. mays
  misc_feature (1)..(319): Ceres Seq. ID no. 12364588
AFSVRPKLASSYSCFALIIARSMTMSIVAAVLLLLLVVHPRAAASQPSPGYFPSSTVRPMAFSDGYDNLWGPQHQTLSQDRMALTLLMDRTSGSGFKSKRSYRNGYFGVSIKVQPGYTAGVNTAFYLSNNELYPGRHDEIDMELLGTVPGEPYTLQTNVYVRGTGDGARLVGREMRFHLWFDPAADFHHYAILWNPDQIVFLVDDVPIRRYAAASAPFFPDRQMWAYGSIWDASDWATDGGRYRADYRYQPFLAGFRGFRTAGCEDAQCRPVPASPAGAGLSVQQRDAMRWAQQTSMVYYYCQDYTKDRSLYPECSLAS

SEQ ID NO: 18353 - protein, 297 aa, Zea mays subsp. mays
  misc_feature (1)..(297): Ceres Seq. ID no. 12364589
MTMSIVAAVLLLLLVVHPRAAASQPSPGYFPSSTVRPMAFSDGYDNLWGPQHQTLSQDRMALTLLMDRTSGSGFKSKRSYRNGYFGVSIKVQPGYTAGVNTAFYLSNNELYPGRHDEIDMELLGTVPGEPYTLQTNVYVRGTGDGARLVGREMRFHLWFDPAADFHHYAILWNPDQIVFLVDDVPIRRYAAASAPFFPDRQMWAYGSIWDASDWATDGGRYRADYRYQPFLAGFRGFRTAGCEDAQCRPVPASPAGAGLSVQQRDAMRWAQQTSMVYYYCQDYTKDRSLYPECSLAS

SEQ ID NO: 18354 - protein, 295 aa, Zea mays subsp. mays
  misc_feature (1)..(295): Ceres Seq. ID no. 12364590
MSIVAAVLLLLLVVHPRAAASQPSPGYFPSSTVRPMAFSDGYDNLWGPQHQTLSQDRMALTLLMDRTSGSGFKSKRSYRNGYFGVSIKVQPGYTAGVNTAFYLSNNELYPGRHDEIDMELLGTVPGEPYTLQTNVYVRGTGDGARLVGREMRFHLWFDPAADFHHYAILWNPDQIVFLVDDVPIRRYAAASAPFFPDRQMWAYGSIWDASDWATDGGRYRADYRYQPFLAGFRGFRTAGCEDAQCRPVPASPAGAGLSVQQRDAMRWAQQTSMVYYYCQDYTKDRSLYPECSLAS

SEQ ID NO: 18355 - DNA, 1284 bp, Zea mays subsp. mays
  misc_feature (1)..(1284): Ceres Seq. ID no. 12364595
aaacctcattccatgctctcttcattggttcatacttcatagctagtttgcctcccaaaaacacctgccctcgtgcgtggcaggagcacgggcacgatgatcagcacagcgcacagccggcagcagcaccatgccttcgagaagagccctggcaacagccacatgaagagcatcgacaggaagctgcagcaggccatgagccaggcggccagcaagtacatgcagaggatctaccctctaggcatgcagaggagcagctccagcctcacattgtcgtcgctctcgctgtcgcagaactccaacgactcctccatcagcagctccaactccagctgggagcctaaggtgccgctgctctacggcggcaccttcagcccctggggcgacgtcatggtgtctcgggagatgaggcgggaggacgatgacaaggtcagtgaccatgacgtcgaaggaggcgaggaggacttggactgcagtgagccggggagcctgcgtaggtgcagctggatcaccaagaacagtgacgaggcgtacgtccagttccacgacgagtgctggggcgtccctgtgtacagcgacaaccggctgttcgagcttctgtcgctgtcagggatgctgatcgaccacaactggacggagatactgaagcgtcgggacatgtacagggaggcgttcgccgacttcgaccccagcgcggtggcgcggatggaggaggaggacgtggcggagatcagcggcgacagggagctgaggatcgccgagtgcagggtccggtgcatcgtggagaacgccaggtgcatccagagggtggccagggagttcggctccttcagcggctacatgtggggccacgtgaaccaccggccggtggtgggcaagtaccgccaccacaagtacatcccgttccggacgcccaagtcggaggcggtgagcaaggacctcgtccgccggggcttccgcctcgtcggccccgtcatcgtctactctttcatgcaggccgccggcatggccatcgaccacctcgtcgactgcttccgcttccacgactgcgtccgcctcgccgagcgctcctggggcatcaccaacgtcgccgcgtagccagccggcccctcaatatctgtgcatgcattcctctccaactttttcacaccttcttcttggtgttgttattttttttttgtttggagatcgaaattgtgtgtgtaattacgtagagtatgtagtactctactaagttatgatgtaatacttctattaactctttgccaatgaaaagtagtactg

SEQ ID NO: 18356 - protein, 333 aa, Zea mays subsp. mays
  misc_feature (1)..(333): Ceres Seq. ID no. 12364596
MISTAHSRQQHHAFEKSPGNSHMKSIDRKLQQAMSQAASKYMQRIYPLGMQRSSSSLTLSSLSLSQNSNDSSISSSNSSWEPKVPLLYGGTFSPWGDVMVSREMRREDDDKVSDHDVEGGEEDLDCSEPGSLRRCSWITKNSDEAYVQFHDECWGVPVYSDNRLFELLSLSGMLIDHNWTEILKRRDMYREAFADFDPSAVARMEEEDVAEISGDRELRIAECRVRCIVENARCIQRVAREFGSFSGYMWGHVNHRPVVGKYRHHKYIPFRTPKSEAVSKDLVRRGFRLVGPVIVYSFMQAAGMAIDHLVDCFRFHDCVRLAERSWGITNVAA

SEQ ID NO: 18357 - protein, 311 aa, Zea mays subsp. mays
  misc_feature (1)..(311): Ceres Seq. ID no. 12364597
MKSIDRKLQQAMSQAASKYMQRIYPLGMQRSSSSLTLSSLSLSQNSNDSSISSSNSSWEPKVPLLYGGTFSPWGDVMVSREMRREDDDKVSDHDVEGGEEDLDCSEPGSLRRCSWITKNSDEAYVQFHDECWGVPVYSDNRLFELLSLSGMLIDHNWTEILKRRDMYREAFADFDPSAVARMEEEDVAEISGDRELRIAECRVRCIVENARCIQRVAREFGSFSGYMWGHVNHRPVVGKYRHHKYIPFRTPKSEAVSKDLVRRGFRLVGPVIVYSFMQAAGMAIDHLVDCFRFHDCVRLAERSWGITNVAA

SEQ ID NO: 18358 - protein, 300 aa, Zea mays subsp. mays
  misc_feature (1)..(300): Ceres Seq. ID no. 12364598
MSQAASKYMQRIYPLGMQRSSSSLTLSSLSLSQNSNDSSISSSNSSWEPKVPLLYGGTFSPWGDVMVSREMRREDDDKVSDHDVEGGEEDLDCSEPGSLRRCSWITKNSDEAYVQFHDECWGVPVYSDNRLFELLSLSGMLIDHNWTEILKRRDMYREAFADFDPSAVARMEEEDVAEISGDRELRIAECRVRCIVENARCIQRVAREFGSFSGYMWGHVNHRPVVGKYRHHKYIPFRTPKSEAVSKDLVRRGFRLVGPVIVYSFMQAAGMAIDHLVDCFRFHDCVRLAERSWGITNVAA

SEQ ID NO: 18359 - DNA, 767 bp, Zea mays subsp. mays
  misc_feature (1)..(767): Ceres Seq. ID no. 12364605
aactacgcctctaaccctaggccacccggccatgcccaggctcccacccgccaggccgccacccaccccactcggccactcccccaggcggcgaggcgtggcgcccatcccccaacccctgttcgcaggtcgcagcagccgccagcacccagatcccagagtcccagaccatgccgccactgcgccttcttattttgtccgccgaacaagccagtagtggctacatcgcgaagggcggcaaggcagatctagggcgatcatggcttacgtcgagagaggtgttggaaggtcttgtttatctgcatgaacaaggtgtcattcatagagatatcaagggcgcaaatatactgagtaccaaagagggaatgtaccatgaatcacatgaatttggtggtcatatgttcaacaccctcctagagggtgttctcgacaaagaaagcttgtaccttaaaacaggaggatacaagaagctgaagtggttgtctgaaggcttttgaactgcttgaagcattagtgtagctttggtgcttttgtgactgatcaactctggagcagctagagtgatgtagttgtgggcttttgaacaatagctggagtgatatgaaacattagtgatgtagttgtgggcttttgaactgcttcaagctggagtgatgtcactgtggtgcttttgtgattgatcatctctggagcttttgtgaatgatctagctagctatctgtaaatgatctagttgtgaatgatattataattgtgatgcttttgtg

SEQ ID NO: 18360 - protein, 108 aa, Zea mays subsp. mays
  misc_feature (1)..(108): Ceres Seq. ID no. 12364606
MPPLRLLILSAEQASSGYIAKGGKADLGRSWLTSREVLEGLVYLHEQGVIHRDIKGANILSTKEGMYHESHEFGGHMFNTLLEGVLDKESLYLKTGGYKKLKWLSEGF

SEQ ID NO: 18361 - protein, 83 aa, Zea mays subsp. mays
  misc_feature (1)..(83): Ceres Seq. ID no. 12364607
NYASNPRPPGHAQAPTRQAATHPTRPLPQAARRGAHPPTPVRRSQQPPAPRSQSPRPCRHCAFLFCPPNKPVVATSRRAARQI

SEQ ID NO: 18362 - protein, 71 aa, Zea mays subsp. mays
  misc_feature (1)..(71): Ceres Seq. ID no. 12364608
TTPLTLGHPAMPRLPPARPPPTPLGHSPRRRGVAPIPQPLFAGRSSRQHPDPRVPDHAATAPSYFVRRTSQ

SEQ ID NO: 18363 - DNA, 1789 bp, Zea mays subsp. mays
  misc_feature (1)..(1789): Ceres Seq. ID no. 12364617
gcacgagaccattacctagaacatcctaatcgaaaatcgccacccaaaagccaccgcgatcccgtgcttccttctcgcacctgcggatctactctccgcacctgcggatctaccccccggcgaaacaagcgccccgacgcctcagggaatgcggagcgatgaggcggcgctcaggcactgacgtcgccggtcagcgcgagctgcgcggcgaccgaacctgccatcgcaagcacgtcgaggacgggtagactcgtccatccttccttcctcctgttagtcgtcgtagggtagtttgcactttgcagatagctagctagtagttaggggatcaggcatgggtgagggcgaggcggaggtgaagggcggggtgctgcagggccgctacgagctcggccgcgtgctgggtcacggcaacttcgggcgcgtccacgcggcgcgggacctgcgcaccgggcgggccgtggcggtgaaggtgctcgacaaggacaagatgctgcgcacgggcatgatggagcagatcaagcgcgagatcgccgtcatgaagcgcgtgtcccaccccaacatcgtggagctccacgaggtgatggccacgcgctccaagatctacctcgcgctggagctcgtccgcggaggggagctcttcgcgcggatcgtgcgcgccgggcgcgtcaaggaggacgtggcgcggcgctacttccggcagctcatacacgccgtggacttctgccacgcgcggggcgtgtaccaccgcgacctgaagctcgagaacctcctcctggacgacgcggggaacctcaaggtcgtcgactttggcctcagcgcgctggccgaccacgcgcgcagcgacgggctgctgcacacgctctgcggcacgcccgggtacgtcgcgccggaggtgttccggaacaagggctacgacggcgccaaggctgacatctggtcgtgcggcgtcatcctctacgtcctcctcgcagggtcgctgccgttcccggacgacaacgttgccgccatgttccggaagatgagccgcggcgactaccggtgcccgccgtggctgtccacggaggcgcgcaggctcatccccaagctgctcgaccccgaccccgacacccgcatcaccatcgcccagctcgtcgagacgccgtggttcaacaagccgtccgtctcgaggtccgtcagagccgccgccggcgcaaccgagccgccggccgagcctgcctcctccgcaaaggacggcggcgacaaggacgagccaccggagacgatgaacgcgttccacctgatctccctctccgcggggttcgacctctcaccgctgttcgacgtggaaggcggtccggcgagggggccccgggagggcggcatgcggttcgcgacgcgggagcccgcgagcggcgtcgtctcccgtctcgaggaggtggccgcccgcggcggcgggcggatgcgggtgaccaagagcggcgcccgcggcgttcggctcgagggcgcggagcgcgggggccgcaagggccggctagccgtggcggccgacatcttctgcgtggcgccgtcggtgctcgtcgtcgacgtgaagaaggacggcggcgactccctcgagtaccgctccttctgcagcgaggagctccggccggcgctcaaagacatcgtctgggcggccgacccccagcccgccgtcgtgtgacgcccgtgctgccgcctgcccgctcattgtttctggatcgtagtggtgccatagtttagtcagtgtcagttccatttccaaagtgattgcgtcactgttctcgattcg

SEQ ID NO: 18364 - protein, 448 aa, Zea mays subsp. mays
  misc_feature (1)..(448): Ceres Seq. ID no. 12364618
MGEGEAEVKGGVLQGRYELGRVLGHGNFGRVHAARDLRTGRAVAVKVLDKDKMLRTGMMEQIKREIAVMKRVSHPNIVELHEVMATRSKIYLALELVRGGELFARIVRAGRVKEDVARRYFRQLIHAVDFCHARGVYHRDLKLENLLLDDAGNLKVVDFGLSALADHARSDGLLHTLCGTPGYVAPEVFRNKGYDGAKADIWSCGVILYVLLAGSLPFPDDNVAAMFRKMSRGDYRCPPWLSTEARRLIPKLLDPDPDTRITIAQLVETPWFNKPSVSRSVRAAAGATEPPAEPASSAKDGGDKDEPPETMNAFHLISLSAGFDLSPLFDVEGGPARGPREGGMRFATREPASGVVSRLEEVAARGGGRMRVTKSGARGVRLEGAERGGRKGRLAVAADIFCVAPSVLVVDVKKDGGDSLEYRSFCSEELRPALKDIVWAADPQPAVV

SEQ ID NO: 18365 - protein, 396 aa, Zea mays subsp. mays
  misc_feature (1)..(396): Ceres Seq. ID no. 12364619
MLRTGMMEQIKREIAVMKRVSHPNIVELHEVMATRSKIYLALELVRGGELFARIVRAGRVKEDVARRYFRQLIHAVDFCHARGVYHRDLKLENLLLDDAGNLKVVDFGLSALADHARSDGLLHTLCGTPGYVAPEVFRNKGYDGAKADIWSCGVILYVLLAGSLPFPDDNVAAMFRKMSRGDYRCPPWLSTEARRLIPKLLDPDPDTRITIAQLVETPWFNKPSVSRSVRAAAGATEPPAEPASSAKDGGDKDEPPETMNAFHLISLSAGFDLSPLFDVEGGPARGPREGGMRFATREPASGVVSRLEEVAARGGGRMRVTKSGARGVRLEGAERGGRKGRLAVAADIFCVAPSVLVVDVKKDGGDSLEYRSFCSEELRPALKDIVWAADPQPAVV

SEQ ID NO: 18366 - protein, 391 aa, Zea mays subsp. mays
  misc_feature (1)..(391): Ceres Seq. ID no. 12364620
MMEQIKREIAVMKRVSHPNIVELHEVMATRSKIYLALELVRGGELFARIVRAGRVKEDVARRYFRQLIHAVDFCHARGVYHRDLKLENLLLDDAGNLKVVDFGLSALADHARSDGLLHTLCGTPGYVAPEVFRNKGYDGAKADIWSCGVILYVLLAGSLPFPDDNVAAMFRKMSRGDYRCPPWLSTEARRLIPKLLDPDPDTRITIAQLVETPWFNKPSVSRSVRAAAGATEPPAEPASSAKDGGDKDEPPETMNAFHLISLSAGFDLSPLFDVEGGPARGPREGGMRFATREPASGVVSRLEEVAARGGGRMRVTKSGARGVRLEGAERGGRKGRLAVAADIFCVAPSVLVVDVKKDGGDSLEYRSFCSEELRPALKDIVWAADPQPAVV

SEQ ID NO: 18367 - DNA, 1035 bp, Zea mays subsp. mays
  misc_feature (1)..(1035): Ceres Seq. ID no. 12364643
tacctacaacatcctaatcaaaagagagagaaagttctcgagctagacgagcgccgtgcgaggagagaagcgagatgagcggtgaggcggcggccgtgggcggaggcgaaggagaggcgaatggcatcccgccgaacgtcaccatctatatcaacaacctcaacgagaagatcaagctcgaagaacttaagaagtccctaacagccgttttttcccagtttgggaaaattcttgatgtgcttgctttcaagactttgaagcataaaggtcaagcttgggttgtcttcgaagatgtcgcatcagctactgaggctctgaagaggatgcagggctttcccttctatgacaaaactatgagaattcaatatgccaagaccaaatcagatattatagcaaaggctgatggcacctttgtacctcgagaaagaagaaagaggactgatgaaaaatctgaaaagaagcagaagcgcgagcatcaccatgatgctggtgctagtcaaattggcatgggtgtaactgcttaccctggtgtttatggggctccacagctcacccagatacctatagcaggaggacaaagggtcatgatgccagagattatcgtaccaaacaacatcttgtttgtccaaaacttgccacacgagacgacgcccatgatgctccagatgctcttctgccagtaccctggcttcaaggaggttcggatgatcgaggcgaagcctgggattgctttcgtggagtatggagacgagacccaggtcactgctgccatgaacaaccttcaaagcttcaaaattacaaaagaaaaccagatggtcatcacatatgcgaagaagtaatgagctcccgagcaatgtttacctgatgtgtgagatgttgtattccgagttttacacaactggtaaatttccttcatgtgttaggtagacagcatcctgaacaacctgttaattgtacccactgggctgcagctatgtgcacttcaggaacggagatgaaatgcaaactgttattatttggtctgctcttgtattc

SEQ ID NO: 18368 - protein, 254 aa, Zea mays subsp. mays
  misc_feature (1)..(254): Ceres Seq. ID no. 12364644
MSGEAAAVGGGEGEANGIPPNVTIYINNLNEKIKLEELKKSLTAVFSQFGKILDVLAFKTLKHKGQAWVVFEDVASATEALKRMQGFPFYDKTMRIQYAKTKSDIIAKADGTFVPRERRKRTDEKSEKKQKREHHHDAGASQIGMGVTAYPGVYGAPQLTQIPIAGGQRVMMPEIIVPNNILFVQNLPHETTPMMLQMLFCQYPGFKEVRMIEAKPGIAFVEYGDETQVTAAMNNLQSFKITKENQMVITYAKK

SEQ ID NO: 18369 - protein, 171 aa, Zea mays subsp. mays
  misc_feature (1)..(171): Ceres Seq. ID no. 12364645
MQGFPFYDKTMRIQYAKTKSDIIAKADGTFVPRERRKRTDEKSEKKQKREHHHDAGASQIGMGVTAYPGVYGAPQLTQIPIAGGQRVMMPEIIVPNNILFVQNLPHETTPMMLQMLFCQYPGFKEVRMIEAKPGIAFVEYGDETQVTAAMNNLQSFKITKENQMVITYAKK

SEQ ID NO: 18370 - protein, 161 aa, Zea mays subsp. mays
  misc_feature (1)..(161): Ceres Seq. ID no. 12364646
MRIQYAKTKSDIIAKADGTFVPRERRKRTDEKSEKKQKREHHHDAGASQIGMGVTAYPGVYGAPQLTQIPIAGGQRVMMPEIIVPNNILFVQNLPHETTPMMLQMLFCQYPGFKEVRMIEAKPGIAFVEYGDETQVTAAMNNLQSFKITKENQMVITYAKK

SEQ ID NO: 18371 - DNA, 1184 bp, Zea mays subsp. mays
  misc_feature (1)..(1184): Ceres Seq. ID no. 12364672
gcacgagaccattacctagaacatcctaatcgaaaactccacctccaccaatccaaccaaccattggccattgcgtagaaaagattactttaagaatgggctgctccaagcgcattgcactggtacttgtcgcggctcttgtagcgctccacgtccatgtcccgatggccaccgcagccaactccaacctcttccgggactacatcggcgccatcttcaacggcgtcaagttcaccgacgtccccatcaacccgagggtccgcttcgactacatcctcgccttcgtgatcgactacaccaccgcgacggagccgcccaccccgaccaacggccagttcaacatcttctggcaggactcggtgctgacggcgtccgcggtggccgccatcaagcagagcaacccgaacgtgcgggtggccgtcagcatcggcggcgccaccgtgaacgaccgccctgtgttcttcaacatcacctccgtcgactcctgggtccagaacgccgtctcctccctgaccaccatcatccagaagtacaacctggacggcatcgacatcgactacgagcagttccaggccgacccggccaccttcgccgagtgcatcggccgcctggtcaccacgctcaagagcaacggggtgatcagcttcgcgtccatcgccccgttcgacaacgccgacgtgcagcgccattaccaggccctgtgggcgacctacggaagcgtcatagactacgtcaacttccagttctacgcctacggcgccagcacgaccgaggcgcagtacgtcgacttcttcaaccagcagcttgtcaactaccccggcggcaacatcctggccagcttcaccacggcgcccaccaccacgtcggtgcccatcaacacgtcgctcagcgcttgccagacattgcagtcgcagggcaagctctacgggatcttcatctgggcagcccgaccattccaggagccaaggcttcaagtacgacacacaagcacaagcactgctcgccaacgcccctgctggctactagtagatggctaccataccttcaatgcgtttaagttggatttggatttcattttcaggtgaacaaataatattattatgtatggaataaggctgtcattggaatataatacggggctatttctatattcctgtgttctctataaaaattaaacaattctt

SEQ ID NO: 18372 - protein, 329 aa, Zea mays subsp. mays
  misc_feature (1)..(329): Ceres Seq. ID no. 12364673
MGCSKRIALVLVAALVALHVHVPMATAANSNLFRDYIGAIFNGVKFTDVPINPRVRFDYILAFVIDYTTATEPPTPTNGQFNIFWQDSVLTASAVAAIKQSNPNVRVAVSIGGATVNDRPVFFNITSVDSWVQNAVSSLTTIIQKYNLDGIDIDYEQFQADPATFAECIGRLVTTLKSNGVISFASIAPFDNADVQRHYQALWATYGSVIDYVNFQFYAYGASTTEAQYVDFFNQQLVNYPGGNILASFTTAPTTTSVPINTSLSACQTLQSQGKLYGIFIWAARPFQEPRLQVRHTSTSTARQRPCWLLVDGYHTFNAFKLDLDFIFR

SEQ ID NO: 18373 - protein, 306 aa, Zea mays subsp. mays
  misc_feature (1)..(306): Ceres Seq. ID no. 12364674
MATAANSNLFRDYIGAIFNGVKFTDVPINPRVRFDYILAFVIDYTTATEPPTPTNGQFNIFWQDSVLTASAVAAIKQSNPNVRVAVSIGGATVNDRPVFFNITSVDSWVQNAVSSLTTIIQKYNLDGIDIDYEQFQADPATFAECIGRLVTTLKSNGVISFASIAPFDNADVQRHYQALWATYGSVIDYVNFQFYAYGASTTEAQYVDFFNQQLVNYPGGNILASFTTAPTTTSVPINTSLSACQTLQSQGKLYGIFIWAARPFQEPRLQVRHTSTSTARQRPCWLLVDGYHTFNAFKLDLDFIFR

SEQ ID NO: 18374 - DNA, 1181 bp, Zea mays subsp. mays
  misc_feature (1)..(1181): Ceres Seq. ID no. 12364890
attgttcactgggaggaccaactagataattcatcatggctatcatactttacaagcagccaatgccgatccttatggacatatgttacaccaccaagaggcaagagcctctcgctcgctaccaatgcgcacgtcacaccgtggtctccttcgccgccgccgccgcgtcgtcatccacccacttggcgtgccacagcgccgaccgcctccggggcagcatggacccgacacagctggcgagagtggcgcggaacttggcgtccccggggcggagcatggcgggcagtggcagcctgctgaccccgcgcgcggcgcaggcctcgtaacgcggcacgatgcgcgtggccagcgcgtangagaagtactcggggaagtcgtacagctcgtcggcgcggcgggccatggcgcccaggaggtagtccgcctnnagccggntgtttccctccacgccgtacccgaagagcgcggggaagcggcgcgccatggagcgggcggcgcgcgccggcaggcccagcgactcgaggaactcgagccgcggcagcagcttgccctccacggagaaggatagcaggtcggcgcggcggtgcaggtcgggcacgccgagcgcgcgcaggaagtagagcgtgggccgcagccgcgccgccacgggagagacgagcaggcgcgggcgccgccggagcacgcgcgggaggtcggcctcggcgacgcccgcctcctccgtgaggaaccggagcgcggcctcgacggcctccgcggacacggacagcagctccgggcacatccccgccgcgcgccggaggtcggcgggcggcacgcccgcctcgagcagnncctgcnnnngngcccgcggccacgggcggcgacggcagcacgggctccggcgccgcgggcgggagacccggggccgcgaggctggtgggcctggtccgcagcnngacggcgacgacgcgtagcctgntgcggcgcggcgccgccggcctgggcccagattccatgccctcgtgccctagcagggccagggcggtgcgggtggcggccatagtccccgtcgctcgcaggtttctctttttctctgtagtggtgaggcgtaaagaggataagggtgtgagatggatctggtcgaaccaccgcacgggcacgagtagtggtggtctcgagaaatgtctaaaaaggtgtttttt

SEQ ID NO: 18375 - protein, 161 aa, Zea mays subsp. mays
  misc_feature (1)..(161): Ceres Seq. ID no. 12364891
  misc_feature (92)..(92): Xaa is any aa, unknown or other
  misc_feature (115)..(115): Xaa is any aa, unknown or other
  misc_feature (116)..(116): Xaa is any aa, unknown or other
  misc_feature (118)..(118): Xaa is any aa, unknown or other
MLHHQEARASRSLPMRTSHRGLLRRRRRVVIHPLGVPQRRPPPGQHGPDTAGESGAELGVPGAEHGGQWQPADPARGAGLVTRHDARGQRVXEVLGEVVQLVGAAGHGAQEVVRXXPXVSLHAVPEERGEAARHGAGGARRQAQRLEELEPRQQLALHGEG

SEQ ID NO: 18376 - protein, 147 aa, Zea mays subsp. mays
  misc_feature (1)..(147): Ceres Seq. ID no. 12364892
  misc_feature (78)..(78): Xaa is any aa, unknown or other
  misc_feature (101)..(101): Xaa is any aa, unknown or other
  misc_feature (102)..(102): Xaa is any aa, unknown or other
  misc_feature (104)..(104): Xaa is any aa, unknown or other
MRTSHRGLLRRRRRVVIHPLGVPQRRPPPGQHGPDTAGESGAELGVPGAEHGGQWQPADPARGAGLVTRHDARGQRVXEVLGEVVQLVGAAGHGAQEVVRXXPXVSLHAVPEERGEAARHGAGGARRQAQRLEELEPRQQLALHGEG

SEQ ID NO: 18377 - protein, 99 aa, Zea mays subsp. mays
  misc_feature (1)..(99): Ceres Seq. ID no. 12364893
IVHWEDQLDNSSWLSYFTSSQCRSLWTYVTPPRGKSLSLATNAHVTPWSPSPPPPRRHPPTWRATAPTASGAAWTRHSWREWRGTWRPRGGAWRAVAAC

SEQ ID NO: 18378 - DNA, 1453 bp, Zea mays subsp. mays
  misc_feature (1)..(1453): Ceres Seq. ID no. 12364902
tcctaatcgaaaaattagccagcgagctgaggcctgaggagcgagcacagccgagtcacccggccggccgcccgcacgcacggacaccaacaactcccttggacgcacccgatcgaccctgctgcctgctagccgtgcgcagtagtgggagcgagcacgagtgagagtgggcagcgagaacatacgccgcccccggccggtgtgactggtggtggcgtcgcgcgcgcgatggggagggcgccgtgctgcgagaaggtggggctcaagcgcgggaggtggacgaaggaggaggaccagatactcgccaactacatcgcagagcacggcgagggatcctggaggtcgctgcccaagaatgcagggctgctccgctgcggcaagagctgccgcctgcggtggatcaactaccttcgggccgacgtcaagagggggaacatctccaaggaggaagaggacgtcatcatcaagctccacgccacccttggaaacaggtggtccctgatcgccagccacctccccggccgaacagacaacgagatcaagaactactggaactcgcacctcagccgccagatccacacgtaccgccggaaatacaccgccggcccggacacggcgcccatcgccatcgccatcgccatcgacatgagcaagctgcacagcgccgagaggcggcgcggtggcaggaccccgggccggtcgccgaagagcgccaccagcagcagcagcatgaccaagagcaagcagccggacgaccctgagccagaaccggaggccggcggcgcgtccagcccgcggcacagcgacggggcgcgaagcgccgtggtggacccggacccggacccgaaccagcccaacagcagcagcggcagcggcagcacgggcgagggggaggacgcgacggggccgtgggtgctggatccgatcgagctcggggacctctgggaggccgagagcgagatggacgccctcatgtctatcgggggggctgcccacgactcggccaccgcggaaggattcgacgcggcccaggcccaggtggacgacctgttcgacgacatggactgggataacttcgcggcccatctgtggggggagccggagcagcagaacgaccacagcgcgcagccgcagccccagcaggccgccgagccgcaggctgctgctgctgctgatgtggcggcggcgggggcggaggcctgcgacccggacgaacacgaactggaggcgttggaaacttggctcctgtccgactcgttctgacagttcccgtcatcagataccgatcaggtcgacgcagctagctagggcctaggtgttgctccgtgcgtgcagtttcgtgtaaatttcgtttctagttcgtaaataggtgctggttcgtgcatggtatattggtatgggccttcgagttcgaatagagagagagaggagacttgcgtcatgcatggcatgg

SEQ ID NO: 18379 - protein, 344 aa, Zea mays subsp. mays
  misc_feature (1)..(344): Ceres Seq. ID no. 12364903
MGRAPCCEKVGLKRGRWTKEEDQILANYIAEHGEGSWRSLPKNAGLLRCGKSCRLRWINYLRADVKRGNISKEEEDVIIKLHATLGNRWSLIASHLPGRTDNEIKNYWNSHLSRQIHTYRRKYTAGPDTAPIAIAIAIDMSKLHSAERRRGGRTPGRSPKSATSSSSMTKSKQPDDPEPEPEAGGASSPRHSDGARSAVVDPDPDPNQPNSSSGSGSTGEGEDATGPWVLDPIELGDLWEAESEMDALMSIGGAAHDSATAEGFDAAQAQVDDLFDDMDWDNFAAHLWGEPEQQNDHSAQPQPQQAAEPQAAAAADVAAAGAEACDPDEHELEALETWLLSDSF

SEQ ID NO: 18380 - protein, 205 aa, Zea mays subsp. mays
  misc_feature (1)..(205): Ceres Seq. ID no. 12364904
MSKLHSAERRRGGRTPGRSPKSATSSSSMTKSKQPDDPEPEPEAGGASSPRHSDGARSAVVDPDPDPNQPNSSSGSGSTGEGEDATGPWVLDPIELGDLWEAESEMDALMSIGGAAHDSATAEGFDAAQAQVDDLFDDMDWDNFAAHLWGEPEQQNDHSAQPQPQQAAEPQAAAAADVAAAGAEACDPDEHELEALETWLLSDSF

SEQ ID NO: 18381 - protein, 177 aa, Zea mays subsp. mays
  misc_feature (1)..(177): Ceres Seq. ID no. 12364905
MTKSKQPDDPEPEPEAGGASSPRHSDGARSAVVDPDPDPNQPNSSSGSGSTGEGEDATGPWVLDPIELGDLWEAESEMDALMSIGGAAHDSATAEGFDAAQAQVDDLFDDMDWDNFAAHLWGEPEQQNDHSAQPQPQQAAEPQAAAAADVAAAGAEACDPDEHELEALETWLLSDSF

SEQ ID NO: 18382 - DNA, 1355 bp, Zea mays subsp. mays
  misc_feature (1)..(1355): Ceres Seq. ID no. 12364918
aaaacagacacttccgtttttattgtccaccctccgccgccggcgtctctccaaaacccaaccaaaccctagatccgccgcactcagttccggtgagaccctcctttccagcgaaaatgccgaacctcgagtgccggatgtatgagcagcggttcccggaggtggacgccgcggtgatgatccaggtgaagcacatcgctgacatgggcgcgtacgtctcgttgctcgagtacaacaacatcgagggcatgatcctcttctccgagctctcccgccgtcgtatccgctccatctcctccctcatcaaggttggccgccaggagcccgccatcgtgctccgtgtcgaccgcgacaagggctacatcgacctttcgaagcgtcgcgtctccgaggaggaggcgcacgcatgcgaggacaggtacaacaagtccaagctcgtgcactccatcatgcgccacgtcgccgagacgctcgagatcgacctcgagccgctctaccagcggattggctggccgctctaccgcaagtacggccacgccttcgaggccttcaagctcatagttgccgaccctgacgccatcctcgacgcactcacctatgaggagaaggaggtcggcccggatggccaggaggtgactaaggtggtgcctgctgtcacccccgaggttaaggattctctggttaagaacataaggaggaggatgacaccacagcctctcaagatccgtgctgatatagagatgaaatgcttccagtttgatggagtgctccatattaagcaagctatgaagaaagctgaagctgcgggcaatgataactgtcctgtgaagattaagctagttgctcctccactttatgttttgaccacacagacccttgacaaggatcaaggcatttcagttctcactactgcagtcaaggcttgtacagcagagattgaaaagtacaaaggaaagttagtagtgaaggaaccaccaagagctgttagtgagcgggaagacaagctattcctcgaccagattgattccctaatggagcaaaacgcagaggtcgatggtgatgctgacagtgaagaggaggaagatacaggaatgggggacgtcgacattacaaattctggcgtcgctgcttactaaggctacactggttgatttggatgagctttgctgtacagcaccagctaagttctaagccgttctgtttggaagcagtttctttctgttaggttttggtgaattcgctgaaactcgttacctgcgttgttaatgttttgggctcagccggtgttggggtagcgtttacttctgtcgagaatcaccaattttttcttgggagtgaaaacaaagcccgttgcc

SEQ ID NO: 18383 - protein, 377 aa, Zea mays subsp. mays
  misc_feature (1)..(377): Ceres Seq. ID no. 12364919
NRHFRFYCPPSAAGVSPKPNQTLDPPHSVPVRPSFPAKMPNLECRMYEQRFPEVDAAVMIQVKHIADMGAYVSLLEYNNIEGMILFSELSRRRIRSISSLIKVGRQEPAIVLRVDRDKGYIDLSKRRVSEEEAHACEDRYNKSKLVHSIMRHVAETLEIDLEPLYQRIGWPLYRKYGHAFEAFKLIVADPDAILDALTYEEKEVGPDGQEVTKVVPAVTPEVKDSLVKNIRRRMTPQPLKIRADIEMKCFQFDGVLHIKQAMKKAEAAGNDNCPVKIKLVAPPLYVLTTQTLDKDQGISVLTTAVKACTAEIEKYKGKLVVKEPPRAVSEREDKLFLDQIDSLMEQNAEVDGDADSEEEEDTGMGDVDITNSGVAAY

SEQ ID NO: 18384 - protein, 339 aa, Zea mays subsp. mays
  misc_feature (1)..(339): Ceres Seq. ID no. 12364920
MPNLECRMYEQRFPEVDAAVMIQVKHIADMGAYVSLLEYNNIEGMILFSELSRRRIRSISSLIKVGRQEPAIVLRVDRDKGYIDLSKRRVSEEEAHACEDRYNKSKLVHSIMRHVAETLEIDLEPLYQRIGWPLYRKYGHAFEAFKLIVADPDAILDALTYEEKEVGPDGQEVTKVVPAVTPEVKDSLVKNIRRRMTPQPLKIRADIEMKCFQFDGVLHIKQAMKKAEAAGNDNCPVKIKLVAPPLYVLTTQTLDKDQGISVLTTAVKACTAEIEKYKGKLVVKEPPRAVSEREDKLFLDQIDSLMEQNAEVDGDADSEEEEDTGMGDVDITNSGVAAY

SEQ ID NO: 18385 - protein, 332 aa, Zea mays subsp. mays
  misc_feature (1)..(332): Ceres Seq. ID no. 12364921
MYEQRFPEVDAAVMIQVKHIADMGAYVSLLEYNNIEGMILFSELSRRRIRSISSLIKVGRQEPAIVLRVDRDKGYIDLSKRRVSEEEAHACEDRYNKSKLVHSIMRHVAETLEIDLEPLYQRIGWPLYRKYGHAFEAFKLIVADPDAILDALTYEEKEVGPDGQEVTKVVPAVTPEVKDSLVKNIRRRMTPQPLKIRADIEMKCFQFDGVLHIKQAMKKAEAAGNDNCPVKIKLVAPPLYVLTTQTLDKDQGISVLTTAVKACTAEIEKYKGKLVVKEPPRAVSEREDKLFLDQIDSLMEQNAEVDGDADSEEEEDTGMGDVDITNSGVAAY

SEQ ID NO: 18386 - DNA, 1075 bp, Zea mays subsp. mays
  misc_feature (1)..(1075): Ceres Seq. ID no. 12364946
agtacagatccaccgccaccaccaccaccaagcactccagtcccgcagcagcatggccggcagcgcgtcccgcctcgccatcctcttggtgctcctggcggcgtcaccgctgcttggcgcgacgcagaaggccgcgccagggccggcgtcgtcgtcgggctcgggcgcgggcgcggcggacgcggcgccgccgacggacgtgaacaaggcgctgaaggacgagcagttcagcgagttccggcagctgctgcacgacacgcgcgtggacacgcagatcaacgcgcagctgacggacagctacaacgggctgaccatcatggcgcccaccaacgccgccttcgacaagatgaaggcgggcgtgctgaacgggctgtcgccgcaggagcagatccagatggtgctctactgcgtgctgccccggttctacagcctgtccatgctcggcaccctcagcggcaaggtcaacacgcaggggtccggccacgacgggccctacaggtacgacatcaagcggtcggggaacaacgtcaacgtgtccacgggggtgaactggatgctgctgggcagccccgtcagcaaggacttcccgctcgccatctaccccgtcgacaaggtgccgctcccctacgagctgttcgggcccaagccgcccacgccggcgcccgcgccggcacccgcgcccgggccggccaaggccaagaccaagaagaagaagaagtccgccgccatcgccgagccgcccacggccgacgacgacgacaccggctccacctccgacgaccagaaggctgccgccgcgccgccacgcgccagcagggcggccgccgcgctctccgtgctcggcgccgctgttctcgtcggcggcctcttctgatgggaagaggatcggatcggaggaggatagaatgaatgcaccgtcattcagaccaagatcacacggcgtgtgtgcgtttggccatcggctttattctttcttctctcttctcttgggggattttctctctctctctctctctctcggtgatttgtatttgtaacttaatgtgatatacattagcagtggttgttcttcttt

SEQ ID NO: 18387 - protein, 302 aa, Zea mays subsp. mays
  misc_feature (1)..(302): Ceres Seq. ID no. 12364947
STDPPPPPPPSTPVPQQHGRQRVPPRHPLGAPGGVTAAWRDAEGRARAGVVVGLGRGRGGRGAADGREQGAEGRAVQRVPAAAARHARGHADQRAADGQLQRADHHGAHQRRLRQDEGGRAERAVAAGADPDGALLRAAPVLQPVHARHPQRQGQHAGVRPRRALQVRHQAVGEQRQRVHGGELDAAGQPRQQGLPARHLPRRQGAAPLRAVRAQAAHAGARAGTRARAGQGQDQEEEEVRRHRRAAHGRRRRHRLHLRRPEGCRRAATRQQGGRRALRARRRCSRRRPLLMGRGSDRRRIE

SEQ ID NO: 18388 - protein, 290 aa, Zea mays subsp. mays
  misc_feature (1)..(290): Ceres Seq. ID no. 12364948
VQIHRHHHHQALQSRSSMAGSASRLAILLVLLAASPLLGATQKAAPGPASSSGSGAGAADAAPPTDVNKALKDEQFSEFRQLLHDTRVDTQINAQLTDSYNGLTIMAPTNAAFDKMKAGVLNGLSPQEQIQMVLYCVLPRFYSLSMLGTLSGKVNTQGSGHDGPYRYDIKRSGNNVNVSTGVNWMLLGSPVSKDFPLAIYPVDKVPLPYELFGPKPPTPAPAPAPAPGPAKAKTKKKKKSAAIAEPPTADDDDTGSTSDDQKAAAAPPRASRAAAALSVLGAAVLVGGLF

SEQ ID NO: 18389 - protein, 273 aa, Zea mays subsp. mays
  misc_feature (1)..(273): Ceres Seq. ID no. 12364949
MAGSASRLAILLVLLAASPLLGATQKAAPGPASSSGSGAGAADAAPPTDVNKALKDEQFSEFRQLLHDTRVDTQINAQLTDSYNGLTIMAPTNAAFDKMKAGVLNGLSPQEQIQMVLYCVLPRFYSLSMLGTLSGKVNTQGSGHDGPYRYDIKRSGNNVNVSTGVNWMLLGSPVSKDFPLAIYPVDKVPLPYELFGPKPPTPAPAPAPAPGPAKAKTKKKKKSAAIAEPPTADDDDTGSTSDDQKAAAAPPRASRAAAALSVLGAAVLVGGLF

SEQ ID NO: 18390 - DNA, 1614 bp, Zea mays subsp. mays
  misc_feature (1)..(1614): Ceres Seq. ID no. 12364958
gccgttctttctccctcagaccctcaccaaccaggcaaccaaaccttctccgatggccgcgcccgtgtcgcagccgccggtgtccgccagggcgtccacacggtttctcccccgcgggataggcgcgctcccggagtccgctcccacgtccctccggttatccgtcggccgccgtcgccgggccgccagcctagaggtgaaggcatcgggaaatgtgttcgggaactacttccaggttgcaacctatggcgaatcccatggagggggtgttggttgcgttatcagtggctgcccacccagaattcctctcactgaggcagacatgcaagtagaactcgataaagacgtccgggtcaaagtagaattacaaccccaagaaaggagactgatacatgcaaaattctatcagggacacatgatgggatgactactggtacaccaattcacgtctttgtcccaaacacagatcaaaggggtggtgattacagtgaaatgtctaaggcgtacagaccatcccatgcagatgcaacctatgacttcaagtatggagttagagctgtgcagggaggtggaaggtcatcagccagagaaaccattggcagggtggctgcaggagctcttgcaaagaaaattctaaagctcaaatcaggagtggagatcttggcatttgtttctaaagtgcaccaagtcgtacttccagaagatgcagttgattatgagactgtaaccttggaacatatagagagcaacatcgttagatgtcctgatccagaatatgcagagaagatgattgctgccattgatacggtacgagttagaggagattcaattggtggggtcgtcacatgcattgcaagaaatgttcctcgtggtcttggctctcctgtttttgacaaacttgaagctgaactggcaaaagccatgctttctcttcctgcaagcaaggggtttgagattggcagtgggttcgctggtacggactttactggaagtgagcataatgatgagttctatatggatgaggctggaaatgtgaggacacgaactaatcgctcaggcggtgttcagggagggatatcaaatggtgaaattatttacttcaaagtggcttttaagccaacagcaactatcggaaagaagcaaaatactgtgtcaagggagcatgaggatgttgaacttttggcaagggggcgccatgacccctgtgttgtccctcgagctgttcctatggtggaatccatggctgcgctggtcctgatggaccagctcatggcgcatattgcccagtgtgagatgtttccgctgaaccttgccctacaagagcccattggctctgctagcagtgcatctgaactgtcaccaaacctatcataatgtttgtcgtggaacatgtcccagctttccttctatcgaaattctggtctttgctaagcagtttgcaattcggaacccccataaaccctcgactattgtacctagagataaagtgaacggatatcaagatagaaatgcattaatgtttttgtgatgtgtagtataactgatatttaccccttttctttttttgagagaggacgcatgatgtcgtttgagcaataaagtttaatttgggag

SEQ ID NO: 18391 - protein, 316 aa, Zea mays subsp. mays
  misc_feature (1)..(316): Ceres Seq. ID no. 12364959
MTTGTPIHVFVPNTDQRGGDYSEMSKAYRPSHADATYDFKYGVRAVQGGGRSSARETIGRVAAGALAKKILKLKSGVEILAFVSKVHQVVLPEDAVDYETVTLEHIESNIVRCPDPEYAEKMIAAIDTVRVRGDSIGGVVTCIARNVPRGLGSPVFDKLEAELAKAMLSLPASKGFEIGSGFAGTDFTGSEHNDEFYMDEAGNVRTRTNRSGGVQGGISNGEIIYFKVAFKPTATIGKKQNTVSREHEDVELLARGRHDPCVVPRAVPMVESMAALVLMDQLMAHIAQCEMFPLNLALQEPIGSASSASELSPNLS

SEQ ID NO: 18392 - protein, 293 aa, Zea mays subsp. mays
  misc_feature (1)..(293): Ceres Seq. ID no. 12364960
MSKAYRPSHADATYDFKYGVRAVQGGGRSSARETIGRVAAGALAKKILKLKSGVEILAFVSKVHQVVLPEDAVDYETVTLEHIESNIVRCPDPEYAEKMIAAIDTVRVRGDSIGGVVTCIARNVPRGLGSPVFDKLEAELAKAMLSLPASKGFEIGSGFAGTDFTGSEHNDEFYMDEAGNVRTRTNRSGGVQGGISNGEIIYFKVAFKPTATIGKKQNTVSREHEDVELLARGRHDPCVVPRAVPMVESMAALVLMDQLMAHIAQCEMFPLNLALQEPIGSASSASELSPNLS

SEQ ID NO: 18393 - protein, 195 aa, Zea mays subsp. mays
  misc_feature (1)..(195): Ceres Seq. ID no. 12364961
MIAAIDTVRVRGDSIGGVVTCIARNVPRGLGSPVFDKLEAELAKAMLSLPASKGFEIGSGFAGTDFTGSEHNDEFYMDEAGNVRTRTNRSGGVQGGISNGEIIYFKVAFKPTATIGKKQNTVSREHEDVELLARGRHDPCVVPRAVPMVESMAALVLMDQLMAHIAQCEMFPLNLALQEPIGSASSASELSPNLS

SEQ ID NO: 18394 - DNA, 1479 bp, Zea mays subsp. mays
  misc_feature (1)..(1479): Ceres Seq. ID no. 12364992
atccgccgcccgcgcacttcttccttcgggcacacaggacaccaccgtcgacggattcatcgcgacgatggggctcgacgtcatggagatcgggatgggcgccgatttgagcctggatctgaggcacttcgcctccaaggccgtgaggcagagcaaggacgacacgccggcgccggacatggacgcatgcatccgccgcctcgaggaggagcggggtaagatcgagatgttcaagcgggacctcccgctctgcgcgcgcctcctcgccgacgtaattgatgtcatgaaggaggaggcggggaagaagaagacgacgacaaggaggagtgaccgcaggctggcgtctgcggcagctgatgaggaggaggaggaggaggacggcgccaccgcggacaagagcaagtggatgagcacggcgcagctctggacgggcgattccgggcgggaggacggggaatcagagaagcaagacaaggggcggtgctcgccggaggccaggtcccgcggcgctctcttaccgttcaaggctgatgtgggttctggcgcgccggcgttggcgccgctctgcttgagaacggacgacaaggctgcggctgcgcgcgtcggggtgccggatctgtcgtccttgctgtcgccgccggcgaccatgcctcctgcggacgccggcgccgaggagagccgtcgccaggttgtgggatttgcgcaagctgcggccagggcggctgccatggccccgtgtgcccctgcgcttgggctccagtcccagtcgcagcagcagcagcagcagcagcagcaggcaaggaaggctcggcgttgctggtcgacggagctgcatcgcaagttcgtcgccgccttggatcagctcggtggcccccaagttgccacgccgaagcaaatcagggagctgatgaaggtggatgggctgacaaacgacgaagtgaaaagccatcttcagaaataccggctgcacaaccggagggcgcctggatccggcgtggtgcgccagccgatcgtgctcgtgggagggctgtggattccccaggagcaaggcagccctcagtctggatctccccacggccccctccaccacctgtccacctcggtggccgccgtctcgtccgccgccaccgccagctgcgaggaggaagacggccggtccgagagctatggctggcaatgatgtctggctgctgctgctgctgcaccaccaatgtgtgttcactgttcagagaggggaggtttcttggcatggtggggatcgccatgggccatggcggaggccaccagttgcagcttcaggaatcgggaggggaattgagtgtagtgtagctgtctgtacacatacatacatacatacagtgagatgggatgagatgagagcgggccttgagcgctcgagatcagaactgatggtgcttcgtcgtcgggtttgtacatcccaaagagaaagagatactagctacagttttgcggcttgct

SEQ ID NO: 18395 - protein, 392 aa, Zea mays subsp. mays
  misc_feature (1)..(392): Ceres Seq. ID no. 12364993
SAARALLPSGTQDTTVDGFIATMGLDVMEIGMGADLSLDLRHFASKAVRQSKDDTPAPDMDACIRRLEEERGKIEMFKRDLPLCARLLADVIDVMKEEAGKKKTTTRRSDRRLASAAADEEEEEEDGATADKSKWMSTAQLWTGDSGREDGESEKQDKGRCSPEARSRGALLPFKADVGSGAPALAPLCLRTDDKAAAARVGVPDLSSLLSPPATMPPADAGAEESRRQVVGFAQAAARAAAMAPCAPALGLQSQSQQQQQQQQQARKARRCWSTELHRKFVAALDQLGGPQVATPKQIRELMKVDGLTNDEVKSHLQKYRLHNRRAPGSGVVRQPIVLVGGLWIPQEQGSPQSGSPHGPLHHLSTSVAAVSSAATASCEEEDGRSESYGWQ

SEQ ID NO: 18396 - protein, 370 aa, Zea mays subsp. mays
  misc_feature (1)..(370): Ceres Seq. ID no. 12364994
MGLDVMEIGMGADLSLDLRHFASKAVRQSKDDTPAPDMDACIRRLEEERGKIEMFKRDLPLCARLLADVIDVMKEEAGKKKTTTRRSDRRLASAAADEEEEEEDGATADKSKWMSTAQLWTGDSGREDGESEKQDKGRCSPEARSRGALLPFKADVGSGAPALAPLCLRTDDKAAAARVGVPDLSSLLSPPATMPPADAGAEESRRQVVGFAQAAARAAAMAPCAPALGLQSQSQQQQQQQQQARKARRCWSTELHRKFVAALDQLGGPQVATPKQIRELMKVDGLTNDEVKSHLQKYRLHNRRAPGSGVVRQPIVLVGGLWIPQEQGSPQSGSPHGPLHHLSTSVAAVSSAATASCEEEDGRSESYGWQ

SEQ ID NO: 18397 - protein, 365 aa, Zea mays subsp. mays
  misc_feature (1)..(365): Ceres Seq. ID no. 12364995
MEIGMGADLSLDLRHFASKAVRQSKDDTPAPDMDACIRRLEEERGKIEMFKRDLPLCARLLADVIDVMKEEAGKKKTTTRRSDRRLASAAADEEEEEEDGATADKSKWMSTAQLWTGDSGREDGESEKQDKGRCSPEARSRGALLPFKADVGSGAPALAPLCLRTDDKAAAARVGVPDLSSLLSPPATMPPADAGAEESRRQVVGFAQAAARAAAMAPCAPALGLQSQSQQQQQQQQQARKARRCWSTELHRKFVAALDQLGGPQVATPKQIRELMKVDGLTNDEVKSHLQKYRLHNRRAPGSGVVRQPIVLVGGLWIPQEQGSPQSGSPHGPLHHLSTSVAAVSSAATASCEEEDGRSESYGWQ

SEQ ID NO: 18398 - DNA, 1005 bp, Zea mays subsp. mays
  misc_feature (1)..(1005): Ceres Seq. ID no. 12365007
ggagagcatcaaagcaagccatgtggaggagggctttagcgatggtcctgttcatggctggcgccgcgctgctcgccggggctgccggcgccggcgcgcagcaggggcgtgtggagcatcatcacccggcccatgttccagagcatgctgagccaccgcggcgacagcgggtgccagggcgccttctacacctacgacgccttcatcgaggccgccagcaagttccccggcttcggcaccaccggcgacgagcagacgcgcaggcgggagctcgccgccttcttcggccagacgtcccacgaaaccaccggtggatgggcgactgctccggatggaccgtttgcctggggatactgccgggtgaaggaacagaaacagacggacccaccctactatggacgaggacccatacagctaactcataagtacaactacaggctcgccgggcaagcgctgaacctgaacctggtgggcgacccggacctggtggcgagagaccccgtggtagccttcaagacggccatctggttctggatgacgccgcagtcgcccaagccgtcgtgccacgccgtgatgaccggcgactggaggccctccgccaccgaccgcgccgcggggaggctccccggatacggcctgaccacgaacatcatcaacggcggcctagagtgcggcgaggaccgctccaccgacggcgccaaagccgccaaggaccgggtcggctactacaagaggtactgcggtatgctccgagtggggtacggggacaacatggcatgcaggaaccagaagccttacggaggatgatgacactagtagctgatctatggttgctgcaatgcaagccttcacgtgtgtttgcctctctacctaaagaataaatcaagctagcagcgaacctaccttcggcgtgtgtctacttgcttatcatagtgtgtgtctgtgtatgagagatgatgtactgtcacgtgtgtatgagagaggatatatggtaagactatcact

SEQ ID NO: 18399 - protein, 224 aa, Zea mays subsp. mays
  misc_feature (1)..(224): Ceres Seq. ID no. 12365008
MFQSMLSHRGDSGCQGAFYTYDAFIEAASKFPGFGTTGDEQTRRRELAAFFGQTSHETTGGWATAPDGPFAWGYCRVKEQKQTDPPYYGRGPIQLTHKYNYRLAGQALNLNLVGDPDLVARDPVVAFKTAIWFWMTPQSPKPSCHAVMTGDWRPSATDRAAGRLPGYGLTTNIINGGLECGEDRSTDGAKAAKDRVGYYKRYCGMLRVGYGDNMACRNQKPYGG

SEQ ID NO: 18400 - protein, 220 aa, Zea mays subsp. mays
  misc_feature (1)..(220): Ceres Seq. ID no. 12365009
MLSHRGDSGCQGAFYTYDAFIEAASKFPGFGTTGDEQTRRRELAAFFGQTSHETTGGWATAPDGPFAWGYCRVKEQKQTDPPYYGRGPIQLTHKYNYRLAGQALNLNLVGDPDLVARDPVVAFKTAIWFWMTPQSPKPSCHAVMTGDWRPSATDRAAGRLPGYGLTTNIINGGLECGEDRSTDGAKAAKDRVGYYKRYCGMLRVGYGDNMACRNQKPYGG

SEQ ID NO: 18401 - protein, 140 aa, Zea mays subsp. mays
  misc_feature (1)..(140): Ceres Seq. ID no. 12365010
RASKQAMWRRALAMVLFMAGAALLAGAAGAGAQQGRVEHHHPAHVPEHAEPPRRQRVPGRLLHLRRLHRGRQQVPRLRHHRRRADAQAGARRLLRPDVPRNHRWMGDCSGWTVCLGILPGEGTETDGPTLLWTRTHTANS

SEQ ID NO: 18402 - DNA, 1246 bp, Zea mays subsp. mays
  misc_feature (1)..(1246): Ceres Seq. ID no. 12365011
aacaagccgactccgacggcgccgtccacgacgacgggcggcggactgcgcgccatggatctgtacgagaagctggagaaggtgggggagggcacgtacgggaaggtgtacaaggcccgggagaaggcgacgggccggatcgtggcgctcaagaagacgcggctccccgaggacgacgagggcgtgccgcccaccgcgctgcgggaggtctcgctgctgcggatgctgtcgcaggacccgcacgtggtccgcctgctcgacctcaagcagggcgtcaacaaggaggggcagaccatcctgtacctcgtcttcgagtacatggacaccgacctgaagaagttcatccggggctatcgcgccaaccacgagaagatccccgcacaaaccgtcaagatcctgatgtaccagcttgcaagggcgtgggttttgttcacggccgcggggtgctccaccgtgatctgaaaccgcacaacctgctcatggaccgcaagaccatggcgctcaagatcgctgacctcggactcagccgtgccatcaccgtccctgtaaagaagtacacgcacgagattctgacgctgtggtacagggcgcccgaggttcttcttggcgccacacactactccacgccggttgacatttggtccgtggggtgcatatttactgagttggttactaatcagccacttttccctggcgactccgagttgcagcagctcctccacatcttcaagttgctgggcaccccaaatgaggagatgtggccaggagtaggcaagctgccgaactggcacgtgtacccccagtggaagcccactaagctgtccactcttgtccctggtcttgactccgatggctatgatttacttgagaaaatgcttgcatatgagccagggaagcgggtctcggcgaagaaggccctggagcacccgtacttcaatgatgttaacaaggaggtgtactgaagcgacccgagtagtagggttcatcgagagaggatcattgtcaccttattcttcgcttagtgtgttaatatggctaccctgaagcagtacttgaagtatctctgtgttcaagctgctacttttctatttgttgtgccattcactttggttgtgatggataaggcagggagagttttcagcatgagtgagcttatgttgacactgtttcttgcaaattgtagccggaaagcttgcgatcatcttccatttgatttataaagcttcactatatggctctgaagctc

SEQ ID NO: 18403 - protein, 319 aa, Zea mays subsp. mays
  misc_feature (1)..(319): Ceres Seq. ID no. 12365012
QADSDGAVHDDGRRTARHGSVREAGEGGGGHVREGVQGPGEGDGPDRGAQEDAAPRGRRGRAAHRAAGGLAAADAVAGPARGPPARPQAGRQQGGADHPVPRLRVHGHRPEEVHPGLSRQPREDPRTNRQDPDVPACKGVGFVHGRGVLHRDLKPHNLLMDRKTMALKIADLGLSRAITVPVKKYTHEILTLWYRAPEVLLGATHYSTPVDIWSVGCIFTELVTNQPLFPGDSELQQLLHIFKLLGTPNEEMWPGVGKLPNWHVYPQWKPTKLSTLVPGLDSDGYDLLEKMLAYEPGKRVSAKKALEHPYFNDVNKEVY

SEQ ID NO: 18404 - protein, 160 aa, Zea mays subsp. mays
  misc_feature (1)..(160): Ceres Seq. ID no. 12365013
MDRKTMALKIADLGLSRAITVPVKKYTHEILTLWYRAPEVLLGATHYSTPVDIWSVGCIFTELVTNQPLFPGDSELQQLLHIFKLLGTPNEEMWPGVGKLPNWHVYPQWKPTKLSTLVPGLDSDGYDLLEKMLAYEPGKRVSAKKALEHPYFNDVNKEVY

SEQ ID NO: 18405 - DNA, 855 bp, Zea mays subsp. mays
  misc_feature (1)..(855): Ceres Seq. ID no. 12365042
attcatgatggcaatggcacagagagaggtgagtccagcgttcatcctctttacgtctcccgcgtttcgttccctggctggtacggtacccgtcgtcgtgcgaacccaagacacccgcagagtgctcgaccaaatgcgacactaggttaggtgcttctactccacggcgatcacccagctgctacccaactgtcgcaggccgacgcgccgagcgagggcgccgccgccgccgtctccggcgtcatggcggtgaagctcaaggacctggtcccggccgcgaccaacacggtgaacacgacgttcatcgtgctcgacaaggcggcgccgtcgacccgccgacagggcggcgccagggaggagacgtgcctggcgctggtggcggacgagaccgcggcggcgcacttcctgctgtggggcgccgagtgcggcgcgttcgagccgggcgacatcgtgcggctcacggacggcatcttctcgtaccacagggggaacgtcctggtgctgcgggcgggccgccgcgggcgcgccgagaaggtgggcgagttcgccatgctcttcgtggagacccccaacatgagcgagctccagtgggggcccgaccccagcgacggccggaggatggtgcaggaggccgtcgtctcgccttactcccagatcttcaagccgctgcggtgatcttcttactactgagaaacatgatactaggggtacgaacttacgatgaagaagaacgaaaaagaagggcttaaagctctgtctgtcttccaaagtgacaaggttacagcttacaacatgttcaaccatacaattatatcttccactgtgcaattatatgtttcattcacagtttgctgc

SEQ ID NO: 18406 - protein, 143 aa, Zea mays subsp. mays
  misc_feature (1)..(143): Ceres Seq. ID no. 12365043
MAVKLKDLVPAATNTVNTTFIVLDKAAPSTRRQGGAREETCLALVADETAAAHFLLWGAECGAFEPGDIVRLTDGIFSYHRGNVLVLRAGRRGRAEKVGEFAMLFVETPNMSELQWGPDPSDGRRMVQEAVVSPYSQIFKPLR

SEQ ID NO: 18407 - DNA, 1984 bp, Zea mays subsp. mays
  misc_feature (1)..(1984): Ceres Seq. ID no. 12365052
atccacaccccggtcggctagtcccaaggctgctgccgccgcctgctgctaggggatcgcttgctttcctcggaccactctgccgaccacatctacaccgcatcaacggtccttccaagtgagctccaatcccctgtctgtagatggagagggtgctcaaggatgacgccgtcgaggagaagggcgagcgcgccaggatggcatcgtttgttggggccatggcaatctcggatttggtgaagaccacattgggcccaaaaggaatggacaagatcctgcaatcaactggcagaggacgtaatgttactgttacaaatgatggggctaccattttgaagtcacttcacattgacaatcctgctgcaaaggtccttgttgacatctcaaaagttcaagatgatgaagttggtgatgggacaacttctgttgttgttctagctggagaacttttgaaggaggctgagaagttaattaacatgaaaattcatccaatgactattattgcaggttacagaatggctctcgagtgtgccagagattctttgctaaaaaagaccatggacaacaaagaaaatacagataaattcagatctgatctcatgaatattgctatgactactcttagttcaaaaatactttcccaagacaaggagtacttcgctgaacttgcggttgatgctgtcttgaggcttaagggtagcaccaacttggaatctattcaaattctgaagaaacctggaggatctcttaaggattcctttttggacgaagggttcattcttgacaagaaaattggcattgggcagcccaaacgcattgagaatgccaaaattttggttgcaaacactgctatggacacagataaagttaagatatatggagcacgggtccgggtggattcaatgtctaaggttgcagatattgaagctgctgagaagcagaaaatgagagagaaagtccaaaagatcatagcacacgggatcaactgttttgtcaacaggcagttaatctataacttccctgaggaactctttgctgacgctggcatacttgcaattgagcatgctgactttgagggcattgaacggctggctcttgttactggtggtgagatcgcatcaacttttgataatccagagtctgttaagcttggtcactgcaaggtcattgaagagattatgattggggaggacaggctaatccatttctctggggttgcgatggggcaggcttgcaccattgtcctaaggggggctagtgagcatgtgctcgatgaggctgagaggtccttgcatgatgccttgtgcgtgttgtcccagacggtaaatgatacccgtgtcttgtttggaggcggatggcctgagatggtgatggccaaagaagtggatgaacttgcaaggaagacccctgggaagaaatcccatgctatcgatgctttctcacatgctctgcaagccatcccaacaatcatagctgacaatgctggtttggatagcgctgatttgatctctcagctacgagctgagcaccacaaagagaactccactgctggaattgatgtcatcacaggcactgttggggacatgcaaaagctagggattcaagagtcgttcaaggtgaagcaggccattcttctgtctgcaacagaggctgcggagatgatcctcagggtcgatgagatcataacctgtgccccgcgcagaagagaggataggatgtgatattacacgctgtttctcgatgtagcgggatgctcattaccctagttttgaggggtattatggtttaggggcgctcaagttggtcagatttcgagtgtttttggcccctaagcaactggtacttgttatttggttgaaacaatcagccttaggtttgtgttctacattctcatgctgtaccgtttggtagcgagttacgtcgtacgatatgcttgttccatattgtttttctattccttttaacgtaagaatgggcttgtctt

SEQ ID NO: 18408 - protein, 525 aa, Zea mays subsp. mays
  misc_feature (1)..(525): Ceres Seq. ID no. 12365053
MERVLKDDAVEEKGERARMASFVGAMAISDLVKTTLGPKGMDKILQSTGRGRNVTVTNDGATILKSLHIDNPAAKVLVDISKVQDDEVGDGTTSVVVLAGELLKEAEKLINMKIHPMTIIAGYRMALECARDSLLKKTMDNKENTDKFRSDLMNIAMTTLSSKILSQDKEYFAELAVDAVLRLKGSTNLESIQILKKPGGSLKDSFLDEGFILDKKIGIGQPKRIENAKILVANTAMDTDKVKIYGARVRVDSMSKVADIEAAEKQKMREKVQKIIAHGINCFVNRQLIYNFPEELFADAGILAIEHADFEGIERLALVTGGEIASTFDNPESVKLGHCKVIEEIMIGEDRLIHFSGVAMGQACTIVLRGASEHVLDEAERSLHDALCVLSQTVNDTRVLFGGGWPEMVMAKEVDELARKTPGKKSHAIDAFSHALQAIPTIIADNAGLDSADLISQLRAEHHKENSTAGIDVITGTVGDMQKLGIQESFKVKQAILLSATEAAEMILRVDEIITCAPRRREDRM

SEQ ID NO: 18409 - protein, 507 aa, Zea mays subsp. mays
  misc_feature (1)..(507): Ceres Seq. ID no. 12365054
MASFVGAMAISDLVKTTLGPKGMDKILQSTGRGRNVTVTNDGATILKSLHIDNPAAKVLVDISKVQDDEVGDGTTSVVVLAGELLKEAEKLINMKIHPMTIIAGYRMALECARDSLLKKTMDNKENTDKFRSDLMNIAMTTLSSKILSQDKEYFAELAVDAVLRLKGSTNLESIQILKKPGGSLKDSFLDEGFILDKKIGIGQPKRIENAKILVANTAMDTDKVKIYGARVRVDSMSKVADIEAAEKQKMREKVQKIIAHGINCFVNRQLIYNFPEELFADAGILAIEHADFEGIERLALVTGGEIASTFDNPESVKLGHCKVIEEIMIGEDRLIHFSGVAMGQACTIVLRGASEHVLDEAERSLHDALCVLSQTVNDTRVLFGGGWPEMVMAKEVDELARKTPGKKSHAIDAFSHALQAIPTIIADNAGLDSADLISQLRAEHHKENSTAGIDVITGTVGDMQKLGIQESFKVKQAILLSATEAAEMILRVDEIITCAPRRREDRM

SEQ ID NO: 18410 - protein, 500 aa, Zea mays subsp. mays
  misc_feature (1)..(500): Ceres Seq. ID no. 12365055
MAISDLVKTTLGPKGMDKILQSTGRGRNVTVTNDGATILKSLHIDNPAAKVLVDISKVQDDEVGDGTTSVVVLAGELLKEAEKLINMKIHPMTIIAGYRMALECARDSLLKKTMDNKENTDKFRSDLMNIAMTTLSSKILSQDKEYFAELAVDAVLRLKGSTNLESIQILKKPGGSLKDSFLDEGFILDKKIGIGQPKRIENAKILVANTAMDTDKVKIYGARVRVDSMSKVADIEAAEKQKMREKVQKIIAHGINCFVNRQLIYNFPEELFADAGILAIEHADFEGIERLALVTGGEIASTFDNPESVKLGHCKVIEEIMIGEDRLIHFSGVAMGQACTIVLRGASEHVLDEAERSLHDALCVLSQTVNDTRVLFGGGWPEMVMAKEVDELARKTPGKKSHAIDAFSHALQAIPTIIADNAGLDSADLISQLRAEHHKENSTAGIDVITGTVGDMQKLGIQESFKVKQAILLSATEAAEMILRVDEIITCAPRRREDRM

SEQ ID NO: 18411 - DNA, 1422 bp, Zea mays subsp. mays
  misc_feature (1)..(1422): Ceres Seq. ID no. 12365071
atctttaccactagtcgccgtgccgtcccctccccttctctctctcctctctccccacgccacgcatcgcctcgtcggaacggaaggcggcagcgctgcgagcaagggagggagggagcggggatgaggatgctgtcgaaggcgtgctcgattgtggcctcctccctcccgcgctgctcctcctccgccgccgcccccacgatgagggggcagccgtccttgctgccaagcgtgcggaagcaatggcccgcgaagccactgctgtatggaatcggcaccctgttggtcatgccactgaggacactgtatggagtgggtcgtgtttttggcgcaggacggtttctctgcaacatgaccaacgtctcttcgtcgctgcaaattgagcttgtatcatgccttcgagataactatgcgtatatcctgcatgatgttgatactggaacagttggagtagtggatccttctgaggctatgcctattataaatgcattggaaaagagaaaccagaacttgacttatatactgaacacccatcatcactatgatcatactggtggaaacttggaattgaaggcaaaatatggtgcaaaggtaattggttctgagaaggataaggacagaatacctggcattgacatcacgcttaaggagggtgacacatggatgttcgctggccatcaagttcttgtactggaaactcctggacatacaacaggtcatgtgtgctattatttcgctggttctggagctatatttacaggtgacaccttgttcaatctatcatgcggaaagctttttgaagggactccacagcagatgtatgcctcactccagaaaattacagctctacccgatgatacaaaagtatactgtgggcatgaatataccttgagtaatgcaaagtttgccttgagtgtagaaccgggaaataaagcattgcaggaatatactgcaaatgcagctgagctgcgtaataagaatatacccacggtgccaacaacaattggaagggagaaggaatgcaatcctttcttgcggacctccaatccagaaattaagagaacactgtccgttccagatcatttcgatgaagatcgggtgcttggagttgtccgtcgagcaaaagataacttctgactaacaaaaggaaatgctcgtgacgtatgacccatatcttgttaaagttcagacagagaacctaagtcacaataaacataggaggaaatgaaggtatatatgtttgagctagattttgaaatgcttcggcaaaattatgtcgagtgtatgtagcttgggcagtgcagtgcttgtctatagcaaccaatgattcttttgaccactacaaataagcgtgttctgctatcatctactctctgtaaaaaaaacgccacgtagccgtttcatagtcgatcttcagttctt

SEQ ID NO: 18412 - protein, 378 aa, Zea mays subsp. mays
  misc_feature (1)..(378): Ceres Seq. ID no. 12365072
IFTTSRRAVPSPSLSPLSPRHASPRRNGRRQRCEQGREGAGMRMLSKACSIVASSLPRCSSSAAAPTMRGQPSLLPSVRKQWPAKPLLYGIGTLLVMPLRTLYGVGRVFGAGRFLCNMTNVSSSLQIELVSCLRDNYAYILHDVDTGTVGVVDPSEAMPIINALEKRNQNLTYILNTHHHYDHTGGNLELKAKYGAKVIGSEKDKDRIPGIDITLKEGDTWMFAGHQVLVLETPGHTTGHVCYYFAGSGAIFTGDTLFNLSCGKLFEGTPQQMYASLQKITALPDDTKVYCGHEYTLSNAKFALSVEPGNKALQEYTANAAELRNKNIPTVPTTIGREKECNPFLRTSNPEIKRTLSVPDHFDEDRVLGVVRRAKDNF

SEQ ID NO: 18413 - protein, 337 aa, Zea mays subsp. mays
  misc_feature (1)..(337): Ceres Seq. ID no. 12365073
MRMLSKACSIVASSLPRCSSSAAAPTMRGQPSLLPSVRKQWPAKPLLYGIGTLLVMPLRTLYGVGRVFGAGRFLCNMTNVSSSLQIELVSCLRDNYAYILHDVDTGTVGVVDPSEAMPIINALEKRNQNLTYILNTHHHYDHTGGNLELKAKYGAKVIGSEKDKDRIPGIDITLKEGDTWMFAGHQVLVLETPGHTTGHVCYYFAGSGAIFTGDTLFNLSCGKLFEGTPQQMYASLQKITALPDDTKVYCGHEYTLSNAKFALSVEPGNKALQEYTANAAELRNKNIPTVPTTIGREKECNPFLRTSNPEIKRTLSVPDHFDEDRVLGVVRRAKDNF

SEQ ID NO: 18414 - protein, 335 aa, Zea mays subsp. mays
  misc_feature (1)..(335): Ceres Seq. ID no. 12365074
MLSKACSIVASSLPRCSSSAAAPTMRGQPSLLPSVRKQWPAKPLLYGIGTLLVMPLRTLYGVGRVFGAGRFLCNMTNVSSSLQIELVSCLRDNYAYILHDVDTGTVGVVDPSEAMPIINALEKRNQNLTYILNTHHHYDHTGGNLELKAKYGAKVIGSEKDKDRIPGIDITLKEGDTWMFAGHQVLVLETPGHTTGHVCYYFAGSGAIFTGDTLFNLSCGKLFEGTPQQMYASLQKITALPDDTKVYCGHEYTLSNAKFALSVEPGNKALQEYTANAAELRNKNIPTVPTTIGREKECNPFLRTSNPEIKRTLSVPDHFDEDRVLGVVRRAKDNF

SEQ ID NO: 18415 - DNA, 1562 bp, Zea mays subsp. mays
  misc_feature (1)..(1562): Ceres Seq. ID no. 12365090
aagcccagctgacaacaccggcctccgagaagcagcgcaggcgcagggcattccagaacgttcggcggcggcgaggcgacacgcccaccaccagtcagccgccccgccacagccatgcgcctccacgccggcgcacgcctcgcgctcctgctcgcccgccgctccctctcctcctccccccgtatcccgcgggtgcacacagggatacggagcgaggcgccctcccggagctctcccttctatccgccgagcagcgcccgcaggtccttccacgggaccaggccggtggcggcaagggactactacgatgtgctcggcgtcagcaagagcgccagccaggcggagatcaaaaaggcctattatgggcttgcaaagaagctccatccagacacaaataaaggtgatgcggatgcagaacgcaagtttcaagaggttcaacgagcttatgagactctaaaggatgaacaaaaaagatcattatatgatcaggttggccctgatcagtatgagaaaactgcttctggcggaggcggaactggcttcgagggtggttttggaaatccatttgaggatatttttggtggtggcggtggcggtggtggaatgaatgatttctttaggaacatttttggggatagggactttagaggacgagatgttaaggttgcactcgaactatcatttatggaagcagttcaagggtgcagcaaaacggtcaccttccaaacgtctgtaacatgtgaaatctgtggtggagccggtgtgcctcctggaaccacacctgaaacatgtctatcttgcaggggttcaggatttatattcatgcaaaccgggcccttcaggatgcaatcaacctgcacaaaatgtggtggttctgggaaaactgtgaaggaattctgcaaggcatgcagaggaaacaaagttgtgcctggaaggaaatcagtccgccttgacatactgcctggtttggataatgaggataccataaaggtggttcgatcaggtggagaagacccagatggccgtccaggtgatctttatgtgaccctcgaggttcgtgaggatcctgttttccgaagagagaaaggtgatattcatgttgatgctgtcctgaatgtgactcaggcaattttgggagggacagttcaagtcccaactctcagtggagacgttgttctaaaggtcaagcccggtactcaacctggtcagaaggtagttctgagaggaaaagggatcaagacaagaaactcaccgcactacggagatcaatatgtccatttcaatgtcaacatccccgaaaatttgacgtctagacagcgggagctgatcgaggaattcgcgaaggaggagcaaggcgaagacgagaaggacgccaaggcagcagctggagcatcggggggatagccggttttaggagccacagtagtgccttttagctggtatttataccgtgaccatagacctgtctcaaattcgcagcgaaaaaaatatatagataggtctttgtttcggattttgtagctggaataaatggataatacgtctagaactgattttctgcc

SEQ ID NO: 18416 - protein, 429 aa, Zea mays subsp. mays
  misc_feature (1)..(429): Ceres Seq. ID no. 12365091
MRLHAGARLALLLARRSLSSSPRIPRVHTGIRSEAPSRSSPFYPPSSARRSFHGTRPVAARDYYDVLGVSKSASQAEIKKAYYGLAKKLHPDTNKGDADAERKFQEVQRAYETLKDEQKRSLYDQVGPDQYEKTASGGGGTGFEGGFGNPFEDIFGGGGGGGGMNDFFRNIFGDRDFRGRDVKVALELSFMEAVQGCSKTVTFQTSVTCEICGGAGVPPGTTPETCLSCRGSGFIFMQTGPFRMQSTCTKCGGSGKTVKEFCKACRGNKVVPGRKSVRLDILPGLDNEDTIKVVRSGGEDPDGRPGDLYVTLEVREDPVFRREKGDIHVDAVLNVTQAILGGTVQVPTLSGDVVLKVKPGTQPGQKVVLRGKGIKTRNSPHYGDQYVHFNVNIPENLTSRQRELIEEFAKEEQGEDEKDAKAAAGASGG

SEQ ID NO: 18417 - protein, 266 aa, Zea mays subsp. mays
  misc_feature (1)..(266): Ceres Seq. ID no. 12365092
MNDFFRNIFGDRDFRGRDVKVALELSFMEAVQGCSKTVTFQTSVTCEICGGAGVPPGTTPETCLSCRGSGFIFMQTGPFRMQSTCTKCGGSGKTVKEFCKACRGNKVVPGRKSVRLDILPGLDNEDTIKVVRSGGEDPDGRPGDLYVTLEVREDPVFRREKGDIHVDAVLNVTQAILGGTVQVPTLSGDVVLKVKPGTQPGQKVVLRGKGIKTRNSPHYGDQYVHFNVNIPENLTSRQRELIEEFAKEEQGEDEKDAKAAAGASGG

SEQ ID NO: 18418 - protein, 239 aa, Zea mays subsp. mays
  misc_feature (1)..(239): Ceres Seq. ID no. 12365093
MEAVQGCSKTVTFQTSVTCEICGGAGVPPGTTPETCLSCRGSGFIFMQTGPFRMQSTCTKCGGSGKTVKEFCKACRGNKVVPGRKSVRLDILPGLDNEDTIKVVRSGGEDPDGRPGDLYVTLEVREDPVFRREKGDIHVDAVLNVTQAILGGTVQVPTLSGDVVLKVKPGTQPGQKVVLRGKGIKTRNSPHYGDQYVHFNVNIPENLTSRQRELIEEFAKEEQGEDEKDAKAAAGASGG

SEQ ID NO: 18419 - DNA, 1641 bp, Zea mays subsp. mays
  misc_feature (1)..(1641): Ceres Seq. ID no. 12365124
aacacggccacaccccgacaccggcatggccacatccctttcccttaaatagacgccatcgccgccgagccgcgcattgggatcgtgcggcaatggcggcggcggcggcggcgcacgtgctggtgttcccggcccctgcgcagggccacctcaacagtttcctccacttctccacggggctcctccgcgcgggcctccacgtcaccttcctgcacaccgaccacaacctccgccgcctcggtactgctgccgccgaggctacggtcgcctcgccgcgtctccgcttcctatccgtgcccgacggcctccccgacgacgacccgcgcaccgtcgacggcctcccggagctcatggagtccctgcgcaccaaggccagcgcctcgtaccgcgcactgctcgcctcgctgcgcgcgggaggcggaggcttcccgccggtgacgtgcgtcgttgccgacggcataatgccgttcgtggtcgacgtcgcagaggagcttggagtcccggcgatctccttccgtacggtgagcgcgtgcgcggtcctggcgtacctgtccgtgcccaagctcatcgccctcggcgagctccccttccccaaaggtggcgacctcgacgcgcccatccgcggcgtcccggggatggagagcttcctgcgtcgacgagacctcccgatccagttccgccagctcaccagcacgtacgaggagcccttggtagcgggcggtggtcgcggccaccgtgcacagctgctgcaaggccagagctctcatcgtcaacacgaccacgtccctggagaggtcatccctcgggcacctcacgcaggagatgcgcgacgtattcgccgtcgggcctctgcacgccatgtcccccgcgccggcggtggcctcgagcctgtggcgccccgacgacgggtgcatggcgtggctcgacaaccagcaggcggagcgggccgtggtgtacatcagcctgggtagcctcgccgtcatctcccacgagcagttcaccgagttcctgcacgggctcgtcgccaccggctacccgttcctctgggtgctccggccggatatgctcgtggccagccaggacgccgcgctccgggaagccatcggcgcggtcgggaaagacagggcgtgcgtcgtncngtgggtgccgcagcgagacgtgctgcggcaccgcgccgtggggtgctttctgacgcacagcgggtggaactcgacgatggagggcatcgtcgagggcgtgcccatggtgtgctggcccttcttcgccgaccagcagatcaacagccgcttcgtaggcgccgtgtggaggaacgggctggacatgaaggacgtgtgcgacagagttgtggtggagagcacggtgagggaagcaatggagtccgaagagatcaggaggtcggttcatgctctggcggagcaggtgaagcgtgacgtcgccgacgacggggcatcggcgttggaattcaagcgcctcatcagcttcatcacggagctcagcacgtcagcagcacagggaaccccatcttcaaaatcgtgaagtgaatgaatgaatcgaaagtaaacttgatagatacgcaccggattcaacaaccggctgaggggtgttttggaatgttatttttgaaggaatttctattttctc

SEQ ID NO: 18420 - protein, 322 aa, Zea mays subsp. mays
  misc_feature (1)..(322): Ceres Seq. ID no. 12365125
HGHTPTPAWPHPFPLNRRHRRRAAHWDRAAMAAAAAAHVLVFPAPAQGHLNSFLHFSTGLLRAGLHVTFLHTDHNLRRLGTAAAEATVASPRLRFLSVPDGLPDDDPRTVDGLPELMESLRTKASASYRALLASLRAGGGGFPPVTCVVADGIMPFVVDVAEELGVPAISFRTVSACAVLAYLSVPKLIALGELPFPKGGDLDAPIRGVPGMESFLRRRDLPIQFRQLTSTYEEPLVAGGGRGHRAQLLQGQSSHRQHDHVPGEVIPRAPHAGDARRIRRRASARHVPRAGGGLEPVAPRRRVHGVARQPAGGAGRGVHQPG

SEQ ID NO: 18421 - protein, 292 aa, Zea mays subsp. mays
  misc_feature (1)..(292): Ceres Seq. ID no. 12365126
MAAAAAAHVLVFPAPAQGHLNSFLHFSTGLLRAGLHVTFLHTDHNLRRLGTAAAEATVASPRLRFLSVPDGLPDDDPRTVDGLPELMESLRTKASASYRALLASLRAGGGGFPPVTCVVADGIMPFVVDVAEELGVPAISFRTVSACAVLAYLSVPKLIALGELPFPKGGDLDAPIRGVPGMESFLRRRDLPIQFRQLTSTYEEPLVAGGGRGHRAQLLQGQSSHRQHDHVPGEVIPRAPHAGDARRIRRRASARHVPRAGGGLEPVAPRRRVHGVARQPAGGAGRGVHQPG

SEQ ID NO: 18422 - protein, 237 aa, Zea mays subsp. mays
  misc_feature (1)..(237): Ceres Seq. ID no. 12365127
  misc_feature (105)..(105): Xaa is any aa, unknown or other
  misc_feature (106)..(106): Xaa is any aa, unknown or other
MRDVFAVGPLHAMSPAPAVASSLWRPDDGCMAWLDNQQAERAVVYISLGSLAVISHEQFTEFLHGLVATGYPFLWVLRPDMLVASQDAALREAIGAVGKDRACVXXWVPQRDVLRHRAVGCFLTHSGWNSTMEGIVEGVPMVCWPFFADQQINSRFVGAVWRNGLDMKDVCDRVVVESTVREAMESEEIRRSVHALAEQVKRDVADDGASALEFKRLISFITELSTSAAQGTPSSKS

SEQ ID NO: 18423 - DNA, 2115 bp, Zea mays subsp. mays
  misc_feature (1)..(2115): Ceres Seq. ID no. 12365140
ataagaaattcgattttcacccaaccctaagcccctcctccctcgtaatcccactccagccgccgccgcgccgccgcctctagcctccggatccaatccagcatcgccgccgcaaaccatgggcttcgacgtgggcgtcgtcccgttcaaccccgacggctggggtcctcctgacgtcccggcgattccgcagtctctggggcgcggtgcctccatccccttcgcgcccttctcccgctccgacaagctgggccgcatcgccgactggacgcgcaaccacgccggtcccgccgccttcgccgcggcgtcacgggactccgtattcgacttcacctccgcggacgactcgctcgtcgccggggccgaggactcctcgttccgcctcgtcgatgctaagccgcagccgcggccgcaacggttcggccccaagtggcgcttcaaccagcgccagcagctcccacagcgccaagacgaggaggtggaggcgcgccgccgcttggccgagaaggagcgcgcacgccgcgatcgccacttccagaacaaccgctcacatcaccaccctggcttccggggcaaccagccctcgtcgtcagccaagccctccgtcgacatccagcccgactggaccatgcgcgagcagatccccttcgccaacttcaccaagctctccttctccgtgtccgaccagcccgaggatctcctcttatgcggcgccgtcgagtcctacgatcgggcctatgaccgtgtcaaccccaaggccgcgcgccgtctcgagcgcttcaagtcccgcaacttcttcaaggtcaccaccaccgacgaccctgtcatccgccgcctcgctgaggaggacaaagccacggtgttcgcgactgatgccatcctcgccgctctcatgtgcacgccccgcagcatcctgtcgtgggacattgtcgtgcagcgtgtgggcaacaagctgttccttgacaagcgtgatggctcccagctcgacctgctcactgtcaatgagactgcgcaggagcagcttcctgagaacaaggatgacatcaactccgcacactcgctcgctgttgaggccacctacatcaaccagaacttctctcagcaggtgctgcaccgcaatggtgagaaggttaactttgacgagcccaacccatttgcttctgagggtgaagaggctgcatctgttggctaccgctaccgccgttggaagttgaatgatgagatcagccttgttgctcgctgtgaggtgcatgctgtcagtgttgatcaaagtggtactcgccagtttattaccgtcaatgccctaaatgagtttgattcaaagattactggtgttgactggaggcagaagcttgagacccagcgtggagctgtccttgctacagagctcaagaacaatgccaacaaacttgctcgctggactgcccaggctttgcttgctggtgctgacatgatgaagttgggctatgtgtcacgggtgaacccccgtgatcagtacaaccattctgtgctcactgtgatgggatacaagccaagggattttgctgcacagatcaacctcaacactgcaaacatgtggggaatcgtcaagtcaattgtggacatctgcatgaagtttgaagagggcaagtatgtgtttgtcaaagatccagcaaagccacagttgaggatctatgaggtaccatctgatgcgtttgagaatgattatgttgaagagccacttccagaggaggagcaggttcgcccgcttggagaagttgacgccactgcagaggaaatggatgcagttgctgaggcagaggccaacaatgtatcttctgctaatggtggtgagggtgggaagagtgcagaagcgacccttgcttgaagggaatagagggttcttttaccctttgcaagaaaattcccttttttggttaattatctgtgtcgtggaagacatgatccgctggtattgatacatgtcttcttatggctaatgcgaaaactatcacatttgtttttttttctctttcatgcttagacatgctatagtttttttaagcacccctcgatcgtttctgctgcaatgtttctgtgtaagaactattgaatctgattctgtgtttttttgtt

SEQ ID NO: 18424 - protein, 582 aa, Zea mays subsp. mays
  misc_feature (1)..(582): Ceres Seq. ID no. 12365141
MGFDVGVVPFNPDGWGPPDVPAIPQSLGRGASIPFAPFSRSDKLGRIADWTRNHAGPAAFAAASRDSVFDFTSADDSLVAGAEDSSFRLVDAKPQPRPQRFGPKWRFNQRQQLPQRQDEEVEARRRLAEKERARRDRHFQNNRSHHHPGFRGNQPSSSAKPSVDIQPDWTMREQIPFANFTKLSFSVSDQPEDLLLCGAVESYDRAYDRVNPKAARRLERFKSRNFFKVTTTDDPVIRRLAEEDKATVFATDAILAALMCTPRSILSWDIVVQRVGNKLFLDKRDGSQLDLLTVNETAQEQLPENKDDINSAHSLAVEATYINQNFSQQVLHRNGEKVNFDEPNPFASEGEEAASVGYRYRRWKLNDEISLVARCEVHAVSVDQSGTRQFITVNALNEFDSKITGVDWRQKLETQRGAVLATELKNNANKLARWTAQALLAGADMMKLGYVSRVNPRDQYNHSVLTVMGYKPRDFAAQINLNTANMWGIVKSIVDICMKFEEGKYVFVKDPAKPQLRIYEVPSDAFENDYVEEPLPEEEQVRPLGEVDATAEEMDAVAEAEANNVSSANGGEGGKSAEATLA

SEQ ID NO: 18425 - protein, 412 aa, Zea mays subsp. mays
  misc_feature (1)..(412): Ceres Seq. ID no. 12365142
MREQIPFANFTKLSFSVSDQPEDLLLCGAVESYDRAYDRVNPKAARRLERFKSRNFFKVTTTDDPVIRRLAEEDKATVFATDAILAALMCTPRSILSWDIVVQRVGNKLFLDKRDGSQLDLLTVNETAQEQLPENKDDINSAHSLAVEATYINQNFSQQVLHRNGEKVNFDEPNPFASEGEEAASVGYRYRRWKLNDEISLVARCEVHAVSVDQSGTRQFITVNALNEFDSKITGVDWRQKLETQRGAVLATELKNNANKLARWTAQALLAGADMMKLGYVSRVNPRDQYNHSVLTVMGYKPRDFAAQINLNTANMWGIVKSIVDICMKFEEGKYVFVKDPAKPQLRIYEVPSDAFENDYVEEPLPEEEQVRPLGEVDATAEEMDAVAEAEANNVSSANGGEGGKSAEATLA

SEQ ID NO: 18426 - protein, 324 aa, Zea mays subsp. mays
  misc_feature (1)..(324): Ceres Seq. ID no. 12365143
MCTPRSILSWDIVVQRVGNKLFLDKRDGSQLDLLTVNETAQEQLPENKDDINSAHSLAVEATYINQNFSQQVLHRNGEKVNFDEPNPFASEGEEAASVGYRYRRWKLNDEISLVARCEVHAVSVDQSGTRQFITVNALNEFDSKITGVDWRQKLETQRGAVLATELKNNANKLARWTAQALLAGADMMKLGYVSRVNPRDQYNHSVLTVMGYKPRDFAAQINLNTANMWGIVKSIVDICMKFEEGKYVFVKDPAKPQLRIYEVPSDAFENDYVEEPLPEEEQVRPLGEVDATAEEMDAVAEAEANNVSSANGGEGGKSAEATLA

SEQ ID NO: 18427 - DNA, 1143 bp, Zea mays subsp. mays
  misc_feature (1)..(1143): Ceres Seq. ID no. 12365155
aaaagaatcacctcctcaacctccagcccaacctccagcccgggatcgagagcaatggcgctcgccaaggccaaggagatcgttgcctccgctcccctcgtcgtcttcagcaaaacttcctgccctttctgcgtccgtgtgaagcagttgttcgagaagctcggagcaagcctacaaggccattggcaacgggtacaggctggccgacaacaagttcgccgacctgacgaacgaggagttcagggccaagatgctgggcttcggacggcctcgcagcggaggcggagccgggcactccacagcgccgagcaccgtggcttgtattggaagtggactgatgggtcgtcagggttattctgatctaccgaaaagcgtggactggcgagagaagggagctgtcgcgccggtgaagagccagggggactgtggctcttgctgggcgttctccgccgttgcggccatcgagggcatcaaccagatcaagaacgggaagctggtgtccctgtcggagcaggagctggtggactgcgacaccaaggccatcggctgcgccggcgggtacatgagctgggccttcgagttcgtcatgaagaaccgcggcctcaccaccgaacggaactacccgtatcaagggctgaacggcgcctgccagacgccgaagctgaaggagagcgcggtgagcatctccgggtacatgaacgtgacgcccagcagcgagccggacctcctgcgggccgccgcggcgcagccggtgtccgtggccgtggacgccggcagcttcgtgtggcagctctacggcggcggcgtcttcacgggaccctgcaccgccgagctgaaccacggcgtcacggtggtcgggtacggcgagacccagggggacacggacggcgacggtagcggcgtgcccgggaagaagtactggatcgtcaagaactcgtgggggcccgagtggggcgacgccggctacatcctcatgcaacgcgaagccagcgtcgcgtctggcctctgcggcatcgctatgctcccgagctacccggtcatgtgatccggcggctgccgccgtcgagacctacagctgcagctctaagaacaatcagtcattatgttggccatcttttgaacaaagggcgttcctctttcccc

SEQ ID NO: 18428 - protein, 264 aa, Zea mays subsp. mays
  misc_feature (1)..(264): Ceres Seq. ID no. 12365156
MLGFGRPRSGGGAGHSTAPSTVACIGSGLMGRQGYSDLPKSVDWREKGAVAPVKSQGDCGSCWAFSAVAAIEGINQIKNGKLVSLSEQELVDCDTKAIGCAGGYMSWAFEFVMKNRGLTTERNYPYQGLNGACQTPKLKESAVSISGYMNVTPSSEPDLLRAAAAQPVSVAVDAGSFVWQLYGGGVFTGPCTAELNHGVTVVGYGETQGDTDGDGSGVPGKKYWIVKNSWGPEWGDAGYILMQREASVASGLCGIAMLPSYPVM

SEQ ID NO: 18429 - protein, 235 aa, Zea mays subsp. mays
  misc_feature (1)..(235): Ceres Seq. ID no. 12365157
MGRQGYSDLPKSVDWREKGAVAPVKSQGDCGSCWAFSAVAAIEGINQIKNGKLVSLSEQELVDCDTKAIGCAGGYMSWAFEFVMKNRGLTTERNYPYQGLNGACQTPKLKESAVSISGYMNVTPSSEPDLLRAAAAQPVSVAVDAGSFVWQLYGGGVFTGPCTAELNHGVTVVGYGETQGDTDGDGSGVPGKKYWIVKNSWGPEWGDAGYILMQREASVASGLCGIAMLPSYPVM

SEQ ID NO: 18430 - protein, 160 aa, Zea mays subsp. mays
  misc_feature (1)..(160): Ceres Seq. ID no. 12365158
MSWAFEFVMKNRGLTTERNYPYQGLNGACQTPKLKESAVSISGYMNVTPSSEPDLLRAAAAQPVSVAVDAGSFVWQLYGGGVFTGPCTAELNHGVTVVGYGETQGDTDGDGSGVPGKKYWIVKNSWGPEWGDAGYILMQREASVASGLCGIAMLPSYPVM

SEQ ID NO: 18431 - DNA, 1248 bp, Zea mays subsp. mays
  misc_feature (1)..(1248): Ceres Seq. ID no. 12365169
atcggtgatcggtctcctatgttcacacctgtttgctctcttttcttcccccgttcacctcgcgtgcgccacccacctagggtgaccgccgccgcccttcgcccagccgcccgggttgcgctttgccggcgacgagcgcccaccgcacccccaccatattggtcactggaggattgctgcggttggtaaggatgagcaaaggcccagttccgtttgccaacatcgggaagagagcaaaagatctcctgtacaaggactacaactttgaccaaaagttttctttgtcgacgtctagcggctctggtttgaatctcacagccactggtgtaaagatcaacgaagacttcattggtgatatacggacacagcataaaagcagtagaactactattgatgtcaccgttgatagtgattctaaagtgtcgaccacagtcactgttgatgaagcactaactggtttgaagacttcattcgccttcaaggtccccgatcacaagtctgggaagcttgatctgcaatatgcgcacaatcgtttttcattgaactcgaccattggtttgacatcagcacctttggttgaactggctgcaactgtcggcacaagtgaacttagcattggtgctgaggttgggtttgacagtacttcagctgctgttactaagtacaactcaggaattggatacaacaagtccgatttctcagcttccttactactggctgataaaggggagactttgaaggcatcttacgttcatttgttcaatccgaccaatggagctacagttgcagctgaggtaacacacaagctgaagaccagagagaactatttcacagttgggagctcccatgcccttgatccttcaacattgctaaagacgagattcagcaactccgggaaggtcggtcttctctgtcagcatgagtggaggccgaaatctcttgtgactctttcagctgagtatgatccaaaggtggtaagtgcgccttcaagaatcggcatggccatatcgctcaagccttgagctgggttaagtcaccttctataaaacagtacaagcataccgtctccaagaacacaagctttggagcgatacctagaacaaccctccattttagcctttttttattttgtaagagtctcttgcaaaggagtattgtcgcttgtcagggagttagacttgttttgtggaacgtttccattagagccaactccacacgaaggattgaaaatacagaggtttgcgttag

SEQ ID NO: 18432 - protein, 276 aa, Zea mays subsp. mays
  misc_feature (1)..(276): Ceres Seq. ID no. 12365170
MSKGPVPFANIGKRAKDLLYKDYNFDQKFSLSTSSGSGLNLTATGVKINEDFIGDIRTQHKSSRTTIDVTVDSDSKVSTTVTVDEALTGLKTSFAFKVPDHKSGKLDLQYAHNRFSLNSTIGLTSAPLVELAATVGTSELSIGAEVGFDSTSAAVTKYNSGIGYNKSDFSASLLLADKGETLKASYVHLFNPTNGATVAAEVTHKLKTRENYFTVGSSHALDPSTLLKTRFSNSGKVGLLCQHEWRPKSLVTLSAEYDPKVVSAPSRIGMAISLKP

SEQ ID NO: 18433 - DNA, 1309 bp, Zea mays subsp. mays
  misc_feature (1)..(1309): Ceres Seq. ID no. 12365183
atgcacaggcggactcgcggactcggggctcgtaccaacaggaaaaaaggcccagaggcagtgccgtgaccgattcgagacgcaagagaaggatcgagacgaggcggcggttttccggggcagcatcgtctcggccacgaagatgtcttactcaaggggctcaaggtatggatctcgctcaccttactcgagaagcacaaggtaccgaagtcgctctaggagtgtcgactctagtgatgctgaaaaccctgggaacaacctgtatgtgactggtttgtcggctcgtgtaacggatcgagatctggagaagcacttctccactgagggtgaggtgattgatgcaagcgttgtgtatgatccttggacaagggaatcacgggggtttggttttgttaccatggctgctgttaaagatgcagatcgctgcatcaaatatctggaccgttctgtgttgcaaggtcgggtcataactgttgagaagggtagatgttggtagctgctctgcaacaaactgatacaacctaacaccaaaccatgccaacctcagccaaagggcaaagagaagacgaggtagaaccccaacacctgggaagtatcttggcacaaaatcatcccgtggacggaggtactccacaagctactcacctgatcggaggggccgttacagttcccgctactcacctgatcggagggactgtcatggtagagaccggtcatactctccatatgacagaaggcgatcatactctccttacggcagggatgaatcatattccccttactatggccggcgatcatactcaccttactacagcagacggtatcgttcaaggtccccatactgctacagaagacgcaggtcaccttctgtttcgccatactaccgccggcacaggtacagatctgtctccaagtcatccagttcatctccaagggccagaggacggagctattcgtgcagtttatcaccacagagaagctactcgcgcagccattccccagaatccgagagatcaacaagctattctcctaagaaagggagtaaaagggaaccctcgcgtagcagatactctggcaagagtcgtcattcaagggaaagccactctcatagccgcagttcgtactccaggtctgtgtccagggagcgctcagcttgatctgcgaggtgtgtcgtcctaggtggttataagatatgcgctgtatttgcatctatcagaacttgtgtacttcgtatattacgaacttgagaactgtatggatgtgtgcattgtgccaaattatgttcattctgtgctatctttctgatgct

SEQ ID NO: 18434 - protein, 214 aa, Zea mays subsp. mays
  misc_feature (1)..(214): Ceres Seq. ID no. 12365184
MPTSAKGQREDEVEPQHLGSILAQNHPVDGGTPQATHLIGGAVTVPATHLIGGTVMVETGHTLHMTEGDHTLLTAGMNHIPLTMAGDHTHLTTADGIVQGPHTATEDAGHLLFRHTTAGTGTDLSPSHPVHLQGPEDGAIRAVYHHREATRAAIPQNPRDQQAILLRKGVKGNPRVADTLARVVIQGKATLIAAVRTPGLCPGSAQLDLRGVSS

SEQ ID NO: 18435 - protein, 164 aa, Zea mays subsp. mays
  misc_feature (1)..(164): Ceres Seq. ID no. 12365185
CTGGLADSGLVPTGKKAQRQCRDRFETQEKDRDEAAVFRGSIVSATKMSYSRGSRYGSRSPYSRSTRYRSRSRSVDSSDAENPGNNLYVTGLSARVTDRDLEKHFSTEGEVIDASVVYDPWTRESRGFGFVTMAAVKDADRCIKYLDRSVLQGRVITVEKGRCW

SEQ ID NO: 18436 - protein, 159 aa, Zea mays subsp. mays
  misc_feature (1)..(159): Ceres Seq. ID no. 12365186
MVETGHTLHMTEGDHTLLTAGMNHIPLTMAGDHTHLTTADGIVQGPHTATEDAGHLLFRHTTAGTGTDLSPSHPVHLQGPEDGAIRAVYHHREATRAAIPQNPRDQQAILLRKGVKGNPRVADTLARVVIQGKATLIAAVRTPGLCPGSAQLDLRGVSS

SEQ ID NO: 18437 - DNA, 1372 bp, Zea mays subsp. mays
  misc_feature (1)..(1372): Ceres Seq. ID no. 12365191
atcatcctcaacgccatggccgtgctgatgctcccgctctacctcttcgccacccctatcctgcgcttcttccaccaggacgccgagattgccgcgctcgccggccgcctagcgctctacatgatcccgcagctcttcgcctacgccttcaacttccccatccagaagttcctgcaggcgcagagcaaggtgatggccatggcggtcgtgtcggtggcggcgctgctgctccacgtcgccatcagctggctcctcatggggcccatggggatggggatcgtcggcctggccgtcgcgctcaacgcgtcttggtggctcgtcgtgctgggccagctcgcctacattctcatgggctactgccccggcgcctggaacggattcgactggctcgccttctccgacctctccggcttcgcgcgcctgtcgcttggctccgccgtcatgctctgcctggagttctggttctacatgttcctgatcgtcatcgtcggcaacctggagaacgctcaggtcgccgttgctgcagtctccatttgcacgaacctgttcgggtggcagatcatggtgttcttcggattcaacgcggccatcagcgtgcgggtgtcgaacgagctgggcgccgggcggccccgcgcggccaagttcgcgatcctggtggtgctcatgtcttcggtggccatcgggttggccttcttcgtcctcgtcctggccttccgcgacgtgtacggcgcgcccttcacggaaagccccgaggtggtgcgcgccgtgggccagcctcggcgtcgtcttcgccttctcgctgctcctcaacagcgtgcagccggtgctgtcgggcgttgccgtcggggccggctggcagtggctggtggcgtacatcaacctcggctgctactacctcgttggcatccccgtcgggtacatcatcgccttcccgctgcgcggcggggtgcaggggatgtggggcggcatgctcacgggcgtcggcctgcagaccctcatcctggtcgccatcacgctgcgcaccaactgggacaaggaggccagcgaggcccattccaggatacagaaatggggtggatcggcggcggccaaagtttcacatgcatgactagtctgaatgacgcgcgccaccatgagaatacaatacaacagatgccatgcgagcagaatggcatgctgcggtgcgtaagcttgattgtacgtgcaggttgcgttttgggctgcttaagtagttggagacaaagtcatacttaggttgttttgtttccagcagatatatgcttgtaaaacacgtattgtgccatagactgcatgattcttagcagagtttgaaatagaaaataatatatctctactactacttaattacctg

SEQ ID NO: 18438 - protein, 417 aa, Zea mays subsp. mays
  misc_feature (1)..(417): Ceres Seq. ID no. 12365192
IILNAMAVLMLPLYLFATPILRFFHQDAEIAALAGRLALYMIPQLFAYAFNFPIQKFLQAQSKVMAMAVVSVAALLLHVAISWLLMGPMGMGIVGLAVALNASWWLVVLGQLAYILMGYCPGAWNGFDWLAFSDLSGFARLSLGSAVMLCLEFWFYMFLIVIVGNLENAQVAVAAVSICTNLFGWQIMVFFGFNAAISVRVSNELGAGRPRAAKFAILVVLMSSVAIGLAFFVLVLAFRDVYGAPFTESPEVVRAVGQPRRRLRLLAAPQQRAAGAVGRCRRGRLAVAGGVHQPRLLLPRWHPRRVHHRLPAARRGAGDVGRHAHGRRPADPHPGRHHAAHQLGQGGQRGPFQDTEMGWIGGGQSFTCMTSLNDARHHENTIQQMPCEQNGMLRCVSLIVRAGCVLGCLSSWRQSHT

SEQ ID NO: 18439 - protein, 412 aa, Zea mays subsp. mays
  misc_feature (1)..(412): Ceres Seq. ID no. 12365193
MAVLMLPLYLFATPILRFFHQDAEIAALAGRLALYMIPQLFAYAFNFPIQKFLQAQSKVMAMAVVSVAALLLHVAISWLLMGPMGMGIVGLAVALNASWWLVVLGQLAYILMGYCPGAWNGFDWLAFSDLSGFARLSLGSAVMLCLEFWFYMFLIVIVGNLENAQVAVAAVSICTNLFGWQIMVFFGFNAAISVRVSNELGAGRPRAAKFAILVVLMSSVAIGLAFFVLVLAFRDVYGAPFTESPEVVRAVGQPRRRLRLLAAPQQRAAGAVGRCRRGRLAVAGGVHQPRLLLPRWHPRRVHHRLPAARRGAGDVGRHAHGRRPADPHPGRHHAAHQLGQGGQRGPFQDTEMGWIGGGQSFTCMTSLNDARHHENTIQQMPCEQNGMLRCVSLIVRAGCVLGCLSSWRQSHT

SEQ ID NO: 18440 - protein, 408 aa, Zea mays subsp. mays
  misc_feature (1)..(408): Ceres Seq. ID no. 12365194
MLPLYLFATPILRFFHQDAEIAALAGRLALYMIPQLFAYAFNFPIQKFLQAQSKVMAMAVVSVAALLLHVAISWLLMGPMGMGIVGLAVALNASWWLVVLGQLAYILMGYCPGAWNGFDWLAFSDLSGFARLSLGSAVMLCLEFWFYMFLIVIVGNLENAQVAVAAVSICTNLFGWQIMVFFGFNAAISVRVSNELGAGRPRAAKFAILVVLMSSVAIGLAFFVLVLAFRDVYGAPFTESPEVVRAVGQPRRRLRLLAAPQQRAAGAVGRCRRGRLAVAGGVHQPRLLLPRWHPRRVHHRLPAARRGAGDVGRHAHGRRPADPHPGRHHAAHQLGQGGQRGPFQDTEMGWIGGGQSFTCMTSLNDARHHENTIQQMPCEQNGMLRCVSLIVRAGCVLGCLSSWRQSHT

SEQ ID NO: 18441 - DNA, 1829 bp, Zea mays subsp. mays
  misc_feature (1)..(1829): Ceres Seq. ID no. 12365195
ttcttctcccccagatctctctcttcttctcttgcgaagtcgccaaggccagtccccaatccccatccagccagaccgccggcgatgacggaccaccgcgacgtgatgttgcccttgtccctccaatacatagccacccgtgccctcctcctgctcgtcatcgcgtccgccgtttcctgctcttccttgccgccggaggacggcatccgggtcgtctctgcagagaaaagaatcgacctcacgggtcccatcgtcaaagtcttcctaacattgaaggttgagaatgctcccacggcctctgaagcatcacgagttctcctcgccttcacgcccacagagtttcaacatctctctattgtcaaggccacaagagcggaggggaagcgcaagaagaaggcattcgtacccctctcggtccaagcctctgagctcgccaccaccgctcccgacgcccctcgcctctactctgttctgctcagcactcctctgaaaccgggcgatgcaaccactctagaagtgctatacatgctcactcactctttagagcccttccccgctgagattagccagtcagagtcccagttggtttactaccgtgacagtgcggtgcttctctcgccctaccatgtcctggagcaggttacctacatcaaaatgccaagcaataggatcgaatccttcacaagggtcgatcctaccacacgagctggttctgaagtgaaatatggcacatacagtaaccagatgccaaactcctatttgccagttcttgtgcattatgagaataaccgcccatttgctgttgttgaggagcttgtacgcaaggtggagatttctcactggggaaacatccaaatcaccgagcagtataaactgaaacacggtggtgctcgtcacaaaggagtcttttccaggcttgagtatcaatctaggccatctatcagtggagcttcgtcctttaagaatcttcttgcaaggctgccacctcgggttcattcagtttactatcgtgatgagattggtaacatctcctcatcccatctgcgcactgattcacacaagtccgatctagaaattgagcccagatatccgttatttggtgggtggcactgcacgttcaccattggctatggtcttccattgcaagattttgtctttgagtcagttgatggccggcgctacatcaaccttacttttggttgccctctattggatactgtggttgacgatcttacagttaaagttgtgcttcctgaaggatcaaaaaatccagagcatgtagttccttttgtgacagagaaacatcttgagactagttattcataccttgacgttgttggaaggacgacggttgtactgaagaagaaaaatgttgtaggggagcacaacgttcctttccaggtgtactatgaattcaatccgatcttcatgctggcggaaccattgatgctgatatctgcagtgttgctgtttttcgttgccttcattgcgtatcttcacatggatctttccatcagaaaatcatcataggcctgttggcaattctgtccaccacagtattttttgaggcacatgttctgctaactgtgattgatgaagtaacaatccttgttctagcgcactagttgaactgtttatcagtgcaccatccccaatggagaaggacgatgtttttttttttgtgtgtgtgtgggtggaatatgattgcttcatgtagggctcacaacgatcagaaacgatatcatctataggaaaacgattgcctagaaatttagctggtttcataattaatcaacgtggtgactacaatacgatattgatatatgttc

SEQ ID NO: 18442 - protein, 509 aa, Zea mays subsp. mays
  misc_feature (1)..(509): Ceres Seq. ID no. 12365196
FFSPRSLSSSLAKSPRPVPNPHPARPPAMTDHRDVMLPLSLQYIATRALLLLVIASAVSCSSLPPEDGIRVVSAEKRIDLTGPIVKVFLTLKVENAPTASEASRVLLAFTPTEFQHLSIVKATRAEGKRKKKAFVPLSVQASELATTAPDAPRLYSVLLSTPLKPGDATTLEVLYMLTHSLEPFPAEISQSESQLVYYRDSAVLLSPYHVLEQVTYIKMPSNRIESFTRVDPTTRAGSEVKYGTYSNQMPNSYLPVLVHYENNRPFAVVEELVRKVEISHWGNIQITEQYKLKHGGARHKGVFSRLEYQSRPSISGASSFKNLLARLPPRVHSVYYRDEIGNISSSHLRTDSHKSDLEIEPRYPLFGGWHCTFTIGYGLPLQDFVFESVDGRRYINLTFGCPLLDTVVDDLTVKVVLPEGSKNPEHVVPFVTEKHLETSYSYLDVVGRTTVVLKKKNVVGEHNVPFQVYYEFNPIFMLAEPLMLISAVLLFFVAFIAYLHMDLSIRKSS

SEQ ID NO: 18443 - protein, 481 aa, Zea mays subsp. mays
  misc_feature (1)..(481): Ceres Seq. ID no. 12365197
MTDHRDVMLPLSLQYIATRALLLLVIASAVSCSSLPPEDGIRVVSAEKRIDLTGPIVKVFLTLKVENAPTASEASRVLLAFTPTEFQHLSIVKATRAEGKRKKKAFVPLSVQASELATTAPDAPRLYSVLLSTPLKPGDATTLEVLYMLTHSLEPFPAEISQSESQLVYYRDSAVLLSPYHVLEQVTYIKMPSNRIESFTRVDPTTRAGSEVKYGTYSNQMPNSYLPVLVHYENNRPFAVVEELVRKVEISHWGNIQITEQYKLKHGGARHKGVFSRLEYQSRPSISGASSFKNLLARLPPRVHSVYYRDEIGNISSSHLRTDSHKSDLEIEPRYPLFGGWHCTFTIGYGLPLQDFVFESVDGRRYINLTFGCPLLDTVVDDLTVKVVLPEGSKNPEHVVPFVTEKHLETSYSYLDVVGRTTVVLKKKNVVGEHNVPFQVYYEFNPIFMLAEPLMLISAVLLFFVAFIAYLHMDLSIRKSS

SEQ ID NO: 18444 - protein, 474 aa, Zea mays subsp. mays
  misc_feature (1)..(474): Ceres Seq. ID no. 12365198
MLPLSLQYIATRALLLLVIASAVSCSSLPPEDGIRVVSAEKRIDLTGPIVKVFLTLKVENAPTASEASRVLLAFTPTEFQHLSIVKATRAEGKRKKKAFVPLSVQASELATTAPDAPRLYSVLLSTPLKPGDATTLEVLYMLTHSLEPFPAEISQSESQLVYYRDSAVLLSPYHVLEQVTYIKMPSNRIESFTRVDPTTRAGSEVKYGTYSNQMPNSYLPVLVHYENNRPFAVVEELVRKVEISHWGNIQITEQYKLKHGGARHKGVFSRLEYQSRPSISGASSFKNLLARLPPRVHSVYYRDEIGNISSSHLRTDSHKSDLEIEPRYPLFGGWHCTFTIGYGLPLQDFVFESVDGRRYINLTFGCPLLDTVVDDLTVKVVLPEGSKNPEHVVPFVTEKHLETSYSYLDVVGRTTVVLKKKNVVGEHNVPFQVYYEFNPIFMLAEPLMLISAVLLFFVAFIAYLHMDLSIRKSS

SEQ ID NO: 18445 - DNA, 1320 bp, Zea mays subsp. mays
  misc_feature (1)..(1320): Ceres Seq. ID no. 12365213
gtcaggacccggaccaaaccaatcagggcggctcgggcgcggcggcgacacagggcaaggaggccgaacgttggggggaccggggctcgacgccagccgtggatcgcctgcggagggggacaagcgtctgcctcatgtcccgcgacggcggggaatagggcgacggcgtcggcggcggggatcggttgcggcggcgtgacgaggcggctacggcggcggctcgggagggaggcggcaccatgtctgcggtagtctgtggcaagaggtcctcctccatcttcgccgacgagctcctcccgccgtctccttcctcccctcactcctcccaccagccggcggccaagaggtcccgccgctccccctcgcaccgcggcggctccgacggactccgaccggaggcgctcgtcgactatctacttgccctcttccccgacatggatccacagttacttgaaaaagctctggaagcatctggagatgacttggattctgcgataaaaagtttgaatttgctgcgcttagagtcagcagaagctatcttgtcatcgactggtttcaaacctgaaaattgtctgcaaacagccaattcagccttctcttgaaggtattcctaatggtggtgtggatacggttacagaacatccgcctagcgtagataattaccagacaagttataatggctctgaatgggttgagctattagtcacagagatgagaaatgcttctgacataaacgatgcacgggctcgtgcgtcaagagctctggaggctttggagaaaacgattgtagagcgtgcaggagctgaagctacacaaaacctgcataaggaaaacatgatgctcaaggagcagttgactgttgttctgcgagagaactccgtgctgaagcgggcagtcgccattcagcacgagcgccaaaaggagttcgacgagaggtctcacgaggtccagaacttgaagcaacttgttctgcagtaccaggagcaagttaggactctagagatgaacaactacgccctcacaatgcatctcaagcaggctcaacagaacagctccatacctgggcgtttcaaccctgatgttttctaagcgtagtagctgctgaacggtccgccccagattaataagctatgtatgaatatatcttgttctaccaactgctcctgagatggggatatccgataggtggattcaccgcccaagggtccagaattttcaagtcactatggttttgatttcgatatactccgtatttatttaaacgtgttgctttcatgcaattggctatccgatatattgtgtgcgcccacttttccgggc

SEQ ID NO: 18446 - protein, 125 aa, Zea mays subsp. mays
  misc_feature (1)..(125): Ceres Seq. ID no. 12365214
MRNASDINDARARASRALEALEKTIVERAGAEATQNLHKENMMLKEQLTVVLRENSVLKRAVAIQHERQKEFDERSHEVQNLKQLVLQYQEQVRTLEMNNYALTMHLKQAQQNSSIPGRFNPDVF

SEQ ID NO: 18447 - protein, 120 aa, Zea mays subsp. mays
  misc_feature (1)..(120): Ceres Seq. ID no. 12365215
MSAVVCGKRSSSIFADELLPPSPSSPHSSHQPAAKRSRRSPSHRGGSDGLRPEALVDYLLALFPDMDPQLLEKALEASGDDLDSAIKSLNLLRLESAEAILSSTGFKPENCLQTANSAFS

SEQ ID NO: 18448 - protein, 84 aa, Zea mays subsp. mays
  misc_feature (1)..(84): Ceres Seq. ID no. 12365216
MMLKEQLTVVLRENSVLKRAVAIQHERQKEFDERSHEVQNLKQLVLQYQEQVRTLEMNNYALTMHLKQAQQNSSIPGRFNPDVF

SEQ ID NO: 18449 - DNA, 1746 bp, Zea mays subsp. mays
  misc_feature (1)..(1746): Ceres Seq. ID no. 12365228
atcatctcatttgctgcgttgttttgtttgccgcgcccacaaataggcgccagttcatccgcttccattcctagttctcaccacccagaagtccacctccttgttgccttcctccaatcccaaatctcacctccttccagttccagctatcgcttctcgtgttggctcgcctcttcctccattcagtggctccttagatcggctcagggacacaccagctgatcgtgtcggcgccgaatctagtggcaatttctcgctattgttgccccggagcagtggtttggatccaagaaagcggccgaccttcttggttgtatatcctcccgcaatggcggcgctcctggagctgttcctgggctcctcgtccgcaccggtggactgggaggcagaggcctacccggcgtacggggacttcgccgtgctacccttactcgtcgcctttttccccgccgtccggttcctcctcgaccgactcgtcttcgaggttttagcacggaaacttatatttggaaaagaacatgataagctttctgaaacagatgacagtagaaagaaaatcaataaatttaaggaatcagcatggaagtttgtttattttctttctggagaactgctttcactatctgtaacatacaatgagccatggtttaagaacaccagatacttttggataggccctggtgaccagatctggcctgatcaaatgataaaactgaagctcaaagctgtctacatgtatgctgctggattttacacatattcaattttcgctcttctgttctgggaaacaaggcgttcggactttggagtatcaatgtcccaccatatagcaactgttgttctgattgttctttcctacattttcagatttgctcgtgttggctctgttgttttagcccttcatgatgcaagtgatatattcctagagattgggaagatggccaagtacagtagctgcgagtggctagcagttgtggcatttcttcttttcgtggcatcgtggatacttctccggcttgttatattccctttctggatcctaagaagcacaagctatgaagtactgctgaccctggacaaggagaaacatcagttttatggccccatatactattatgttttcaactgtcttctgttctcactcctagttcttcacatatattggtgggtactgatatggcggatgctagttaagcagattcaatcgaaagggcatgttggtgatgatgttcgatccgattctgaaggcgaagaggaacatgaagattaactttttaggttgaatgcttaactgaagaactatgttgtgtgatacctacagcaaggcacaccttctgaaaccacctttttccttctaaagaagatttgcagatattagattttattagatcatatcattctttcagcatcaaagatgacaactatcatttgcgagttgccactgaagccgtctgtgctcttggatgtttgcatgaaaacagaagtgaattgtatttttttcccagtcaaccgtcgtttgtaaaagatacagaataatcgcttgttcatccattcttgtaactagacagttgatttgatttcaaatcatgtaatttgctacatcagcttagttgattacttggtgtatcatccattatgatgtaaatgggagtcttgggaagttcacaacaagaatgtgacactatgtactgttatttctcctattattttaataagagcacagagaagtagcccaagtgcaaggat

SEQ ID NO: 18450 - protein, 313 aa, Zea mays subsp. mays
  misc_feature (1)..(313): Ceres Seq. ID no. 12365229
MAALLELFLGSSSAPVDWEAEAYPAYGDFAVLPLLVAFFPAVRFLLDRLVFEVLARKLIFGKEHDKLSETDDSRKKINKFKESAWKFVYFLSGELLSLSVTYNEPWFKNTRYFWIGPGDQIWPDQMIKLKLKAVYMYAAGFYTYSIFALLFWETRRSDFGVSMSHHIATVVLIVLSYIFRFARVGSVVLALHDASDIFLEIGKMAKYSSCEWLAVVAFLLFVASWILLRLVIFPFWILRSTSYEVLLTLDKEKHQFYGPIYYYVFNCLLFSLLVLHIYWWVLIWRMLVKQIQSKGHVGDDVRSDSEGEEEHED

SEQ ID NO: 18451 - protein, 188 aa, Zea mays subsp. mays
  misc_feature (1)..(188): Ceres Seq. ID no. 12365230
MIKLKLKAVYMYAAGFYTYSIFALLFWETRRSDFGVSMSHHIATVVLIVLSYIFRFARVGSVVLALHDASDIFLEIGKMAKYSSCEWLAVVAFLLFVASWILLRLVIFPFWILRSTSYEVLLTLDKEKHQFYGPIYYYVFNCLLFSLLVLHIYWWVLIWRMLVKQIQSKGHVGDDVRSDSEGEEEHED

SEQ ID NO: 18452 - protein, 178 aa, Zea mays subsp. mays
  misc_feature (1)..(178): Ceres Seq. ID no. 12365231
MYAAGFYTYSIFALLFWETRRSDFGVSMSHHIATVVLIVLSYIFRFARVGSVVLALHDASDIFLEIGKMAKYSSCEWLAVVAFLLFVASWILLRLVIFPFWILRSTSYEVLLTLDKEKHQFYGPIYYYVFNCLLFSLLVLHIYWWVLIWRMLVKQIQSKGHVGDDVRSDSEGEEEHED

SEQ ID NO: 18453 - DNA, 1691 bp, Zea mays subsp. mays
  misc_feature (1)..(1691): Ceres Seq. ID no. 12365235
ctgggccgttactagcttagctcatatacgtacgtacgcaggctgcaagtgatcgagaggagcaatataatggctggttcttccatggacactgaagctgcaggcaaggagctcaagcagggcagcggcggcggcggcggctacaccatgccggctactgctcatgcggtggacacagactcgtggcagcaggtggggctgctcctggtgatcggcttcaactgcgcctacgtgctcagcttctccaacctcatgatggtgcccctgggctgggcgtggggcgtcgcctgcctgctgctcgtcggcgccgccgcgtggtacgccaactggctcctcgccggcctccacttcgtcgacggccagaggttcatccgctacagggacctcatgggcttcatattcgggaggaacatgtactacatcacctggttcctgcagttcgcaactctacttctgtgcaacatgggcttcattttgctaggagcaagagcgctcaaggcaatcaacacggagtttacccacaccccagccaggctgcagtggttcatcacggccacgggaatcgtctacttcgccttcgcctacttcgtgccgacgatttctgccatgaggaactggctcgccacgtcggcggcgctgacgttagcttacgacgtcgctctgctggctatcttgatcagagatgggaaatcgaacaagcagaaggactatgacgtccatgccggatcccaagccgagaaggtgttcaacgcgttgggcgccgtcgctgccatcctcgtctgcaacacgtccgggctgctcccggagatacagtcgacggtgcgggagccggcggtgcgcggcatgaggcgggcgctgctgctgcagtacaccgccggcgccgcggggtactacggcatcagcgtggcggggtactgggcgtacgggtcagcggtgtcggagtacctccccaacgagctcggcggcccgaggtgggccgccgtcctcatcaacgccaccgccttcctgcagagcattgtgtcccaacacctgtttacggtgccgatccacgaggcgatggacacgcggctgcagcggctggacgaaggcatattctcccgctacaacctcacgcgccgcgtgcgcgcgggggctcgtcttcggcttcaacgtcttcgtcaccgcgctgttcccgttcatgggggatttcgtcaacctcgtcggctccttagcgctcgtcccgctcaccttcacgttccccagcatggccgtcctcaagatcaaaggcaagagctgtgggagatgtaacagactttggcattggggcatcatagttctgtcctcggctctctgcgttgctaccaccgccgccgccgttcgtttgatcttcaacaatgctaggatctaccacttcttcgccgacatgtagcgagcgagtagtagtgggattgacatgtgtatcgtcaccatgaggtgatagtatggccacttcgttctcaattttttgtttgcttcaagagtggaagggtacggtggtcacttagctcatgtttgataatggcactacatgattaataagcatgcatcatgtacgtagtcatcctatcaaaatttagaaatgagcttattgtaatcgatggaccacctccctctaaccaaacatctctgttttccgtgaaagcttaaaaggcaactcgtgaatgtgttctttt

SEQ ID NO: 18454 - protein, 405 aa, Zea mays subsp. mays
  misc_feature (1)..(405): Ceres Seq. ID no. 12365236
MAGSSMDTEAAGKELKQGSGGGGGYTMPATAHAVDTDSWQQVGLLLVIGFNCAYVLSFSNLMMVPLGWAWGVACLLLVGAAAWYANWLLAGLHFVDGQRFIRYRDLMGFIFGRNMYYITWFLQFATLLLCNMGFILLGARALKAINTEFTHTPARLQWFITATGIVYFAFAYFVPTISAMRNWLATSAALTLAYDVALLAILIRDGKSNKQKDYDVHAGSQAEKVFNALGAVAAILVCNTSGLLPEIQSTVREPAVRGMRRALLLQYTAGAAGYYGISVAGYWAYGSAVSEYLPNELGGPRWAAVLINATAFLQSIVSQHLFTVPIHEAMDTRLQRLDEGIFSRYNLTRRVRAGARLRLQRLRHRAVPVHGGFRQPRRLLSARPAHLHVPQHGRPQDQRQELWEM

SEQ ID NO: 18455 - protein, 400 aa, Zea mays subsp. mays
  misc_feature (1)..(400): Ceres Seq. ID no. 12365237
MDTEAAGKELKQGSGGGGGYTMPATAHAVDTDSWQQVGLLLVIGFNCAYVLSFSNLMMVPLGWAWGVACLLLVGAAAWYANWLLAGLHFVDGQRFIRYRDLMGFIFGRNMYYITWFLQFATLLLCNMGFILLGARALKAINTEFTHTPARLQWFITATGIVYFAFAYFVPTISAMRNWLATSAALTLAYDVALLAILIRDGKSNKQKDYDVHAGSQAEKVFNALGAVAAILVCNTSGLLPEIQSTVREPAVRGMRRALLLQYTAGAAGYYGISVAGYWAYGSAVSEYLPNELGGPRWAAVLINATAFLQSIVSQHLFTVPIHEAMDTRLQRLDEGIFSRYNLTRRVRAGARLRLQRLRHRAVPVHGGFRQPRRLLSARPAHLHVPQHGRPQDQRQELWEM

SEQ ID NO: 18456 - protein, 379 aa, Zea mays subsp. mays
  misc_feature (1)..(379): Ceres Seq. ID no. 12365238
MPATAHAVDTDSWQQVGLLLVIGFNCAYVLSFSNLMMVPLGWAWGVACLLLVGAAAWYANWLLAGLHFVDGQRFIRYRDLMGFIFGRNMYYITWFLQFATLLLCNMGFILLGARALKAINTEFTHTPARLQWFITATGIVYFAFAYFVPTISAMRNWLATSAALTLAYDVALLAILIRDGKSNKQKDYDVHAGSQAEKVFNALGAVAAILVCNTSGLLPEIQSTVREPAVRGMRRALLLQYTAGAAGYYGISVAGYWAYGSAVSEYLPNELGGPRWAAVLINATAFLQSIVSQHLFTVPIHEAMDTRLQRLDEGIFSRYNLTRRVRAGARLRLQRLRHRAVPVHGGFRQPRRLLSARPAHLHVPQHGRPQDQRQELWEM

SEQ ID NO: 18457 - DNA, 1174 bp, Zea mays subsp. mays
  misc_feature (1)..(1174): Ceres Seq. ID no. 12365255
atagcaaatccgcgaccccgagcaagaagccaggaaccagctcaaagttattcgtccaagaaccccaccccacccccacaacacatagaaatttcgtcttggagagccaccaatggcttgttccactgcatctttagcggcgatgctgctggcgttcgcgctgatgttccaggcctgcgtcgcggggaggaggaggctcaccgcgctcgtgcaggagccggccatcaccatgaagtaccacaagggcgcgctcctgtcgggccccatcgccgtcaacttcatctggtacggcgacttcacggcgccacagcgggcggtgatcaccgacttcgtctcgtcgctgtccgcggccccgcgggcggcggcgcagtcgcagccggagccgtccgtgtccacgtggttcaagacggcgcgcaagtactacgacacctccaaggcgcgtttcccggcgctgcgcctcggctcccacgccgtcgaccggaactgctccctcggcaggcggctcacggagcgggacctcctcaggctcgccgccaggggggcaccgagccgcgccatcaacctggtgctcacggccgccgacgtggccgtggacgggttctgcgcgtcccgttgcggcacgcacggcgcgtccccgcggtcccgcgccggccggttcgcgtacgtgtgggtgggcaacccggcgtcgcagtgccccggacagtgcgcgtggccgttccaccagcccgtctacggcccgcaggcgccgccgctcacgccccccaacgccgacgtcggggtcgacggcatggtgatctcgctggcgtccatgatcgtcggcaccgtcaccaacccgttcggcaacggggttctaccaggagggctcggccgacgcgccgctcgaggccgccacggcgtgcgccggcgtgtacggcaagggcgcgtaccccggctacgcgggggcgctgctggtggacccggccagcggcgccagcttcaatgccaacggggcccacgggagaaagtacctggtcccggcgctcgtggatccggacacgtcgtcgtgtgccaccttggggtagatttcgcggatcgtaaattagtgtttgcgatgtggcggtggtggtgctgtggagtgtgttccacgcggctaaaagtttgtgctaaagtagtactgaccaggttgcattattcc

SEQ ID NO: 18458 - protein, 358 aa, Zea mays subsp. mays
  misc_feature (1)..(358): Ceres Seq. ID no. 12365256
IANPRPRARSQEPAQSYSSKNPTPPPQHIEISSWRATNGLFHCIFSGDAAGVRADVPGLRRGEEEAHRARAGAGHHHEVPQGRAPVGPHRRQLHLVRRLHGATAGGDHRLRLVAVRGPAGGGAVAAGAVRVHVVQDGAQVLRHLQGAFPGAAPRLPRRRPELLPRQAAHGAGPPQARRQGGTEPRHQPGAHGRRRGRGRVLRVPLRHARRVPAVPRRPVRVRVGGQPGVAVPRTVRVAVPPARLRPAGAAAHAPQRRRRGRRHGDLAGVHDRRHRHQPVRQRGSTRRARPTRRSRPPRRAPACTARARTPATRGRCWWTRPAAPASMPTGPTGESTWSRRSWIRTRRRVPPWGRFRGS

SEQ ID NO: 18459 - protein, 354 aa, Zea mays subsp. mays
  misc_feature (1)..(354): Ceres Seq. ID no. 12365257
MACSTASLAAMLLAFALMFQACVAGRRRLTALVQEPAITMKYHKGALLSGPIAVNFIWYGDFTAPQRAVITDFVSSLSAAPRAAAQSQPEPSVSTWFKTARKYYDTSKARFPALRLGSHAVDRNCSLGRRLTERDLLRLAARGAPSRAINLVLTAADVAVDGFCASRCGTHGASPRSRAGRFAYVWVGNPASQCPGQCAWPFHQPVYGPQAPPLTPPNADVGVDGMVISLASMIVGTVTNPFGNGVLPGGLGRRAARGRHGVRRRVRQGRVPRLRGGAAGGPGQRRQLQCQRGPREKVPGPGARGSGHVVVCHLGVDFADRKLVFAMWRWWCCGVCSTRLKVCAKVVLTRLHYS

SEQ ID NO: 18460 - protein, 344 aa, Zea mays subsp. mays
  misc_feature (1)..(344): Ceres Seq. ID no. 12365258
MLLAFALMFQACVAGRRRLTALVQEPAITMKYHKGALLSGPIAVNFIWYGDFTAPQRAVITDFVSSLSAAPRAAAQSQPEPSVSTWFKTARKYYDTSKARFPALRLGSHAVDRNCSLGRRLTERDLLRLAARGAPSRAINLVLTAADVAVDGFCASRCGTHGASPRSRAGRFAYVWVGNPASQCPGQCAWPFHQPVYGPQAPPLTPPNADVGVDGMVISLASMIVGTVTNPFGNGVLPGGLGRRAARGRHGVRRRVRQGRVPRLRGGAAGGPGQRRQLQCQRGPREKVPGPGARGSGHVVVCHLGVDFADRKLVFAMWRWWCCGVCSTRLKVCAKVVLTRLHYS

SEQ ID NO: 18461 - DNA, 1885 bp, Zea mays subsp. mays
  misc_feature (1)..(1885): Ceres Seq. ID no. 12365283
attccctactcaaacgcagccgccgagcgcctctcgcctctcgccctacaggaggcaccctacagaacccaaccaaaaagcgccggcggcaaacagaacccaacccaaagcgccggcggcaagcgaagagaaagcgccggcactaatccgacgatggacgcgtcggccggcggcggcggcaactccctgccgaccactggcgcggacgggtcgaagcgccgcgtcttctacttctacgacgcggaggtgggcaactactactacgggcagggccacccgatgaagccgcaccgcatccgcatgacccacgcgctgctcggccgctacggcctcctcgaccagatgcaagtgttccgccctcaccctgcccgcgaccgcgacctctgccgcttccacgccgacgattacgtctccttcctccggtccgtcacccccgaaacgcagcaggaccagatccgcgcgctcaagcgcttcaacgtcggcgaggactgccccgtcttcgacggtctctacagtttctgtcagacgtacgcggggggctctgttggcggcgccgtcaagctcaaccatggccatgatatcgccatcaactgggccggcggactccaccacgccaagaagtgcgaggcctccgggttttgctatgttaatgacattgtcctcgccatcctcgagctcctcaagtaccaccagcgcgttctgtacgtggacattgatatccaccacggggacggcgtggaggaggctttttataccacagaccgggtgatgacagtctcattccacaagtttggagattatttccctgggacaggggacattcgtgatgttgggcactcaaagggtaaatattactccctgaatgttcccctggacgatggtattgatgatgagagctaccagtcgttgttcaagccaataatgggcaaggtgatggaggtcttcaaccctggtgcagtcgtgctccagtgtggtgcggattcattgtcgggtgacaggttgggctgtttcaacctctctattaagggtcacgcagaatgtgtaagatttatgaggtccttcaacgtcccgctgttgctgcttggtggtggtgggtataccataagaaacgttgcacggtgttggtgctacgagacaggagttgcccttggtcatgagctcactgacaagatgccacctaatgagtactatgagtattttggtccagattacactctacatgtcgctccaagtaacatggagaataaaaacacacggcatcaattggatgacataaaatcaaaacttctagataatctttcaaaactccgacatgctcctagtgttcagtttcaagagcgatctcctgaggctgagttacctgagcaagatgaagacaaagagaatcctgatgaaagacatgatgctgattctgatgtggagatgaatgatgccaaacctttgcaggactctggaaggatgtcaatagtgtagctgcagaacattctagaggcactggacctgtggctgatggagttggttcctcgaaacaaacctttccgaatgccactagtcgaatggccatagatgaaccaaacgctcttgagagttgagcaagagggttcaaacaaattgcaggaccaaccatcgatgcacctcaagtagctaatgtcatctgtagcctgtcgattcttttgcgcaaattcattaactgtaggcaagccatgcgtggactgaagcagggagcagaagtaagtgctcgaccaagaagttgtgcatctgaaatctatattttttgcgcgtcatatttgtattaccgacagttgcaaacgatggtttaatcatgaaaaatttgtctttccacccttggcttctgcagtggaaggggttgatatcgtagtatgcg

SEQ ID NO: 18462 - protein, 490 aa, Zea mays subsp. mays
  misc_feature (1)..(490): Ceres Seq. ID no. 12365284
IPYSNAAAERLSPLALQEAPYRTQPKSAGGKQNPTQSAGGKRRESAGTNPTMDASAGGGGNSLPTTGADGSKRRVFYFYDAEVGNYYYGQGHPMKPHRIRMTHALLGRYGLLDQMQVFRPHPARDRDLCRFHADDYVSFLRSVTPETQQDQIRALKRFNVGEDCPVFDGLYSFCQTYAGGSVGGAVKLNHGHDIAINWAGGLHHAKKCEASGFCYVNDIVLAILELLKYHQRVLYVDIDIHHGDGVEEAFYTTDRVMTVSFHKFGDYFPGTGDIRDVGHSKGKYYSLNVPLDDGIDDESYQSLFKPIMGKVMEVFNPGAVVLQCGADSLSGDRLGCFNLSIKGHAECVRFMRSFNVPLLLLGGGGYTIRNVARCWCYETGVALGHELTDKMPPNEYYEYFGPDYTLHVAPSNMENKNTRHQLDDIKSKLLDNLSKLRHAPSVQFQERSPEAELPEQDEDKENPDERHDADSDVEMNDAKPLQDSGRMSIV

SEQ ID NO: 18463 - protein, 439 aa, Zea mays subsp. mays
  misc_feature (1)..(439): Ceres Seq. ID no. 12365285
MDASAGGGGNSLPTTGADGSKRRVFYFYDAEVGNYYYGQGHPMKPHRIRMTHALLGRYGLLDQMQVFRPHPARDRDLCRFHADDYVSFLRSVTPETQQDQIRALKRFNVGEDCPVFDGLYSFCQTYAGGSVGGAVKLNHGHDIAINWAGGLHHAKKCEASGFCYVNDIVLAILELLKYHQRVLYVDIDIHHGDGVEEAFYTTDRVMTVSFHKFGDYFPGTGDIRDVGHSKGKYYSLNVPLDDGIDDESYQSLFKPIMGKVMEVFNPGAVVLQCGADSLSGDRLGCFNLSIKGHAECVRFMRSFNVPLLLLGGGGYTIRNVARCWCYETGVALGHELTDKMPPNEYYEYFGPDYTLHVAPSNMENKNTRHQLDDIKSKLLDNLSKLRHAPSVQFQERSPEAELPEQDEDKENPDERHDADSDVEMNDAKPLQDSGRMSIV

SEQ ID NO: 18464 - protein, 397 aa, Zea mays subsp. mays
  misc_feature (1)..(397): Ceres Seq. ID no. 12365286
MKPHRIRMTHALLGRYGLLDQMQVFRPHPARDRDLCRFHADDYVSFLRSVTPETQQDQIRALKRFNVGEDCPVFDGLYSFCQTYAGGSVGGAVKLNHGHDIAINWAGGLHHAKKCEASGFCYVNDIVLAILELLKYHQRVLYVDIDIHHGDGVEEAFYTTDRVMTVSFHKFGDYFPGTGDIRDVGHSKGKYYSLNVPLDDGIDDESYQSLFKPIMGKVMEVFNPGAVVLQCGADSLSGDRLGCFNLSIKGHAECVRFMRSFNVPLLLLGGGGYTIRNVARCWCYETGVALGHELTDKMPPNEYYEYFGPDYTLHVAPSNMENKNTRHQLDDIKSKLLDNLSKLRHAPSVQFQERSPEAELPEQDEDKENPDERHDADSDVEMNDAKPLQDSGRMSIV

SEQ ID NO: 18465 - DNA, 970 bp, Zea mays subsp. mays
  misc_feature (1)..(970): Ceres Seq. ID no. 12365291
aatgactcctcttttagcggcgagagactgagagcttggctcaacgcgtcctcggcttctgtggaaggccattccatgcgctccgtgtagccagccattcggtacaaccaactaccctagaagtaacttttcttttcttttttgctctcgagatggatccggttggccccttcctcgtcgcctctataagaagcatccccacacgttctctccacccatcactgcagctcaaacacaaagcagcatcacactgactccactgctctgcctccataataagcacagaagcgccccaataatcagcagcgcaggagcgagcgatcgctatggctcagggaagaggcagtgcgacgcgggggcttgccctcggcagcctactcgccgccgctttcctcctcctcctcggcgtcgccgacgcggccacccacagggtcgactggtccttcaacgcggacagctggtccaagggcaagagcttccgtgccggcgacgtcctcgagttcaactacgacccctccgtgcacaacgtggtggccgtggacgccggcggctacaacggctgccggccctccggcacgtcgtacggctccgggagcgaccgcatcacgctcggccccggcaccagctatttcatctgcagcctcaacgggcactgcgggatggggatgaagatggtcgtcaacgccagctgagcacgacgcttatatgttagtactgcaaaaatatatgggctagtggtggtccgatagatcgtgcaagaactcaatcgtgtgcatactcgtaccgtgtgttcgatggacacggttcatgtgttgtgtatgcatgcgactgctggtaggtcaggcatgatgtacgtgtggctgatggcgtgttagtaaagcgtcctgcagctttgttgttactttgttcgatcgaagcagcggcttcttttgtttgttcatcaataacatctttcattaaattttttttt

SEQ ID NO: 18466 - protein, 121 aa, Zea mays subsp. mays
  misc_feature (1)..(121): Ceres Seq. ID no. 12365292
MAQGRGSATRGLALGSLLAAAFLLLLGVADAATHRVDWSFNADSWSKGKSFRAGDVLEFNYDPSVHNVVAVDAGGYNGCRPSGTSYGSGSDRITLGPGTSYFICSLNGHCGMGMKMVVNAS

SEQ ID NO: 18467 - DNA, 1252 bp, Zea mays subsp. mays
  misc_feature (1)..(1252): Ceres Seq. ID no. 12365355
aaggctctggctcgcgcacccctgtccctgttcgatccgcaccgcacacctagacgcacctccaactgcagcgcgccatacttgaccgcatcagcatggcatccacgggaacgacggcggcggcggcggcggtggcggtgccggaggtgaccctgcggtcgggcaacgggaagccgatgccgatggtgggcatgggcacggcgtcgttccccgtggtgcacgaggccgtcagggacgccgtgctggcggccatcgaggtggggttccgccacttcgacacggccttcctgtacggcaccgagaagccgctcggcgacgccgtggccgaggcgctgcggcgcggcctcctgcggtcccgggaggagctcttcgtcacgtccaagctgtggtgctcgcagacccacgcggacctcgtgctgccgtccctgcgggaaactctcgagaacctgcagatggagtacgtggacctgtacctgatccactggccggtgtccctcaggccggccggcgggccgcccaagttcccgaacaggaaggaggacgcggtgccgctggacgtggcgggcgtgtggcgcgccatggaggagtgccagcggctgggcctcgccagggcgatcggcgtcagcaacttcaccaccaggcacctggacaaggtcctggccatcgccgcggtcccgcccgcggtgaaccaggtggagctgaacccggcgtggcagcagcggacgctgcgggcgtactgcgtcgaccggggcgtccacgtcgccgcctactcgccgctgggagggcagaactgggacgggcggggcagcgccgtgctcgactcggaggtgctcgcggagatagccagggcgagggggaagaccgtggcacaggtggcgctgcgatggatacatgagcagggagtgacgtgcatcgtcaagagctacaacagggagaggctgaagcagaacctcgagatattcgactgggagctgaccgacgacgaccggctcaagatcaaccacatcccgcagaggaaggttgtcgaggccagcggcttgttctcgcaggagggtgagttcacctctgttgatcccgcggaactgaatactgtggaggaatgggaactggactggaaaatggcccccgcctgtcggtgttgctccgtataggaaccgaataacaacgatcgccctcggtgtttcgagctatagttacagtatggttccgtaaactttgtatgaattttctgatctaaataaagtgggttttt

SEQ ID NO: 18468 - protein, 351 aa, Zea mays subsp. mays
  misc_feature (1)..(351): Ceres Seq. ID no. 12365356
MASTGTTAAAAAVAVPEVTLRSGNGKPMPMVGMGTASFPVVHEAVRDAVLAAIEVGFRHFDTAFLYGTEKPLGDAVAEALRRGLLRSREELFVTSKLWCSQTHADLVLPSLRETLENLQMEYVDLYLIHWPVSLRPAGGPPKFPNRKEDAVPLDVAGVWRAMEECQRLGLARAIGVSNFTTRHLDKVLAIAAVPPAVNQVELNPAWQQRTLRAYCVDRGVHVAAYSPLGGQNWDGRGSAVLDSEVLAEIARARGKTVAQVALRWIHEQGVTCIVKSYNRERLKQNLEIFDWELTDDDRLKINHIPQRKVVEASGLFSQEGEFTSVDPAELNTVEEWELDWKMAPACRCCSV

SEQ ID NO: 18469 - protein, 324 aa, Zea mays subsp. mays
  misc_feature (1)..(324): Ceres Seq. ID no. 12365357
MPMVGMGTASFPVVHEAVRDAVLAAIEVGFRHFDTAFLYGTEKPLGDAVAEALRRGLLRSREELFVTSKLWCSQTHADLVLPSLRETLENLQMEYVDLYLIHWPVSLRPAGGPPKFPNRKEDAVPLDVAGVWRAMEECQRLGLARAIGVSNFTTRHLDKVLAIAAVPPAVNQVELNPAWQQRTLRAYCVDRGVHVAAYSPLGGQNWDGRGSAVLDSEVLAEIARARGKTVAQVALRWIHEQGVTCIVKSYNRERLKQNLEIFDWELTDDDRLKINHIPQRKVVEASGLFSQEGEFTSVDPAELNTVEEWELDWKMAPACRCCSV

SEQ ID NO: 18470 - protein, 322 aa, Zea mays subsp. mays
  misc_feature (1)..(322): Ceres Seq. ID no. 12365358
MVGMGTASFPVVHEAVRDAVLAAIEVGFRHFDTAFLYGTEKPLGDAVAEALRRGLLRSREELFVTSKLWCSQTHADLVLPSLRETLENLQMEYVDLYLIHWPVSLRPAGGPPKFPNRKEDAVPLDVAGVWRAMEECQRLGLARAIGVSNFTTRHLDKVLAIAAVPPAVNQVELNPAWQQRTLRAYCVDRGVHVAAYSPLGGQNWDGRGSAVLDSEVLAEIARARGKTVAQVALRWIHEQGVTCIVKSYNRERLKQNLEIFDWELTDDDRLKINHIPQRKVVEASGLFSQEGEFTSVDPAELNTVEEWELDWKMAPACRCCSV

SEQ ID NO: 18471 - DNA, 786 bp, Zea mays subsp. mays
  misc_feature (1)..(786): Ceres Seq. ID no. 12365367
gtcaactgatcaagccaaagccgaacaccaccacaaggcagcagccgaacaccaaggcagcagccgccaccacttcattgcgcgaatcggagcccgtggccgtcgcctccgccctcgcgattcgccgccgttgcccacgagcgaggcttcctcctcttcgtcgccgccgtcgcaggaggggaaagaggataaactgccatggcgggcaggctcctcgcgaatctaatcgtcatgggcggaaccgtggttggcagggccatgctccaggcctaccgccaggccatcgtcaatgcaaacaaaactggagctgcccaagaagctataaatggtattagacgggctagcaaggccatgactgagcaagaagcccggcaaattcttggtatcagtgaaaattcgacgtgggaagagattgtccagaagtacgacacaatgtttgagaggaataacaagaacggcagcttctatctccagtcaaaggttcatagagcgaaagaatgcctggaacctttatatcaaaagcctgatgtactgaactgagattttgcagacgccctagcttctgtttgaagcggtatgcctaattgatcgatttattagtgtgcccagagatcaacgttcagtttattgatcggtttgccaatgcgcccagagatcaacgttcagttttgagttatgtgttgggcgcatcaggttggttcgttgtaatgccagaataatgtttaacaaacatactgaattttggctgtttctcattggcaacgcctcagtcactggttttaattc

SEQ ID NO: 18472 - protein, 113 aa, Zea mays subsp. mays
  misc_feature (1)..(113): Ceres Seq. ID no. 12365368
MAGRLLANLIVMGGTVVGRAMLQAYRQAIVNANKTGAAQEAINGIRRASKAMTEQEARQILGISENSTWEEIVQKYDTMFERNNKNGSFYLQSKVHRAKECLEPLYQKPDVLN

SEQ ID NO: 18473 - protein, 110 aa, Zea mays subsp. mays
  misc_feature (1)..(110): Ceres Seq. ID no. 12365369
QLIKPKPNTTTRQQPNTKAAAATTSLRESEPVAVASALAIRRRCPRARLPPLRRRRRRRGKRINCHGGQAPRESNRHGRNRGWQGHAPGLPPGHRQCKQNWSCPRSYKWY

SEQ ID NO: 18474 - protein, 102 aa, Zea mays subsp. mays
  misc_feature (1)..(102): Ceres Seq. ID no. 12365370
MGGTVVGRAMLQAYRQAIVNANKTGAAQEAINGIRRASKAMTEQEARQILGISENSTWEEIVQKYDTMFERNNKNGSFYLQSKVHRAKECLEPLYQKPDVLN

SEQ ID NO: 18475 - DNA, 1237 bp, Zea mays subsp. mays
  misc_feature (1)..(1237): Ceres Seq. ID no. 12365371
aggaggggactaggggagagagagagagagagagggggaaggccaagaagaggcttcctctccccccattctccaatccgtgccctagtcgagccagccgcgaggaaggaggcgtctcgcctagcgcccgccctcggccgaccttctgctgcaccttcgaactctggaaagttcatagatttttgggcaatagcaagtggacatggaaccatcctctcagcctcagcctgcgatgggtgttgccgccggtgggtcacaagtgtatcctgcctctgcctacccgcctgcagcaacagtagctcctcctgctgttgcatctgctggtttacagtcagtgcaaccattcccagccaaccctgcccatatgaggtgctcagcaccagattgtctaccagcaagctcaacagttccaccaacagctccagcagcagcaacagcagcagcttcaccagttctgggtcgaacgcatgactgaaatcgaggcaacagctgatttcaggaaccacaacttgccacttgcgaggataaagaagatcatgaaggccgacgaagatgtccgcatgatctcagccgaagctcccgtggtcttcgcaaaagcttgcgagatattcatactggagctgacgctgaggtcgtggatgcacaccgaggagaacaagcgccgcaccttgcagaagaacgacattgccgcagccatcaccaggaccgacatttacgacttcttggtcgacattgttcccagggatgagatgaaggacgacggaatcgggcttcctaggcccgggctgccacccatgggagccccagctgacgcatatccatactactacatgccacagcagcaggtgcctggtcctgggatggtttatggcgcccagcaaggccacccggtgacgtatctgtggcaggatcctcaggaacagcaggagcaagctcctgaagagcagcagtctctgcatgaaagggactgaggatgtcgctcaagctatcacctgatttttcagagctctcattttaggttctctaaactgcaggttttcgttggctaatatcgttgggtatcaaactgaaacaggtagggtgtagcatcatggtagtttgatttctgctgtggtgttagttggagggataatgattagcggctagtggattaaagttacccataccgtttcctttcgttccaaaagttcgccttcatgaggcctctgatatgaaaaatgctgggtgttaatgcttc

SEQ ID NO: 18476 - protein, 167 aa, Zea mays subsp. mays
  misc_feature (1)..(167): Ceres Seq. ID no. 12365372
MTEIEATADFRNHNLPLARIKKIMKADEDVRMISAEAPVVFAKACEIFILELTLRSWMHTEENKRRTLQKNDIAAAITRTDIYDFLVDIVPRDEMKDDGIGLPRPGLPPMGAPADAYPYYYMPQQQVPGPGMVYGAQQGHPVTYLWQDPQEQQEQAPEEQQSLHERD

SEQ ID NO: 18477 - protein, 156 aa, Zea mays subsp. mays
  misc_feature (1)..(156): Ceres Seq. ID no. 12365373
RRGLGERERERGGRPRRGFLSPHSPIRALVEPAARKEASRLAPALGRPSAAPSNSGKFIDFWAIASGHGTILSASACDGCCRRWVTSVSCLCLPACSNSSSSCCCICWFTVSATIPSQPCPYEVLSTRLSTSKLNSSTNSSSSSNSSSFTSSGSNA

SEQ ID NO: 18478 - protein, 144 aa, Zea mays subsp. mays
  misc_feature (1)..(144): Ceres Seq. ID no. 12365374
MKADEDVRMISAEAPVVFAKACEIFILELTLRSWMHTEENKRRTLQKNDIAAAITRTDIYDFLVDIVPRDEMKDDGIGLPRPGLPPMGAPADAYPYYYMPQQQVPGPGMVYGAQQGHPVTYLWQDPQEQQEQAPEEQQSLHERD

SEQ ID NO: 18479 - DNA, 1592 bp, Zea mays subsp. mays
  misc_feature (1)..(1592): Ceres Seq. ID no. 12365401
aaagccagcattgctgcatgccagcatccacgtagcatctgaggctctgagctcatggttcagatagcagcggtgaagcggatgaaggggcgggccccgctgtcagtggtggtggcaatcatcggcgggctggctctcgcgggcgtcatcttcaccgacgacctccgctcacttactgagatcatggagaagaaggggaaagcgaaggagcacaagaggacgacgtctctacatgccgggacgaggacgaggaagatgccgctaacgccgccgccgccgccgcagccggcgaaggcagcgttcgacccgagccggtgcagcgtgacggagggctactgggcgtacaacaggtccaaggagctgctttacacggaccaaacatgcccgttcatcgacaggcaggtctcttgccagaggaacggcaggccggacagcgactacctgcgctgggattggcacctagacgactgcagtctcccaaggttcgacccggtggcgttgctggagacgctgcgggggaagcggatgatgttcgttggcgactcgctgcagatggggcagtggctctccatggtctgcctcgtcaactccgccgtgccctacaccgcgcggtccatggagcgcagcaccaccctgtccgtcttcaccgccacggagtacaacgcgacgatcgagttctactgggcgccgtacctggtggaggccaactccgaccgcaacatccggctgggggccgacggccgcgtgctccacgtcgacgccgtcgagctgcacgctaggcactggaagggcgtggacatcctcgtcttcgacagctacgtgtggtggatgaccggcagcaggatcaaatcagtgtgggggtcgttcggggacgacgggtacgaggagctggacgcctgggtcgcgttccggcttggactcaagacatgggccaactgggtggacgccaacatcgatcccaacgccacaagggtcttcttcatgtcgatctccaccacgcacatgaggagcgaggactggggccgggagggcggcatacggtgccacaacgagacgtggcccgtcacgcggaaggggtactggggcagcggcgcggaccggcggatgatggaggtgatgtccgacgtggtgggccggatgcgggtgcccgtcacgctgctcaacgtcacgcagctcacggagcaccgcgtcgacgcccacgtctccgtgtacaccgagaccggcggcgagctgctcaccgacgcgcagagggccgacccgcagacgcacacggactgcatccactggtgcgtgcccggcgtgccggacacgtggaaccagatcctctacgcgcacttgtagcagcaggttcggtcacagtcacagccgcgagaacgaacaacggggacacgtaccgaaatccagctgggaataattttagttacggtaggtcgtcgtccggccgagttcaattcagacatgatagatccagttcaaatcatcgctcggacagaaaatgcctgagcttgtactgctctgctttgtcacacaggcagagcgcgtcacgcacgcttgctcacacacatacaatacacacggacacaccttttcct

SEQ ID NO: 18480 - protein, 428 aa, Zea mays subsp. mays
  misc_feature (1)..(428): Ceres Seq. ID no. 12365402
MVQIAAVKRMKGRAPLSVVVAIIGGLALAGVIFTDDLRSLTEIMEKKGKAKEHKRTTSLHAGTRTRKMPLTPPPPPQPAKAAFDPSRCSVTEGYWAYNRSKELLYTDQTCPFIDRQVSCQRNGRPDSDYLRWDWHLDDCSLPRFDPVALLETLRGKRMMFVGDSLQMGQWLSMVCLVNSAVPYTARSMERSTTLSVFTATEYNATIEFYWAPYLVEANSDRNIRLGADGRVLHVDAVELHARHWKGVDILVFDSYVWWMTGSRIKSVWGSFGDDGYEELDAWVAFRLGLKTWANWVDANIDPNATRVFFMSISTTHMRSEDWGREGGIRCHNETWPVTRKGYWGSGADRRMMEVMSDVVGRMRVPVTLLNVTQLTEHRVDAHVSVYTETGGELLTDAQRADPQTHTDCIHWCVPGVPDTWNQILYAHL

SEQ ID NO: 18481 - protein, 419 aa, Zea mays subsp. mays
  misc_feature (1)..(419): Ceres Seq. ID no. 12365403
MKGRAPLSVVVAIIGGLALAGVIFTDDLRSLTEIMEKKGKAKEHKRTTSLHAGTRTRKMPLTPPPPPQPAKAAFDPSRCSVTEGYWAYNRSKELLYTDQTCPFIDRQVSCQRNGRPDSDYLRWDWHLDDCSLPRFDPVALLETLRGKRMMFVGDSLQMGQWLSMVCLVNSAVPYTARSMERSTTLSVFTATEYNATIEFYWAPYLVEANSDRNIRLGADGRVLHVDAVELHARHWKGVDILVFDSYVWWMTGSRIKSVWGSFGDDGYEELDAWVAFRLGLKTWANWVDANIDPNATRVFFMSISTTHMRSEDWGREGGIRCHNETWPVTRKGYWGSGADRRMMEVMSDVVGRMRVPVTLLNVTQLTEHRVDAHVSVYTETGGELLTDAQRADPQTHTDCIHWCVPGVPDTWNQILYAHL

SEQ ID NO: 18482 - protein, 385 aa, Zea mays subsp. mays
  misc_feature (1)..(385): Ceres Seq. ID no. 12365404
MEKKGKAKEHKRTTSLHAGTRTRKMPLTPPPPPQPAKAAFDPSRCSVTEGYWAYNRSKELLYTDQTCPFIDRQVSCQRNGRPDSDYLRWDWHLDDCSLPRFDPVALLETLRGKRMMFVGDSLQMGQWLSMVCLVNSAVPYTARSMERSTTLSVFTATEYNATIEFYWAPYLVEANSDRNIRLGADGRVLHVDAVELHARHWKGVDILVFDSYVWWMTGSRIKSVWGSFGDDGYEELDAWVAFRLGLKTWANWVDANIDPNATRVFFMSISTTHMRSEDWGREGGIRCHNETWPVTRKGYWGSGADRRMMEVMSDVVGRMRVPVTLLNVTQLTEHRVDAHVSVYTETGGELLTDAQRADPQTHTDCIHWCVPGVPDTWNQILYAHL

SEQ ID NO: 18483 - DNA, 1404 bp, Zea mays subsp. mays
  misc_feature (1)..(1404): Ceres Seq. ID no. 12365409
aaatctcctggaaattctgatcgaacctcctgcttggagcttcgcagcaacaccgtcctcacccgcgctgaaaaagcacccatcttcctattgcgcctttcttgtagagtcaagtcagctcacttttctcgtttcgatccagatcccgtattcccgttggattcgtttatcccgcgtcccgcaagcaatatcagatccttagcttctgtggttctgcacttattcagcgtctctccagcttggaccccttaaagtgttctccaggtacagctacttgaatcgtcagaaatggccactgacgccagcggaggtggtaagcctagtcttcttctgagtactttaccgaagcaactaccatcggattttctgaaagagattacggatgggttctctgctgacagaaaactgggtcaaggtggatttggaactgtttacaagggattcctgcaagacgggcaagccattgctgtgaagaagctctcagataattccccagtggcaaccgaaaaacagttcaagaatgaggttgggaaccttatggccatccagcatgagaacatagtgaggttgtatggctactgtcatgaactgcagaagaaagtgatagaacacaatggaagatacattcttgtggatgtggttcagagcatgctctgctacgaatacgcccccaaggggagccttgacaagtgtatttttgatatatcttctaggcctaattgggccacatgcttcaaaataattaagggcatttgccagggtttatatttcctacataaggggatggataggcctattgttcatctggatcttcagcctgccaacatactattggatgacaacatggtaccaaaaattgcggattttggcctgtcaaggctctttggtgaagaacaaacccgaataaacacaataaatgttgtgggagccaaagggtatatggctccagaatatctgtacagaggggagatctcaacccggtctgacatatacagcttaggcgtactaatcatggagatcacaactgggcagaagaactctccgaatgacaaagacatgtgtgcaaggaactttataaatcaggtttgccaaacatggacagacgaacacatggcatccaagtactcatcactagatgcagacagcctccagcaagtaaaagcatgcattgaaactgggctaaaatgtgtggatatcgatcagaagaagaggccctctatagttgaaattgttgacaagctcgatggaaggcttgctctctgaatggtagtgtatgctgcgcaaggtaaaactgtgatgcagagttaattctgcctatggtgatatgctctagatgcaatcacggaaacaataattgtatcacttactaatttatgtacttatgaaaaatatgttgcttgtgtc

SEQ ID NO: 18484 - protein, 324 aa, Zea mays subsp. mays
  misc_feature (1)..(324): Ceres Seq. ID no. 12365410
MATDASGGGKPSLLLSTLPKQLPSDFLKEITDGFSADRKLGQGGFGTVYKGFLQDGQAIAVKKLSDNSPVATEKQFKNEVGNLMAIQHENIVRLYGYCHELQKKVIEHNGRYILVDVVQSMLCYEYAPKGSLDKCIFDISSRPNWATCFKIIKGICQGLYFLHKGMDRPIVHLDLQPANILLDDNMVPKIADFGLSRLFGEEQTRINTINVVGAKGYMAPEYLYRGEISTRSDIYSLGVLIMEITTGQKNSPNDKDMCARNFINQVCQTWTDEHMASKYSSLDADSLQQVKACIETGLKCVDIDQKKRPSIVEIVDKLDGRLAL

SEQ ID NO: 18485 - protein, 241 aa, Zea mays subsp. mays
  misc_feature (1)..(241): Ceres Seq. ID no. 12365411
MAIQHENIVRLYGYCHELQKKVIEHNGRYILVDVVQSMLCYEYAPKGSLDKCIFDISSRPNWATCFKIIKGICQGLYFLHKGMDRPIVHLDLQPANILLDDNMVPKIADFGLSRLFGEEQTRINTINVVGAKGYMAPEYLYRGEISTRSDIYSLGVLIMEITTGQKNSPNDKDMCARNFINQVCQTWTDEHMASKYSSLDADSLQQVKACIETGLKCVDIDQKKRPSIVEIVDKLDGRLAL

SEQ ID NO: 18486 - protein, 204 aa, Zea mays subsp. mays
  misc_feature (1)..(204): Ceres Seq. ID no. 12365412
MLCYEYAPKGSLDKCIFDISSRPNWATCFKIIKGICQGLYFLHKGMDRPIVHLDLQPANILLDDNMVPKIADFGLSRLFGEEQTRINTINVVGAKGYMAPEYLYRGEISTRSDIYSLGVLIMEITTGQKNSPNDKDMCARNFINQVCQTWTDEHMASKYSSLDADSLQQVKACIETGLKCVDIDQKKRPSIVEIVDKLDGRLAL

SEQ ID NO: 18487 - DNA, 1318 bp, Zea mays subsp. mays
  misc_feature (1)..(1318): Ceres Seq. ID no. 12365440
gctcactcgcccctcctcttctcctcgctcgcagcaagccgggaacgtacgaacagcacgagcaggggggaggggaagaagaggaggagacctaccataccatagattcagagccagatacccaatcagtatcctgctgtaccattaccaccaggcacgcaccagcaggttaccaaaatctcgtgtggagggaaatggcgcccagcagctacgaggtggcggcttccatcctcctctgcgccgaggacagcagcagcatcctggacctcgaagcggaggccgaggaggaagcgctactggcgcggagcggggagccccgcggcggcgcggagttccccgtgccgtccgaggaatgcgtcgccggtttcctggagactgaggcggcgcacatgccgcgggaggactacgccgagaggctgcgcggcgcggggatggatctccgcgtccggacggacgccatcgactggatttggaaggttcacacgtgctacggtttcggccctctcactgcctgcttggccgtcaactacctggaccgcttcctctcgctctaccagcttccggaaggcaaggcttggatgacacagctgctgtccgtggcgtgcttgtccctggccgccaagatggaggagacctacgtcccttcgtccctggacctgcaggccggggacgcgcggtacgtgttcgaggcgaagacgatccagaggatggagctcctggtcctcagcacgctcaagtggaggatgcaagcggtcacccccttgtcgtacgtcgactacttcctccaccggctccgaggcggcgccgcgccgagcagacgcgccgtcctccgatccgcggagctcatcctgtgcatcgccagagggacgcactgcttggatttcaggccctcggagatcgccttggccgtcgccgccaccgtggccggcgaagagcgcgccgtggacatcgacagggccttcacccaccgtgtacataaggagagggtgtcgcgatgcctcgaagcgatccagcaggccaccgccaccatggccctgccgcagccgctgaaaagtgaaggcccgagcagcagcggccgcagggcctcgtcttcctcggccaccgtgccgcggagccccaccggggtgctggacgctggctgcctgagctacaggagagccgccgccgccgccgcctcgcacgcgagctccagctggcgcgacgaggacgacgacgactgccccccggctgtctgcagcaagaggaggaagattagcagatgattaaagccaatgatggacggatgaaaaagtcaagcggtttttgatcgcactgactg

SEQ ID NO: 18488 - protein, 419 aa, Zea mays subsp. mays
  misc_feature (1)..(419): Ceres Seq. ID no. 12365441
SLAPPLLLARSKPGTYEQHEQGGGEEEEETYHTIDSEPDTQSVSCCTITTRHAPAGYQNLVWREMAPSSYEVAASILLCAEDSSSILDLEAEAEEEALLARSGEPRGGAEFPVPSEECVAGFLETEAAHMPREDYAERLRGAGMDLRVRTDAIDWIWKVHTCYGFGPLTACLAVNYLDRFLSLYQLPEGKAWMTQLLSVACLSLAAKMEETYVPSSLDLQAGDARYVFEAKTIQRMELLVLSTLKWRMQAVTPLSYVDYFLHRLRGGAAPSRRAVLRSAELILCIARGTHCLDFRPSEIALAVAATVAGEERAVDIDRAFTHRVHKERVSRCLEAIQQATATMALPQPLKSEGPSSSGRRASSSSATVPRSPTGVLDAGCLSYRRAAAAAASHASSSWRDEDDDDCPPAVCSKRRKISR

SEQ ID NO: 18489 - protein, 355 aa, Zea mays subsp. mays
  misc_feature (1)..(355): Ceres Seq. ID no. 12365442
MAPSSYEVAASILLCAEDSSSILDLEAEAEEEALLARSGEPRGGAEFPVPSEECVAGFLETEAAHMPREDYAERLRGAGMDLRVRTDAIDWIWKVHTCYGFGPLTACLAVNYLDRFLSLYQLPEGKAWMTQLLSVACLSLAAKMEETYVPSSLDLQAGDARYVFEAKTIQRMELLVLSTLKWRMQAVTPLSYVDYFLHRLRGGAAPSRRAVLRSAELILCIARGTHCLDFRPSEIALAVAATVAGEERAVDIDRAFTHRVHKERVSRCLEAIQQATATMALPQPLKSEGPSSSGRRASSSSATVPRSPTGVLDAGCLSYRRAAAAAASHASSSWRDEDDDDCPPAVCSKRRKISR

SEQ ID NO: 18490 - protein, 290 aa, Zea mays subsp. mays
  misc_feature (1)..(290): Ceres Seq. ID no. 12365443
MPREDYAERLRGAGMDLRVRTDAIDWIWKVHTCYGFGPLTACLAVNYLDRFLSLYQLPEGKAWMTQLLSVACLSLAAKMEETYVPSSLDLQAGDARYVFEAKTIQRMELLVLSTLKWRMQAVTPLSYVDYFLHRLRGGAAPSRRAVLRSAELILCIARGTHCLDFRPSEIALAVAATVAGEERAVDIDRAFTHRVHKERVSRCLEAIQQATATMALPQPLKSEGPSSSGRRASSSSATVPRSPTGVLDAGCLSYRRAAAAAASHASSSWRDEDDDDCPPAVCSKRRKISR

SEQ ID NO: 18491 - DNA, 1301 bp, Zea mays subsp. mays
  misc_feature (1)..(1301): Ceres Seq. ID no. 12365448
agatagacctcgcccttggctcccatggcttccgggctccggcttcttctcctcgccgtcgcgtgagactgcgctaaaacctaggctttgagacaccaatggcctccgcgacggcgacggcgcccacattcgctctcgcatcgtccttctcgcgcggcggcttccttccgctccctcgtcacgccggccggcccatgcttcagtctctgcgactcgtcgcgtcagccgtgaagcggcggcgcggcgcggtcgtggtggcagcggacgcggcggcggcggccgggagcgcggagttcggcgacgaggagaacccgtatgagcttctgggcatcaggccgcttgatagcttcgatcacatgaaaatggcctacaagaagaagcgcaaggacgccgaggagactggagacgacgagttccttgccaagttggacagggcctatgacactgtcatgatgcagcagctgcagtatcggaagaagggagtcacatacgggtctgttcaggtgtccaaggatatcaagtatgctgacaatcaaccagtggtgccttggggaccaagattctcccgatcaacaatgaaggacatgcgcataaatatggcagtatcagcagcatttgttgtttggatagctattatgggcaatgcagactggaagcctttgcagttcctttgttttgctttcttctacagaatactacagaagctaagagctactgaaccaccaattactccaatatacaatgaatatggcgaggtcgaaggacgagggataagaatggcaaaaagagtagtccgtgctttgggtttgatatttggatgtgtgttcgctgcatccctgggttatacagcagctattaacttgatcgagctttcaatgcagtacactccccgccttgtttattactaccaggagctgattgttacggcggctacctccgttcttctgtgcatcacagcctcatactaccgatgaacacgacgacgagcagtgatggcctggctgaggcgattgtgagatagccgagaatccacaaattttgtagcatacttccaccagcacctgtcagctttgaggcagagagttcttagtgcaggatcatacatgaccacttgtggcacaatgcagatgaccaatggatgaaaaacatttggcgtgaatgcttcaacagcagtgttgtgtgtgtgcaatttttaattaggtcttggacatgttagacaacagggttagctgcaatgtgcatgtgctttgttttgcctcgatcaacgaatgaatgaaagtactagctgctgcttctttgct

SEQ ID NO: 18492 - protein, 291 aa, Zea mays subsp. mays
  misc_feature (1)..(291): Ceres Seq. ID no. 12365449
MASATATAPTFALASSFSRGGFLPLPRHAGRPMLQSLRLVASAVKRRRGAVVVAADAAAAAGSAEFGDEENPYELLGIRPLDSFDHMKMAYKKKRKDAEETGDDEFLAKLDRAYDTVMMQQLQYRKKGVTYGSVQVSKDIKYADNQPVVPWGPRFSRSTMKDMRINMAVSAAFVVWIAIMGNADWKPLQFLCFAFFYRILQKLRATEPPITPIYNEYGEVEGRGIRMAKRVVRALGLIFGCVFAASLGYTAAINLIELSMQYTPRLVYYYQELIVTAATSVLLCITASYYR

SEQ ID NO: 18493 - protein, 259 aa, Zea mays subsp. mays
  misc_feature (1)..(259): Ceres Seq. ID no. 12365450
MLQSLRLVASAVKRRRGAVVVAADAAAAAGSAEFGDEENPYELLGIRPLDSFDHMKMAYKKKRKDAEETGDDEFLAKLDRAYDTVMMQQLQYRKKGVTYGSVQVSKDIKYADNQPVVPWGPRFSRSTMKDMRINMAVSAAFVVWIAIMGNADWKPLQFLCFAFFYRILQKLRATEPPITPIYNEYGEVEGRGIRMAKRVVRALGLIFGCVFAASLGYTAAINLIELSMQYTPRLVYYYQELIVTAATSVLLCITASYYR

SEQ ID NO: 18494 - protein, 205 aa, Zea mays subsp. mays
  misc_feature (1)..(205): Ceres Seq. ID no. 12365451
MKMAYKKKRKDAEETGDDEFLAKLDRAYDTVMMQQLQYRKKGVTYGSVQVSKDIKYADNQPVVPWGPRFSRSTMKDMRINMAVSAAFVVWIAIMGNADWKPLQFLCFAFFYRILQKLRATEPPITPIYNEYGEVEGRGIRMAKRVVRALGLIFGCVFAASLGYTAAINLIELSMQYTPRLVYYYQELIVTAATSVLLCITASYYR

SEQ ID NO: 18495 - DNA, 1068 bp, Zea mays subsp. mays
  misc_feature (1)..(1068): Ceres Seq. ID no. 12365452
ctacccgatcggcccggtcctgcctctcaagccgccgtccgcgcccggcgacggcgagcaggtagtagcacagcggcacgagtgcgtgaggtggctcgacgcgcagcccccagcgtccgtcgtgctgctctgctttgggagcatgggcggcagcttcccgtcgccccaggtccgcgagatcgccgacggcctcgagcgcagcgggcaccgcttcctgtgggtgctccgtggcccgccaccgccggacggttccaagtacccgacggacgccaacgtccacgagctgctcccggaagggttcctggagaggacgaagggccgaggcctcgtgtggcccacgtgggcgccgcagaaggacatcctcgccaaccccgccgtcggcggcttcgtcacccactgcggctggaactccatcctcgagagcctgtggcacggcgtgccgatggtgccctggccgcagttcgcggagcagcacctgaacgcgttcgagctcgtgtccgtcatgggcgtcgccgttgccatgcaggtggacaggaagcgcggcaacttcgtcgaggcggcggagctggagcgcgcggtccggtgcctgatgggcgggtcggaggaggaggggaggaaggcgcgggagaaggcgacggaggcgaaggccctgagccagaacggcgtggccagcggcgggtcgtcggacgcgtcggtgcagaaactggcgcgagagattttgcacaagcacgacgacaaggggtgtgccaccgcaagcggggagagcatgggcagcgtcgtcgttcccgcatctccggccggaataatatgatcccccgaacacggagaaatcgccgtcgtccacgaataaatcggaggccgccatgcgatccgtctggcactgctcacgttgtttgacattgttcagaatcgccgtgtgcactgtagtttcttatccgcagtagcttttactattcgaaataatgtagcatagcaagcgctgcttcttcctaagtccgtgcagcgtagcccgcgtgttcgagctagtttgtgttaagttgaatgagttaatggatgctagttgtagcc

SEQ ID NO: 18496 - protein, 298 aa, Zea mays subsp. mays
  misc_feature (1)..(298): Ceres Seq. ID no. 12365453
LPDRPGPASQAAVRARRRRAGSSTAARVREVARRAAPSVRRAALLWEHGRQLPVAPGPRDRRRPRAQRAPLPVGAPWPATAGRFQVPDGRQRPRAAPGRVPGEDEGPRPRVAHVGAAEGHPRQPRRRRLRHPLRLELHPREPVARRADGALAAVRGAAPERVRARVRHGRRRCHAGGQEARQLRRGGGAGARGPVPDGRVGGGGEEGAGEGDGGEGPEPERRGQRRVVGRVGAETGARDFAQARRQGVCHRKRGEHGQRRRSRISGRNNMIPRTRRNRRRPRINRRPPCDPSGTAHVV

SEQ ID NO: 18497 - protein, 269 aa, Zea mays subsp. mays
  misc_feature (1)..(269): Ceres Seq. ID no. 12365454
YPIGPVLPLKPPSAPGDGEQVVAQRHECVRWLDAQPPASVVLLCFGSMGGSFPSPQVREIADGLERSGHRFLWVLRGPPPPDGSKYPTDANVHELLPEGFLERTKGRGLVWPTWAPQKDILANPAVGGFVTHCGWNSILESLWHGVPMVPWPQFAEQHLNAFELVSVMGVAVAMQVDRKRGNFVEAAELERAVRCLMGGSEEEGRKAREKATEAKALSQNGVASGGSSDASVQKLAREILHKHDDKGCATASGESMGSVVVPASPAGII

SEQ ID NO: 18498 - protein, 222 aa, Zea mays subsp. mays
  misc_feature (1)..(222): Ceres Seq. ID no. 12365455
MGGSFPSPQVREIADGLERSGHRFLWVLRGPPPPDGSKYPTDANVHELLPEGFLERTKGRGLVWPTWAPQKDILANPAVGGFVTHCGWNSILESLWHGVPMVPWPQFAEQHLNAFELVSVMGVAVAMQVDRKRGNFVEAAELERAVRCLMGGSEEEGRKAREKATEAKALSQNGVASGGSSDASVQKLAREILHKHDDKGCATASGESMGSVVVPASPAGII

SEQ ID NO: 18499 - DNA, 1334 bp, Zea mays subsp. mays
  misc_feature (1)..(1334): Ceres Seq. ID no. 12365472
gccagtcttctcgccttcacgccgcccgctgtcctgcaaggccgctcccgcgtcgccggagcccgccgtcgccgtctccgcctcttccgcggcgcccgcgcccgccgccgccggttcgccgctccgccccttcgcgctccgcgcgctgctccgggaggaggtatttccgtctccatcgccccagctggcctctgccgcagcggtggcctcggtaccaagcggggccgtgctgaagcggcggcgacctgcgccgctccttgtgccggcgtccggcgcggctgctgctgctccggtggccgccgtggaggcagatccgaggaacgaggtggaggaggagggggaggagttcgcagcgtattgccggagggggaaggggagaagggtggaaatggaggaccggcatgtggccaaggtcgctctcggcggagatccccaagtggcgctctttggtgtattcgatggtcacgggggcaaaaatgcggcagagttcgctgcggagaacatgcccaagtttttggccgaggagttcaagaaggtgaacggcggaggagagatcgaaggagttgtcaagaggggttacctcaagacggacgaggagttcctcaagagggacgagagcgggggcgcgtgctgcgtcacagccgttctccaaaagggtggactggtcgtctccaatgctggagactgccgtgcggtgctcagccgagcagggaaggcagaggtgctcacctctgaccaccggggcctcccgggaggatgagaaggagagaattgaaaaattgggtggatttgtggtgaattaccatgggacatggcgagtccagggttccctggcagtgtctaggggcattggggatggacaactaaagcagtgggttgtggctaacccagacactaggacgctcctcgtcgaccaccagtgcgagttcttgatacttgcttctgatggcctatgggataaggtcgataatcaggaggcagtagaccttgcacgtcctctatgcattagcaatgacaagacctctcgcctggctgcctgcaggatgctcactgagacgtcgatttccaggggctcaactgatgatatcagtgttatgatcgtgcaattgcagaagttttcaagttcctaacttaattggagaaacttgaccaaaactctaggcattagcaccaacagactggcggaaggcaggactttgctggctaaagttttcatgagtcagcgctatttttggctgtttaacgttcattcattcattctttgtcatagaaccatttttattattattagatgtaattagatctatttgattcattctttgacaatatttatc

SEQ ID NO: 18500 - protein, 252 aa, Zea mays subsp. mays
  misc_feature (1)..(252): Ceres Seq. ID no. 12365473
PVFSPSRRPLSCKAAPASPEPAVAVSASSAAPAPAAAGSPLRPFALRALLREEVFPSPSPQLASAAAVASVPSGAVLKRRRPAPLLVPASGAAAAAPVAAVEADPRNEVEEEGEEFAAYCRRGKGRRVEMEDRHVAKVALGGDPQVALFGVFDGHGGKNAAEFAAENMPKFLAEEFKKVNGGGEIEGVVKRGYLKTDEEFLKRDESGGACCVTAVLQKGGLVVSNAGDCRAVLSRAGKAEVLTSDHRGLPGG

SEQ ID NO: 18501 - protein, 244 aa, Zea mays subsp. mays
  misc_feature (1)..(244): Ceres Seq. ID no. 12365474
ASLLAFTPPAVLQGRSRVAGARRRRLRLFRGARARRRRFAAPPLRAPRAAPGGGISVSIAPAGLCRSGGLGTKRGRAEAAATCAAPCAGVRRGCCCSGGRRGGRSEERGGGGGGGVRSVLPEGEGEKGGNGGPACGQGRSRRRSPSGALWCIRWSRGQKCGRVRCGEHAQVFGRGVQEGERRRRDRRSCQEGLPQDGRGVPQEGRERGRVLRHSRSPKGWTGRLQCWRLPCGAQPSREGRGAHL

SEQ ID NO: 18502 - protein, 151 aa, Zea mays subsp. mays
  misc_feature (1)..(151): Ceres Seq. ID no. 12365475
MLETAVRCSAEQGRQRCSPLTTGASREDEKERIEKLGGFVVNYHGTWRVQGSLAVSRGIGDGQLKQWVVANPDTRTLLVDHQCEFLILASDGLWDKVDNQEAVDLARPLCISNDKTSRLAACRMLTETSISRGSTDDISVMIVQLQKFSSS

SEQ ID NO: 18503 - DNA, 1524 bp, Zea mays subsp. mays
  misc_feature (1)..(1524): Ceres Seq. ID no. 12365476
agagattagtgaatccaaaaggcgaccaaacagatcccccgcaccccgctcctgtgctccgctcatggcagagaaccccctgggaaaacgcagcggagaaactctggagatcgaaaccccggcacgcagctaggcgaactgcacgcagctgcaggtcgacagtctaatcaatttcttgtcgcttcagcttctggtgctggtcttcttccagttgcatcctggttacctgtgtcaaggggcggttggtgtctggtgtagttggagggcagagcttcggcggcggcgaagaagaagagcagcagagagactctgctgacactgaccgagggagatatgatgaggaagctgagagagttgctgcagaagagcgacaaccgcgtatgtgccgactgcggcgcacctgatcccaaatgggcatcggctaacattggagtattcatttgcctaaagtgttctggtgttcacagaagcctcgggacacatgtttcaaaggtgctgtcagtcacactagatcaatggacggatgatgagatcaactccatgatagaagttggtggaaactcttatgccaatgctatatatgaagcatttctgccagagggctatcagaagccgcatccagattctagccaagaagagagagctgatttcatcaggtcgaagtatgagttgcaagaattcctgaagccaagcctaaggttagtttccagcaataagggctctttagaggctaccagtaccagctctcgaaaacataaggacaatactgtgtctctttctgctagtttcagcagtgaggctggaatggttgagttcattggaatactaaaagttaaagtgataagagggactaaactagctgtaagagacctgatgagtagtgacccctatattgtactgaccctaggacagcagaaagcaaaaacttctgtgagtaaacgtaatctgaatcctgtttggaatgaagagcttaagctgtcagttccccagcagtacgggcctctgaagcttcaagtgttcgaccacgacatgctatcgaaggatgacgagatgggtgacgcagagattgacctgcagccgatgatcagtgcagctacagcgtttggcgaccctgatctgctcgcggacatgcagatcggcaagtggctcaggtccccagataatgcgctggcaagggacagcgccgtcaatgtcgttggtggcaaggtcaagcaggaggtctctctgaggctgcagaacgtggaatcgggggaggtggaactggagctggagtggataccactcaatcagtagagttcaaatccacctgtaggctatatgtgatgcatgtttcatgtgtgccacacaagtcctgatgctcttgatcatcttcagtttgtcagggtgcctgcagtgttgtagactatctttgcggttgtagaatcagtgtcggagcccggccaccgtgactggttcagcaactctgtacaatgatagtttgaggactcaatgacttgttagtacaagtatgagactgttgtttgc

SEQ ID NO: 18504 - protein, 319 aa, Zea mays subsp. mays
  misc_feature (1)..(319): Ceres Seq. ID no. 12365477
MMRKLRELLQKSDNRVCADCGAPDPKWASANIGVFICLKCSGVHRSLGTHVSKVLSVTLDQWTDDEINSMIEVGGNSYANAIYEAFLPEGYQKPHPDSSQEERADFIRSKYELQEFLKPSLRLVSSNKGSLEATSTSSRKHKDNTVSLSASFSSEAGMVEFIGILKVKVIRGTKLAVRDLMSSDPYIVLTLGQQKAKTSVSKRNLNPVWNEELKLSVPQQYGPLKLQVFDHDMLSKDDEMGDAEIDLQPMISAATAFGDPDLLADMQIGKWLRSPDNALARDSAVNVVGGKVKQEVSLRLQNVESGEVELELEWIPLNQ

SEQ ID NO: 18505 - protein, 318 aa, Zea mays subsp. mays
  misc_feature (1)..(318): Ceres Seq. ID no. 12365478
MRKLRELLQKSDNRVCADCGAPDPKWASANIGVFICLKCSGVHRSLGTHVSKVLSVTLDQWTDDEINSMIEVGGNSYANAIYEAFLPEGYQKPHPDSSQEERADFIRSKYELQEFLKPSLRLVSSNKGSLEATSTSSRKHKDNTVSLSASFSSEAGMVEFIGILKVKVIRGTKLAVRDLMSSDPYIVLTLGQQKAKTSVSKRNLNPVWNEELKLSVPQQYGPLKLQVFDHDMLSKDDEMGDAEIDLQPMISAATAFGDPDLLADMQIGKWLRSPDNALARDSAVNVVGGKVKQEVSLRLQNVESGEVELELEWIPLNQ

SEQ ID NO: 18506 - protein, 250 aa, Zea mays subsp. mays
  misc_feature (1)..(250): Ceres Seq. ID no. 12365479
MIEVGGNSYANAIYEAFLPEGYQKPHPDSSQEERADFIRSKYELQEFLKPSLRLVSSNKGSLEATSTSSRKHKDNTVSLSASFSSEAGMVEFIGILKVKVIRGTKLAVRDLMSSDPYIVLTLGQQKAKTSVSKRNLNPVWNEELKLSVPQQYGPLKLQVFDHDMLSKDDEMGDAEIDLQPMISAATAFGDPDLLADMQIGKWLRSPDNALARDSAVNVVGGKVKQEVSLRLQNVESGEVELELEWIPLNQ

SEQ ID NO: 18507 - DNA, 1517 bp, Zea mays subsp. mays
  misc_feature (1)..(1517): Ceres Seq. ID no. 12365500
gcacgagaccattacctagaacatcctaacgaaaaagagcttgttacgaggcaatggcgccgacagtggaggtgctgacgtcggagatggtcgtcccagctgaagaggccccggcgggcaccatttggctgtccaacctggacctcgccgcacgccgcgggtacacgcccacggtctacttcttccggcccaacggtgacccggggttcttcgccccggacgtcgtcaagggcagcctcgccaggacgctagtcacgttctacccgctcgcggggcggcctcgcgctcgacggcgccgggcgccgtccaggtcgactgcaccggcgagggtgcggtgttcgtgaccgcgcggtcggactacgcgctcgacgacctgatgcgcgagttcgtgccgtgccgcgagatgcgggacctgctggtgcccccggcgcccgcgccggacccgccgtgcgcgctgctgttcgtgcaggtcacgcgcctgcgctgcggcggcgccgtgctcgccctgtccatgcaccactccgtgtgcgacgcgcggagcgccgcgcacttcttcgatacgtgggcgagcatcgcgcgcggggacgccgccgccgccgccgcgaacgctcctgtgccaccgtgcttcgactacgcgctgctcgccgcgcgcccggcgctcgcggtgctgtacgaccaccccgagtacaagcccgagccggagcctgtggacgccgcgtccgactacgcgagcgccatcgtcgtcatgaccaaagcgcaggtgggcgcgctcaaggcgcggtgttccggggcgtccacgttccgcgccgtggtggcgctggtgtggcagtgcgtgtgccgcgcgcgggcgctgccccccgaggcggagacgcggctctactccatgatcgacatgcgctcgcgcctggatccgccgctccctacgggatacttcggcaacgcggttgtccgcacctcggtctccgccacggtcggcgaggtgacgtccaaccccgtaggccacgccgcgcgccgcgcgctcgcggtaacgagccagggcgacgactacgcgcggtcgctggtggactacctagagggcgtggacgccatgaacctgcccagaagcggcatctcgcgtgcgcacctccgcgccatcagctggatgggcatgtcgctgtacaaggccgacttcgggtggggcgcgccggtgttcatggggccggcgatcatgtactacagtggcttcgtgtacgtcatgaacgcggcggggaaggagggtgccctcgcgctcgtgctgtcgctggagccggagagcatgccggagttcaggaaggtgttcgccgaggagctcgccagcctggacgtgatctagtgcatacatatagctcgaagtatgtaccggccggctaagccgccaggcgccagtggacagttgcatgcgtggaacgtactacgtgttaggctatccacactcatatcaccctatttctctaaatatctaccatataactgtgggttatgataattagagataccca

SEQ ID NO: 18508 - protein, 324 aa, Zea mays subsp. mays
  misc_feature (1)..(324): Ceres Seq. ID no. 12365501
MREFVPCREMRDLLVPPAPAPDPPCALLFVQVTRLRCGGAVLALSMHHSVCDARSAAHFFDTWASIARGDAAAAAANAPVPPCFDYALLAARPALAVLYDHPEYKPEPEPVDAASDYASAIVVMTKAQVGALKARCSGASTFRAVVALVWQCVCRARALPPEAETRLYSMIDMRSRLDPPLPTGYFGNAVVRTSVSATVGEVTSNPVGHAARRALAVTSQGDDYARSLVDYLEGVDAMNLPRSGISRAHLRAISWMGMSLYKADFGWGAPVFMGPAIMYYSGFVYVMNAAGKEGALALVLSLEPESMPEFRKVFAEELASLDVI

SEQ ID NO: 18509 - protein, 315 aa, Zea mays subsp. mays
  misc_feature (1)..(315): Ceres Seq. ID no. 12365502
MRDLLVPPAPAPDPPCALLFVQVTRLRCGGAVLALSMHHSVCDARSAAHFFDTWASIARGDAAAAAANAPVPPCFDYALLAARPALAVLYDHPEYKPEPEPVDAASDYASAIVVMTKAQVGALKARCSGASTFRAVVALVWQCVCRARALPPEAETRLYSMIDMRSRLDPPLPTGYFGNAVVRTSVSATVGEVTSNPVGHAARRALAVTSQGDDYARSLVDYLEGVDAMNLPRSGISRAHLRAISWMGMSLYKADFGWGAPVFMGPAIMYYSGFVYVMNAAGKEGALALVLSLEPESMPEFRKVFAEELASLDVI

SEQ ID NO: 18510 - protein, 279 aa, Zea mays subsp. mays
  misc_feature (1)..(279): Ceres Seq. ID no. 12365503
MHHSVCDARSAAHFFDTWASIARGDAAAAAANAPVPPCFDYALLAARPALAVLYDHPEYKPEPEPVDAASDYASAIVVMTKAQVGALKARCSGASTFRAVVALVWQCVCRARALPPEAETRLYSMIDMRSRLDPPLPTGYFGNAVVRTSVSATVGEVTSNPVGHAARRALAVTSQGDDYARSLVDYLEGVDAMNLPRSGISRAHLRAISWMGMSLYKADFGWGAPVFMGPAIMYYSGFVYVMNAAGKEGALALVLSLEPESMPEFRKVFAEELASLDVI

SEQ ID NO: 18511 - DNA, 921 bp, Zea mays subsp. mays
  misc_feature (1)..(921): Ceres Seq. ID no. 12365504
gcacgagaccattacctagaacatcctaatcgaaaaaaacagccttgtgcattcatcactttcctgactcacctcactcgatcatcctccagtcttgtcgtcgcctgctagcttgaatattacgccagcatctcgccaggaaaatggcgggcactactccgcgccgcttgctcctggtcatcgtccccctcgtcgccgtcgtgccggcgtccgcaaaagactacatggtcggcgactcgtccgggtggaagtccggagtggactacgctgcctgggccaagggcaagccgttcgccatcggcgacacgctctcgttccagtacagctcggcgcactcggtgctggaggtgagcgaggcggaccacggcgcgtgctcggcgagcaacccgctgcggtcgcaccagggccagagcaccaccatcccgctcaccaaggccggcacccgctacttcatctgcggcgcccccggccactgcgcctcgggcatgaaggtcgccatcaccgtctccggcggcggcggcggcggcagcagcagcgccgacaacaccgcgactccgtcgggtccctccgtgcgggcgatgaacacgaagccggcgtccggtctccggtccggtggcgcgacgacgacggacgagtcggactccagcgcggctggcagcggcgcccgcctcgcgatgggcctgctgttcggggccgcgggcctcgctgcaataatgggctgaattgaggacccgctagggaaaaggcagtgcggtttcacgaatttcctatttagtttcctgcgttctctgcttgcgtccccgagtcgcgaggctgagtgttcggccgtgcatatttttcgtatacttttgctgtgtttttttggggctattcgttgttcaatactgttgtttcagaataaaatttcatccttgaccatcc

SEQ ID NO: 18512 - protein, 192 aa, Zea mays subsp. mays
  misc_feature (1)..(192): Ceres Seq. ID no. 12365505
MAGTTPRRLLLVIVPLVAVVPASAKDYMVGDSSGWKSGVDYAAWAKGKPFAIGDTLSFQYSSAHSVLEVSEADHGACSASNPLRSHQGQSTTIPLTKAGTRYFICGAPGHCASGMKVAITVSGGGGGGSSSADNTATPSGPSVRAMNTKPASGLRSGGATTTDESDSSAAGSGARLAMGLLFGAAGLAAIMG

SEQ ID NO: 18513 - protein, 165 aa, Zea mays subsp. mays
  misc_feature (1)..(165): Ceres Seq. ID no. 12365506
MVGDSSGWKSGVDYAAWAKGKPFAIGDTLSFQYSSAHSVLEVSEADHGACSASNPLRSHQGQSTTIPLTKAGTRYFICGAPGHCASGMKVAITVSGGGGGGSSSADNTATPSGPSVRAMNTKPASGLRSGGATTTDESDSSAAGSGARLAMGLLFGAAGLAAIMG

SEQ ID NO: 18514 - DNA, 1569 bp, Zea mays subsp. mays
  misc_feature (1)..(1569): Ceres Seq. ID no. 12365538
agggctctagcatccccaatcccatcggtcagcctcatccatccgcagggcgccggcggcgggagtcttgccggccacatcgtcgccgatttcaccgatccgagctccggcctcttagccatggaatctccacgaactctggaagccctcaccaacgacctcgtggtggagatattcctccggatcggctcccctgccgacctcgttcgcgcctccgccgcctgcgtcgccctctgccgtctcatcgccaacccctccttcttgcgccggtaccgctccgtccacccgccgctacttctcggcctcctcgacccttatggcgatatcgaacccaccgagacaccccatccctccgctgctctcgctggcgccgtcgctcgcgccgctgacctccgcttcggcgagtattttcctagcagcaagttatccggctattgtgtctctgacgtccgagacggtcatgtcctcctcaccatcacgccctaccttgaggacgacgaggatgagaagttggtgccagacctcgcggtgtgcgaccccctggcccgtgtatgcctgcgactgccccccataccagacgaccttctcgcctccgtccaggttcagcagcaagatctcgtacattatagttgcgatacattccttgtcccttcaggagatgaagaagatgtcacttcttttagagtgatcgtcatgatgagatctacacagatgctagtcgcttttatcttctcttcaaccactggtgattggagtgctggttcacctttcagcctgggttctctgagaataccatacgacaacattccgagttatgcttatggctgcttctactggaaagtcgagtctgagaacaggttgctcacgctcaacatgagcagtatggagttctcagtcgttgacctcccacctgggcccgataggagtttcgtcatcatggtggaggcaggcgaaagcaggcttgggatgtttagtctaattaaccatggtaccactctctgttatgccattaggcaaattgggagcgagaagtccaatcagttggagatggacagtgtgatccctttacctgagggttatatttactttcgcattcacggttcatatgaaggacacattctcatatttggatacgcgtttagtgaagacgcatgcttcgcacttgagatcaagactatgaagattgagagagtctgtcggaagtggcgtggtttctgtccttattttgtgttcctgccatccatgtcacaaaggaggatataatgtggactgaattcacatccaggtttggggcttcttccaatccattctgctggtgtggagttgagctaggtgatggcacaggccctcatgtagatgtagcacatctgcaacactgtcccatgttatcctcctagtctgtcgtattgtctagcttacattagtagctactgaaactttagttatatctatatttttaagttctcccgactgtaatttaagatgtgacaaaggcgtctttagtgtatcaagagccaacttttataagccggctctgtgtgctgcgaaatcacgtgtttgctagtctag

SEQ ID NO: 18515 - protein, 420 aa, Zea mays subsp. mays
  misc_feature (1)..(420): Ceres Seq. ID no. 12365539
RALASPIPSVSLIHPQGAGGGSLAGHIVADFTDPSSGLLAMESPRTLEALTNDLVVEIFLRIGSPADLVRASAACVALCRLIANPSFLRRYRSVHPPLLLGLLDPYGDIEPTETPHPSAALAGAVARAADLRFGEYFPSSKLSGYCVSDVRDGHVLLTITPYLEDDEDEKLVPDLAVCDPLARVCLRLPPIPDDLLASVQVQQQDLVHYSCDTFLVPSGDEEDVTSFRVIVMMRSTQMLVAFIFSSTTGDWSAGSPFSLGSLRIPYDNIPSYAYGCFYWKVESENRLLTLNMSSMEFSVVDLPPGPDRSFVIMVEAGESRLGMFSLINHGTTLCYAIRQIGSEKSNQLEMDSVIPLPEGYIYFRIHGSYEGHILIFGYAFSEDACFALEIKTMKIERVCRKWRGFCPYFVFLPSMSQRRI

SEQ ID NO: 18516 - protein, 380 aa, Zea mays subsp. mays
  misc_feature (1)..(380): Ceres Seq. ID no. 12365540
MESPRTLEALTNDLVVEIFLRIGSPADLVRASAACVALCRLIANPSFLRRYRSVHPPLLLGLLDPYGDIEPTETPHPSAALAGAVARAADLRFGEYFPSSKLSGYCVSDVRDGHVLLTITPYLEDDEDEKLVPDLAVCDPLARVCLRLPPIPDDLLASVQVQQQDLVHYSCDTFLVPSGDEEDVTSFRVIVMMRSTQMLVAFIFSSTTGDWSAGSPFSLGSLRIPYDNIPSYAYGCFYWKVESENRLLTLNMSSMEFSVVDLPPGPDRSFVIMVEAGESRLGMFSLINHGTTLCYAIRQIGSEKSNQLEMDSVIPLPEGYIYFRIHGSYEGHILIFGYAFSEDACFALEIKTMKIERVCRKWRGFCPYFVFLPSMSQRRI

SEQ ID NO: 18517 - DNA, 1517 bp, Zea mays subsp. mays
  misc_feature (1)..(1517): Ceres Seq. ID no. 12365543
aagcatcaccatcgacggggcgagggtacacggaacaccagccgtccgatccatatcgacggccaggtaaatcggaggaagcccggaagaagtctccttccagcaccacccttctctcctccgcatccccccggccggttcctccttgccgccgccgtcgctgtgccaagccttgcgaataaccgttgtccgggctgtggggggcagacatggcgctccggaggctgctgcaggggagtgtcctgccgcgggtaaccggcagggtttcggcaccggccgtggcgccgttttcaacggagtccggagagaccatccgtgccacgctctttccgggcgacggcatcgggccagagattgccgagtctgtcaagcaggtattcaatgttgcaggggtaccaattgaatgggaagaacactatgttggtacagaagttgatcccagaacagagagttttttgacttgggaaagcctggagtcagtgcgtagaaacaaagttggcttgaaaggtcctatggctacacctattggaaagggtcatcgatctttgaatcttacattaaggaaagaacttgggctctatgccaatgtcaggccttgcaacagcctcccaggctacaagaccagatacgatgatgttaaccttgtgacaattcgtgaaaatactgaaggagaatatagtggtcttgagcatcaggttgtgagaggtgttgtagaaagtttgaaaattattacccgccaagcaagtttgagagtggcagaatatgcttttcattatgccaaggccaatggccgggaaagggtctctgcgattcacaaggccaatattatgaggaagacagatggtcttttcctcaagtgttgccgtgaagtggctgagacgtaccctgaaattcaatacgaggaggtcatcattgacaattgttgtatgacgcttgtgaagaatcctggtctttttgatgtattagtgatgccaaacctctatggtgacatcattagcgatctatgtgctggtttgattgggggcttgggcctaacacccagttgcaatattggtgaaggtggcatttgtctagcagaagctgttcatggttctgctcctgatattgctggcaagaaccttgcgaacccgactgctcttatgctgagtgctgtcatgatgttgcgccacttgcaattcaacgacaaagcagaccggatccacaacgccatcctccagactattgctggggggaagtacaggactgctgatcttggtggaaaggcatcgacatccgagtttacaaatgcagtctgtgatcacatctgagaatcggatgtggttctttccttctgattgttctgtcttcctaatatctttttgtcgcatatggggaggagctttagctttaagaggttaactggcagcacctcgaacttctttgggtggttaacacggtttgagaccgtcaaatatttttgtcacatatcttgctgtccagaaattttttcaacttcagaatcgagtaaataattctgc

SEQ ID NO: 18518 - protein, 365 aa, Zea mays subsp. mays
  misc_feature (1)..(365): Ceres Seq. ID no. 12365544
MALRRLLQGSVLPRVTGRVSAPAVAPFSTESGETIRATLFPGDGIGPEIAESVKQVFNVAGVPIEWEEHYVGTEVDPRTESFLTWESLESVRRNKVGLKGPMATPIGKGHRSLNLTLRKELGLYANVRPCNSLPGYKTRYDDVNLVTIRENTEGEYSGLEHQVVRGVVESLKIITRQASLRVAEYAFHYAKANGRERVSAIHKANIMRKTDGLFLKCCREVAETYPEIQYEEVIIDNCCMTLVKNPGLFDVLVMPNLYGDIISDLCAGLIGGLGLTPSCNIGEGGICLAEAVHGSAPDIAGKNLANPTALMLSAVMMLRHLQFNDKADRIHNAILQTIAGGKYRTADLGGKASTSEFTNAVCDHI

SEQ ID NO: 18519 - protein, 264 aa, Zea mays subsp. mays
  misc_feature (1)..(264): Ceres Seq. ID no. 12365545
MATPIGKGHRSLNLTLRKELGLYANVRPCNSLPGYKTRYDDVNLVTIRENTEGEYSGLEHQVVRGVVESLKIITRQASLRVAEYAFHYAKANGRERVSAIHKANIMRKTDGLFLKCCREVAETYPEIQYEEVIIDNCCMTLVKNPGLFDVLVMPNLYGDIISDLCAGLIGGLGLTPSCNIGEGGICLAEAVHGSAPDIAGKNLANPTALMLSAVMMLRHLQFNDKADRIHNAILQTIAGGKYRTADLGGKASTSEFTNAVCDHI

SEQ ID NO: 18520 - DNA, 1250 bp, Zea mays subsp. mays
  misc_feature (1)..(1250): Ceres Seq. ID no. 12365550
ggaacagcctcgttctgtccaagtccaactccaacgaggcaacgactcgtcagtggtcagtacactacaccgtaaccgtcgccggaatcgatcgacccaaagctccctttagagcccgagctctatccaacccacgaacgggatcccgatgcccgtggcggcctcggttctcgccgcagcggcggtctcgcccccgctgacgtggcggagatggactcctcttctcgccgcgtcacatccacaggcgaacccgcctcccgcactgcgcccgcgggcgcccgctcctcctctccgggcctcctccgttccccgcgattcctgcgccggagccgccgtccggaggacgccgtgtgcggcggcggcggcacttggtggatgtgtgaaggcggagtccacggagcgggaggcgctcgatcgggatgctctgaagcgggtggcgctactcgcgcttggctgctgcgctgcagccgccgcgctcggctgcggcgctgcagccgccgcgctcggctgcggcgcggcgcgggcagcggcggaggactccatcaaggcgtcaggattcgggctgcgggtggcggagtcgctgcggaggctcggatggcccgacgacaccgtcgtgttcgcgctcgcgacgctgccggtgatcgagctgcggggggcgatccccgttgggtattggctgcggctccatccagtccgcctcaccatcctatccgttcttgggaacatggtgcctgtaccattcatcatcctctacctgaagaaactcgcaacgtttctgtctcagaacagcgcgtccgcgactcgaattatggacctcctctttgagcgggcacggcgcaaggctgctcctgttgaggaattccagtggctcggcttgatgctgttcgttgccgttccattcccaggcacgggagcgtggacatgggccttcattgcatctgtactaggcatgccgttctggtcaggttttacagcaaatttcgtgggagtcgtccttgcagggctgctggtgaacttgctcatgaatcttggcctgaaatacgcgatcgtcactggagtagttttgttctttgtctcaaccgtcatgtggagtgttcttcgttcccttaagaagtccgttaatgtcaagtgatctagtagtctttatcaaactgttcctaatcccttcagagttcagccttgcgtaggaagcttagttgtgtaattttaagtggaactttcagcttccaagtggatttacaagagagagt

SEQ ID NO: 18521 - protein, 327 aa, Zea mays subsp. mays
  misc_feature (1)..(327): Ceres Seq. ID no. 12365551
MPVAASVLAAAAVSPPLTWRRWTPLLAASHPQANPPPALRPRAPAPPLRASSVPRDSCAGAAVRRTPCAAAAALGGCVKAESTEREALDRDALKRVALLALGCCAAAAALGCGAAAAALGCGAARAAAEDSIKASGFGLRVAESLRRLGWPDDTVVFALATLPVIELRGAIPVGYWLRLHPVRLTILSVLGNMVPVPFIILYLKKLATFLSQNSASATRIMDLLFERARRKAAPVEEFQWLGLMLFVAVPFPGTGAWTWAFIASVLGMPFWSGFTANFVGVVLAGLLVNLLMNLGLKYAIVTGVVLFFVSTVMWSVLRSLKKSVNVK

SEQ ID NO: 18522 - protein, 204 aa, Zea mays subsp. mays
  misc_feature (1)..(204): Ceres Seq. ID no. 12365552
MDSSSRRVTSTGEPASRTAPAGARSSSPGLLRSPRFLRRSRRPEDAVCGGGGTWWMCEGGVHGAGGARSGCSEAGGATRAWLLRCSRRARLRRCSRRARLRRGAGSGGGLHQGVRIRAAGGGVAAEARMARRHRRVRARDAAGDRAAGGDPRWVLAAAPSSPPHHPIRSWEHGACTIHHPLPEETRNVSVSEQRVRDSNYGPPL

SEQ ID NO: 18523 - DNA, 2059 bp, Zea mays subsp. mays
  misc_feature (1)..(2059): Ceres Seq. ID no. 12365570
cgtgttcttaggcttcgctgcccctaccgcgtcttcgccgggatcggtccatggccggcgccgagcgcgcggaggcggtcgcgctggaacaagggctcctcgatccggaggaatccaaccaagtagtatacactggagatggatcagtcgacttttctggaaatcctgttgtcaaggaaagaacgggtagatggaaggcatgtccattcatattaggtaatgaatgctgtgaacgactggcctactatggcatctccacaaaccttgttacttacttgacaaaaaaactgcatgctggcaatgcctctgctgctagcagtgtgactacatggtcgggaacttgctacctaactccacttattggagcaatcctggctgatgcatactgggggaggtactggacaatcgcaacattttccacagtatacttcatcgggatgacactgctgactctttcagcatcagttcctatgctcatgcctccatcttgtgaaggatccttttgcccagcagcaagcccttttcagtatactgtcttttttcttggtctttatctgattgccctgggtactggtggaattaagccgtgtgtctcatcctttggagcggatcaatttgatgatacagatccagctgagcgaatccagaagggctctttcttcaattggttttatttttcaataaacattggtgctctcatatcaagcagctttctggtttgggtgcaagacaatgtaggatggggactggggtttggcattccgactgtattcatggggctggcaatcataagcttcttctctggtacatcactttataggttccaaaaaccaggaggtagtccaattacacgagtatgtcaggtgattgttgcctctttgcgcaagtggaatgtgcctgtcccagaggatagctctctcttgtatgagctacctaatggggtatcaacaattgaggggagtcggcaaatagagcacacagatgaactcagatgtttagataaggctgctacagttaccgaagttgatgtgaaaacggctgacttcaacaacccatggcggatatgcactgtcacccaggtggaagaactgaagatactagtaaggatgttccctgtctgggcaacaacaatagtgttttctgctgtatatgctcagatgtcaacaatgtttgtggaaacaagggatggtgcttgacccatccttgggctctttcaagatccctccagcttcactatctactttcgacaccctaagtgtcatcatatgtgtcccgatgtatgattacatcgtggttccgatagccaggagattcactggcaacgagaggggctttacagagttgcagaggatgggtattggcctggtaatttccatcatggctatgtcagtcgccgcagtcctcgaaatcaagcggctagcagttgccagggaagcacacctggtggatcagaatgtcccggtcccactgagcatattctggcaaatccctcagtatttcctgattggtctagcggagattttcacattcattggggcgctcgagttcttctatgaccagtcaccagacgccatgaggagcctctgcagcgcgcttaatcttctcactactgcgtttgggaactatctcagcacgttcattttgacaatggttgcgtactttactacgaggggaggtaaccctgggtggattcctgacaacttgaacgaaggccatcttgattacttcttcttgctcatcgctggcatcagttttctgaacctgattgtttatgtcctctgtgctggcaaatacaagagcaagaaggcagcttgagttgtgaaggccaggggctggatggcgtgctgcgcgccatgttatggtggacacttcagttcaaaatctgtatatatgtttcccgcattaaccaccctagctgaagcaaccatctgcaattgttgcaaagtttatattcttcattgtgctggactaagttgattatacattcgtgcttctactttgtgtatgtatatatctgacctaaagttgctgaacatagacaatttcacttgcctctggc

SEQ ID NO: 18524 - protein, 381 aa, Zea mays subsp. mays
  misc_feature (1)..(381): Ceres Seq. ID no. 12365571
MAGAERAEAVALEQGLLDPEESNQVVYTGDGSVDFSGNPVVKERTGRWKACPFILGNECCERLAYYGISTNLVTYLTKKLHAGNASAASSVTTWSGTCYLTPLIGAILADAYWGRYWTIATFSTVYFIGMTLLTLSASVPMLMPPSCEGSFCPAASPFQYTVFFLGLYLIALGTGGIKPCVSSFGADQFDDTDPAERIQKGSFFNWFYFSINIGALISSSFLVWVQDNVGWGLGFGIPTVFMGLAIISFFSGTSLYRFQKPGGSPITRVCQVIVASLRKWNVPVPEDSSLLYELPNGVSTIEGSRQIEHTDELRCLDKAATVTEVDVKTADFNNPWRICTVTQVEELKILVRMFPVWATTIVFSAVYAQMSTMFVETRDGA

SEQ ID NO: 18525 - protein, 252 aa, Zea mays subsp. mays
  misc_feature (1)..(252): Ceres Seq. ID no. 12365572
MTLLTLSASVPMLMPPSCEGSFCPAASPFQYTVFFLGLYLIALGTGGIKPCVSSFGADQFDDTDPAERIQKGSFFNWFYFSINIGALISSSFLVWVQDNVGWGLGFGIPTVFMGLAIISFFSGTSLYRFQKPGGSPITRVCQVIVASLRKWNVPVPEDSSLLYELPNGVSTIEGSRQIEHTDELRCLDKAATVTEVDVKTADFNNPWRICTVTQVEELKILVRMFPVWATTIVFSAVYAQMSTMFVETRDGA

SEQ ID NO: 18526 - protein, 241 aa, Zea mays subsp. mays
  misc_feature (1)..(241): Ceres Seq. ID no. 12365573
MLMPPSCEGSFCPAASPFQYTVFFLGLYLIALGTGGIKPCVSSFGADQFDDTDPAERIQKGSFFNWFYFSINIGALISSSFLVWVQDNVGWGLGFGIPTVFMGLAIISFFSGTSLYRFQKPGGSPITRVCQVIVASLRKWNVPVPEDSSLLYELPNGVSTIEGSRQIEHTDELRCLDKAATVTEVDVKTADFNNPWRICTVTQVEELKILVRMFPVWATTIVFSAVYAQMSTMFVETRDGA

SEQ ID NO: 18527 - DNA, 1336 bp, Zea mays subsp. mays
  misc_feature (1)..(1336): Ceres Seq. ID no. 12365588
aaaaaaccctagcccgacccctcctcctccacctgcgccaccgcccaccatgagctccgccgccgcgccagctgccgtcggcagcggcaaggagcttgccaacccgcccgccgacgggatcaccaacctccgcttctccaaccacagcaacaacctcctcgtctcctcatgggacaagacggtgcggctctacgacgccgacgccaacgtgctcaagggggagttcatgcaccccggggccgtcctcgactgctgcttccacgacgactcctcgggctttagcgccggagccgaccacaccgtgcggaggttggtatttagctcgtccaaggaagatgttttggggcggcatgatggtccagttcgttgcgtggaatactcttatgctgcaggtcaagtcatcaccggcagctgggataaaactgtaaaatgctgggatccaagaggagttagtggaccagagcgcacccttgttgggacatatgctcaacctgaacgtgtatattctctttcgttagtaggaaataggttggttgttgcaacagctggaagacatgtaaatatttatgatctgcgcaatatgtctcaacctgagcaaaaaagagactcttctttgaaatatcaaacacgatgtgttcgatgttttcccaacggaacaggatatgctcttagttctgttgaagggcgagtttctatggaattctttgatctatctgagtctgctcaatctaaaaagtatgctttcaagtgtcatcggaaatctgaggccggcagggacaccgtctatcctgtcaatgcaattgctttccatcccatatatggaacatttgccaccggagggtgtgatggatttgtgaatgtgtgggatggcattaacaagaaaagactatatcagtactcgaagtacgcatcaagcatcgctgctctatcattcagtaaggatgggcatctgcttgctgtggcatccagctacacttatgaagagggagaaaaaacgcatgagcctgacgctatatttatccggacagtgaatgaagtcgaggtgaagccgaagcccaaggcactggcagccccccagtagtgctgtgacctgttctggaggctagatgacccgtacttctctgcgttgatgtcaattacattagttgaccgagtgcttgtttgtgttgaaagagctgaaacgcctgtttcttaatctggaaccctcttctcccgttttacttgtccgtggaaacatttcatgttccagctggttgtatattccgaaacagaccatgtttaagttcattcggttcttcgttgacttaagttatttatcaaatatttaagtatcgtg

SEQ ID NO: 18528 - protein, 359 aa, Zea mays subsp. mays
  misc_feature (1)..(359): Ceres Seq. ID no. 12365589
KNPSPTPPPPPAPPPTMSSAAAPAAVGSGKELANPPADGITNLRFSNHSNNLLVSSWDKTVRLYDADANVLKGEFMHPGAVLDCCFHDDSSGFSAGADHTVRRLVFSSSKEDVLGRHDGPVRCVEYSYAAGQVITGSWDKTVKCWDPRGVSGPERTLVGTYAQPERVYSLSLVGNRLVVATAGRHVNIYDLRNMSQPEQKRDSSLKYQTRCVRCFPNGTGYALSSVEGRVSMEFFDLSESAQSKKYAFKCHRKSEAGRDTVYPVNAIAFHPIYGTFATGGCDGFVNVWDGINKKRLYQYSKYASSIAALSFSKDGHLLAVASSYTYEEGEKTHEPDAIFIRTVNEVEVKPKPKALAAPQ

SEQ ID NO: 18529 - protein, 343 aa, Zea mays subsp. mays; identical to SEQ ID NO: 16431
  misc_feature (1)..(343): Ceres Seq. ID no. 12365590

SEQ ID NO: 18530 - protein, 284 aa, Zea mays subsp. mays; identical to SEQ ID NO: 16432
  misc_feature (1)..(284): Ceres Seq. ID no. 12365591

SEQ ID NO: 18531 - DNA, 1023 bp, Zea mays subsp. mays
  misc_feature (1)..(1023): Ceres Seq. ID no. 12365599
agattacaaaagccattccttcaatcactcaaatccactgtgactccgtgagctccctgcctgctgccctgcactgctgcacactccccgcccagccgcaccagctcagctcagctcagctcagcagtcatggctcgcccctgccgcagcagcagcgccgctgcccgcctcctgctgctgctcgccgccgtcgcagcggcgctccaggccgcggccgccgcgccgccggtggccagcggcttcatccgcaaatcctgccgcgcgacgcagtacccgtcggtgtgcgagcagagcctcgcggcgtacggaggctccccgccgccgcggagcccgcgtgagctggcgcgcgccgcgctggcggtgagcgcggaccgcgctcgggcagcgtccgcgtacgtgggccgcctgtgcggctcccggtccggatccggcgacggcagcccccgccgcggcgccggcgcgatgaaggggtcggcggccgcggggtcccgtgcgcgactgtctggagaatctagcggacagcgtgggccacctccgcgacgcggcgcaggagataggcggcgccgggatggcccgcgccgggacgcgcgcgttcaggtggcacctcagcaacgtgcagacctggtgcagcgccgcgctcacggacgagaacacctgcctggacgggctctcgtcccgcgccgtggacgccgccacgcgcgccgccgtccgcggcagggtcgtcgaggtcgcgcaggtcaccagcaacgcgctcgcactcgtcaacaaggtcgggcctgggtactagtagcccagggcggcctgggtgctactactactgcctcctccacgacgttggttgtttctgcctcggcggttaactagttctgttattatcaatgtgtgtgtgtttctttgcatataagtatatgctttgtatctgttgtgtgaggtaatttatatatagttaaggccttaagggcaattagcttgtatattgtattatgggtggcgagaagtacacgaagacggataatccttctt

SEQ ID NO: 18532 - protein, 244 aa, Zea mays subsp. mays
  misc_feature (1)..(244): Ceres Seq. ID no. 12365600
MARPCRSSSAAARLLLLLAAVAAALQAAAAAPPVASGFIRKSCRATQYPSVCEQSLAAYGGSPPPRSPRELARAALAVSADRARAASAYVGRLCGSRSGSGDGSPRRGAGAMKGSAAAGSRARLSGESSGQRGPPPRRGAGDRRRRDGPRRDARVQVAPQQRADLVQRRAHGREHLPGRALVPRRGRRHARRRPRQGRRGRAGHQQRARTRQQGRAWVLVAQGGLGATTTASSTTLVVSASAVN

SEQ ID NO: 18533 - protein, 133 aa, Zea mays subsp. mays
  misc_feature (1)..(133): Ceres Seq. ID no. 12365601
MKGSAAAGSRARLSGESSGQRGPPPRRGAGDRRRRDGPRRDARVQVAPQQRADLVQRRAHGREHLPGRALVPRRGRRHARRRPRQGRRGRAGHQQRARTRQQGRAWVLVAQGGLGATTTASSTTLVVSASAVN

SEQ ID NO: 18534 - DNA, 1427 bp, Zea mays subsp. mays
  misc_feature (1)..(1427): Ceres Seq. ID no. 12365626
acaaccggcccccaaggccctctgtaggtgttcaattcctgccactccccgcttccactttggcatcttgctcgcaccggggcaaggcaatggcgccgccgcgtcgctacctggccgcgttgctcgccctgctatgcgcgtgcaccaccacgacggcgccggcgggctccgtcgtcgcggccgcgaacgtaccgatcactacgtgccggtcgttctgcggcaacatcacggtggactacccgttcgcgctgcacgaggggtgcggccacgcggggctgcgggacctgctcttctgcatcaacggcgcgctgatgctccacctcccctcgggctcctaccgcgtggtcgacgtcgactacgcgtaccggggcctgaccctgcacgacccggccatgtccgactgccgcgcgctggacctcgccccggctgggcggggcaacggcttcgtcatcgagccgtggcgggagccgtacctgtcgccggactcggacaacgtgttcctcctcctgggctgccgcgccacctcgccgctgttccagggcttccccgaccgccacctcccctgccggaacgtgtctgggatggggtgcggcgactacctcggctgcctcgcctgggacgactactacgccggcggaggcgggcggcggggcccgtcgtcgggcgacgccgcggggcaaccgcccgagtgctgcgcgctgccctggggtgccatccgggcggtgaacgtcagccggctcgagtgcgaggggtacagcagcgcgtacagcctcgcgcccgtgcgcgccgagggcgccgccgcgggctgggcgtacgggatccgggtgtcgtggacgctgcccgagtccaaccgcggattctgcggcgcgtgccgcgccacgggcggggcgtgtggccatgacacggagagccacgccgacctgtgcctctgcggggactggaactccacctccaactgcgactcctcggccgacgccagcacggtcggtcgccgccacgctgcccgctgtcgccgcgcttcgctgggccatcctcgcctcaggattgacgtcactatggtactacgcgtcgacgacatcaaatatgtgatggacggtggattcatgctgtgatcgacaactgcccttcaaacaacagtacacaccacctagagaaagacgatgcgtttcaggagcttgaaacgatcgaatttcagaacccacgatcactatccatactggtttatgtttacaatcactcgtaatggacaaaaggccaaagacgatcatgtttgttgtagcaaggatatttttcccgtttggatgtatccctttatgtcaacagactcgtttggatgtgagttttgtcgcacattagtagctgcacgatgttgtacgggtcagtcggctgtatactgacgatggtttgatggttgatggacatatggc

SEQ ID NO: 18535 - protein, 369 aa, Zea mays subsp. mays
  misc_feature (1)..(369): Ceres Seq. ID no. 12365627
NRPPRPSVGVQFLPLPASTLASCSHRGKAMAPPRRYLAALLALLCACTTTTAPAGSVVAAANVPITTCRSFCGNITVDYPFALHEGCGHAGLRDLLFCINGALMLHLPSGSYRVVDVDYAYRGLTLHDPAMSDCRALDLAPAGRGNGFVIEPWREPYLSPDSDNVFLLLGCRATSPLFQGFPDRHLPCRNVSGMGCGDYLGCLAWDDYYAGGGGRRGPSSGDAAGQPPECCALPWGAIRAVNVSRLECEGYSSAYSLAPVRAEGAAAGWAYGIRVSWTLPESNRGFCGACRATGGACGHDTESHADLCLCGDWNSTSNCDSSADASTVGRRHAARCRRASLGHPRLRIDVTMVLRVDDIKYVMDGGFML

SEQ ID NO: 18536 - protein, 340 aa, Zea mays subsp. mays
  misc_feature (1)..(340): Ceres Seq. ID no. 12365628
MAPPRRYLAALLALLCACTTTTAPAGSVVAAANVPITTCRSFCGNITVDYPFALHEGCGHAGLRDLLFCINGALMLHLPSGSYRVVDVDYAYRGLTLHDPAMSDCRALDLAPAGRGNGFVIEPWREPYLSPDSDNVFLLLGCRATSPLFQGFPDRHLPCRNVSGMGCGDYLGCLAWDDYYAGGGGRRGPSSGDAAGQPPECCALPWGAIRAVNVSRLECEGYSSAYSLAPVRAEGAAAGWAYGIRVSWTLPESNRGFCGACRATGGACGHDTESHADLCLCGDWNSTSNCDSSADASTVGRRHAARCRRASLGHPRLRIDVTMVLRVDDIKYVMDGGFML

SEQ ID NO: 18537 - protein, 299 aa, Zea mays subsp. mays
  misc_feature (1)..(299): Ceres Seq. ID no. 12365629
QPAPKALCRCSIPATPRFHFGILLAPGQGNGAAASLPGRVARPAMRVHHHDGAGGLRRRGRERTDHYVPVVLRQHHGGLPVRAARGVRPRGAAGPALLHQRRADAPPPLGLLPRGRRRLRVPGPDPARPGHVRLPRAGPRPGWAGQRLRHRAVAGAVPVAGLGQRVPPPGLPRHLAAVPGLPRPPPPLPERVWDGVRRLPRLPRLGRLLRRRRRAAGPVVGRRRGATARVLRAALGCHPGGERQPARVRGVQQRVQPRARARRGRRRGLGVRDPGVVDAARVQPRILRRVPRHGRGVWP

SEQ ID NO: 18538 - DNA, 1523 bp, Zea mays subsp. mays
  misc_feature (1)..(1523): Ceres Seq. ID no. 12365642
atgagaaaaatagaaaattcctccaaaccctaagcccctctctgctcacctctgtactccgaatctgctcccaagtctgctagggtttaacgctcgcgtcctcctcacgcattcggtctggtcgctgatcttcgcttgttcgattccgctcggctctaggacccaggctctcgaggcggctggagtggcggcgcgacgagagggtgaagcggatgcagacggaggcgagggtggggatggccgccgccacgatggacggcaccggcgccgcggcgtccgccgcccggaggtacacgacgcagcagcagcagcagcagctgcagcaccaccagccgcagctcgggaccgtgccccatctcctcgccggcggcgtcgctggcgcagtcagcaagacctgcaccgccccgctcgcacgcctcaccatcctctttcaggtacaaggaatgcactcagatgtggctacaatgcgcaatactagcatatggcgtgaagcatcccgcattgtctatggagaaggttttcgagctttctggaaagggaaccttgttaccattgctcaccggttgccttactcttcaattagtttctatgcctatgagagatacaagaatttgcttcagatgctaccgggtcttgagaagaatggtggatttggtgcagatgttggtgttagattgctaggtggtggtttatcaggaatcactgcagcttctgtgacgtatccactggacttggtgcggacacgtcttgctgcccagacaaatactgcctactacaggggcatatctcatgctctttatgcgatctgcagagatgagggtgtccgtggattgtacaagggtcttggtgccactttactgggagtgggccccagcattgcagtaagcttctctgtgtatgaaactttacgttcccattggcaaatagagaggccatgtgattcccctgttctgatcagtttggcttgtggaagtctttcaggaattgcatcatctacttttacattcccgttggatcttgtgagacgtcgcatgcaattggaaggagcagccgggagggctcgcgtctaccagacaggactttttggaaccttcggacatattgtccgtacggagggttttagaggcatgtatagaggaatcttgcctgagtactgcaaagtggttcctggtgtcggcatcgtatttatgacatatgagatgcttaaggccatcctcacaggactggaatctgatgattagatatctgcgaggtcatgctacacaattttgatacatggtgtcagaacaacatttgaggctgattagactgggagaaatatgagcatgtagcatacgttagggtttaggatgtgctaaggtttgcagtttgtgttatatggttacagatgtttatgtagtgcaccgtgaaagatgccacaggtcttccaaaatgaatatttttttggcatcaccaccattttgtgtatcttcaataacattgtaatggtacatgaagctgttgtctttagcctgatgatcttt

SEQ ID NO: 18539 - protein, 342 aa, Zea mays subsp. mays
  misc_feature (1)..(342): Ceres Seq. ID no. 12365643
MQTEARVGMAAATMDGTGAAASAARRYTTQQQQQQLQHHQPQLGTVPHLLAGGVAGAVSKTCTAPLARLTILFQVQGMHSDVATMRNTSIWREASRIVYGEGFRAFWKGNLVTIAHRLPYSSISFYAYERYKNLLQMLPGLEKNGGFGADVGVRLLGGGLSGITAASVTYPLDLVRTRLAAQTNTAYYRGISHALYAICRDEGVRGLYKGLGATLLGVGPSIAVSFSVYETLRSHWQIERPCDSPVLISLACGSLSGIASSTFTFPLDLVRRRMQLEGAAGRARVYQTGLFGTFGHIVRTEGFRGMYRGILPEYCKVVPGVGIVFMTYEMLKAILTGLESDD

SEQ ID NO: 18540 - protein, 334 aa, Zea mays subsp. mays
  misc_feature (1)..(334): Ceres Seq. ID no. 12365644
MAAATMDGTGAAASAARRYTTQQQQQQLQHHQPQLGTVPHLLAGGVAGAVSKTCTAPLARLTILFQVQGMHSDVATMRNTSIWREASRIVYGEGFRAFWKGNLVTIAHRLPYSSISFYAYERYKNLLQMLPGLEKNGGFGADVGVRLLGGGLSGITAASVTYPLDLVRTRLAAQTNTAYYRGISHALYAICRDEGVRGLYKGLGATLLGVGPSIAVSFSVYETLRSHWQIERPCDSPVLISLACGSLSGIASSTFTFPLDLVRRRMQLEGAAGRARVYQTGLFGTFGHIVRTEGFRGMYRGILPEYCKVVPGVGIVFMTYEMLKAILTGLESDD

SEQ ID NO: 18541 - protein, 329 aa, Zea mays subsp. mays
  misc_feature (1)..(329): Ceres Seq. ID no. 12365645
MDGTGAAASAARRYTTQQQQQQLQHHQPQLGTVPHLLAGGVAGAVSKTCTAPLARLTILFQVQGMHSDVATMRNTSIWREASRIVYGEGFRAFWKGNLVTIAHRLPYSSISFYAYERYKNLLQMLPGLEKNGGFGADVGVRLLGGGLSGITAASVTYPLDLVRTRLAAQTNTAYYRGISHALYAICRDEGVRGLYKGLGATLLGVGPSIAVSFSVYETLRSHWQIERPCDSPVLISLACGSLSGIASSTFTFPLDLVRRRMQLEGAAGRARVYQTGLFGTFGHIVRTEGFRGMYRGILPEYCKVVPGVGIVFMTYEMLKAILTGLESDD

SEQ ID NO: 18542 - DNA, 1164 bp, Zea mays subsp. mays
  misc_feature (1)..(1164): Ceres Seq. ID no. 12365653
ctcgtaatctctcctgcgtccatcctctcctcgcggcgggggaagaatggccgacccgagcttcctcgtcgggatcgtagggaacgtaatctccatcctcgtcttcgcgtcgccgatagcgacgttccggcgcatcgtgaggagcaggagcacggaggacttcaggtggctgccgtacgtcaccaccctgctcagcaccagcctctggaccttctacggcctcctcaagcccggctgcctcctcgtcgtcaccgtcaacggcgccggcgccgcgctcgaggccgcctacgtcgcgctctacctcgtctacgcgccaagggagaccaaggcgaagatggccaaggtggtggtggccgtgaacgtcgccttccttgccgcggtcgtcgcggtggcgcctgctggcgctgcacggcggcgcccgcctgttcgcggtgggcctgctgtgcgccgcgctcacggtcgggatgtacgcggcaccgctcggcgcgatgcggacggtggtgaagacccggagcgtggagtacatgcccttctccctctccttcttcctcttcctcaacggcggcgtctggagcatctactccctgctcgtcaaggactacttcatcggggtccccaacgccatcggcctcgtcctgggcacggcgcagctgctgctgtacctggcgtaccggaaggcgccggcgagcaaggacgacgacgaggaggcggccgctgctgcgtcgggggacgacggcgacgacgaggaggaggaggaagggctgacgcacctgatggggcagcaggtggagatggcgcagcgcggccgcctgcgcctgcacaaggggcagagcctgcccaagccgccgccgggcgggccgctgtcgtcgccgcgccacgggttcgggagcatcatcaagtccctgtccgccacccccgtcgagctgcactccgtcctgtaccagcacgcccggttccagcccgtcaagaaggacgacgacgacgtggaggccaacgactgactgatatgatgcattaattgatgctgctattgttcgaccgacgtggtagcggtacagaggcgcccttttagtattcaggccagggtagcgttccaatggacagggtttgagtgtgttcttcacatatttgcaggttcgaaacccagatgaattaatatgtttg

SEQ ID NO: 18543 - protein, 323 aa, Zea mays subsp. mays
  misc_feature (1)..(323): Ceres Seq. ID no. 12365654
MADPSFLVGIVGNVISILVFASPIATFRRIVRSRSTEDFRWLPYVTTLLSTSLWTFYGLLKPGCLLVVTVNGAGAALEAAYVALYLVYAPRETKAKMAKVVVAVNVAFLAAVVAVAPAGAARRRPPVRGGPAVRRAHGRDVRGTARRDADGGEDPERGVHALLPLLLPLPQRRRLEHLLPARQGLLHRGPQRHRPRPGHGAAAAVPGVPEGAGEQGRRRGGGRCCVGGRRRRRGGGGRADAPDGAAGGDGAARPPAPAQGAEPAQAAAGRAAVVAAPRVREHHQVPVRHPRRAALRPVPARPVPARQEGRRRRGGQRLTDMMH

SEQ ID NO: 18544 - protein, 227 aa, Zea mays subsp. mays
  misc_feature (1)..(227): Ceres Seq. ID no. 12365655
MAKVVVAVNVAFLAAVVAVAPAGAARRRPPVRGGPAVRRAHGRDVRGTARRDADGGEDPERGVHALLPLLLPLPQRRRLEHLLPARQGLLHRGPQRHRPRPGHGAAAAVPGVPEGAGEQGRRRGGGRCCVGGRRRRRGGGGRADAPDGAAGGDGAARPPAPAQGAEPAQAAAGRAAVVAAPRVREHHQVPVRHPRRAALRPVPARPVPARQEGRRRRGGQRLTDMMH

SEQ ID NO: 18545 - protein, 178 aa, Zea mays subsp. mays
  misc_feature (1)..(178): Ceres Seq. ID no. 12365656
MYAAPLGAMRTVVKTRSVEYMPFSLSFFLFLNGGVWSIYSLLVKDYFIGVPNAIGLVLGTAQLLLYLAYRKAPASKDDDEEAAAAASGDDGDDEEEEEGLTHLMGQQVEMAQRGRLRLHKGQSLPKPPPGGPLSSPRHGFGSIIKSLSATPVELHSVLYQHARFQPVKKDDDDVEAND

SEQ ID NO: 18546 - DNA, 1547 bp, Zea mays subsp. mays
  misc_feature (1)..(1547): Ceres Seq. ID no. 12365695
ttcttggtttgctagagagaggaaaaacaaaaaaacaaaaaaaacagtctagatggctgctgctatagatctgtcaggggaggagctgatgagagcactcgagccttttatccgggatgcctctgctcacggatccagtccgctcctccacccgcaccagccacttagcccctcgtcgccgttctccttccaccaagctgtcgccgtcgccgccgcctcctcctacggaggaaactacccgttcgccgcgcccgacgaggcgggccagctgagcccttcccagatgcagtacatccaggcccgcctccacctgcagcgtcgccaggcgcagacctccgtgctgggcccgcgtgcccagcccatgaaggcgtcggcgtccgcggcccccgccccggcgcggccgcagaagctgtacccgcggcgtgcggcagcggcactggggcaagtgggtggcggagatccggctcccgcgcaaccgcacccggctctggctcggcaccttcgacaccgccgaggaggcggcgctggcctacgaccaggccgcctaccgcctccgcggcgacgcggcgcgcctcaacttccccgacaacgccgcctcccgcggcccgctccacgcctccgtcgacgccaagctccagagcctgtgccagagcatcgccgcgtccaagaagggcgccaagaagccagcctccgccgcagctgccgcgtcgtcgtccgcccccaccagcaactgctgctcctcgccgtcgtccgacgacgcgacctcgtcctgcctcgagtccgccaccgagtcctcgtgcccgtccccgtccacgtcgccgtccgcctcgcccgggccgacggtgccggagatgcagcagctggacttcagcgaggcgccgtgggacgaggccgccggcttcgcgctcaccaagtacccgtcgtacgagatcgactgggactccctcctcgccaattaatcgtcgccccctgttggctggctggctggctcccttcctacccacactgccgtcgtgcagctggaggagggttaaagaaggttaacggccgtcgcgcagatgggattttagacatcctgcgcgggcactagttggatcattagtgctaatccccgtccgtccgttcgttcgttcgttctgtgtagatgtccgtccgattcgtttggtccttgtcactggtgagtcagttgtagatctcgggttatttagggtttggttctccggaggaggagagaaccacaaccgacgggaagccggcgtttttgtgtccggcgttctccggcggtggccggtacgtgtcacactggtcagtgaccccaccccccccggccgttcaggtgtccgttgttctggtagctgtttcttgtgctagatggtgtgctgtgctctacaggttgtaaagagcagcacggtgtgatgtgaaggagatgcttgtcaagcagtagtactccgtatgtatgttgtaaaatcagctagctagctgtgtccaggagttgtaatttgatgaactgctactgttggtgctactattgtatggtttattgttgt

SEQ ID NO: 18547 - protein, 345 aa, Zea mays subsp. mays
  misc_feature (1)..(345): Ceres Seq. ID no. 12365696
MAAAIDLSGEELMRALEPFIRDASAHGSSPLLHPHQPLSPSSPFSFHQAVAVAAASSYGGNYPFAAPDEAGQLSPSQMQYIQARLHLQRRQAQTSVLGPRAQPMKASASAAPAPARPQKLYPRRAAAALGQVGGGDPAPAQPHPALARHLRHRRGGGAGLRPGRLPPPRRRGAPQLPRQRRLPRPAPRLRRRQAPEPVPEHRRVQEGRQEASLRRSCRVVVRPHQQLLLLAVVRRRDLVLPRVRHRVLVPVPVHVAVRLARADGAGDAAAGLQRGAVGRGRRLRAHQVPVVRDRLGLPPRQLIVAPCWLAGWLPSYPHCRRAAGGGLKKVNGRRADGILDILRGH

SEQ ID NO: 18548 - protein, 333 aa, Zea mays subsp. mays
  misc_feature (1)..(333): Ceres Seq. ID no. 12365697
MRALEPFIRDASAHGSSPLLHPHQPLSPSSPFSFHQAVAVAAASSYGGNYPFAAPDEAGQLSPSQMQYIQARLHLQRRQAQTSVLGPRAQPMKASASAAPAPARPQKLYPRRAAAALGQVGGGDPAPAQPHPALARHLRHRRGGGAGLRPGRLPPPRRRGAPQLPRQRRLPRPAPRLRRRQAPEPVPEHRRVQEGRQEASLRRSCRVVVRPHQQLLLLAVVRRRDLVLPRVRHRVLVPVPVHVAVRLARADGAGDAAAGLQRGAVGRGRRLRAHQVPVVRDRLGLPPRQLIVAPCWLAGWLPSYPHCRRAAGGGLKKVNGRRADGILDILRGH

SEQ ID NO: 18549 - protein, 268 aa, Zea mays subsp. mays
  misc_feature (1)..(268): Ceres Seq. ID no. 12365698
MQYIQARLHLQRRQAQTSVLGPRAQPMKASASAAPAPARPQKLYPRRAAAALGQVGGGDPAPAQPHPALARHLRHRRGGGAGLRPGRLPPPRRRGAPQLPRQRRLPRPAPRLRRRQAPEPVPEHRRVQEGRQEASLRRSCRVVVRPHQQLLLLAVVRRRDLVLPRVRHRVLVPVPVHVAVRLARADGAGDAAAGLQRGAVGRGRRLRAHQVPVVRDRLGLPPRQLIVAPCWLAGWLPSYPHCRRAAGGGLKKVNGRRADGILDILRGH

SEQ ID NO: 18550 - DNA, 928 bp, Zea mays subsp. mays
  misc_feature (1)..(928): Ceres Seq. ID no. 12365717
ccttctatcctctccggcacgagccgtccagttcagttcacctcggtccgggaccgcgactacaccgacggcggcgcgtccgagcccagccgacgccgagccaatggtgactccagcgacattctccctccgccccagcgcgccccccgcgccgcctcgtgccgggctgccccgcgctcgggcctgtttcgcgcccgccatccgcacctccccttccgtcgccttttcctaccagcctcggcgcttcagtggcatccgccgcgccgtggccgtcgactccgagcagggctcccccgagtctccagagcaggagaagaagcccaagacgtactacttcctggtggcaaacgccaagttcatgctggacgaggaggagcatttccaggagcaactcgccgagaagctgcgcaactacgccgagcgcgacaaggagcaggacttctggctcgtcgtggagcccaagttcctcgacaggttccccaacatcaccaagcgcctcaagcgccccgccgtcgcgcttgtctccaccgacggcaactggatcacattcatgaagttaaggctagacagggtcttacaagaccagttcgacgcagaatcagttgaagaggcattggcttctaaccctgttgagttgaaatttgagaagcctgagaaatggacagctccgtaccctaaatatgggtttggatggtgggaacccttcttgcctccaaagttcagcaatggtacggcatagagataagcagcaatccctatgaggcatgtaagattactcccctgtaagtgatgaatgtaattttaattttgatgatgaggatgtagtacttgaggttgtaccagtacagttagttgaattagttgcacagtttttgtaataccaaataatcagctgttttattttatttgagaaagtcgtggttctgtt

SEQ ID NO: 18551 - protein, 245 aa, Zea mays subsp. mays
  misc_feature (1)..(245): Ceres Seq. ID no. 12365718
LLSSPARAVQFSSPRSGTATTPTAARPSPADAEPMVTPATFSLRPSAPPAPPRAGLPRARACFAPAIRTSPSVAFSYQPRRFSGIRRAVAVDSEQGSPESPEQEKKPKTYYFLVANAKFMLDEEEHFQEQLAEKLRNYAERDKEQDFWLVVEPKFLDRFPNITKRLKRPAVALVSTDGNWITFMKLRLDRVLQDQFDAESVEEALASNPVELKFEKPEKWTAPYPKYGFGWWEPFLPPKFSNGTA

SEQ ID NO: 18552 - protein, 211 aa, Zea mays subsp. mays
  misc_feature (1)..(211): Ceres Seq. ID no. 12365719
MVTPATFSLRPSAPPAPPRAGLPRARACFAPAIRTSPSVAFSYQPRRFSGIRRAVAVDSEQGSPESPEQEKKPKTYYFLVANAKFMLDEEEHFQEQLAEKLRNYAERDKEQDFWLVVEPKFLDRFPNITKRLKRPAVALVSTDGNWITFMKLRLDRVLQDQFDAESVEEALASNPVELKFEKPEKWTAPYPKYGFGWWEPFLPPKFSNGTA

SEQ ID NO: 18553 - protein, 201 aa, Zea mays subsp. mays
  misc_feature (1)..(201): Ceres Seq. ID no. 12365720
PSILSGTSRPVQFTSVRDRDYTDGGASEPSRRRANGDSSDILPPPQRAPRAASCRAAPRSGLFRARHPHLPFRRLFLPASALQWHPPRRGRRLRAGLPRVSRAGEEAQDVLLPGGKRQVHAGRGGAFPGATRREAAQLRRARQGAGLLARRGAQVPRQVPQHHQAPQAPRRRACLHRRQLDHIHEVKARQGLTRPVRRRIS

SEQ ID NO: 18554 - DNA, 1796 bp, Zea mays subsp. mays
  misc_feature (1)..(1796): Ceres Seq. ID no. 12365735
ctcccacagtcccactcctctctctctcgcgctctctctctttcatcgccaccaccgccgtgaaatccgcacgcgtgcttcctgtcgatttttgagctgtgactgtgagcgccatgcgccgtggaggctgtgtccggaaatggcaccgaggcagtggccgcggcgccggcgaaggaggtgagcaccaagcaggcgtctttccgggaggagagcaacttcctggacgatctcaaggagagcgagcgtaaggcgcttgccgagctccgcgacaaggtcgaggcggccatcgtggagggcaagctgttcgacgacggtaagccggaggtgaaggagaaggagaaggagaaggaggaggccaagaagaaggcagtggagaagaaagatgagcagcccgaagccgaggagaagggagaggaggatgacaagaaggaggccgacgccgaggaggagaagaaggaaggcgtggaggaaggggagaagaaggaaggccaggaggaaggggagaaggaggaggccgaggaggagagcggagacgacaccaagcaggaggccaaggaagaggaagccgacgacaaggcggcggcgaaggagccggagacggcggccgttgtcgtcgacaaggacatcgcgctgtggggcgtgcctttgctccctagcaagggcgacgaggccaccgacgtggtgctcctcaagttcctccgcgcgcgcgacttcaaggccggcgccgcgttcgagatgctccgccgcacgctccgctggcgcagggactggaccggcttcagctccggcgccgagtccgacgccgacctccccgaggagctcgcgggcgcgtgctacctcgacggcgcagaccacgagggccacccggtgtgctacaacgcgctgggcgtgttcgcggacgacgccgtgtacaagaaggcgctgggcaccgaggaaggcaaggccaggttcctccggtggcgggtgcgcgccatggagcgccacgtcgccgagctggacctgaggcccggcggcgtcgcgtcgctgctgcaggtgatcgacctcaggaactcgccggggccggccaagaaggacttccgagtcgccgtcaagcaggtctcgacctgttccaggacaactaccccgagctcgtcgcgagaaacatcttggtcaacgtgccgttctggtactacgcgttcagcaccctgttctacccgttcctgacgcagaggacgaagagcaagttcgtcgttgctcgcccgtcaaaggtcaccgagaccctcctcaagtacattccgatcgaggccatcccggtgaagtacggcggcctgaagcgcgacggcgacaccgagttctcggcggacgacggcgaggtcgcggaggtcaccgtcaagggaagctccacggagaccatcgagatcgaagctactgaggctgatgccacgctgacatgggacctgactgtgctggggtgggaggtgaactacaaggaggagttcgtgccggcggacgagggctcctacactatcatcgtcaggaaaggcaagaagatggcgtccggcgaggaggcggtccgcaactcgttccgcgccggcgagccgggcaaggtcgtgctcaccgtccagaacacctcgcacaggaagaagaaggtgctgttcaggcacaaggccaagagcgcctgcgccaagaagtgctgagaggctaagaaatttgggagtgaaattggttgtggatttcaatattcgttacattctttgtgtgtgtgtaaggagagagagagagaacattgttcgctgattatttgaggtggttgttgc

SEQ ID NO: 18555 - protein, 206 aa, Zea mays subsp. mays
  misc_feature (1)..(206): Ceres Seq. ID no. 12365736
MSSPKPRRRERRMTRRRPTPRRRRRKAWRKGRRRKARRKGRRRRPRRRAETTPSRRPRKRKPTTRRRRRSRRRRPLSSTRTSRCGACLCSLARATRPPTWCSSSSSARATSRPAPRSRCSAARSAGAGTGPASAPAPSPTPTSPRSSRARATSTAQTTRATRCATTRWACSRTTPCTRRRWAPRKARPGSSGGGCAPWSATSPSWT

SEQ ID NO: 18556 - protein, 194 aa, Zea mays subsp. mays
  misc_feature (1)..(194): Ceres Seq. ID no. 12365737
MTRRRPTPRRRRRKAWRKGRRRKARRKGRRRRPRRRAETTPSRRPRKRKPTTRRRRRSRRRRPLSSTRTSRCGACLCSLARATRPPTWCSSSSSARATSRPAPRSRCSAARSAGAGTGPASAPAPSPTPTSPRSSRARATSTAQTTRATRCATTRWACSRTTPCTRRRWAPRKARPGSSGGGCAPWSATSPSWT

SEQ ID NO: 18557 - protein, 155 aa, Zea mays subsp. mays
  misc_feature (1)..(155): Ceres Seq. ID no. 12365738
MLRRTLRWRRDWTGFSSGAESDADLPEELAGACYLDGADHEGHPVCYNALGVFADDAVYKKALGTEEGKARFLRWRVRAMERHVAELDLRPGGVASLLQVIDLRNSPGPAKKDFRVAVKQVSTCSRTTTPSSSRETSWSTCRSGTTRSAPCSTRS

SEQ ID NO: 18558 - DNA, 1542 bp, Zea mays subsp. mays
  misc_feature (1)..(1542): Ceres Seq. ID no. 12365770
agtccccgtgcgccacgccacctgccagtactagctcgcccgctcgatcgcgcccatcaatcaatcaattctcgacctcactactcgatctcgtctcatcagtgtgagtgtccgagcacggcagcacgcgcaatggacgctctgctcgtgactacgaccttcctcgtccccgtgggtggcgctcctcctcgggtccgggtccgggtccgcggcggcgctgccgcgcgccttcttcgtgttcggtaactccctcgtggacaacggcaacaacaactacctgatgacgacggcgcgcgccgacgcgccgccctacgggatcgacttccccacgcacatggccacggggcggttctccaacgggctgaacatccccgacatcatcagcgagcacctcggctcccagcccgcgctgccgtacctgagccccgacctccgcggcgcccagctcctggtcggcgccaacttcgcgtccgccggcgtcggcatcctcaacgacaccgacatacagttcgtgaacatcatcaggatcggacagcagctgcgcaacttccaggagtaccagcagaggctggcggcgttcgtcggcgaggacgcggcgcggcaggccgtcaacgacgcgctcgtgctcatcacgctcggcggcaacgacttcgtcaacaactactacctggtgcccttctccgtccgctctcgccagtttgccatccaggactacgtcccctacctcatctccgagtacaggaagatcctcacgcggctgtacgagctcggggcccggcgcgtggtggtgacgggcaccgggatgatcgggtgcgtgccggcggagctcgccatgcacagcgtcgacggcgagtgcgcgcgcgacctcacggaggcggccgacctcttcaacccgcagctggtgcagatgctctccgagctcaacgccgacatcggcgccgacgtcttcatcgccgccaacaccaaccgggtcagcttcgacttcatgttcaacccgcaggactacgggttcgtgacgtccaaggtggcatgctgcgggcagggcccctacaacgggatcgggctgtgcacgccggcgtccaacgtgtgccccaaccgggacgtgtacgcgtactgggacgcgttccaccccacggagcgcgccaaccggatcatcgtcggccagttcatgcacggatccaccgaccacatcagccccatgaacatcagcaccatcctcgccatggacaacaggaactaggccctgcgcgtggcgtgcctcgacctcgatccatccatctctagccggctgggattgagatgccaatctgcactgccatggatccgtcccgacactggcagctataatactacgagacgacacacatagctactgcatgcatgcgtaatactactagtataagttcgtgtcattggtaattggttatgttcatgaagcttcttttttgtggtttagattgacgtgaattgatggtgagaaattaatcctttattagagatgcatgggttcaatataatacagctgtatgtcaagtttcttcg

SEQ ID NO: 18559 - protein, 319 aa, Zea mays subsp. mays
  misc_feature (1)..(319): Ceres Seq. ID no. 12365771
MTTARADAPPYGIDFPTHMATGRFSNGLNIPDIISEHLGSQPALPYLSPDLRGAQLLVGANFASAGVGILNDTDIQFVNIIRIGQQLRNFQEYQQRLAAFVGEDAARQAVNDALVLITLGGNDFVNNYYLVPFSVRSRQFAIQDYVPYLISEYRKILTRLYELGARRVVVTGTGMIGCVPAELAMHSVDGECARDLTEAADLFNPQLVQMLSELNADIGADVFIAANTNRVSFDFMFNPQDYGFVTSKVACCGQGPYNGIGLCTPASNVCPNRDVYAYWDAFHPTERANRIIVGQFMHGSTDHISPMNISTILAMDNRN

SEQ ID NO: 18560 - protein, 301 aa, Zea mays subsp. mays
  misc_feature (1)..(301): Ceres Seq. ID no. 12365772
MATGRFSNGLNIPDIISEHLGSQPALPYLSPDLRGAQLLVGANFASAGVGILNDTDIQFVNIIRIGQQLRNFQEYQQRLAAFVGEDAARQAVNDALVLITLGGNDFVNNYYLVPFSVRSRQFAIQDYVPYLISEYRKILTRLYELGARRVVVTGTGMIGCVPAELAMHSVDGECARDLTEAADLFNPQLVQMLSELNADIGADVFIAANTNRVSFDFMFNPQDYGFVTSKVACCGQGPYNGIGLCTPASNVCPNRDVYAYWDAFHPTERANRIIVGQFMHGSTDHISPMNISTILAMDNRN

SEQ ID NO: 18561 - DNA, 1033 bp, Zea mays subsp. mays
  misc_feature (1)..(1033): Ceres Seq. ID no. 12365844
cctgatttcctgaaacacagatcatcatcattcatggtcatggctatggcaaactcggcaacgatcctgaccgtcgttctggctctcgggctagcgttcctccgcgccgcagctccggcctccgcgcagaactgcggctgcccgccaggctactgctgcagcaagttcggttactgcggcaccagcttcgactactgcaatgccaacacgtgccagtccggcccgtgcacggccgggggcgccggtagcggcggcggcgcgaacgtgagtggcgtcgtcaccgacgcatttctcagcggcatcaagtcccaggccgggagcgggtgcgagggcagtagcttgagcttctactcgcgaagggcgttcctgagcgccgccagctcgtatcccggcttcgcccgtgcaggatcggaggccgacggcaagcgcgaggtcgccgccttcttcgcgcacgtcacgcacgagaccggccatttctgctacgtcagcgagatcaacaagaacaacagctactgcaactcgagcaacacgcagtggccgtgcgccccgggcaagaagtactacggacgcggcccgcctgcagatctcgtggaactacaactacggtcccgccgggaggagcgtcggcttcgacgggctggtgaacccggacatggtggcgcaggaccccgtggtctcgttcaagacggcgctctggttctggatgagcaacgcgcaccaggtcatgccgcgggggttcggcgccactatccgtgccatcaacggcgccctcgagtgcaacggcgagaaccccgccgccgtgaacgcgcgcgtgggctactacaaggagtactgcaagcagttcggcgtcggcccagggaacaacctcacctgctagaacctattcaagtgttgtgttgggttcatgcatatgcgggcttcaatggaaaactcagtccgctgtagtgaagctcagagtttgagagtacctgtttattatacaagaaaaatgaagcagttcctaatatacagattatatcatttaattaatggg

SEQ ID NO: 18562 - protein, 314 aa, Zea mays subsp. mays
  misc_feature (1)..(314): Ceres Seq. ID no. 12365845
PDFLKHRSSSFMVMAMANSATILTVVLALGLAFLRAAAPASAQNCGCPPGYCCSKFGYCGTSFDYCNANTCQSGPCTAGGAGSGGGANVSGVVTDAFLSGIKSQAGSGCEGSSLSFYSRRAFLSAASSYPGFARAGSEADGKREVAAFFAHVTHETGHFCYVSEINKNNSYCNSSNTQWPCAPGKKYYGRGPPADLVELQLRSRREERRLRRAGEPGHGGAGPRGLVQDGALVLDEQRAPGHAAGVRRHYPCHQRRPRVQRREPRRRERARGLLQGVLQAVRRRPREQPHLLEPIQVLCWVHAYAGFNGKLSPL

SEQ ID NO: 18563 - protein, 303 aa, Zea mays subsp. mays
  misc_feature (1)..(303): Ceres Seq. ID no. 12365846
MVMAMANSATILTVVLALGLAFLRAAAPASAQNCGCPPGYCCSKFGYCGTSFDYCNANTCQSGPCTAGGAGSGGGANVSGVVTDAFLSGIKSQAGSGCEGSSLSFYSRRAFLSAASSYPGFARAGSEADGKREVAAFFAHVTHETGHFCYVSEINKNNSYCNSSNTQWPCAPGKKYYGRGPPADLVELQLRSRREERRLRRAGEPGHGGAGPRGLVQDGALVLDEQRAPGHAAGVRRHYPCHQRRPRVQRREPRRRERARGLLQGVLQAVRRRPREQPHLLEPIQVLCWVHAYAGFNGKLSPL

SEQ ID NO: 18564 - protein, 301 aa, Zea mays subsp. mays
  misc_feature (1)..(301): Ceres Seq. ID no. 12365847
MAMANSATILTVVLALGLAFLRAAAPASAQNCGCPPGYCCSKFGYCGTSFDYCNANTCQSGPCTAGGAGSGGGANVSGVVTDAFLSGIKSQAGSGCEGSSLSFYSRRAFLSAASSYPGFARAGSEADGKREVAAFFAHVTHETGHFCYVSEINKNNSYCNSSNTQWPCAPGKKYYGRGPPADLVELQLRSRREERRLRRAGEPGHGGAGPRGLVQDGALVLDEQRAPGHAAGVRRHYPCHQRRPRVQRREPRRRERARGLLQGVLQAVRRRPREQPHLLEPIQVLCWVHAYAGFNGKLSPL

SEQ ID NO: 18565 - DNA, 1331 bp, Zea mays subsp. mays
  misc_feature (1)..(1331): Ceres Seq. ID no. 12365852
cttgcgacctgattcgccatgccctgcgtgtcctttcgaaaacggctgtcgacactgcccctctcgctcgctttccactcgattccagcaggcgtgcgtggcccaagtacccaacgcaccaccaggtggggcatctgctccacccccactccacttccactagcaccaacaccaacagcctcgccgccagccgcagccacgcgacacgacgcgacgcgagacgcggagcggtacaaaaggtggactgggtgggtggctggttccgtggttcaactcctaccactaccacagcaccaacgacggaccaggcagcagagaaaaagcagaccagacgagacctctcgcgttccgtcctcctcccccctgcccctgctgccgttccccttcttcctcagttctcccgcccgctgctgccctccgtccgcgtccagatcccgccaccaaccgatccggcgccctccagcatggcgggggcgggggcgaaggcggcgggagccctggctctggcgctcgtgctcgcgctcgcgggggccaactccgagggcgacgcgctctcggcgctgcgccggagcctcagggaccccggcggcgttctgcagagctgggaccccacgctcgtcaacccctgcacctggttccacgtcacctgcgaccgcgacaaccgcgtcacccgcctagatcttggtaatttgaacttatctggtcatctggtgcctgagcttgggaaactggagcatcttcagtatctggaactttataagaataacattcaaggaacagtcccttctgagcttggcaacttgaagaatctaataagcttcgacttgtacaagaacaacatttcggggacaatacctcctgcccttggaaagttgaagtcccttgtattcttgcgtctcaatggcaatcatttgactgggcccatcccaagggaactcgctggaatatctagtctcaaagttgttgatgtttcaagtaatgatttgtgcgggacgattcccacgtctggaccatttgaacatattcctctgagcaactttgagaagaacccgcgcttggaaggtccagagctacaaggcctggccatatacgacaccaactgctagaggcaccacgaagataagaactgctagaaagtaacgagcgaacaaggttacgagaaattgggcgatatagatttactaggtctggatctgtaatcctccctgcatagctcttattcgtaactcgctgcctgcacgaaagttggtgtgtgttttagcagaatgctttctgtccgtgaaagtaaacttgaactgcttattacgactgaaatgatattgtcgttcctc

SEQ ID NO: 18566 - protein, 367 aa, Zea mays subsp. mays
  misc_feature (1)..(367): Ceres Seq. ID no. 12365853
CDLIRHALRVLSKTAVDTAPLARFPLDSSRRAWPKYPTHHQVGHLLHPHSTSTSTNTNSLAASRSHATRRDARRGAVQKVDWVGGWFRGSTPTTTTAPTTDQAAEKKQTRRDLSRSVLLPPAPAAVPLLPQFSRPLLPSVRVQIPPPTDPAPSSMAGAGAKAAGALALALVLALAGANSEGDALSALRRSLRDPGGVLQSWDPTLVNPCTWFHVTCDRDNRVTRLDLGNLNLSGHLVPELGKLEHLQYLELYKNNIQGTVPSELGNLKNLISFDLYKNNISGTIPPALGKLKSLVFLRLNGNHLTGPIPRELAGISSLKVVDVSSNDLCGTIPTSGPFEHIPLSNFEKNPRLEGPELQGLAIYDTNC

SEQ ID NO: 18567 - protein, 219 aa, Zea mays subsp. mays
  misc_feature (1)..(219): Ceres Seq. ID no. 12365854
MPCVSFRKRLSTLPLSLAFHSIPAGVRGPSTQRTTRWGICSTPTPLPLAPTPTASPPAAATRHDATRDAERYKRWTGWVAGSVVQLLPLPQHQRRTRQQRKSRPDETSRVPSSSPLPLLPFPFFLSSPARCCPPSASRSRHQPIRRPPAWRGRGRRRREPWLWRSCSRSRGPTPRATRSRRCAGASGTPAAFCRAGTPRSSTPAPGSTSPATATTASPA

SEQ ID NO: 18568 - protein, 213 aa, Zea mays subsp. mays
  misc_feature (1)..(213): Ceres Seq. ID no. 12365855
MAGAGAKAAGALALALVLALAGANSEGDALSALRRSLRDPGGVLQSWDPTLVNPCTWFHVTCDRDNRVTRLDLGNLNLSGHLVPELGKLEHLQYLELYKNNIQGTVPSELGNLKNLISFDLYKNNISGTIPPALGKLKSLVFLRLNGNHLTGPIPRELAGISSLKVVDVSSNDLCGTIPTSGPFEHIPLSNFEKNPRLEGPELQGLAIYDTNC

SEQ ID NO: 18569 - DNA, 1382 bp, Zea mays subsp. mays
  misc_feature (1)..(1382): Ceres Seq. ID no. 12365863
atcggcacgtcaatttactactagcactctatcagtagtgttcagctgctcccgagctagcgagcgaagcactgtcggcacagtaacccccccctgtgcgcgtcgcgtgccgagtgccgcagagcacgagaagctaggccgcacagcaagcttgacatcatggcagctgctgccactcgttcattgcactccttcctcgcgcttcttctcctgttggcagctgcggccgcggctgcggcgctgtcgtacgaaaccaagtccatagatcctggactcgtcgtgatgacgctgccggagccggtgtccgggccggagagtctcgccttcgacgggcgtggcggcgggccctactccggcgtctccgacggccgcgtcctccggtggcaaggtcccctccggggatggaccgagttcgcctacaactccaagcacaggagcgtggcgttgtgcgcgccggacaagaagctggtagtgccggagagcctgtgcgggcgcccgctgggcctgcagttccaccggcagtccggcgacctttacgtcgccgacgcctacctggggctgctcagggttgccgcgcgcggcgggctggcgcaggtcgtggcgacggaggccgccggggggccgttcaacttcctcaacgggctcgacgtcgaccagcggaccggcgacgtctacttcaccgatagcagcgccacgtacaggaggagcgactacctgctggtggtggccatgggcgacgagacgggccgcctgctgcgctacgagcggcggaccgggcgcgtgggcgtgctccaggcgggcctgtcgtacccgaacggcgtggcggtgagcgcggacggcacgcacgtggtggtggcgcacacggcgctttgcgagctgcggaggtactggatccgcggcgcccgggcgggcacgtccgacaccttcgccgagctgccggggtacccggacaacctgcgcgccgacggccgcggcgggtactgggtagcgctgagcagcggcgtcgcggctgatgaggcggccgccgcgcccacggtcgccgtcagggtctcccgcgacggcaacgtgacggaggcgcttgacgggttcagcttcgtgtccgtcagcgaggtggcccagcgcggcggcgcgctctgggtcggctccgtggacacgccgtacgccggccagctcaagcggcgtgccagctagtgccgtgccgttttgtcatccattgatatcatatatgcagttgtgttgcgtgtgcatgcaccgtgaacaacatttgactgtacgtaccccaatgtcgtcgtcgtcgtcgtctcgtagctagtgttcgtcgcaattgtggatgtggactccgttcgtggaatggttagtggttgtttggtctctggtgatct

SEQ ID NO: 18570 - protein, 343 aa, Zea mays subsp. mays
  misc_feature (1)..(343): Ceres Seq. ID no. 12365864
MAAAATRSLHSFLALLLLLAAAAAAAALSYETKSIDPGLVVMTLPEPVSGPESLAFDGRGGGPYSGVSDGRVLRWQGPLRGWTEFAYNSKHRSVALCAPDKKLVVPESLCGRPLGLQFHRQSGDLYVADAYLGLLRVAARGGLAQVVATEAAGGPFNFLNGLDVDQRTGDVYFTDSSATYRRSDYLLVVAMGDETGRLLRYERRTGRVGVLQAGLSYPNGVAVSADGTHVVVAHTALCELRRYWIRGARAGTSDTFAELPGYPDNLRADGRGGYWVALSSGVAADEAAAAPTVAVRVSRDGNVTEALDGFSFVSVSEVAQRGGALWVGSVDTPYAGQLKRRAS

SEQ ID NO: 18571 - protein, 302 aa, Zea mays subsp. mays
  misc_feature (1)..(302): Ceres Seq. ID no. 12365865
MTLPEPVSGPESLAFDGRGGGPYSGVSDGRVLRWQGPLRGWTEFAYNSKHRSVALCAPDKKLVVPESLCGRPLGLQFHRQSGDLYVADAYLGLLRVAARGGLAQVVATEAAGGPFNFLNGLDVDQRTGDVYFTDSSATYRRSDYLLVVAMGDETGRLLRYERRTGRVGVLQAGLSYPNGVAVSADGTHVVVAHTALCELRRYWIRGARAGTSDTFAELPGYPDNLRADGRGGYWVALSSGVAADEAAAAPTVAVRVSRDGNVTEALDGFSFVSVSEVAQRGGALWVGSVDTPYAGQLKRRAS

SEQ ID NO: 18572 - DNA, 1504 bp, Zea mays subsp. mays
  misc_feature (1)..(1504): Ceres Seq. ID no. 12365889
gatgagctagctagcaagcctccgatggcgccgcctcgttggccttggccggcaccggctcaacattgccggcagaggccgcccctgcccgggtccgcgccttctctgcctcggccgcccagtccatgcgcacgatgaccgtcaccagcaccgccaagctgacggcggcgcccaccaggaagccggccaggaggccctccagcccgaggccggccttgaagccgagcgcgacgcccaccggcagcgccaccacgtagaagccgcccacgacggcgtacatgcccagcagcggccgcgccgtgcccccgcacgatgccgccgcacacgttgagcgggaagttgaccacctccagcagcgccatcaccttcatggcccgccccacgccgtcccgcacctccgggctgcgcgtgtatatgcgcgcccacggccggcgcgccgccagcatgagcaggcctccggcgaggcccgccaccgcgccgcccgccaccgacaccctggcggcgcggcgcgccgtggcggcgtccccggcgcccagctcgttggacacgcgcaccgacgcgctgacggacagcgacagcatggccgcgaacagcaggtagtcgaagttgagcgtgacggcgaccacgcccaccgtgcggcgcgcgtcggggaggcgccccgtgaggagcaccaggatctcgtaggaccaccactcgaggcaggtgttgaggcagcaggggacggccaggcggaggagcagcagccacgccccggacgcccatcctggcggagagcgagacggtgagcgggatgtggagcgccagcgccagggcagcggcgaacagagtgggcagcgtggcctcctgcgcgctgaggtacgccttgagcgggttgagcacggaggtgacggcgaggtccgggaggaggcagagcacgtaggtcctggccgtggccgcgatgtcgggctgctggccgaagcgcagcagcacggcgtcgacgcgcgtccagaggagcgcgatggggacggaggcggccaggagcatgagggtggccctgagcagcgtcccgcgcaggagggcgacgtttccggcgccgtgcgcctggccgcagatgggctccatggcgccgcagaggccgctgaggacggcgaagccggtgacgttggcgaagctgtagccgagcgtgccggcggccagctccaggtcgccgaggcggccgaggaaggccgtggtcacggcctgcttggcgaaccaggtgaggttcatgccgatgagagggagcgcgatgccgcgctgcgcgcgcacctcggacgcaacagcggccaggccatgctgctgccttggcggtggtgtcgtcatggtcatggctgctgcgtgagcgagcgagcagatggagatggagtttggtttgctttggtttgttggggttacaggcagcacatatccacatactagtatacatactttacttaggctgcctgctttatttctgctttcttccatgaatggatcgtaacggttctgc

SEQ ID NO: 18573 - protein, 168 aa, Zea mays subsp. mays
  misc_feature (1)..(168): Ceres Seq. ID no. 12365890
MPSSGRAVPPHDAAAHVEREVDHLQQRHHLHGPPHAVPHLRAARVYARPRPARRQHEQASGEARHRAARHRHPGGAARRGGVPGAQLVGHAHRRADGQRQHGREQQVVEVERDGDHAHRAARVGEAPREEHQDLVGPPLEAGVEAAGDGQAEEQQPRPGRPSWRRARR

SEQ ID NO: 18574 - protein, 95 aa, Zea mays subsp. mays
  misc_feature (1)..(95): Ceres Seq. ID no. 12365891
MPPHTLSGKLTTSSSAITFMARPTPSRTSGLRVYMRAHGRRAASMSRPPARPATAPPATDTLAARRAVAASPAPSSLDTRTDALTDSDSMAANSR

SEQ ID NO: 18575 - DNA, 1619 bp, Zea mays subsp. mays
  misc_feature (1)..(1619): Ceres Seq. ID no. 12365892
gcacgagaccattacctagaacatcctaatcgaaaaagtagacacctaaactttgccacatagccaataacggatcggatcgccttcgtacttttcctacttgctatctccagcgctaggctatcagctagcactagcagcgccgtcactgttcgaagagatcagcgcagcgaactcgcagccgagagatcgatcgaggccggccggggccgagatgggcagcgtcggcgtcggttgcggctcgccggacgaggagcagcagaccgagggcagtggccctctgccgccgccggctgtctgcgtcacggggtccaccggctacgtcggctcctggctcgtccgcacgctgctgcggcgaggctaccgcgtccacgccaccgccagggacacaggcaaggccttgcaggtgctcgccgtcgtggaagaagggagggaccggctcagggtgttcagggccgacatgggcgaggaagggagcttcgacgccgccgtcacgggatgcgtggcgctcttccacgtcgcggcctccatggacctccacgtatcacccgcccatcaggacaacctcgaggagcacgtgaggtcaagcatgctggagccggccacgaggggaaccatcaacgtgctgcggtcctgcgtccgcgccgggaccgtgcgccgggtcgtcttcacgtcctccgtcagcacgttgacggcggtggacgcggtggggcggcggaaggccgtgctcgacgagtcttgcctcagagccctcgacgacgtgtggcgcaccaagcccgtcggctgggtctacatcctgtccaagcggctgactgaggaggcggcgttcaggttcgcacgggagaacggcgtccacctcgtgtccctcgttctgccaaccgtcgccgggccgttcctcacgacaagcgtccctacgagcatccagctcctgctgtcacccatcacaggtgacccgaagctctactcggtgctggcctcagtgcacgccaggttcgggtgcgtcccgctggcgcacgtccaggacgtgtgtgacgcgcacgtcttactgatggaggcgccgcgcgccgaggggcggtacctgtgcgccgcgggcgggtacgcggcggcgcagctcgcgcggctcctcgcttcgcgctaccttccggccggtgacaggctgagcaaagatttcgacgacgtctcctgctcgccgccggtggtttcgtccaggaggctgttggatctggggttcaggttccggcacgacgtcgaggacgtggtgaaagacagtgttgcgcagtgtcttgcccatgggttcctggagcatcctgagacctgaatgcggcagagctgcaattcctagttggtttcaggcgttcagcaaatcagcggcgatctgaaggagaaggatgaatgcatggttgggctggggcctgggcccttaggctatccacatgttactctatatttactctacagactataccactattcctagcttaatcaccaaaattccttactctaaattactcaccaaaatttgtagcctcatatacctctatatatcaactactactacatagtctattttattctatttcattctaactacttttttctctatataatacaagattttg

SEQ ID NO: 18576 - protein, 367 aa, Zea mays subsp. mays
  misc_feature (1)..(367): Ceres Seq. ID no. 12365893
MGSVGVGCGSPDEEQQTEGSGPLPPPAVCVTGSTGYVGSWLVRTLLRRGYRVHATARDTGKALQVLAVVEEGRDRLRVFRADMGEEGSFDAAVTGCVALFHVAASMDLHVSPAHQDNLEEHVRSSMLEPATRGTINVLRSCVRAGTVRRVVFTSSVSTLTAVDAVGRRKAVLDESCLRALDDVWRTKPVGWVYILSKRLTEEAAFRFARENGVHLVSLVLPTVAGPFLTTSVPTSIQLLLSPITGDPKLYSVLASVHARFGCVPLAHVQDVCDAHVLLMEAPRAEGRYLCAAGGYAAAQLARLLASRYLPAGDRLSKDFDDVSCSPPVVSSRRLLDLGFRFRHDVEDVVKDSVAQCLAHGFLEHPET

SEQ ID NO: 18577 - protein, 285 aa, Zea mays subsp. mays
  misc_feature (1)..(285): Ceres Seq. ID no. 12365894
MGEEGSFDAAVTGCVALFHVAASMDLHVSPAHQDNLEEHVRSSMLEPATRGTINVLRSCVRAGTVRRVVFTSSVSTLTAVDAVGRRKAVLDESCLRALDDVWRTKPVGWVYILSKRLTEEAAFRFARENGVHLVSLVLPTVAGPFLTTSVPTSIQLLLSPITGDPKLYSVLASVHARFGCVPLAHVQDVCDAHVLLMEAPRAEGRYLCAAGGYAAAQLARLLASRYLPAGDRLSKDFDDVSCSPPVVSSRRLLDLGFRFRHDVEDVVKDSVAQCLAHGFLEHPET

SEQ ID NO: 18578 - protein, 262 aa, Zea mays subsp. mays
  misc_feature (1)..(262): Ceres Seq. ID no. 12365895
MDLHVSPAHQDNLEEHVRSSMLEPATRGTINVLRSCVRAGTVRRVVFTSSVSTLTAVDAVGRRKAVLDESCLRALDDVWRTKPVGWVYILSKRLTEEAAFRFARENGVHLVSLVLPTVAGPFLTTSVPTSIQLLLSPITGDPKLYSVLASVHARFGCVPLAHVQDVCDAHVLLMEAPRAEGRYLCAAGGYAAAQLARLLASRYLPAGDRLSKDFDDVSCSPPVVSSRRLLDLGFRFRHDVEDVVKDSVAQCLAHGFLEHPET

SEQ ID NO: 18579 - DNA, 1120 bp, Zea mays subsp. mays
  misc_feature (1)..(1120): Ceres Seq. ID no. 12365896
ctttggagtttatagctaccattgcgtcatctatttggtgtgaaatgaatattcgcaaagagaggtttaaacaagaatgggatttggtgattgttaatgctttgactgcagcttgttgcaacttgatggttcttggacttttagcaccatgccgttcatatgcgagtacatctcgatttgacttccaaaatgcaattgagaaacttccgaacaacatatttgagaagagctatcctttgagagagtttgatctagcaaaacgaatcagtgcattcttttataaagctgctgagcttagtctggtcgggtttgtagctggctctgtgcaagggggtatgtcaatagtcttgtccgcaagaaaagaaaggaggttatcggtgactattccctctatcagcaccaatgctcttggttatggagctttcctaggactctatgctaacttgcgttatcaattgctatgtggagtagaccaatatatggtcaagcgcttcgatgttttgggtgtggcaatcttcttcagcacagcagcaagactgatcaatattcagattggtgaggcatcaaggaggacttggcttggcgaggaagctgatccacagtactcagatcgactgttgagagcatacaagagacctgtggaggttgacgcggaccaatcaaggtggtttatatccaaggatgcaattgtatctggccttggtcttctaggtatcaagcagggtggacctgaggcaacattttctaagtctcgtcgaaagagagtcatccgcaaaaaggtcacttcaggttgagtttagtggatttggatagcaatgctggaacaattttgcttctgttccactatgccagagggaggtctacccaaattatggtaaatgagaaaaaggtatcaagtcaaccagcacgtggtctgtcggcgaagggatcaaagggtttgttactgggaagggttagttaaaaggtgccaattactattttataatttaattgcagttatttaaggtaagaaaatatgttgttttcttgtattgctgtgaggcaaatagacacgtttagtggtagttttgtaagattgttaatgtactgactttacatgagaaatggattctgcattttt

SEQ ID NO: 18580 - protein, 263 aa, Zea mays subsp. mays
  misc_feature (1)..(263): Ceres Seq. ID no. 12365897
LEFIATIASSIWCEMNIRKERFKQEWDLVIVNALTAACCNLMVLGLLAPCRSYASTSRFDFQNAIEKLPNNIFEKSYPLREFDLAKRISAFFYKAAELSLVGFVAGSVQGGMSIVLSARKERRLSVTIPSISTNALGYGAFLGLYANLRYQLLCGVDQYMVKRFDVLGVAIFFSTAARLINIQIGEASRRTWLGEEADPQYSDRLLRAYKRPVEVDADQSRWFISKDAIVSGLGLLGIKQGGPEATFSKSRRKRVIRKKVTSG

SEQ ID NO: 18581 - protein, 249 aa, Zea mays subsp. mays
  misc_feature (1)..(249): Ceres Seq. ID no. 12365898
MNIRKERFKQEWDLVIVNALTAACCNLMVLGLLAPCRSYASTSRFDFQNAIEKLPNNIFEKSYPLREFDLAKRISAFFYKAAELSLVGFVAGSVQGGMSIVLSARKERRLSVTIPSISTNALGYGAFLGLYANLRYQLLCGVDQYMVKRFDVLGVAIFFSTAARLINIQIGEASRRTWLGEEADPQYSDRLLRAYKRPVEVDADQSRWFISKDAIVSGLGLLGIKQGGPEATFSKSRRKRVIRKKVTSG

SEQ ID NO: 18582 - protein, 222 aa, Zea mays subsp. mays
  misc_feature (1)..(222): Ceres Seq. ID no. 12365899
MVLGLLAPCRSYASTSRFDFQNAIEKLPNNIFEKSYPLREFDLAKRISAFFYKAAELSLVGFVAGSVQGGMSIVLSARKERRLSVTIPSISTNALGYGAFLGLYANLRYQLLCGVDQYMVKRFDVLGVAIFFSTAARLINIQIGEASRRTWLGEEADPQYSDRLLRAYKRPVEVDADQSRWFISKDAIVSGLGLLGIKQGGPEATFSKSRRKRVIRKKVTSG

SEQ ID NO: 18583 - DNA, 1173 bp, Zea mays subsp. mays
  misc_feature (1)..(1173): Ceres Seq. ID no. 12365916
agtagtcctctcctctcctcccatccatgcttcggtccacgcacccacccagccccaccagcggcagctccgcggcgccggcgtccagctccgacgccgcggcgatggtcgggggcggcgcggcggcgggcagcggcggcgcaccgagcggcgccaagctgctgcagatcctcaacgtgcgggtcgtgggcagcggcgaccgcgtggtggtgctgtcccacgggttcggcacggaccagtcggcgtggagccgcgtgctcccctacctcacccgcgaccaccgcgtggtgctctacgacctcgtctgcgccggcagcgtcaacccggagcacttcgacttccgccgctacgacacgctcgactcgtacgtcgacgacctcctcgccatcctcgacgcgctccgcatcgcgcgctgcgccttcgtcggccactccgtctccgccatgatcggcatcctcgcctccatccgccgccccgagctcttcgccaagctcgtactcatcggcgcgtcgcccaggttcctgaacgaccacgactaccacggcgggttcgagctgccggagatccagcaggtgttcgacgcgatggcggccaactactcggcgtgggcgaccgggtacgccccgctggcggtgggcgcggacgtgccggcggcggtgcaggagttcagccgcaccctgttcaacatgcggccggacatctccctccacgtgtgccgcaccgtgttcaacaccgacctccgcggcgtgctgggcatggtgcggtccccctgcgtggtggtgcagaccacccgcgacgtctccgtcccggcctccgtcgccgcctacctcaaggcccacctcggcggccgcaccgccgtcgagttcctccagaccgagggccacctcccgcacctcagcgcccccggcctcctcgcgcaggtgctccgccgcgcgctcgcccggtactagcggagcgcctgccacctacggtcctggtggtcatcggtattttttaccgcctcgatttaccctgtgccgagaccggggacggggatcagataatgtggcgacccgcgccgtttgctgtgcgcgccatgactgtagactgtagtacgagtgtacgacttgttctggacttctggtacccgatttttttactgctttttaatggagagccgagcagtagcactgg

SEQ ID NO: 18584 - protein, 390 aa, Zea mays subsp. mays
  misc_feature (1)..(390): Ceres Seq. ID no. 12365917
VVLSSPPIHASVHAPTQPHQRQLRGAGVQLRRRGDGRGRRGGGQRRRTERRQAAADPQRAGRGQRRPRGGAVPRVRHGPVGVEPRAPLPHPRPPRGALRPRLRRQRQPGALRLPPLRHARLVRRRPPRHPRRAPHRALRLRRPLRLRHDRHPRLHPPPRALRQARTHRRVAQVPERPRLPRRVRAAGDPAGVRRDGGQLLGVGDRVRPAGGGRGRAGGGAGVQPHPVQHAAGHLPPRVPHRVQHRPPRRAGHGAVPLRGGADHPRRLRPGLRRRLPQGPPRRPHRRRVPPDRGPPPAPQRPRPPRAGAPPRARPVLAERLPPTVLVVIGIFYRLDLPCAETGDGDQIMWRPAPFAVRAMTVDCSTSVRLVLDFWYPIFLLLFNGEPSSST

SEQ ID NO: 18585 - protein, 307 aa, Zea mays subsp. mays
  misc_feature (1)..(307): Ceres Seq. ID no. 12365918
MLRSTHPPSPTSGSSAAPASSSDAAAMVGGGAAAGSGGAPSGAKLLQILNVRVVGSGDRVVVLSHGFGTDQSAWSRVLPYLTRDHRVVLYDLVCAGSVNPEHFDFRRYDTLDSYVDDLLAILDALRIARCAFVGHSVSAMIGILASIRRPELFAKLVLIGASPRFLNDHDYHGGFELPEIQQVFDAMAANYSAWATGYAPLAVGADVPAAVQEFSRTLFNMRPDISLHVCRTVFNTDLRGVLGMVRSPCVVVQTTRDVSVPASVAAYLKAHLGGRTAVEFLQTEGHLPHLSAPGLLAQVLRRALARY

SEQ ID NO: 18586 - protein, 281 aa, Zea mays subsp. mays
  misc_feature (1)..(281): Ceres Seq. ID no. 12365919
MVGGGAAAGSGGAPSGAKLLQILNVRVVGSGDRVVVLSHGFGTDQSAWSRVLPYLTRDHRVVLYDLVCAGSVNPEHFDFRRYDTLDSYVDDLLAILDALRIARCAFVGHSVSAMIGILASIRRPELFAKLVLIGASPRFLNDHDYHGGFELPEIQQVFDAMAANYSAWATGYAPLAVGADVPAAVQEFSRTLFNMRPDISLHVCRTVFNTDLRGVLGMVRSPCVVVQTTRDVSVPASVAAYLKAHLGGRTAVEFLQTEGHLPHLSAPGLLAQVLRRALARY

SEQ ID NO: 18587 - DNA, 1490 bp, Zea mays subsp. mays
  misc_feature (1)..(1490): Ceres Seq. ID no. 12365955
aaggatcacttacgctgacacggttgaggcgacccaccagttcgacgaggagaacgtgctcagccgaggccgccacggcctcgtgttcaaggcttgttacagtgacggcaccgtgctggcgattctgcggctcccgtccaggtctgccgatggcgccgtggtgatcgacgagggatcgttcaggaaggaggccgagtctctcgggaaggtgaagcacaggaacctcacggtgctccgtggctactatgccgggcctccgccggacgtccggctgctggtctatgactacatgcccaacggcaacctcgccacgctgctgcaggaagcgtcacaccgggacggccacattctcaactggccgatgaggcacctcatcgcgctcggcgtctcgcgcggtcttgcgttcctgcaccagtccggggtggtgcacggcgacgtcaagccgcagaacattctcttcgacgccgacttcgagccgcacctgtctgatttcggcctcgagccgatggtggtgactgcggccgccgccgccgcgtcgacatcggctgcaactgcaacaccacccgtgggctccctcggctacgtggcccccgacgcggccgctgccgggcaggccacgagggagggcgacgtgtacagcttcggcatcgtgctgctggagctcctcacgggtcggcgccccggcatgttcgccggggagaaggaggaggaggaggaagaggacatcgtgaagtgggtgaagcggcagctgcagcgcggcgccgtggcggaactgctggagccgggcctgctggagctggacccggagtcgtccgagtgggaggagttcctgctgggcatcaaggtcgggctgctgtgcaccgcgtccgacccgctggaccgcccggccatgggcgacgtggtgttcatgctggagggctgccgcgtcggcccggacatcccgtccccgtcctccgccgaccccacctcccagccgtcgccggcctgatctcccggcggctccggcattgccgcccgccagattcagttcggtagcttgttccatttttttttctgtcgctgattgatttatttaattagttcagattagttttgctcccgtcgacagtcgaactgacacgtgggggccggtaaccgtttcccgccagtagccgttggttaggggaggccagtcagcagcgggcacggcggagcagggagccatgtgcgcactgctgctcaagcgtgtgcgtgtcgtcgtgctgcgcatgtggggtttccctgcccaagcatcggcaacggctactagaggcaggacatgcctgtcgcctcctggccgttgatctcggccgatctgtacctgtactctctaacgattgatttcgtgtagtggcctgcttggcttcctgggatccttgtcttttaatctcgtttcaccaatgcaacaatcggccgttttgtgccacgtgctgtacatttgtctgtattttgttatcctgattgattggccc

SEQ ID NO: 18588 - protein, 328 aa, Zea mays subsp. mays
  misc_feature (1)..(328): Ceres Seq. ID no. 12365956
RITYADTVEATHQFDEENVLSRGRHGLVFKACYSDGTVLAILRLPSRSADGAVVIDEGSFRKEAESLGKVKHRNLTVLRGYYAGPPPDVRLLVYDYMPNGNLATLLQEASHRDGHILNWPMRHLIALGVSRGLAFLHQSGVVHGDVKPQNILFDADFEPHLSDFGLEPMVVTAAAAAASTSAATATPPVGSLGYVAPDAAAAGQATREGDVYSFGIVLLELLTGRRPGMFAGEKEEEEEEDIVKWVKRQLQRGAVAELLEPGLLELDPESSEWEEFLLGIKVGLLCTASDPLDRPAMGDVVFMLEGCRVGPDIPSPSSADPTSQPSPA

SEQ ID NO: 18589 - protein, 232 aa, Zea mays subsp. mays
  misc_feature (1)..(232): Ceres Seq. ID no. 12365957
MPNGNLATLLQEASHRDGHILNWPMRHLIALGVSRGLAFLHQSGVVHGDVKPQNILFDADFEPHLSDFGLEPMVVTAAAAAASTSAATATPPVGSLGYVAPDAAAAGQATREGDVYSFGIVLLELLTGRRPGMFAGEKEEEEEEDIVKWVKRQLQRGAVAELLEPGLLELDPESSEWEEFLLGIKVGLLCTASDPLDRPAMGDVVFMLEGCRVGPDIPSPSSADPTSQPSPA

SEQ ID NO: 18590 - protein, 208 aa, Zea mays subsp. mays
  misc_feature (1)..(208): Ceres Seq. ID no. 12365958
MRHLIALGVSRGLAFLHQSGVVHGDVKPQNILFDADFEPHLSDFGLEPMVVTAAAAAASTSAATATPPVGSLGYVAPDAAAAGQATREGDVYSFGIVLLELLTGRRPGMFAGEKEEEEEEDIVKWVKRQLQRGAVAELLEPGLLELDPESSEWEEFLLGIKVGLLCTASDPLDRPAMGDVVFMLEGCRVGPDIPSPSSADPTSQPSPA

SEQ ID NO: 18591 - DNA, 1159 bp, Zea mays subsp. mays
  misc_feature (1)..(1159): Ceres Seq. ID no. 12365990
atattggtagctcatcatcgatccagcagcacacagacgagccgacacaagcagttagctatagctgctagcctgatcgccaatggccaccgccggcagcaagcaaggaggaggctcgtccaagccgcctgcggctggtcaggagttggacccgaggtacgagtgggaggagaacgccagcagcttcatcctccgcatccacctctcaggcttcaggaaacaagatttcagggtgcaagtcgacggcgccggccgcctcaccgtccgtggccagcgctccgacgccgccgccaacgccaggcactcccgcttcaacaaggtcttccagctgccctccacctccaacctcgacgacatcgccggccgcttcgaccttggagtcctcacgctcaccgtgcccaagcgcctgcccgcgcccgcaaaggaagaccagcagcaggccaagaagcccgaggatgccgctgccgctgccgccaccaagcaggtggcgggagccaagggcgccaaatcggagccggagcagcagcacaaggaggaggcggcggcaaaggaagataagcccaagacgaccgccgcagcacctgcaccggcagccgacacgacggcaaaggaagataagcccaaggccgccgccgcagcacctgcaccggcagccgacacgaagaagcagcccgagacgcaggccaacgcagagagcaaggcgacggatccgaccgaaagcctggcggagcggcgcaccgaggaagagcgggccaatgcaaatgctgcagctgcggcggagcaccagagaaaggcatgccgtggcttcaaggagcgcgtggcggaggagctccaggggctggcgggctccgagtgggcggagggccttgtggagacgatcaagaggaacagggaggtggtcgccgtcgccgtcgccgccttctccctcggcgtcttcgtctccagcaggctcttctccaggtccagcaggaactagaagccaaccatgcatgcatctctcttttgtgacaatcgtaatagcgcttgtcaccaccacaaactacgtatactgacacatacagtccatgatgtggatatatacatgcactgcacagacacaagtgaattgtaaacatgtttataaatgtatcagaaacaagtttatacatgtaacagtgtc

SEQ ID NO: 18592 - protein, 297 aa, Zea mays subsp. mays
  misc_feature (1)..(297): Ceres Seq. ID no. 12365991
MATAGSKQGGGSSKPPAAGQELDPRYEWEENASSFILRIHLSGFRKQDFRVQVDGAGRLTVRGQRSDAAANARHSRFNKVFQLPSTSNLDDIAGRFDLGVLTLTVPKRLPAPAKEDQQQAKKPEDAAAAAATKQVAGAKGAKSEPEQQHKEEAAAKEDKPKTTAAAPAPAADTTAKEDKPKAAAAAPAPAADTKKQPETQANAESKATDPTESLAERRTEEERANANAAAAAEHQRKACRGFKERVAEELQGLAGSEWAEGLVETIKRNREVVAVAVAAFSLGVFVSSRLFSRSSRN

SEQ ID NO: 18593 - protein, 198 aa, Zea mays subsp. mays
  misc_feature (1)..(198): Ceres Seq. ID no. 12365992
MPLPLPPPSRWREPRAPNRSRSSSTRRRRRQRKISPRRPPQHLHRQPTRRQRKISPRPPPQHLHRQPTRRSSPRRRPTQRARRRIRPKAWRSGAPRKSGPMQMLQLRRSTRERHAVASRSAWRRSSRGWRAPSGRRALWRRSRGTGRWSPSPSPPSPSASSSPAGSSPGPAGTRSQPCMHLSFVTIVIALVTTTNYVY

SEQ ID NO: 18594 - protein, 185 aa, Zea mays subsp. mays
  misc_feature (1)..(185): Ceres Seq. ID no. 12365993
ILVAHHRSSSTQTSRHKQLAIAASLIANGHRRQQARRRLVQAACGWSGVGPEVRVGGERQQLHPPHPPLRLQETRFQGASRRRRPPHRPWPALRRRRQRQALPLQQGLPAALHLQPRRHRRPLRPWSPHAHRAQAPARARKGRPAAGQEARGCRCRCRHQAGGGSQGRQIGAGAAAQGGGGGKGR

SEQ ID NO: 18595 - DNA, 1276 bp, Zea mays subsp. mays
  misc_feature (1)..(1276): Ceres Seq. ID no. 12365996
gtaggattgtgggactcccagctggtggagtggagcttccgagtgtccactccaattctccaacgccagggtgttgcagacttgcaggcagtggaacatggacaaggaaggcgacggccaccaccaccacgccatccgagtcccatccccagataacatagcaatggtggaggagacatcgcagccaaatggcgcaccgtcgctgagacggaaagcaggcgagatgatcgccacctccctggagacgtaccggagcaagcccttctccttctggctactcctgttcctgagcagcggcgccatgctcaccgcgttcccggcgtcgagcctcctgtcgcggctctactacaacgagggcgggcagagcaagtggatcctgtcgtgggcggccgtcgccggctggcccctgcccgcgctgctcctgctgccgctgtatctcctcggcagggcgtcgccgacgccgctgtcgctgtcgctgtgctcctggtacgtgctccttgggctcctcagcgccgccgacaacctcatgtacgcgtgggcctacgcgtacctcccggcgtccacggcctcgctcgtcgccgcgtcgtcgctcgccttctccgcgctcttcggccgcgccatcgccaagaaccggctcaacatgtcctcgctcaacgccgtcgtcgtgatcacggcgggcgtggtgatcgtcgcgctggactccgggtcggacaggccccccggcgtcacgccccgccagtacgcgctcggcttcgtcctggacgtgctcgggtcggcgctccacggcctcatcttcgcgctctccgagctcgtcttcgccagggccctcggtaggcgctcgttccacgtggtgctggagcagcaggcggcggtgtcgctctgcgccttcgccttcacctccgcgggcctcgccgtcgcggagggcttcccggccatgcggcgcgagtcggcacggtttgcgcacggtggccagccggcgtacgcgaacttgatggtgtggacggcactcacgttccagctgggcgtcctcggaggcaccggcgtgctgttcctggcgtccactgtcctcgccggcgtgctgaacgctgtcagggtgcccctgacgagcatcgccgcggtgatctggttccatgaccccatgagtggcttcaagatcttggctctggtcatcacggtgtgggggttcgcgtcctatattcttggacactcctcttttagaaaaacgtaacaaattagatatcatctcattgcaaaaaatgatgaaagattttaattc

SEQ ID NO: 18596 - protein, 376 aa, Zea mays subsp. mays
  misc_feature (1)..(376): Ceres Seq. ID no. 12365997
MDKEGDGHHHHAIRVPSPDNIAMVEETSQPNGAPSLRRKAGEMIATSLETYRSKPFSFWLLLFLSSGAMLTAFPASSLLSRLYYNEGGQSKWILSWAAVAGWPLPALLLLPLYLLGRASPTPLSLSLCSWYVLLGLLSAADNLMYAWAYAYLPASTASLVAASSLAFSALFGRAIAKNRLNMSSLNAVVVITAGVVIVALDSGSDRPPGVTPRQYALGFVLDVLGSALHGLIFALSELVFARALGRRSFHVVLEQQAAVSLCAFAFTSAGLAVAEGFPAMRRESARFAHGGQPAYANLMVWTALTFQLGVLGGTGVLFLASTVLAGVLNAVRVPLTSIAAVIWFHDPMSGFKILALVITVWGFASYILGHSSFRKT

SEQ ID NO: 18597 - protein, 354 aa, Zea mays subsp. mays
  misc_feature (1)..(354): Ceres Seq. ID no. 12365998
MVEETSQPNGAPSLRRKAGEMIATSLETYRSKPFSFWLLLFLSSGAMLTAFPASSLLSRLYYNEGGQSKWILSWAAVAGWPLPALLLLPLYLLGRASPTPLSLSLCSWYVLLGLLSAADNLMYAWAYAYLPASTASLVAASSLAFSALFGRAIAKNRLNMSSLNAVVVITAGVVIVALDSGSDRPPGVTPRQYALGFVLDVLGSALHGLIFALSELVFARALGRRSFHVVLEQQAAVSLCAFAFTSAGLAVAEGFPAMRRESARFAHGGQPAYANLMVWTALTFQLGVLGGTGVLFLASTVLAGVLNAVRVPLTSIAAVIWFHDPMSGFKILALVITVWGFASYILGHSSFRKT

SEQ ID NO: 18598 - protein, 334 aa, Zea mays subsp. mays
  misc_feature (1)..(334): Ceres Seq. ID no. 12365999
MIATSLETYRSKPFSFWLLLFLSSGAMLTAFPASSLLSRLYYNEGGQSKWILSWAAVAGWPLPALLLLPLYLLGRASPTPLSLSLCSWYVLLGLLSAADNLMYAWAYAYLPASTASLVAASSLAFSALFGRAIAKNRLNMSSLNAVVVITAGVVIVALDSGSDRPPGVTPRQYALGFVLDVLGSALHGLIFALSELVFARALGRRSFHVVLEQQAAVSLCAFAFTSAGLAVAEGFPAMRRESARFAHGGQPAYANLMVWTALTFQLGVLGGTGVLFLASTVLAGVLNAVRVPLTSIAAVIWFHDPMSGFKILALVITVWGFASYILGHSSFRKT

SEQ ID NO: 18599 - DNA, 1573 bp, Zea mays subsp. mays
  misc_feature (1)..(1573): Ceres Seq. ID no. 12366004
acacgaggctccagggcctccatcgccacaccggtgcgtgcgagcgcgattaccagaggcgggcggcagggacgatgctgctgcaaaggcgcggcggcctcctctgctgcgggtgcggcgccagcgccgtggccgtggccgtcagtggccgcgttccggaagacgacggcggtgccgtcgtcgatggccagccgcctgacgccaagagcgtgtctggtaccagtgtctccgctgccgtgacgaccgcaaacgcgaggcagctctcgtgggcgcaggtggaggccatgacgggaggcttcacgtcagccatcgtcggcgagggcggcttcagcaccgtttacctcgcccgcctcgctggctccctcgccgccgtgaaggtccatcgtagtagcgagcgtcttcatcgcgcgttccgccaggagctcgacgcgctcctccgcgttcgccatccccacatcgtccgcctcctcgccttctgcgaccagcgagacgaaggcgtgctggtgctagagttcgcgccgaacggcagcctgcacgagcagctccacggcggcggcgcgggcgcggcgccgatgccgtgggcgcggcgggtgccggtggcgctgcaggtggcccgcgccctggagtacctccacgagcggtgcgagccgcaggtggtgcacggcgacgtgaaggcgtcgaacgtgctgctggacgcgggcatgggcgccaggctgtgcgacttcgggtcggcgcgcgcggggttctcggcggccgtggccgttgccgctgcaggcccgcgcccgcgcgccgtgttcgggtccccgggctacgtcgacccgcactacctccgctccggcgtggtcaccaagaagagcgacgtgtacagcttcggcgtgctcctgctggagctgctcaccggcgtgcaggcgttccgcgacggccggctcctgacggcgtccgtggcgccgaggctcgccgccgccgcagccggcgacctcgtggaccggaggctggggtgccgatacgacgcccgcgaggcggcggccgtgctggcgctagcggccgcgtgcgtccgggacaaaccgggcctccggccgtcgatggccgacgtggtgcgggccctggagcagctgcagccgcagcacggccggagcttgttgggcgccggagggaagctgtagctgctgtcgtagacacgtggcgcgcattgttgtttgtggtggtcgtggggatgcgactgctcaactgaccacaccctccctctattggaattgggttggtgaggaacaggaggcgttgggatttgcgctttgggggtattggggtggggggtgatttgcttatcatctttagctgggatgatgggtcatcatgtcattagccaccaaatcaaaagtagagcaactgctgagataaaacgaacagcaggaggatggaagtatccgtcattatcaagtgtgtatacagtagtaactaaaatgtaaacagagttgcttctttttcgtctgtgttgcatgtatgatgtacctgtgtgtggtatgcacacatgtttagccaaaagaaaagaactgtgcatatacattatcattct

SEQ ID NO: 18600 - protein, 386 aa, Zea mays subsp. mays
  misc_feature (1)..(386): Ceres Seq. ID no. 12366005
TRLQGLHRHTGACERDYQRRAAGTMLLQRRGGLLCCGCGASAVAVAVSGRVPEDDGGAVVDGQPPDAKSVSGTSVSAAVTTANARQLSWAQVEAMTGGFTSAIVGEGGFSTVYLARLAGSLAAVKVHRSSERLHRAFRQELDALLRVRHPHIVRLLAFCDQRDEGVLVLEFAPNGSLHEQLHGGGAGAAPMPWARRVPVALQVARALEYLHERCEPQVVHGDVKASNVLLDAGMGARLCDFGSARAGFSAAVAVAAAGPRPRAVFGSPGYVDPHYLRSGVVTKKSDVYSFGVLLLELLTGVQAFRDGRLLTASVAPRLAAAAAGDLVDRRLGCRYDAREAAAVLALAAACVRDKPGLRPSMADVVRALEQLQPQHGRSLLGAGGKL

SEQ ID NO: 18601 - protein, 362 aa, Zea mays subsp. mays
  misc_feature (1)..(362): Ceres Seq. ID no. 12366006
MLLQRRGGLLCCGCGASAVAVAVSGRVPEDDGGAVVDGQPPDAKSVSGTSVSAAVTTANARQLSWAQVEAMTGGFTSAIVGEGGFSTVYLARLAGSLAAVKVHRSSERLHRAFRQELDALLRVRHPHIVRLLAFCDQRDEGVLVLEFAPNGSLHEQLHGGGAGAAPMPWARRVPVALQVARALEYLHERCEPQVVHGDVKASNVLLDAGMGARLCDFGSARAGFSAAVAVAAAGPRPRAVFGSPGYVDPHYLRSGVVTKKSDVYSFGVLLLELLTGVQAFRDGRLLTASVAPRLAAAAAGDLVDRRLGCRYDAREAAAVLALAAACVRDKPGLRPSMADVVRALEQLQPQHGRSLLGAGGKL

SEQ ID NO: 18602 - protein, 292 aa, Zea mays subsp. mays
  misc_feature (1)..(292): Ceres Seq. ID no. 12366007
MTGGFTSAIVGEGGFSTVYLARLAGSLAAVKVHRSSERLHRAFRQELDALLRVRHPHIVRLLAFCDQRDEGVLVLEFAPNGSLHEQLHGGGAGAAPMPWARRVPVALQVARALEYLHERCEPQVVHGDVKASNVLLDAGMGARLCDFGSARAGFSAAVAVAAAGPRPRAVFGSPGYVDPHYLRSGVVTKKSDVYSFGVLLLELLTGVQAFRDGRLLTASVAPRLAAAAAGDLVDRRLGCRYDAREAAAVLALAAACVRDKPGLRPSMADVVRALEQLQPQHGRSLLGAGGKL

SEQ ID NO: 18603 - DNA, 1954 bp, Zea mays subsp. mays
  misc_feature (1)..(1954): Ceres Seq. ID no. 12366011
cccaatcccaagatgaatgctacgtaggtagacagtgttcttgtggtgacgtgacctccacagagtgcagagatgggagaagctgaagaagcgccaggagacagcaatggtgaggcactggagctcctcatgtccatggcgtcctcttcgctggcctgctctgtctcgcagttcccagccaagtggcagtccatcaaggacaagctccagctgctctgctgcagcctcaattcactctgcggcggcggcggtgaccacgacgacgacgacgacaaggagcatcctgtgttggctgagcttctgcggctggcttcagcaaccgtgaggagcatccaggtcgttgcttctcagtgcagcgacgggtcatacaagggtggaaggcttcgtctgaggagcgacctggacaacctgagctgcaagctcgatgcgcacatgaagcagctcaaggagatggccgtctcgtccggggcgccgtcgccgtccaaggccattgtcgccgtcaggcccagcgccgaggccagcgtgggtgagaaggccttctacctcaaggatctcttttccaggatcaggatcggcggcaccgtccagaggagccaggcactggccgccatcagggagctgttggtggaagacgagctctgtgcgaaggttgtcgccctcgacgtcgacgacggcgtcgccctgctcacggggttcctcgagtccaccgacgcgcgcatccaagaagaggctgccggcgccgtcgccgtcgtcgcgagctccgagcgttacaggggaatgctggtgaaggcaggggtgatcgccccgctcgtccagctgctggagaacgcggacaccgccagcgagctgggcaagcagagggcggcgcacgcgctgagggagctgacggagaactccgacaacgtgtgggccgtctgcgcgcacggcggcctcaccacgctgctgcacgcctgcgcccacgccggcagcagcagcaagctcgtcagctcctcttttgcagtgctgaggaacctcagtcggatggaggaagtgaagatgttcatggtggagcaaggggtggtcacggagctggtgaagctctcccagaagaaggaggaggtccgcaagctcggcgccgtcgaattgctccacgccatggctctggatgacgccgacgtcagggaggaagccgtcggcatgggggtgatccagtccctcctccagttgatataccccgaccttccctactcgtacaaggccagggaggttgctcttgctgccatctggttcttctgcttctcttctgcaaactccttggatgacctcatcagctcggatgttcttggctggctgctcttctacctgaacaacggcgactacgccgtcctcgaatgtacgctcaagattctgaggcatctctccgaggtttctgaggagtacaaccggatgatgggcagagcagggtatttgagcgccctgtcaggcttgcttggagcgaaatcctgtcgagtccgggaaatggcggcgcaggttctttccagcttgctgatgcttcaccccaaccgtgccatcttcatccaagacggcgacaatctgaacaggctgctgcagctccttgatccagccgagggcaagttgatggcgaaggacttgatcctctctgctatcatgtccctggctgagaccaacagcggaaggaagaagattgtgacgtcggaaaatttctgcagcctgaaagaactggcagaatctggtgacttcgacgccaagaagatcgtcaggaaactatctactaacagactgcaaaccatcttcagcaaaatatggagtgtctagattattcctgactcccctttttcactgaggcttagctctagtctatttgatgtccatagtattttttctctggctttgcttgtaatctcggcgcatccatcattttgattcctttgtgatatatattgcaacttcggtt

SEQ ID NO: 18604 - protein, 580 aa, Zea mays subsp. mays
  misc_feature (1)..(580): Ceres Seq. ID no. 12366012
MGEAEEAPGDSNGEALELLMSMASSSLACSVSQFPAKWQSIKDKLQLLCCSLNSLCGGGGDHDDDDDKEHPVLAELLRLASATVRSIQVVASQCSDGSYKGGRLRLRSDLDNLSCKLDAHMKQLKEMAVSSGAPSPSKAIVAVRPSAEASVGEKAFYLKDLFSRIRIGGTVQRSQALAAIRELLVEDELCAKVVALDVDDGVALLTGFLESTDARIQEEAAGAVAVVASSERYRGMLVKAGVIAPLVQLLENADTASELGKQRAAHALRELTENSDNVWAVCAHGGLTTLLHACAHAGSSSKLVSSSFAVLRNLSRMEEVKMFMVEQGVVTELVKLSQKKEEVRKLGAVELLHAMALDDADVREEAVGMGVIQSLLQLIYPDLPYSYKAREVALAAIWFFCFSSANSLDDLISSDVLGWLLFYLNNGDYAVLECTLKILRHLSEVSEEYNRMMGRAGYLSALSGLLGAKSCRVREMAAQVLSSLLMLHPNRAIFIQDGDNLNRLLQLLDPAEGKLMAKDLILSAIMSLAETNSGRKKIVTSENFCSLKELAESGDFDAKKIVRKLSTNRLQTIFSKIWSV

SEQ ID NO: 18605 - protein, 561 aa, Zea mays subsp. mays
  misc_feature (1)..(561): Ceres Seq. ID no. 12366013
MSMASSSLACSVSQFPAKWQSIKDKLQLLCCSLNSLCGGGGDHDDDDDKEHPVLAELLRLASATVRSIQVVASQCSDGSYKGGRLRLRSDLDNLSCKLDAHMKQLKEMAVSSGAPSPSKAIVAVRPSAEASVGEKAFYLKDLFSRIRIGGTVQRSQALAAIRELLVEDELCAKVVALDVDDGVALLTGFLESTDARIQEEAAGAVAVVASSERYRGMLVKAGVIAPLVQLLENADTASELGKQRAAHALRELTENSDNVWAVCAHGGLTTLLHACAHAGSSSKLVSSSFAVLRNLSRMEEVKMFMVEQGVVTELVKLSQKKEEVRKLGAVELLHAMALDDADVREEAVGMGVIQSLLQLIYPDLPYSYKAREVALAAIWFFCFSSANSLDDLISSDVLGWLLFYLNNGDYAVLECTLKILRHLSEVSEEYNRMMGRAGYLSALSGLLGAKSCRVREMAAQVLSSLLMLHPNRAIFIQDGDNLNRLLQLLDPAEGKLMAKDLILSAIMSLAETNSGRKKIVTSENFCSLKELAESGDFDAKKIVRKLSTNRLQTIFSKIWSV

SEQ ID NO: 18606 - protein, 559 aa, Zea mays subsp. mays
  misc_feature (1)..(559): Ceres Seq. ID no. 12366014
MASSSLACSVSQFPAKWQSIKDKLQLLCCSLNSLCGGGGDHDDDDDKEHPVLAELLRLASATVRSIQVVASQCSDGSYKGGRLRLRSDLDNLSCKLDAHMKQLKEMAVSSGAPSPSKAIVAVRPSAEASVGEKAFYLKDLFSRIRIGGTVQRSQALAAIRELLVEDELCAKVVALDVDDGVALLTGFLESTDARIQEEAAGAVAVVASSERYRGMLVKAGVIAPLVQLLENADTASELGKQRAAHALRELTENSDNVWAVCAHGGLTTLLHACAHAGSSSKLVSSSFAVLRNLSRMEEVKMFMVEQGVVTELVKLSQKKEEVRKLGAVELLHAMALDDADVREEAVGMGVIQSLLQLIYPDLPYSYKAREVALAAIWFFCFSSANSLDDLISSDVLGWLLFYLNNGDYAVLECTLKILRHLSEVSEEYNRMMGRAGYLSALSGLLGAKSCRVREMAAQVLSSLLMLHPNRAIFIQDGDNLNRLLQLLDPAEGKLMAKDLILSAIMSLAETNSGRKKIVTSENFCSLKELAESGDFDAKKIVRKLSTNRLQTIFSKIWSV

SEQ ID NO: 18607 - DNA, 1129 bp, Zea mays subsp. mays
  misc_feature (1)..(1129): Ceres Seq. ID no. 12366033
gcacgagaccattacctagaacatcctaatcgaaaaacaccgatcctcccagctgcatctgcattgcattgcatgcacaggtcgcgcccaccatcagtagcggtcgccgccatgcagagactcgtgcgcgtcctcgtggtgctgggcgtggccgccgcggcgtcggcgcaaggcccgacggcggcgccaacgacgcccacgcccacgccggcaacccccgcggcgcccgcgcccacgacggcgtccagcaacatcacgggcgtgctggccaaggccgggcagttcaacaccttcatccggctgctcaagtccacgggcgtggcgtcgcagatcgacaaccaggtcgccaacggcgggaacggggtcacggtgttcgcgcccacggacaacgcgttccagtcgctgccctcgggcacgctcaactcgctgtcggaccaggacaagaacgcgctggtgcagtaccacgtggtgtccgccgccatccccatgtcgcagttcgacaccgtcagcaacccgctccgcacgcaggccggcagcgcctcgccgggggagttcccactcaacgtcacctcctccgagggccagcaggtcaacgtcaccacgggcgtcgtcaccgccaccgtcgacaactccctctactcgggcgacagcctcgtcgtctaccaggtcaacaaggtgctgctccccatgaagctcttcggcgccgcggatgcgcccgcgcccgcgccgctcgcgccggccaagaagaagggcaagacgccggcggccgtcgctcgactcgcccgacgcggcggaggcgtccccggacgccacgaccacgtcgctcgcgcccgcgaggctgacggcggggtggcctcgccacggctcttgcgctcgccgtcgtgtggtgggggctgtagtcacggcgaggagtgtctcgtgaggtctctccggtggccgtgacatctatacattttttttttcgttcgcgggtcttgtttgtcttttcgtttttactttattgcccatttttggatgaattgttcttccctgtcattcaaattgctaggagtatgtcatgtcatgtaacgtccttgtcccatttttatgtaattttaactaaataaatatgagttgtgtatatttcagt

SEQ ID NO: 18608 - protein, 313 aa, Zea mays subsp. mays
  misc_feature (1)..(313): Ceres Seq. ID no. 12366034
ARDHYLEHPNRKTPILPAASALHCMHRSRPPSVAVAAMQRLVRVLVVLGVAAAASAQGPTAAPTTPTPTPATPAAPAPTTASSNITGVLAKAGQFNTFIRLLKSTGVASQIDNQVANGGNGVTVFAPTDNAFQSLPSGTLNSLSDQDKNALVQYHVVSAAIPMSQFDTVSNPLRTQAGSASPGEFPLNVTSSEGQQVNVTTGVVTATVDNSLYSGDSLVVYQVNKVLLPMKLFGAADAPAPAPLAPAKKKGKTPAAVARLARRGGGVPGRHDHVARAREADGGVASPRLLRSPSCGGGCSHGEECLVRSLRWP

SEQ ID NO: 18609 - protein, 289 aa, Zea mays subsp. mays
  misc_feature (1)..(289): Ceres Seq. ID no. 12366035
MHRSRPPSVAVAAMQRLVRVLVVLGVAAAASAQGPTAAPTTPTPTPATPAAPAPTTASSNITGVLAKAGQFNTFIRLLKSTGVASQIDNQVANGGNGVTVFAPTDNAFQSLPSGTLNSLSDQDKNALVQYHVVSAAIPMSQFDTVSNPLRTQAGSASPGEFPLNVTSSEGQQVNVTTGVVTATVDNSLYSGDSLVVYQVNKVLLPMKLFGAADAPAPAPLAPAKKKGKTPAAVARLARRGGGVPGRHDHVARAREADGGVASPRLLRSPSCGGGCSHGEECLVRSLRWP

SEQ ID NO: 18610 - protein, 276 aa, Zea mays subsp. mays
  misc_feature (1)..(276): Ceres Seq. ID no. 12366036
MQRLVRVLVVLGVAAAASAQGPTAAPTTPTPTPATPAAPAPTTASSNITGVLAKAGQFNTFIRLLKSTGVASQIDNQVANGGNGVTVFAPTDNAFQSLPSGTLNSLSDQDKNALVQYHVVSAAIPMSQFDTVSNPLRTQAGSASPGEFPLNVTSSEGQQVNVTTGVVTATVDNSLYSGDSLVVYQVNKVLLPMKLFGAADAPAPAPLAPAKKKGKTPAAVARLARRGGGVPGRHDHVARAREADGGVASPRLLRSPSCGGGCSHGEECLVRSLRWP

SEQ ID NO: 18611 - DNA, 1694 bp, Zea mays subsp. mays
  misc_feature (1)..(1694): Ceres Seq. ID no. 12366041
acccggttgtcatcgtcagccgctcgctccctcggtcactcactcactcactcccctctagtacatcactcaccgcccgccaagcgcgaagctgtcactctgctgaccgcttgacagagcagagcacggcacctagccgccctctcaccgacccatggccatgggcggcgcgttccccttccagtggcccgagggccccgcggatcctgttctcgacgacgtgaccttgcctccgctgcccacggcggcgcccgacgccggggtcgccgcgtactacgcggacgcggcggacgtgcacgcgatgcacatggcgctgcccgatttcgcggcggcgctggctgcgatgcggcgggaggaggaggaggccgcgggcatccgcctggtgcacctcctcatgagctgcgccggcgccgtcgaggcggccgaccacgcgggcgcgtccgcgcacctggcggacgcgcacgccgcgctcgccgccgtctcgcccacatccggcatcggccgcgtgtgccgtgcacttcaccgccgcgctgtcccgccggctgttccctcccacgccttcgccttcgcctccgcccccggccccgcacgccgccgacgccgaccgagccttcctctaccaccgcttctacgaggcgggtccctacctcaagtttgcgcacttcacggccaaccaggccatcctggaggccgtccagggctgcaagcacgtgcacatcatcgacttcagcatcatgcagggcctccagtggccagcgctaatccaggccctcgcgctccggcccggcgggccgccgtcggtccgcctcacgggcattgggccgccgtccccgccagggcgcgacgacctccgcgacgtcggggtccgcctcgccgacctggcgcgctccgtgcgcgtccacttctccttccgcggcgtggccgccaaccgcctcgacgaggtgcggccctggatgctgcaggtctcgcagggcgaggccgtggccgtgaactccgtgctccagctgcaccgcctcctcgccgacgctccctcgtcgggcgacgcccgggcgcccatcgacgccgtgctggagtgcgtcgcgtccgtgcgccccagggtgttcacggtggtggagcaggaggcggaccacaacaagtcggggttcctggaccggttcacggaggcgctcttctactactcggcggtgttcgactccctggacgcggcgagcggcggcgcgggcgacgcggcggcggaggcctacctggagcgcgagatctgcgacatcgtgtgcggcgagggcgcggagcgcagggagcggcacgagccgctgtggcggtggcgggacaggctgggtcgcacggggctggccgccgtgccgctgggggccaacgcgctgcggcaggcgaggatgctggtggggctcttctccggggaaggacactgcgtggaggaggccgaggggtgcctgacactgggctgacacgggcgcccgctcttctcggcgtccgcgtggcgcgcggaagagaacaatcagagtgacagcaggagcaggagcagcggcagtgaggagagcaatatcagctgcagcagctagagcgtcgctactttactgtaaattccttcggtgagaggctagtagcggggtttactgtaaaatcgcggtgcccgcgatccaaatggttcgattgagagagcgttggcatcggtcgtc

SEQ ID NO: 18612 - protein, 455 aa, Zea mays subsp. mays
  misc_feature (1)..(455): Ceres Seq. ID no. 12366042
MAMGGAFPFQWPEGPADPVLDDVTLPPLPTAAPDAGVAAYYADAADVHAMHMALPDFAAALAAMRREEEEAAGIRLVHLLMSCAGAVEAADHAGASAHLADAHAALAAVSPTSGIGRVCRALHRRAVPPAVPSHAFAFASAPGPARRRRRPSLPLPPLLRGGSLPQVCALHGQPGHPGGRPGLQARAHHRLQHHAGPPVASANPGPRAPARRAAVGPPHGHWAAVPARARRPPRRRGPPRRPGALRARPLLLPRRGRQPPRRGAALDAAGLAGRGRGRELRAPAAPPPRRRSLVGRRPGAHRRRAGVRRVRAPQGVHGGGAGGGPQQVGVPGPVHGGALLLLGGVRLPGRGERRRGRRGGGGLPGARDLRHRVRRGRGAQGAARAAVAVAGQAGSHGAGRRAAGGQRAAAGEDAGGALLRGRTLRGGGRGVPDTGLTRAPALLGVRVARGREQSE

SEQ ID NO: 18613 - protein, 453 aa, Zea mays subsp. mays
  misc_feature (1)..(453): Ceres Seq. ID no. 12366043
MGGAFPFQWPEGPADPVLDDVTLPPLPTAAPDAGVAAYYADAADVHAMHMALPDFAAALAAMRREEEEAAGIRLVHLLMSCAGAVEAADHAGASAHLADAHAALAAVSPTSGIGRVCRALHRRAVPPAVPSHAFAFASAPGPARRRRRPSLPLPPLLRGGSLPQVCALHGQPGHPGGRPGLQARAHHRLQHHAGPPVASANPGPRAPARRAAVGPPHGHWAAVPARARRPPRRRGPPRRPGALRARPLLLPRRGRQPPRRGAALDAAGLAGRGRGRELRAPAAPPPRRRSLVGRRPGAHRRRAGVRRVRAPQGVHGGGAGGGPQQVGVPGPVHGGALLLLGGVRLPGRGERRRGRRGGGGLPGARDLRHRVRRGRGAQGAARAAVAVAGQAGSHGAGRRAAGGQRAAAGEDAGGALLRGRTLRGGGRGVPDTGLTRAPALLGVRVARGREQSE

SEQ ID NO: 18614 - protein, 406 aa, Zea mays subsp. mays
  misc_feature (1)..(406): Ceres Seq. ID no. 12366044
MHMALPDFAAALAAMRREEEEAAGIRLVHLLMSCAGAVEAADHAGASAHLADAHAALAAVSPTSGIGRVCRALHRRAVPPAVPSHAFAFASAPGPARRRRRPSLPLPPLLRGGSLPQVCALHGQPGHPGGRPGLQARAHHRLQHHAGPPVASANPGPRAPARRAAVGPPHGHWAAVPARARRPPRRRGPPRRPGALRARPLLLPRRGRQPPRRGAALDAAGLAGRGRGRELRAPAAPPPRRRSLVGRRPGAHRRRAGVRRVRAPQGVHGGGAGGGPQQVGVPGPVHGGALLLLGGVRLPGRGERRRGRRGGGGLPGARDLRHRVRRGRGAQGAARAAVAVAGQAGSHGAGRRAAGGQRAAAGEDAGGALLRGRTLRGGGRGVPDTGLTRAPALLGVRVARGREQSE

SEQ ID NO: 18615 - DNA, 972 bp, Zea mays subsp. mays
  misc_feature (1)..(972): Ceres Seq. ID no. 12366045
actatggaccaggccttcgtgcaggcccccgagcaccgccccaagcccatcgtcaccgaggccaccggcatccctctcatcgacctctcgcctctggccgccagcggcggcgccgtggacgcgctggccgccgaggtgggcgcggcgagccgccgccgccggcagccgtggccgacggcgagcttgtgttcgataacaagtggccccaggatctaccgggcttcagagaggcgctggaggagtacgcgaaagcgatggaagagctggcgttcaagctgctggagctgatcgcccggagcctgaagctgaggcccgaccggctgcacggcttcttcaaggaccagacgaccttcatccggctgaaccactaccctccttgcccgagccccgacctggccctcggcgtggggcggcacaaggacgccggcgccctgaccatcctgtaccaggacgacgtcggggggctcgacgtccggcggcggctccgacggcgagtgggtccgcgtcaggcccgtgcccgactcgttcatcatcaacgtcggcgacctcatccaggtacgagagcgcggagcaccgggcgtcggtgaactcggcgagggagaggttctccatgccctacttcttcaacccggcgacctacaccatggtggagccggtggaggagctggtgagcaaggacgatccgcccaggtacgacgcctacaactggggcgacttcttcagcaccaggaagaacagcaacttcaagaagctcaacgtggagaacattcagatcgcgcatttcaagaagagcctcgtcctcgcctaactactgctactgctaggatccatgccattgccatgtcgtcttcagattcagagcacgccatgtcgtcgctagcttcgtggtagaacaaataatgatgtgcgtgctgtgtgtaagcatggatatggatgtgaatatgtaatatgatgagcactcctactttggtg

SEQ ID NO: 18616 - protein, 194 aa, Zea mays subsp. mays
  misc_feature (1)..(194): Ceres Seq. ID no. 12366046
YGPGLRAGPRAPPQAHRHRGHRHPSHRPLASGRQRRRRGRAGRRGGRGEPPPPAAVADGELVFDNKWPQDLPGFREALEEYAKAMEELAFKLLELIARSLKLRPDRLHGFFKDQTTFIRLNHYPPCPSPDLALGVGRHKDAGALTILYQDDVGGLDVRRRLRRRVGPRQARARLVHHQRRRPHPGTRARSTGRR

SEQ ID NO: 18617 - protein, 110 aa, Zea mays subsp. mays
  misc_feature (1)..(110): Ceres Seq. ID no. 12366047
MEELAFKLLELIARSLKLRPDRLHGFFKDQTTFIRLNHYPPCPSPDLALGVGRHKDAGALTILYQDDVGGLDVRRRLRRRVGPRQARARLVHHQRRRPHPGTRARSTGRR

SEQ ID NO: 18618 - DNA, 1180 bp, Zea mays subsp. mays
  misc_feature (1)..(1180): Ceres Seq. ID no. 12366064
cccctctgccttttccttttccttccccgctttctccttccttcctccccactccccgctcccctcgcccagccactggccatgtcggtggagacggagcggagctccaccgagtcctccggggcttccgggctcgacttcgaggacaccgcgctcacgctcaccctccgcctcccgggctccgcgccttccgccgccgccgccgccgcggcctccctgtccctctcctcctcgtcgtcctccgccttccccgaccccgaccgcaagcgcgcgtcctccgacgccgaccccggccgctcctccccgctcgccgcgtcctccgacgctgcaccggcacccaaggctcgtgtggtgggctggccgccggtgaggtcgtaccgcaagaacgcgctcgccgacgccgcgggctccagcaaggccgccaagttcgtcaaggtggccgtcgacggcgcgccctacctgcggaaggtggacctgcaggcgtacgccggctacgaccagctgctccgcgcgctccaggacaagttcttctcccacttcaccatcaggaagttcgccgacgacgagaggaagctggtggacgcggtgaacgggacggagtacgtgcccacgtacgaggacaaggatggcgactggatcctcgtcggcgacgtcccctggaagatgttcgtggaaacctgccagcgccttcgtctgatgaaaggttcagaggccgtgaacttggcaccgagagccgcccgatgaggcacactagctccgttgggcgttggcacgcacgcacgcactggcgtcttgaaggaaagcgggaactctgctggtcttgatgaggatcttcacgtgagataggaacgtgtgtacagttgtcgccttatggtattgagttgaggaaacttggaagttccattacttgtctgtagtctctactttatatagatgcgaagaagcttgagatacacattgcctacaatgtctttttgatgaataagaccagacagcaccgaaccgaactcgtccttccacatctccacacggttgctttgccatctcggtggttttgtggtggtggtggtggtggtggtcgtgcttcctataggtgtgaggctgatggcgtggctgccatttatacaatctttaatcctgttttgttgagctttattatatggttttgttttgagagtcc

SEQ ID NO: 18619 - protein, 273 aa, Zea mays subsp. mays
  misc_feature (1)..(273): Ceres Seq. ID no. 12366065
PLPFPFPSPLSPSFLPTPRSPRPATGHVGGDGAELHRVLRGFRARLRGHRAHAHPPPPGLRAFRRRRRRGLPVPLLLVVLRLPRPRPQARVLRRRPRPLLPARRVLRRCTGTQGSCGGLAAGEVVPQERARRRRGLQQGRQVRQGGRRRRALPAEGGPAGVRRLRPAAPRAPGQVLLPLHHQEVRRRREEAGGRGERDGVRAHVRGQGWRLDPRRRRPLEDVRGNLPAPSSDERFRGRELGTESRPMRHTSSVGRWHARTHWRLEGKRELCWS

SEQ ID NO: 18620 - protein, 247 aa, Zea mays subsp. mays
  misc_feature (1)..(247): Ceres Seq. ID no. 12366066
PLCLFLFLPRFLLPSSPLPAPLAQPLAMSVETERSSTESSGASGLDFEDTALTLTLRLPGSAPSAAAAAAASLSLSSSSSSAFPDPDRKRASSDADPGRSSPLAASSDAAPAPKARVVGWPPVRSYRKNALADAAGSSKAAKFVKVAVDGAPYLRKVDLQAYAGYDQLLRALQDKFFSHFTIRKFADDERKLVDAVNGTEYVPTYEDKDGDWILVGDVPWKMFVETCQRLRLMKGSEAVNLAPRAAR

SEQ ID NO: 18621 - protein, 220 aa, Zea mays subsp. mays
  misc_feature (1)..(220): Ceres Seq. ID no. 12366067
MSVETERSSTESSGASGLDFEDTALTLTLRLPGSAPSAAAAAAASLSLSSSSSSAFPDPDRKRASSDADPGRSSPLAASSDAAPAPKARVVGWPPVRSYRKNALADAAGSSKAAKFVKVAVDGAPYLRKVDLQAYAGYDQLLRALQDKFFSHFTIRKFADDERKLVDAVNGTEYVPTYEDKDGDWILVGDVPWKMFVETCQRLRLMKGSEAVNLAPRAAR

SEQ ID NO: 18622 - DNA, 1891 bp, Zea mays subsp. mays
  misc_feature (1)..(1891): Ceres Seq. ID no. 12366083
atatattaaccgcgcaccttttgtcctctccttgttcccaaacctctgctagcttcgcttccaaccccatcgatacttcccagcaagctacactacaagctcatccgcctagtcctttcatggccgatcaccagcctcaggtcgaggtcctgaccgagtcagtgcgggtcaacggcaccaaggcggaggccacgctcgtgggaggcgagctggcgtggcgccccgccgccggcggcaacggagaggggcaggagcggcggctggagctggagtcggaggtgctcgggttccagatggacgggaggcagctcaaattcgcgacctttgccgcgagcggcggcggtaatgggaaagggggaggaggggatgggaatcggaggagaggggaggtggagatggagatggagaacgaggccaccgcggtgcggtggggggacgtaatcagtgatcgcctagcctcgctcggccggccaaagaaattgttcattatagtgaacccttatggtggaaagagaagcggaccgagtattttccagaatgaagtcctccccctcattgaagcttctggcgtgctttatacgatgcaagaaaccaagcatcgccttcatgctcaagagattgcacattcacttgatcttaggaagtatgacggcatcatttgtgtcagtggagatggtgtgatggtagaggttgtcaatggtctcctgcaaagggaggactgggaagcagcaataaaagtgccccttgggatcattccagcaggtactggaaatggaatggcacgatctctactgcatgctgctggtgaaccattctctatatctaatgctgtgttcgcaatcatcagaggtcataaacgtgcccttgatgttacttctgttgtgcagggaaaggcgaggttctttagtgtcctgatgcttacatggggtctggtggctgatgttgatattgaatcagagaagtataggtggatgggaagtgctcgccttgatttttatcttctactccgcattctgaacctgcgacggtacaatgggcgtatcctttttgttccagcaccaggatacgaagaagttggtgatcctgtggaccaagctaccggttacgaaacaaacgggtttagcacgggatttcaagacgacggaagaaccggcagtaatggtgagacgtgtggctatgtgggcccatcgtcgatcaaagaagctggtcttagatggagatcactggatgggccattcgtttcagtctggctcggcaatgttcctttcgctagcgaagatgccatggcagcaccaaaagctgagtttgcggatggctacttggatgctgctataatcaaggattgtcctcggtgggatgtcctcgggctcgtgttccagatgaaggacggcagctacgtgaactcgccatgcgtggagtacttcaaggtgaaggcgatccggatcgagccgggcctgcgcgtgggcagcagcaccgagggcggtatcatcgactcggacggggaggtgatcgcgaggggcgacgagtccgattcccgcgccggcgacgacgagccggggcacctgatggcgtacggcccgcccatccagctgacggtggaccaggggctggccaccatcttctccccgagatgacgatccttctctcagttctcctccaccgcctgcgagtaatttgcttcgtctagccctgcctgccattctctcgcgtaggatcatgtgcttctgtatgtaaatattgctcacagcccaccccagttggatgagcgatgagccaagagggacggatactggctggatctccgtctatagattgttttatttccctgcccacatggctgccgcttttagtgctagcttgagaaatgagagctgggcagttcataagcttc

SEQ ID NO: 18623 - protein, 543 aa, Zea mays subsp. mays
  misc_feature (1)..(543): Ceres Seq. ID no. 12366084
ILTAHLLSSPCSQTSASFASNPIDTSQQATLQAHPPSPFMADHQPQVEVLTESVRVNGTKAEATLVGGELAWRPAAGGNGEGQERRLELESEVLGFQMDGRQLKFATFAASGGGNGKGGGGDGNRRRGEVEMEMENEATAVRWGDVISDRLASLGRPKKLFIIVNPYGGKRSGPSIFQNEVLPLIEASGVLYTMQETKHRLHAQEIAHSLDLRKYDGIICVSGDGVMVEVVNGLLQREDWEAAIKVPLGIIPAGTGNGMARSLLHAAGEPFSISNAVFAIIRGHKRALDVTSVVQGKARFFSVLMLTWGLVADVDIESEKYRWMGSARLDFYLLLRILNLRRYNGRILFVPAPGYEEVGDPVDQATGYETNGFSTGFQDDGRTGSNGETCGYVGPSSIKEAGLRWRSLDGPFVSVWLGNVPFASEDAMAAPKAEFADGYLDAAIIKDCPRWDVLGLVFQMKDGSYVNSPCVEYFKVKAIRIEPGLRVGSSTEGGIIDSDGEVIARGDESDSRAGDDEPGHLMAYGPPIQLTVDQGLATIFSPR

SEQ ID NO: 18624 - protein, 504 aa, Zea mays subsp. mays
  misc_feature (1)..(504): Ceres Seq. ID no. 12366085
MADHQPQVEVLTESVRVNGTKAEATLVGGELAWRPAAGGNGEGQERRLELESEVLGFQMDGRQLKFATFAASGGGNGKGGGGDGNRRRGEVEMEMENEATAVRWGDVISDRLASLGRPKKLFIIVNPYGGKRSGPSIFQNEVLPLIEASGVLYTMQETKHRLHAQEIAHSLDLRKYDGIICVSGDGVMVEVVNGLLQREDWEAAIKVPLGIIPAGTGNGMARSLLHAAGEPFSISNAVFAIIRGHKRALDVTSVVQGKARFFSVLMLTWGLVADVDIESEKYRWMGSARLDFYLLLRILNLRRYNGRILFVPAPGYEEVGDPVDQATGYETNGFSTGFQDDGRTGSNGETCGYVGPSSIKEAGLRWRSLDGPFVSVWLGNVPFASEDAMAAPKAEFADGYLDAAIIKDCPRWDVLGLVFQMKDGSYVNSPCVEYFKVKAIRIEPGLRVGSSTEGGIIDSDGEVIARGDESDSRAGDDEPGHLMAYGPPIQLTVDQGLATIFSPR

SEQ ID NO: 18625 - protein, 446 aa, Zea mays subsp. mays
  misc_feature (1)..(446): Ceres Seq. ID no. 12366086
MDGRQLKFATFAASGGGNGKGGGGDGNRRRGEVEMEMENEATAVRWGDVISDRLASLGRPKKLFIIVNPYGGKRSGPSIFQNEVLPLIEASGVLYTMQETKHRLHAQEIAHSLDLRKYDGIICVSGDGVMVEVVNGLLQREDWEAAIKVPLGIIPAGTGNGMARSLLHAAGEPFSISNAVFAIIRGHKRALDVTSVVQGKARFFSVLMLTWGLVADVDIESEKYRWMGSARLDFYLLLRILNLRRYNGRILFVPAPGYEEVGDPVDQATGYETNGFSTGFQDDGRTGSNGETCGYVGPSSIKEAGLRWRSLDGPFVSVWLGNVPFASEDAMAAPKAEFADGYLDAAIIKDCPRWDVLGLVFQMKDGSYVNSPCVEYFKVKAIRIEPGLRVGSSTEGGIIDSDGEVIARGDESDSRAGDDEPGHLMAYGPPIQLTVDQGLATIFSPR

SEQ ID NO: 18626 - DNA, 1449 bp, Zea mays subsp. mays
  misc_feature (1)..(1449): Ceres Seq. ID no. 12366087
acattttttactgcgagaggctcctcgtcccactttgcattgcacccccgcaagctctcttcactctccccagctcaactcaaatgcaagcaaagatcgagcagaaacggcagcggctgctgggcatcgcgcccgatctgccgctgcacaagctccagctcgtcgtcgccccgaccgcggcctcgctcccggcgctcgccgtggtcgccctcctcctcctcctcctcgccacggcgcgccgtccgtgctccttcctcgacgcgtaccgctccggcgtcgtctccctgccttccccgtccagaacctcgccgccccacctcgggcgctctgcggccgccaacagggtgccgagcgggtgcgacatcttccgcccgggccagtgggttcccgacgacgacgcgccgtactacaccaacctcacctgcccgctcatccaggagcaccagaactgcatgaagtacggccgccccgaccgcggattccttcgctggcggtggcgccccgatggctgcgacctgccccgcttcgacgccgccgccttcctggacgccgtccgggacacgtcgctggcgttcgtcggggactcgctcgccaggaaccacatgcagtccctcatgtgcctcctgtccaaggtggcgtaccccaaagacgtctcgacgacgacgaacccagagttccggacgatgcgctacgaggcgtacaacttcaccatggccatcttctggtcgccgttcctggtccgggggcaccagccggacccgcggcgccacatgtgggacatctacctggacgagccggacgcggcgtggcgcgacgccgtctcgggcttcgaccgcgtggtcctgtcggcggcgacctggttcacccggccggccatgttctacgaggccggcggggggcgcgtccgcgtcgtggggtgccactactgcctggtcccgggcgtccccgaccggacgctgcgctactcgctgcgcatggcgctccgctccgcgctccgcgtgctcacggggccccggttcaacaggacggtgatcctgcggacgctgtcgccgacgtcgcacttcgagggcggggagtgggaccggggcggggactgccggcggacgcggccgttcgcgcccaacgagacgcgggtggcggggctggacctcgacctccacgcggtgcaggtggaggagttctccagggcaagggccgaggcggaggcgtccggcggggggacgaggctggcgctcatggacaccacggcggccatggtgcttcggccggacggccacccgagccggtacggccactggccgcacgagaacgtgacgctgtacaacgactgcgtgcactggtgcctccccggccccatcgacgcctggaacgacatgctgctccagatgctcctcgcggacccatcttgatgtccgtgtgtttcttccgctagctccaatttgtcccagg

SEQ ID NO: 18627 - protein, 476 aa, Zea mays subsp. mays
  misc_feature (1)..(476): Ceres Seq. ID no. 12366088
HFLLREAPRPTLHCTPASSLHSPQLNSNASKDRAETAAAAGHRARSAAAQAPARRRPDRGLAPGARRGRPPPPPPRHGAPSVLLPRRVPLRRRLPAFPVQNLAAPPRALCGRQQGAERVRHLPPGPVGSRRRRAVLHQPHLPAHPGAPELHEVRPPRPRIPSLAVAPRWLRPAPLRRRRLPGRRPGHVAGVRRGLARQEPHAVPHVPPVQGGVPQRRLDDDEPRVPDDALRGVQLHHGHLLVAVPGPGAPAGPAAPHVGHLPGRAGRGVARRRLGLRPRGPVGGDLVHPAGHVLRGRRGARPRRGVPLLPGPGRPRPDAALLAAHGAPLRAPRAHGAPVQQDGDPADAVADVALRGRGVGPGRGLPADAAVRAQRDAGGGAGPRPPRGAGGGVLQGKGRGGGVRRGDEAGAHGHHGGHGASAGRPPEPVRPLAARERDAVQRLRALVPPRPHRRLERHAAPDAPRGPILMSVCFFR

SEQ ID NO: 18628 - protein, 468 aa, Zea mays subsp. mays
  misc_feature (1)..(468): Ceres Seq. ID no. 12366089
IFYCERLLVPLCIAPPQALFTLPSSTQMQAKIEQKRQRLLGIAPDLPLHKLQLVVAPTAASLPALAVVALLLLLLATARRPCSFLDAYRSGVVSLPSPSRTSPPHLGRSAAANRVPSGCDIFRPGQWVPDDDAPYYTNLTCPLIQEHQNCMKYGRPDRGFLRWRWRPDGCDLPRFDAAAFLDAVRDTSLAFVGDSLARNHMQSLMCLLSKVAYPKDVSTTTNPEFRTMRYEAYNFTMAIFWSPFLVRGHQPDPRRHMWDIYLDEPDAAWRDAVSGFDRVVLSAATWFTRPAMFYEAGGGRVRVVGCHYCLVPGVPDRTLRYSLRMALRSALRVLTGPRFNRTVILRTLSPTSHFEGGEWDRGGDCRRTRPFAPNETRVAGLDLDLHAVQVEEFSRARAEAEASGGGTRLALMDTTAAMVLRPDGHPSRYGHWPHENVTLYNDCVHWCLPGPIDAWNDMLLQMLLADPS

SEQ ID NO: 18629 - protein, 441 aa, Zea mays subsp. mays
  misc_feature (1)..(441): Ceres Seq. ID no. 12366090
MQAKIEQKRQRLLGIAPDLPLHKLQLVVAPTAASLPALAVVALLLLLLATARRPCSFLDAYRSGVVSLPSPSRTSPPHLGRSAAANRVPSGCDIFRPGQWVPDDDAPYYTNLTCPLIQEHQNCMKYGRPDRGFLRWRWRPDGCDLPRFDAAAFLDAVRDTSLAFVGDSLARNHMQSLMCLLSKVAYPKDVSTTTNPEFRTMRYEAYNFTMAIFWSPFLVRGHQPDPRRHMWDIYLDEPDAAWRDAVSGFDRVVLSAATWFTRPAMFYEAGGGRVRVVGCHYCLVPGVPDRTLRYSLRMALRSALRVLTGPRFNRTVILRTLSPTSHFEGGEWDRGGDCRRTRPFAPNETRVAGLDLDLHAVQVEEFSRARAEAEASGGGTRLALMDTTAAMVLRPDGHPSRYGHWPHENVTLYNDCVHWCLPGPIDAWNDMLLQMLLADPS

SEQ ID NO: 18630 - DNA, 1680 bp, Zea mays subsp. mays
  misc_feature (1)..(1680): Ceres Seq. ID no. 12366104
atattagtattaatccgggttttttcccctcgaagaaacggaagctcgtttgtaggagtgacttgtaggtagtagcgctcactgcataaaattggattggattggattatgctcttctatactagtagacccagccagagcttatactagcactgtagcatgaacagggaccgggacagctggacagtggcagaggagaggagatgagccgatcctttgctaccttttcctcccttttcaatgaatctccatcttcctcctccctggtcttggctgtttggttcgttccagaggagggctgggacccggacctcttcatactcctctgatgatgatgatccattaatggtacagctcatgtgtggtgtggctgtgacttgtgatgagtgagcgtgccccttcttcctcctccagcctccagctccaggtgcggtgtgaggtcccgctcctgctcctgtcctaccagcgtactactccagtagtacagtggagtagccgagcgcatttaatagctggacaaggtgagaggaggaagctctagccacacacacacagcacagcacagcacagagggaccgcaacggagcagagaactgggccaccaaactgaaccaaccgcgggaaggagaaagggaacccgaacccttttcctccgcgtgcattaaaacccttcacatgggcatgggcatgtcagctgctgccccttcgtcctcgcccctgcttgctggctggctggtctgctctgtcccgtccgtcctactcctacgaggagtcgacggtggagacggaggtgcgcgcggcgcacaacgtgctggaggcgtgcgcgcagacggacgccatggagcgggtcgtcttcacctcctccgtcaccgccgtcgtctggagcggcgccggcgccggcgtcggcgcccacagggaggaggtcgccgacgagaggagctggagcgacctcgccttctgcaggaagttcaagctgtggcacgccctggccaagacgctgtcggagaagacggcgtgggcgctggccatggaccggggcgtcgacatggtggccatcaacgccggcctgctgctgtccgcccccgggcccgggctcgggctcaccgccgcgcacccctacctcaagggcgcccccgacatgtacgacggcggcgtcctcgccaccgtcgacgtcggcttcctggccgacgcgcacgtcgccgcctacgagtcccccaccgcctacggccgctacctctgcttcagcgacgccgtctgccgtcccgaggacgccgtcaagctcgcccagatgctctcgccggccgcgccacgctcgccgccgccaagcgacgaactgaaggtgataccacagaggatccagggcaagaaactgaacaagctcatgctggagttcgccagcggggtatacggggagctggactaggaaggaactgccaggccacagatgatgcgatgcgactagggctgttgtattcttttgtacgtagtactatttgtagttttcgcccccctcacaaaaaaaaggagggaaatctgtttggttggccaaaatgtgccatacgctcgctgtacatggccaaacacgccacgtgtgtagcccctgccagcagcaggggtgggtggggagagcatttcagtgatcggttgccaaagaaataccatatcgtatctaggttcgtg

SEQ ID NO: 18631 - protein, 335 aa, Zea mays subsp. mays
  misc_feature (1)..(335): Ceres Seq. ID no. 12366105
MGMGMSAAAPSSSPLLAGWLVCSVPSVLLLRGVDGGDGGARGAQRAGGVRADGRHGAGRLHLLRHRRRLERRRRRRRRPQGGGRRREELERPRLLQEVQAVARPGQDAVGEDGVGAGHGPGRRHGGHQRRPAAVRPRARARAHRRAPLPQGRPRHVRRRRPRHRRRRLPGRRARRRLRVPHRLRPLPLLQRRRLPSRGRRQARPDALAGRATLAAAKRRTEGDTTEDPGQETEQAHAGVRQRGIRGAGLGRNCQATDDAMRLGLLYSFVRSTICSFRPPHKKKEGNLFGWPKCAIRSLYMAKHATCVAPASSRGGWGEHFSDRLPKKYHIVSRFV

SEQ ID NO: 18632 - protein, 333 aa, Zea mays subsp. mays
  misc_feature (1)..(333): Ceres Seq. ID no. 12366106
MGMSAAAPSSSPLLAGWLVCSVPSVLLLRGVDGGDGGARGAQRAGGVRADGRHGAGRLHLLRHRRRLERRRRRRRRPQGGGRRREELERPRLLQEVQAVARPGQDAVGEDGVGAGHGPGRRHGGHQRRPAAVRPRARARAHRRAPLPQGRPRHVRRRRPRHRRRRLPGRRARRRLRVPHRLRPLPLLQRRRLPSRGRRQARPDALAGRATLAAAKRRTEGDTTEDPGQETEQAHAGVRQRGIRGAGLGRNCQATDDAMRLGLLYSFVRSTICSFRPPHKKKEGNLFGWPKCAIRSLYMAKHATCVAPASSRGGWGEHFSDRLPKKYHIVSRFV

SEQ ID NO: 18633 - protein, 331 aa, Zea mays subsp. mays
  misc_feature (1)..(331): Ceres Seq. ID no. 12366107
MSAAAPSSSPLLAGWLVCSVPSVLLLRGVDGGDGGARGAQRAGGVRADGRHGAGRLHLLRHRRRLERRRRRRRRPQGGGRRREELERPRLLQEVQAVARPGQDAVGEDGVGAGHGPGRRHGGHQRRPAAVRPRARARAHRRAPLPQGRPRHVRRRRPRHRRRRLPGRRARRRLRVPHRLRPLPLLQRRRLPSRGRRQARPDALAGRATLAAAKRRTEGDTTEDPGQETEQAHAGVRQRGIRGAGLGRNCQATDDAMRLGLLYSFVRSTICSFRPPHKKKEGNLFGWPKCAIRSLYMAKHATCVAPASSRGGWGEHFSDRLPKKYHIVSRFV

SEQ ID NO: 18634 - DNA, 1952 bp, Zea mays subsp. mays
  misc_feature (1)..(1952): Ceres Seq. ID no. 12366144
gctctcctgcccgtgcccacctccacgactccacctccgcagcgcccgcagtaacctccccacgccacgccacatcgcgtgcgagccccaaccgtcgccggcctcccaattaagccgcccccgcggcgcgatccggtgtccaccgctgctccgccggaggagggggaaggggaagaaaagggagggggggagcacagggggatgctagaggcgaagccgccgtcgccgggctccggcgcggccggggcggcggcgcacatccacggtcaccggcggtgggcggcgccgctgctggcctcggttctgctctcgtcgctcctcatcaccgcgtcgctcttcttttcctcctcccgcgcgctgctactctccttctcgccgctcccctccgcggcctccgccgagcctctcttcgtcgaggccaagctccgccagcagatgcgggccgaggagcgccccacgcggggcgccgtgcccaggatcgcctacctcatctccggctccgcggggggacggagccgcgctgcgccggacgctcagggcgctctaccacccggtaaacacatacgtcgtgcacctcgacctcgaggcccccgccgccgagcgcgccgaactcgcctctgccatccacgcggaccccgtctacgctaggttccgcaacgtcaaggtcgtcacacgggccaacttggtcacctaccgtggcccgaccatggtggccaacacgctgcacgcggctgccatcctgctgcgcgagggcggtaattgggactggttcatcaacctctccgcctccgactatccgctcgtcacccaggacgatctattgcatgtgctttctgagttgcccaggcagcttaacttcattgagcataccagtgacatcggatggaaggagtaccagagggcgaagccagtgatcatcgaccctgggctatacagcctgcagaagtctgacgttttctggataacagagaaaaggagtgtcccaactgcattcaagctcttcaccggctcagcatggatgatgcttactcatcagttcattgaatattgtatatggggatgggacaatctcccaaggacagtcctgatgtattacgcaaattttctttcttcaccagagggttacttccacactgtcatctgcaatgtccccgagttccgcaacaccacagtcaaccatgatctacatttcatttcttgggacaacccaccaaagcaacaccctcattatctcacactcgctgacttcgatggtatggttaacagcaacgcaccctttgcaaggaagtttggaagagaggatcctgtgctggacaagattgaccaggaactgttggcccgccgacctgatggatttgtgcctggtggatggacagacctactgaacacaactgagaaagggaaacccttcacggttgagcgcgtgcaagatctccgcccaggtcctggtgtggacagattaaagaaactcgtcacaggattgctcacccaagaaggttttgatgacaagcattgcctgtgaaactcccagtaagatgattctggggcagtaggttacacgctcaaatttgaaggcatcgggccatttgctaggaatgcccctactagctgaggcagcagcacattagcgtcatgtacgcgaggatgcaacgataaggaaggtgctcttacagacaactgcttgagttgagttaccttacagcaggagaccacggatgtagcagtcggagatgattatacagaactagtagctcattagtttattagatgattataatcagccccccaaccatgaataatgttggaatttttgacatttctgcgcccgagggttgtgcaaggtagcccattctttgtttcgaagccatggcacctggtgcaccagctggtagcgtgagacttcgttgtattgactagtggatgtttctgagtaaactgatacatttgattgc

SEQ ID NO: 18635 - protein, 271 aa, Zea mays subsp. mays
  misc_feature (1)..(271): Ceres Seq. ID no. 12366145
MVANTLHAAAILLREGGNWDWFINLSASDYPLVTQDDLLHVLSELPRQLNFIEHTSDIGWKEYQRAKPVIIDPGLYSLQKSDVFWITEKRSVPTAFKLFTGSAWMMLTHQFIEYCIWGWDNLPRTVLMYYANFLSSPEGYFHTVICNVPEFRNTTVNHDLHFISWDNPPKQHPHYLTLADFDGMVNSNAPFARKFGREDPVLDKIDQELLARRPDGFVPGGWTDLLNTTEKGKPFTVERVQDLRPGPGVDRLKKLVTGLLTQEGFDDKHCL

SEQ ID NO: 18636 - protein, 167 aa, Zea mays subsp. mays
  misc_feature (1)..(167): Ceres Seq. ID no. 12366146
MMLTHQFIEYCIWGWDNLPRTVLMYYANFLSSPEGYFHTVICNVPEFRNTTVNHDLHFISWDNPPKQHPHYLTLADFDGMVNSNAPFARKFGREDPVLDKIDQELLARRPDGFVPGGWTDLLNTTEKGKPFTVERVQDLRPGPGVDRLKKLVTGLLTQEGFDDKHCL

SEQ ID NO: 18637 - protein, 166 aa, Zea mays subsp. mays
  misc_feature (1)..(166): Ceres Seq. ID no. 12366147
MLTHQFIEYCIWGWDNLPRTVLMYYANFLSSPEGYFHTVICNVPEFRNTTVNHDLHFISWDNPPKQHPHYLTLADFDGMVNSNAPFARKFGREDPVLDKIDQELLARRPDGFVPGGWTDLLNTTEKGKPFTVERVQDLRPGPGVDRLKKLVTGLLTQEGFDDKHCL

SEQ ID NO: 18638 - DNA, 2125 bp, Zea mays subsp. mays
  misc_feature (1)..(2125): Ceres Seq. ID no. 12366165
gcacgagaccattacctagaacatcctaatcgaaaagaaagccgaagcgagtgcgagtgcggccctcagctgctgcagttgctcctgcagtcctgctcgtttctgcggcggcggcggcggcctagcacctgagcggggcggcgagaggggacggagatggatatcgcgcgggcggctgctggcgtggcctgctgcaaggagcaccagaggatctacgccgagtggttcgccctcgccgacccagatggcgacggccgcgtcacgggcgccgatgccaccagcttcttcgccatgtccgcgctttcacgcgccgatctcaagcaggtgtgggcgatcgcggattccaggcggcaggggtacctcggattcgccgagttcgtcacagcaatgcagctcgtgtctctggcccaagcagggaacgagatcacacaggacagtctgaaacgtgaagacctgagcaccttggatccgcctgtgatggaaggtgttgatgagctactggctagatccaaggctgttgtaaagagagttcacccagatgacaatggcaccactcaggcccaagcaccttccatatatcactggtttggttcaaaatcagcacagaaggtgcagatgcctctgactgctgttacctctgtaattgatggcttgaaaagactctatgttgaaaaactgaagcctttggaagtcgcctacagatacaatgatttttctcacccattattgacaaacagtgactttgaagcaaagccaatggttatgctcttgggtcagtattcaacaggcaaaacaacattcattaagcatctgctaaagacaagctacccaggagctcacgtcggaccagagccaacaactgatagattcgtagttgtcatgtcaggatctgatggaaggaccattcctggcaatactattgccgttcaagccgacatgccattcactggtcttacaacctttgggggagcgtttctgtcgaagtttgaatgctctcagatgccacatcccctgctagagcatatcacctttgtggacactcctggtgttctctctggggaaaagcaacggacccaacgtagctatgatttcactggtgtgacctcatggtttgctgccaagtgtgaccttatccttcttctgtttgaccctcacaagcttgatataagtgatgagttcaaacgtgtcatttcatctttacgtgggcatgatgacaaaatacgcgtagtgttgaacaaggccgaccaagttgacacacaacagcttatgagagtgtatggtgcattgatgtggtctcttgggaaagtgctaaatactcctgaggttgcgcgtgtgtatatcggatcatttaatgataagccagtgaatgattcagctgttgggccaattggaaaagacttgtttgagagggagcaagatgacctcctctgtgacctgaaggacattcctaagaaggcttgtgatcgacgggtcaatgagtttgttaagcgtgcccgagctgccaagatccatgcttacataattggccatctgaagaaggagatgcctgcagtgatgggaaaagccaaggctcagcagcgactcatagacaacttagaggaggagtttgcaaaggtgcagagggaatatcatctccccgccggagacttccccgacgtcgagcacttcaagcaggtgctgggcgggtacagcatcgacaagttcgagaagctgaagccgaagatggtgcaggcggtggacgacatgctcgctcacgacatcccggagctcctcaagaacttgcggaacccgtacgagtgaaactgacctgacctctcgcgtccgtcggttgtaaaaagattatcttagctgtcacgtccggtgatggcggacggacgaggcagacgttcctgggagagagatgcctagacggttacgggtcactactcactcactagctgtccgcagctgtgccaaaaccgagaggacacatgagggttcagatcggacagccacagcgcatagcctgtgttggtttcggcgtcagtgctctctgcacgcgaaggagctgctgcggcaccgttgccgtgccgtctcgctgtgatacatttcccctcgtgacgagatgaaaagagttgcaggcggc

SEQ ID NO: 18639 - protein, 547 aa, Zea mays subsp. mays
  misc_feature (1)..(547): Ceres Seq. ID no. 12366166
MDIARAAAGVACCKEHQRIYAEWFALADPDGDGRVTGADATSFFAMSALSRADLKQVWAIADSRRQGYLGFAEFVTAMQLVSLAQAGNEITQDSLKREDLSTLDPPVMEGVDELLARSKAVVKRVHPDDNGTTQAQAPSIYHWFGSKSAQKVQMPLTAVTSVIDGLKRLYVEKLKPLEVAYRYNDFSHPLLTNSDFEAKPMVMLLGQYSTGKTTFIKHLLKTSYPGAHVGPEPTTDRFVVVMSGSDGRTIPGNTIAVQADMPFTGLTTFGGAFLSKFECSQMPHPLLEHITFVDTPGVLSGEKQRTQRSYDFTGVTSWFAAKCDLILLLFDPHKLDISDEFKRVISSLRGHDDKIRVVLNKADQVDTQQLMRVYGALMWSLGKVLNTPEVARVYIGSFNDKPVNDSAVGPIGKDLFEREQDDLLCDLKDIPKKACDRRVNEFVKRARAAKIHAYIIGHLKKEMPAVMGKAKAQQRLIDNLEEEFAKVQREYHLPAGDFPDVEHFKQVLGGYSIDKFEKLKPKMVQAVDDMLAHDIPELLKNLRNPYE

SEQ ID NO: 18640 - protein, 502 aa, Zea mays subsp. mays
  misc_feature (1)..(502): Ceres Seq. ID no. 12366167
MSALSRADLKQVWAIADSRRQGYLGFAEFVTAMQLVSLAQAGNEITQDSLKREDLSTLDPPVMEGVDELLARSKAVVKRVHPDDNGTTQAQAPSIYHWFGSKSAQKVQMPLTAVTSVIDGLKRLYVEKLKPLEVAYRYNDFSHPLLTNSDFEAKPMVMLLGQYSTGKTTFIKHLLKTSYPGAHVGPEPTTDRFVVVMSGSDGRTIPGNTIAVQADMPFTGLTTFGGAFLSKFECSQMPHPLLEHITFVDTPGVLSGEKQRTQRSYDFTGVTSWFAAKCDLILLLFDPHKLDISDEFKRVISSLRGHDDKIRVVLNKADQVDTQQLMRVYGALMWSLGKVLNTPEVARVYIGSFNDKPVNDSAVGPIGKDLFEREQDDLLCDLKDIPKKACDRRVNEFVKRARAAKIHAYIIGHLKKEMPAVMGKAKAQQRLIDNLEEEFAKVQREYHLPAGDFPDVEHFKQVLGGYSIDKFEKLKPKMVQAVDDMLAHDIPELLKNLRNPYE

SEQ ID NO: 18641 - protein, 470 aa, Zea mays subsp. mays
  misc_feature (1)..(470): Ceres Seq. ID no. 12366168
MQLVSLAQAGNEITQDSLKREDLSTLDPPVMEGVDELLARSKAVVKRVHPDDNGTTQAQAPSIYHWFGSKSAQKVQMPLTAVTSVIDGLKRLYVEKLKPLEVAYRYNDFSHPLLTNSDFEAKPMVMLLGQYSTGKTTFIKHLLKTSYPGAHVGPEPTTDRFVVVMSGSDGRTIPGNTIAVQADMPFTGLTTFGGAFLSKFECSQMPHPLLEHITFVDTPGVLSGEKQRTQRSYDFTGVTSWFAAKCDLILLLFDPHKLDISDEFKRVISSLRGHDDKIRVVLNKADQVDTQQLMRVYGALMWSLGKVLNTPEVARVYIGSFNDKPVNDSAVGPIGKDLFEREQDDLLCDLKDIPKKACDRRVNEFVKRARAAKIHAYIIGHLKKEMPAVMGKAKAQQRLIDNLEEEFAKVQREYHLPAGDFPDVEHFKQVLGGYSIDKFEKLKPKMVQAVDDMLAHDIPELLKNLRNPYE

SEQ ID NO: 18642 - DNA, 2286 bp, Zea mays subsp. mays
  misc_feature (1)..(2286): Ceres Seq. ID no. 12366176
gcacgagaccattacctagaacatcctaatcgaaaaactgccccttccagtctcgccgtcgccggagataggccgccgccgccagccggaacgcaacaccgcagcggttacctgcagcggacggcaggaacctagtcctccactgctctgcctaccctacaatcgggatctcgcgggcttcattaggggggaaaatcgaccagcgagcgagtgcaagaagctcctgttcgatcgatctcgggagctccgatactgcgcgcaatcccaaatttgacacagagtcacagcaatgtcagtgagccatgccgacgagcacgagatatctctgtgcgaccccagctccgaggacgaccggcggcgccggaagatcgggtccctgccgctcaaggccatccacgcgctacggaagaagcgcgcccggcgtcgcgtcactgacttccggttccccgcggccatctccatcgaggacgtccgcgacgccgaggaggagcgcgccgtcgccgccttccgcgaccgtctcgccgcgcaccgcctcctccccgacaagcacgacgactaccacatgatgctgaggtttctgaaagccaggaagtttgattccgacaaggcaatgcaaatgtggtcagagatgctgaggtggaggaaagagtttggtaccgacacaatcttggaggactttgagttcgacgagctcaacgatgtactccactactatcctcagggcctaccatggcgtcgaccgtgaaggccggcccgtgtacattgagaggctcggcaaagttgatccgaacaagctcatgcagatcacctcggtggatcgctacatcaagtaccatgtgcaggagttcgagagggcattcagggagaggttccctgcctgcacactgtcagccaagagacatattgactccactaccaccatactggacgtccatggtgtggggttcaagaatttctcaaagaccgcaagggagcttgtccaacgtatgcagagaatagacagtgactactatcccgagacgctacatcagatgtatgttgtgaatgcaggcagtgggtttaagttgatctggaacagtgttaagggattcctagacccaaaaacttcttccaagatccatgttcttggttccaactaccagagcagacttatcgaagttattgactcaagtgaattgccaaaatttcttggcggatcatgcacatgcagtgagaagggtggttgcctcaggtctaacaggggtccatggaatgaccctgtcattatgaagctaatacacagtatggaaggtggtagtactagagaaataaagcaagtttctgacggggacgaaagaagtggctcttccctaagggcagaaaacctgaagggcatgcttagtgacatatcaaatgctgaatctgagtcggatgttgatgacgttggtttaacagttgtccaaaagagtacggaccacagtttactaaccccagttcatgaagaagtcaaggggtcagatacttcgatattttgtagttctagcagtaagcatctcctagatacaactcctcgatctcctcaggccacccctcaaatggagatgcccattcagttgacttgccgtaaatattttcctacctttgggtggctaaataatttagggaatgcttacattagtttgcatggtacatccgctggaaggactctggaaaaccttgctactggactgatcacgctcttgatcaggatatcatctttcttccacctttccgtctaccggcaagaaagatatctagaaaccgtccaaccctgtgccgcagcacaggaaccagaacctcaaagggaagaggacatgagtgcttgtttacgacgcctcaagaagctcgagtcactgtgtgatcacctcatgagcaaacctccggatatgccgaaggagaaagaacttgtattgatgcagtccttcgatcggataaaatccctcgaggctgaactggaggcgacgaaaaacgcgctgcaggctgcggtggaaaagcagatggaactggtggagacggtagaatctctgcagcaccaaacgtccagcgttaggaggagattttgctgttcataggagtaggattgtcgtcgtcgcgccgaagctgtctgggttagcaaataatgaacctgacgctgcccttggcatacgccaaacctgtcgctggctcgacactgtatgcgcggatgcgtgtaaaatcgatcagttttttttgtagctacactctggcttctgtgatctccagagcctgcaaaatgtcaaagctttcgcc

SEQ ID NO: 18643 - protein, 463 aa, Zea mays subsp. mays
  misc_feature (1)..(463): Ceres Seq. ID no. 12366177
MYSTTILRAYHGVDREGRPVYIERLGKVDPNKLMQITSVDRYIKYHVQEFERAFRERFPACTLSAKRHIDSTTTILDVHGVGFKNFSKTARELVQRMQRIDSDYYPETLHQMYVVNAGSGFKLIWNSVKGFLDPKTSSKIHVLGSNYQSRLIEVIDSSELPKFLGGSCTCSEKGGCLRSNRGPWNDPVIMKLIHSMEGGSTREIKQVSDGDERSGSSLRAENLKGMLSDISNAESESDVDDVGLTVVQKSTDHSLLTPVHEEVKGSDTSIFCSSSSKHLLDTTPRSPQATPQMEMPIQLTCRKYFPTFGWLNNLGNAYISLHGTSAGRTLENLATGLITLLIRISSFFHLSVYRQERYLETVQPCAAAQEPEPQREEDMSACLRRLKKLESLCDHLMSKPPDMPKEKELVLMQSFDRIKSLEAELEATKNALQAAVEKQMELVETVESLQHQTSSVRRRFCCS

SEQ ID NO: 18644 - protein, 430 aa, Zea mays subsp. mays
  misc_feature (1)..(430): Ceres Seq. ID no. 12366178
MQITSVDRYIKYHVQEFERAFRERFPACTLSAKRHIDSTTTILDVHGVGFKNFSKTARELVQRMQRIDSDYYPETLHQMYVVNAGSGFKLIWNSVKGFLDPKTSSKIHVLGSNYQSRLIEVIDSSELPKFLGGSCTCSEKGGCLRSNRGPWNDPVIMKLIHSMEGGSTREIKQVSDGDERSGSSLRAENLKGMLSDISNAESESDVDDVGLTVVQKSTDHSLLTPVHEEVKGSDTSIFCSSSSKHLLDTTPRSPQATPQMEMPIQLTCRKYFPTFGWLNNLGNAYISLHGTSAGRTLENLATGLITLLIRISSFFHLSVYRQERYLETVQPCAAAQEPEPQREEDMSACLRRLKKLESLCDHLMSKPPDMPKEKELVLMQSFDRIKSLEAELEATKNALQAAVEKQMELVETVESLQHQTSSVRRRFCCS

SEQ ID NO: 18645 - protein, 367 aa, Zea mays subsp. mays
  misc_feature (1)..(367): Ceres Seq. ID no. 12366179
MQRIDSDYYPETLHQMYVVNAGSGFKLIWNSVKGFLDPKTSSKIHVLGSNYQSRLIEVIDSSELPKFLGGSCTCSEKGGCLRSNRGPWNDPVIMKLIHSMEGGSTREIKQVSDGDERSGSSLRAENLKGMLSDISNAESESDVDDVGLTVVQKSTDHSLLTPVHEEVKGSDTSIFCSSSSKHLLDTTPRSPQATPQMEMPIQLTCRKYFPTFGWLNNLGNAYISLHGTSAGRTLENLATGLITLLIRISSFFHLSVYRQERYLETVQPCAAAQEPEPQREEDMSACLRRLKKLESLCDHLMSKPPDMPKEKELVLMQSFDRIKSLEAELEATKNALQAAVEKQMELVETVESLQHQTSSVRRRFCCS

SEQ ID NO: 18646 - DNA, 1296 bp, Zea mays subsp. mays
  misc_feature (1)..(1296): Ceres Seq. ID no. 12366185
aacgacgagcagtgcaagccaagcattctcacgctagctgttctcttcttgcgcctcatccatcttgcatctatattctcggcgcgagttacgttttcgtcgtccggccggccggcgagcattttgcttctgcgatcgatcggcgcgacgtgtgcacggccatggagatgatcgacgcagagctgcgtctgggtccgcccggcagcaccaacagagacgtcatcaacgtcgtgcagccggcgttggcggcggcgaaacggccgtcgtcgtcggtggtggagagcgaggcgtccgggacggacgaccatgacgacgctgcaccgacctccaaggtgcaggtggtggggtggccgccggtgagagtgtaccggaagaacgcgttccacgcggcggcggaggcgaggaggaccaggcggggcgagcagcaaggaggaggaggcctgtacgtgaaggtgagcatggacggggcgccatacctccggaaggtggacctgcggacctacggcggctaccgtgagctgagggacgcactggacgcgctcttcggctgcttctcctcctcggccgacggcggatgccagttcgccgtcgcctacgaggacaaggacggcgacctcatgctcgccggcgacgtgccatgggagatgttcatctgttcttgcaagaagctgaggatcatgagggggtccgaaacaagataaccaagcaacgaggatgcaagaaccctgttggatgcatatgcatggagaggccggccggactcatggtgtcatgcacgagagagaagaagaagaagacgacgacctgctggaactgaaggcggttgggtatacctgcatgcatggggagggagcccacgcatgcacgcgcgcgtcgtcgtgttctagccaccagaccggccgccggcccatatgctcaccacggagatggaggtgatggttcaaggatcacggcggcgtacgcgtcatcagtcacgccgtcgtcctgtcatcagatgagagatggaggggtgatgcatgagggcagtgctgtcgacggctggctggacgtgcagatcggagcgagattgtactgtgcacgcacatgagctttgtaattcattctaggggtgcagccgcacccacgtagaaataaataagaataccgccgtggttagagccaaattttttgccatttatattgttagcgtctcgtcagcgcagagaggagaagagaagaatcgggatgcgtggagaagaagaatagtgtagcgacgaggggaaatgtgtaatgtaagtatatgttcttttgatgcct

SEQ ID NO: 18647 - protein, 232 aa, Zea mays subsp. mays
  misc_feature (1)..(232): Ceres Seq. ID no. 12366186
RRAVQAKHSHASCSLLAPHPSCIYILGASYVFVVRPAGEHFASAIDRRDVCTAMEMIDAELRLGPPGSTNRDVINVVQPALAAAKRPSSSVVESEASGTDDHDDAAPTSKVQVVGWPPVRVYRKNAFHAAAEARRTRRGEQQGGGGLYVKVSMDGAPYLRKVDLRTYGGYRELRDALDALFGCFSSSADGGCQFAVAYEDKDGDLMLAGDVPWEMFICSCKKLRIMRGSETR

SEQ ID NO: 18648 - protein, 179 aa, Zea mays subsp. mays
  misc_feature (1)..(179): Ceres Seq. ID no. 12366187
MEMIDAELRLGPPGSTNRDVINVVQPALAAAKRPSSSVVESEASGTDDHDDAAPTSKVQVVGWPPVRVYRKNAFHAAAEARRTRRGEQQGGGGLYVKVSMDGAPYLRKVDLRTYGGYRELRDALDALFGCFSSSADGGCQFAVAYEDKDGDLMLAGDVPWEMFICSCKKLRIMRGSETR

SEQ ID NO: 18649 - protein, 177 aa, Zea mays subsp. mays
  misc_feature (1)..(177): Ceres Seq. ID no. 12366188
MIDAELRLGPPGSTNRDVINVVQPALAAAKRPSSSVVESEASGTDDHDDAAPTSKVQVVGWPPVRVYRKNAFHAAAEARRTRRGEQQGGGGLYVKVSMDGAPYLRKVDLRTYGGYRELRDALDALFGCFSSSADGGCQFAVAYEDKDGDLMLAGDVPWEMFICSCKKLRIMRGSETR

SEQ ID NO: 18650 - DNA, 1478 bp, Zea mays subsp. mays
  misc_feature (1)..(1478): Ceres Seq. ID no. 12366212
cgcgcctccccccaactcgtccagagttagttgtagctatagacctggttgttgtagcgcacgcagtagccataggaaatgcggctgcttgctgccaagatgagtggcggcgccaaggcctacgccgccgtcgtcctgatcaggatcatgtactccggcatgcacgtcatgagcaaggtggccctggatcagggcatgaacccgctggtgttcctgttctaccggcataccactgccgcgctcgttctcatccctgtcacctttgttgtcgagaggcggaaagctaagccggttacgttcaagattggatggaagatgttcatacatgccctctatggggtgacagcatgcggtgacttgtttaaccttggactcaactacacttctgctacgtcatcttcagcgttgtacaacgttcaaccggtggtcacattcatcctagccgtcatatttgggatggagactctgaaactgactcggttccatggcaaagtgaaattcgcgggcatcctgttctgcgtcgccggcgtcaccatcctggccttctacgaggggccgatgttcaggtccttcaaccaccaccatctgtttcagaacggcggcggcggcggcggtagctctgcagcaggagcaggagacacgcactccaagaagcagtgggtgctggggatcttcctcatgacactatccaacgttctagcaggcctgtggacagtgctccaggggcccctgatagaggacacgtcgaagctgatgaacacgacgctgcagatctcgtgggcgtcgctccaggccttcctggtggccgttgcggtggagagggacttctccaagtggaggctgggctggaacgtcggcctcgccgccataatctacagcggcgtgatcgtgacggcgctttcctactacatgcaaatgtggacgatcgccaagaggggcccggtgttcctggccatgtccatgccgctcaccttcgtcttcaccatcgtcatatcctccttcgtcataggggacgcagtcagcctaggaagcatctttgccggggcgttgctggttggaggcctgtacaatgtgttctgggggcaagagcatcgaggagcgagacgacgacgacctgatgaacaagatcagcggcccgggaaaagccgggcagcaggacaaggcggcggacaataatccggcgtcgtcccaagtgccggatgacggtgcggaggcaaaggtgtaatacagcctctctcatcagtcagccagacacgggaacgatcgatctgcgtcaaaagctaggcggccagcaggccaaagccaagccactggttaatttatttcaggggtgctgggaaacaaaacaacgaagaacgaagcaggaattagcacacgtattgtgatttgtgaatgtgacgtgatcgatatgcaggtctactcaccggccggccggactcgtgtggcacacgcacgctgtaaatttggtctcggatttt

SEQ ID NO: 18651 - protein, 365 aa, Zea mays subsp. mays
  misc_feature (1)..(365): Ceres Seq. ID no. 12366213
MRLLAAKMSGGAKAYAAVVLIRIMYSGMHVMSKVALDQGMNPLVFLFYRHTTAALVLIPVTFVVERRKAKPVTFKIGWKMFIHALYGVTACGDLFNLGLNYTSATSSSALYNVQPVVTFILAVIFGMETLKLTRFHGKVKFAGILFCVAGVTILAFYEGPMFRSFNHHHLFQNGGGGGGSSAAGAGDTHSKKQWVLGIFLMTLSNVLAGLWTVLQGPLIEDTSKLMNTTLQISWASLQAFLVAVAVERDFSKWRLGWNVGLAAIIYSGVIVTALSYYMQMWTIAKRGPVFLAMSMPLTFVFTIVISSFVIGDAVSLGSIFAGALLVGGLYNVFWGQEHRGARRRRPDEQDQRPGKSRAAGQGGGQ

SEQ ID NO: 18652 - protein, 358 aa, Zea mays subsp. mays
  misc_feature (1)..(358): Ceres Seq. ID no. 12366214
MSGGAKAYAAVVLIRIMYSGMHVMSKVALDQGMNPLVFLFYRHTTAALVLIPVTFVVERRKAKPVTFKIGWKMFIHALYGVTACGDLFNLGLNYTSATSSSALYNVQPVVTFILAVIFGMETLKLTRFHGKVKFAGILFCVAGVTILAFYEGPMFRSFNHHHLFQNGGGGGGSSAAGAGDTHSKKQWVLGIFLMTLSNVLAGLWTVLQGPLIEDTSKLMNTTLQISWASLQAFLVAVAVERDFSKWRLGWNVGLAAIIYSGVIVTALSYYMQMWTIAKRGPVFLAMSMPLTFVFTIVISSFVIGDAVSLGSIFAGALLVGGLYNVFWGQEHRGARRRRPDEQDQRPGKSRAAGQGGGQ

SEQ ID NO: 18653 - protein, 342 aa, Zea mays subsp. mays
  misc_feature (1)..(342): Ceres Seq. ID no. 12366215
MYSGMHVMSKVALDQGMNPLVFLFYRHTTAALVLIPVTFVVERRKAKPVTFKIGWKMFIHALYGVTACGDLFNLGLNYTSATSSSALYNVQPVVTFILAVIFGMETLKLTRFHGKVKFAGILFCVAGVTILAFYEGPMFRSFNHHHLFQNGGGGGGSSAAGAGDTHSKKQWVLGIFLMTLSNVLAGLWTVLQGPLIEDTSKLMNTTLQISWASLQAFLVAVAVERDFSKWRLGWNVGLAAIIYSGVIVTALSYYMQMWTIAKRGPVFLAMSMPLTFVFTIVISSFVIGDAVSLGSIFAGALLVGGLYNVFWGQEHRGARRRRPDEQDQRPGKSRAAGQGGGQ

SEQ ID NO: 18654 - DNA, 1974 bp, Zea mays subsp. mays
  misc_feature (1)..(1974): Ceres Seq. ID no. 12366224
gcacgagaccattacctagaacatcctaatcgaaaacttcgtcttctgtcactgtcccacactcctatcattctcgccttcgacttcccaggagcgcccagcgccgcggagcttctagaacacgcgactggggcgagctagacgaagctaaggaggcgcgaggggtgacgatgcggggcaggtgacggtgcggcgtggtggaggcgggacagaggccgggggatggtggcggcggagggtgggcccgtcgaggagggcgtcggggagagctcgtccccgccgcgcgtagacgcagccccagcgccctctggctccgttgggagcgggggcagaggaggcgccagcgacatctgcgccgaggtgctcgagcgcctcgtcgccgacggccacgcggaggcgtccgaccccgagttccgcgacaggctcgccgcacatttcgggcggctcccgcacagctatcagctggatatcaatgttgacaaagcaaccgatgtcttggtccaccagaatgtcttagcggaagcaaaggatcctgataggcgccctgcattctatgttcgtttcttgaggattgaagatattgatcctgcaaacgactccgatgcatctgaagaaggggatggtgatggtgatgatctctctgtaaggcaggacacaccatatactcacattcatgaggtagtattctccacaatcgacaagccaaagctccttagtcagctatctgcattgctatctgacattggattgaacatcagagaagcacatgttttctctactcatgatggctattctcttgatgttttcgttgttgatggctggcccattaaggatactgatggtttgcacaaagcactggaagcatccattttaagaaatgagggttcatggtctggttcatctcattcgtcagcagctgaaagaacactgcccttccaagttaaaggtggtgaatgggaaatcgataaacgacttctgaagatgggagggttgattgcttctggttcttgtggggacttgtatcacgggacttacctcggtgaggatgtagctgttaaagttctaagagctgagcatttgaataagaatgtttggaacgaatttactcaagaagtatatatactaagagaagttcaacatacaaatgttgtgcgattcattggtgcttgcacaaaaccaccacaattttgcataattacagaatacatgtctggaggaagcttatatgactttgtgcacaagcagcataacgttctaaacctcacgactctattgaagtttgcagttgatgtatgccgagggatgtgctacttgcatgaaaggggtatcatccatagagacttaaagactgccaaccttctaatggacaacgatcatgctgtgaaagtggctgattttggcgtagctcggttccaggatcaaggaggtatcatgacagctgaaactggaacatacagatggatggcgcctgaggttataaaccaccaaccctatgatagcaaagcagatgtgttcagctttgccattgttctctgggagctgataacgtccaagatcccatatgataccatgacccctctccaagcggctgtaggtgtgagacaggggttgcgcccaggacttccgaagaagacgcacccaaagctgttggacttgatgcagagatgttgggaagcagatccatccgaccggcctgctttctcggacattttagccgaactggaggatcttttggcacaagctcagggaacatcgggaaagacggtccaagatccatcaaactcgaacgcgaaagattaacccccatgccatgcacatacctgacattttttctcaatccagtgatttgccacatctaggattcgagttgccaattatgaggaaatttgttttgcttgtgtacattcgaacaatcttcttggggcctattttttatgggcacctcattattcttatacaaaagaaattgggccc

SEQ ID NO: 18655 - protein, 525 aa, Zea mays subsp. mays
  misc_feature (1)..(525): Ceres Seq. ID no. 12366225
MVAAEGGPVEEGVGESSSPPRVDAAPAPSGSVGSGGRGGASDICAEVLERLVADGHAEASDPEFRDRLAAHFGRLPHSYQLDINVDKATDVLVHQNVLAEAKDPDRRPAFYVRFLRIEDIDPANDSDASEEGDGDGDDLSVRQDTPYTHIHEVVFSTIDKPKLLSQLSALLSDIGLNIREAHVFSTHDGYSLDVFVVDGWPIKDTDGLHKALEASILRNEGSWSGSSHSSAAERTLPFQVKGGEWEIDKRLLKMGGLIASGSCGDLYHGTYLGEDVAVKVLRAEHLNKNVWNEFTQEVYILREVQHTNVVRFIGACTKPPQFCIITEYMSGGSLYDFVHKQHNVLNLTTLLKFAVDVCRGMCYLHERGIIHRDLKTANLLMDNDHAVKVADFGVARFQDQGGIMTAETGTYRWMAPEVINHQPYDSKADVFSFAIVLWELITSKIPYDTMTPLQAAVGVRQGLRPGLPKKTHPKLLDLMQRCWEADPSDRPAFSDILAELEDLLAQAQGTSGKTVQDPSNSNAKD

SEQ ID NO: 18656 - protein, 272 aa, Zea mays subsp. mays
  misc_feature (1)..(272): Ceres Seq. ID no. 12366226
MGGLIASGSCGDLYHGTYLGEDVAVKVLRAEHLNKNVWNEFTQEVYILREVQHTNVVRFIGACTKPPQFCIITEYMSGGSLYDFVHKQHNVLNLTTLLKFAVDVCRGMCYLHERGIIHRDLKTANLLMDNDHAVKVADFGVARFQDQGGIMTAETGTYRWMAPEVINHQPYDSKADVFSFAIVLWELITSKIPYDTMTPLQAAVGVRQGLRPGLPKKTHPKLLDLMQRCWEADPSDRPAFSDILAELEDLLAQAQGTSGKTVQDPSNSNAKD

SEQ ID NO: 18657 - DNA, 3580 bp, Zea mays subsp. mays
  misc_feature (1)..(3580): Ceres Seq. ID no. 12366227
gcacgagaccattacctagaacatcctaatcgaaaaatcaatctctttcgctgcttgctttccattgaaaatgatgtgttctcccacaccctgcaacctgaaggcaacatgcctagcacaaaattctcccaaggattcccatggtttcctagcccaagatgtgcatggagccttgcttcttgatctccagcagaacagaagtgaagcactgtggccttgcatgcccaagttttgttgttagcgttaccaagatcatagctaccactgatgcagtgcgttcgcgatgaactgtgtagagcaggttctgaagagagtgttacctgcatctgcatggaagagggaggagacccgcagcttccgagcatctccgtggcacgcaccacgtccgaaggcgcgggggccgtcgacttggatctccttgagcagctactgtccggcgacaacggttggctcgaggtggtctcgcgctcgcccaactcggtagcgtttcctccaccctcggccttcttctcggctgacgcgacggccaccacagtgacgacgacggcggcgccggccgcgaacgccagctggttgattcagacgggcggcgcgagcaccccctccgtgcgggagcggttcagccaggccctgtcctacatccgtgatacgcagagcgacggcgacgtcctcgtgcagctctgggtgccggtcaaccgcgatgacgggaagctggtgctgaccaccagcggtcagccgttcacgctcgaccaccgctccgacagcctcatccggttcagggaggtgtccaccaagtaccagttcccagccgacgttaggtcaggggagtcaccagggttgccagggagggtcttcatcggcaggctccctgagtggtcgccggacatcaggtgcttcaccagctacgagtacgccagggtgacagatgcaaagtacctcgatgtccacggcaccatggggctgccagtgttcgagaaaagaagttacagttgcctgggcgttatcgagctgatcatgacaaagcagaagctcaacttcacctctgagctcaacaccatctgcagtgctctacaggcagttaatctcagaagtacagaagtttcgagcattccacgcaaaaagtttagcactgcttcctacaaagatgctttaccagagatactggaggtcctgagggcagcctgcttgacccacaagctgccattagctcagacatgggtcacatgtactcaacaagggaaacgaggcagccgacattctgacgagaactacaggtactgcatttccaccatcgacgaagcatgctttgtgaatgaagccgagatgcggggcttccatgaggcctgctccgaacaccatctgctgcgtggcgagggggtggcagggaaggccctcacgacaaaccagccatgcttcctgccggacattggatcctcaactaaattggaataccccttgtctcaccatgctaagatcttcaggttaaaaggtgcagtggcgatccgactgcggtgcacacgcactgggatagcagacttcgtgctggaattctttcttccaacagattgtgaagcactggaggagcagaagacagtgctggactccttgtcaggcaccatgcgaagtgtttgccagaccctacgtgtggtcacagatagagagatggaaggcgaagcggcgctggaaatgaacgagctgaactcttttactcctcctgagaaggacaaagatgagttgtcctttggaggcaattcagcagatcgtagaggggcctcttggacaagtctggcaggaacttcacagcaagaacccgagttagctgcattgcggatgcatggaacgttctcacctgtggggcagggtccatctctatctggtgttcaggcaactgctgaaggcagtaagacaaaaaggcgcacaaaggccgagaagaccgttagtttgcaggttcttcggcagtacttcgctggtagcctcaaagatgcagcgagaagccttggagtgtgtcccacgaccctcaaaagaatatgcaggcaacatggtataacccgctggccatcacgaaagatcaagaaggtagaccactctctaagaaagctccaacagatcattgattcggttcatggtgcagagacagctttccagctaaacaccctgtacaaggatctcacagacacctcaatatcatctgacaacaatttgtcaggaagtgtcacggttcctccaactaaccagagcaatctcaccgacttcaacaagcaccaaccccacaagtcaagtagcaatatgccatcaacttcacactcacactcctcatgcagccacggttctcagtcaagcccctcgtgtagcgttggtgcaacagaacatgcacaacagggtataattgatctgatgaagtcagaaaatcctgtgaaagacagctctattcagactatgcaaacagaaaacacttcattatatgagcatttctcagttcatgaggctccaattgatcttctacaggatgttactgaaaaggctaatggtgcacatcattcttctcgaagcctgtcatcccccaaccccaagcagaacacagatgcaaatatgagagtaaaggcaacatttggctcagaaaaggtgagattccgactaaacccagagtgcaattttcaaggactgaagcatgagctagcgaaacgtttgagtatagtagacacaaaccccttggttttaaagtacttggatgatgattcagaatgggtcttgatgacatgtgatgcagatctgcaggagtgccttcatgtatacaaactagcagatatccaaacaatcaaaatttcagttcatttagctgttagtccagctacaagggtcacagctggtcacactggtttgtcatgacaacagtatgagcctcaccactttgtgaggtttaatcaaattcaaccaggatcacatggttttgtgcaggggaaaccaaagattccaggagtccagggttggtagctgtgcaatactgcaatgtactatgtaccaccacgtcccagttctactgttagatcaattagtcttgtttctgatgctcaggttaggaactaatgatcaaacaagaatacttgacaatgagagagtcaagaaatcaggataaacagaagtaagcatgcattgcttgtaaatacttattgatgaacctgaatctctgaatgacaatgcaattgattgaattaatagggtgacgtatctacaaatcagatttgctccaactccaagtatgttttgtttctttgagtgctgatgtgcaacaatcattgatggcttctttctgataattgatcagctacaattgtcccttaagatcacagcattccttcatcgcctgagcgatcagcatgctctgttcaatgcacatgaaattctgcttctgaaattgtaattttctgcagcaaggattagatctagaataggatgataggatacttagtttgttcaatatgtttgtccattgcaaaaaaaataaaaaatgaatggtacactgaattatgggcctctttgaaagaacgtctgctgctgtagacattatagattgttttccttt

SEQ ID NO: 18658 - protein, 872 aa, Zea mays subsp. mays
  misc_feature (1)..(872): Ceres Seq. ID no. 12366228
MQCVRDELCRAGSEESVTCICMEEGGDPQLPSISVARTTSEGAGAVDLDLLEQLLSGDNGWLEVVSRSPNSVAFPPPSAFFSADATATTVTTTAAPAANASWLIQTGGASTPSVRERFSQALSYIRDTQSDGDVLVQLWVPVNRDDGKLVLTTSGQPFTLDHRSDSLIRFREVSTKYQFPADVRSGESPGLPGRVFIGRLPEWSPDIRCFTSYEYARVTDAKYLDVHGTMGLPVFEKRSYSCLGVIELIMTKQKLNFTSELNTICSALQAVNLRSTEVSSIPRKKFSTASYKDALPEILEVLRAACLTHKLPLAQTWVTCTQQGKRGSRHSDENYRYCISTIDEACFVNEAEMRGFHEACSEHHLLRGEGVAGKALTTNQPCFLPDIGSSTKLEYPLSHHAKIFRLKGAVAIRLRCTRTGIADFVLEFFLPTDCEALEEQKTVLDSLSGTMRSVCQTLRVVTDREMEGEAALEMNELNSFTPPEKDKDELSFGGNSADRRGASWTSLAGTSQQEPELAALRMHGTFSPVGQGPSLSGVQATAEGSKTKRRTKAEKTVSLQVLRQYFAGSLKDAARSLGVCPTTLKRICRQHGITRWPSRKIKKVDHSLRKLQQIIDSVHGAETAFQLNTLYKDLTDTSISSDNNLSGSVTVPPTNQSNLTDFNKHQPHKSSSNMPSTSHSHSSCSHGSQSSPSCSVGATEHAQQGIIDLMKSENPVKDSSIQTMQTENTSLYEHFSVHEAPIDLLQDVTEKANGAHHSSRSLSSPNPKQNTDANMRVKATFGSEKVRFRLNPECNFQGLKHELAKRLSIVDTNPLVLKYLDDDSEWVLMTCDADLQECLHVYKLADIQTIKISVHLAVSPATRVTAGHTGLS

SEQ ID NO: 18659 - protein, 851 aa, Zea mays subsp. mays
  misc_feature (1)..(851): Ceres Seq. ID no. 12366229
MEEGGDPQLPSISVARTTSEGAGAVDLDLLEQLLSGDNGWLEVVSRSPNSVAFPPPSAFFSADATATTVTTTAAPAANASWLIQTGGASTPSVRERFSQALSYIRDTQSDGDVLVQLWVPVNRDDGKLVLTTSGQPFTLDHRSDSLIRFREVSTKYQFPADVRSGESPGLPGRVFIGRLPEWSPDIRCFTSYEYARVTDAKYLDVHGTMGLPVFEKRSYSCLGVIELIMTKQKLNFTSELNTICSALQAVNLRSTEVSSIPRKKFSTASYKDALPEILEVLRAACLTHKLPLAQTWVTCTQQGKRGSRHSDENYRYCISTIDEACFVNEAEMRGFHEACSEHHLLRGEGVAGKALTTNQPCFLPDIGSSTKLEYPLSHHAKIFRLKGAVAIRLRCTRTGIADFVLEFFLPTDCEALEEQKTVLDSLSGTMRSVCQTLRVVTDREMEGEAALEMNELNSFTPPEKDKDELSFGGNSADRRGASWTSLAGTSQQEPELAALRMHGTFSPVGQGPSLSGVQATAEGSKTKRRTKAEKTVSLQVLRQYFAGSLKDAARSLGVCPTTLKRICRQHGITRWPSRKIKKVDHSLRKLQQIIDSVHGAETAFQLNTLYKDLTDTSISSDNNLSGSVTVPPTNQSNLTDFNKHQPHKSSSNMPSTSHSHSSCSHGSQSSPSCSVGATEHAQQGIIDLMKSENPVKDSSIQTMQTENTSLYEHFSVHEAPIDLLQDVTEKANGAHHSSRSLSSPNPKQNTDANMRVKATFGSEKVRFRLNPECNFQGLKHELAKRLSIVDTNPLVLKYLDDDSEWVLMTCDADLQECLHVYKLADIQTIKISVHLAVSPATRVTAGHTGLS

SEQ ID NO: 18660 - protein, 643 aa, Zea mays subsp. mays
  misc_feature (1)..(643): Ceres Seq. ID no. 12366230
MGLPVFEKRSYSCLGVIELIMTKQKLNFTSELNTICSALQAVNLRSTEVSSIPRKKFSTASYKDALPEILEVLRAACLTHKLPLAQTWVTCTQQGKRGSRHSDENYRYCISTIDEACFVNEAEMRGFHEACSEHHLLRGEGVAGKALTTNQPCFLPDIGSSTKLEYPLSHHAKIFRLKGAVAIRLRCTRTGIADFVLEFFLPTDCEALEEQKTVLDSLSGTMRSVCQTLRVVTDREMEGEAALEMNELNSFTPPEKDKDELSFGGNSADRRGASWTSLAGTSQQEPELAALRMHGTFSPVGQGPSLSGVQATAEGSKTKRRTKAEKTVSLQVLRQYFAGSLKDAARSLGVCPTTLKRICRQHGITRWPSRKIKKVDHSLRKLQQIIDSVHGAETAFQLNTLYKDLTDTSISSDNNLSGSVTVPPTNQSNLTDFNKHQPHKSSSNMPSTSHSHSSCSHGSQSSPSCSVGATEHAQQGIIDLMKSENPVKDSSIQTMQTENTSLYEHFSVHEAPIDLLQDVTEKANGAHHSSRSLSSPNPKQNTDANMRVKATFGSEKVRFRLNPECNFQGLKHELAKRLSIVDTNPLVLKYLDDDSEWVLMTCDADLQECLHVYKLADIQTIKISVHLAVSPATRVTAGHTGLS

SEQ ID NO: 18661 - DNA, 2429 bp, Zea mays subsp. mays
  misc_feature (1)..(2429): Ceres Seq. ID no. 12366265
gcacgagaccattacctagaacatcctaatcgaaaaaagacaagaccataaagattactcatagattaaagtagggtttggacgtctgcctgtccatttcggcgtctgttcttagcggccgacaagcggaatctggatcaagtcccctgcttcaacccatcccctctcatcgattcattgccacaaggcagctgattgctcacagcgttggatgtgagaattggattcggacccaccgatcgatatgccgttcggccacacgcggctcgatgtccggcgtccgccgcagtcgtcctacctctgctgctccacaaccaccgtcgccgtattcgtcgcgctctgcctggtggctgtgtggatggcgtcgtccatgctcgtcacccctgccgagttccctccatttcagtccaaagtgcgtccactgaggcctcatgactctcctcctgccaccggaagcttaaccagtgctgatcagggcgatggcatcaccacccatgatgatccaccacctgctacacaacaattgcctcctgtaacagacagcatggatggtgaaaatcagcaacaagaacttttcactacagagcgcggaccatggtcaaccaaggctgaacaatctaacaaggacgctaaagagcaaaccttgacgtccagtagcccactgagcttccgttgggcgttatgcaacgtcgatgctggagcagattatatttccatgcctcgacaacgtagcagctatcaagaagctccgttccaccaagcactacgaacaccgagaaaggcattgccccgagaaatctcctacctgccttgttcctctaccagagggctacaggaatccaattaggtggccaaagagcagagatcagatatggtacaataacgttcctcatactaagctggttgaatacaagggacaccaaaactgggttaaggtttctggagaatacctcaccttccccggaggcgggactcagtttaaacatggtgcgttgcgctacattgattttattcaggaggcaaagaaggatgtagcatggggaaaacgaagccgtgtagtgttagatgttggttgtggagtagctagctttggaggatatctatttgacagagatgtgattactatgtcatttgcacctaaagatgagcacgaagctcaggttcagtttgctcttgaaagaggaatacctgctatatcagctgtcatgggtacaaaaaggctcccatttcccagtagggtgtttgatgttgttcattgtgcacgatgtagggtaccgtggcatattgaaggcggtaaactcttgcttgaactggacagactgttacgtcctggtggttactttgtgtggtctgctacacccgtataccagaagctgcctgaagatgttgagatatggcaagccatgtctgctctaaccagttcaatgtgctggaaaatggtcaacaaagtaaaggatagggtgaatagagtgggtatagcaatttacagaaagccaacagacaacagctgctacgaagcaagatctgaaacaaaccctccactctgtggagagtacgacgatcctgatgctgcctggaacatatcgttgggggcttgtatgcataagttgcctgtagatcctaccgttcgtggttcacagtggcctgagttatggccattgagactggagaaaccaccttattggctgagaggttctgaggctggagtatatgggaaacctgccccggaggattttcaagcagactatgaacactggaagcgagtcgtgagcaattcatacatgaatggtttgggtattgactggtctactgttagaaatgttatggatatgaaagccgtatatgcagggttcgcagcagctttgcgcgatctcaaggtgtgggtcatgaatgtggttccaattgattcacctgacacgcttccaattatatatgagcgcgggctgtttggactgtaccatgactggtgtgagtcgtttagcacctatccgagaacttatgatcttgtgcacgccaaccatctgttctccaaggttaagaagaggtgcgagctattacctgttatcgtggaggtggaccgggtgttgaggccacaaggccggctaattgtcagagacaacattgaaacaacaagtgaggtggagaacattctgaaatctctccactgggaggtccgcatgtcttacttccaggagaaagaaggcttgctgttggtgcagaagacgacatggcggccaaatgaaactgaagctaagctatgatgcagagcccttgccccttggaaggaggaaaggaagatctagtgtttgcaaggtcctctacttttgtgaggcatcttttatttatgtagaatttgtagagctatatgattggtagatgtggaggaatctggtggtttccagcatatccatattcatctgtggaagtcg

SEQ ID NO: 18662 - protein, 522 aa, Zea mays subsp. mays
  misc_feature (1)..(522): Ceres Seq. ID no. 12366266
MLEQIIFPCLDNVAAIKKLRSTKHYEHRERHCPEKSPTCLVPLPEGYRNPIRWPKSRDQIWYNNVPHTKLVEYKGHQNWVKVSGEYLTFPGGGTQFKHGALRYIDFIQEAKKDVAWGKRSRVVLDVGCGVASFGGYLFDRDVITMSFAPKDEHEAQVQFALERGIPAISAVMGTKRLPFPSRVFDVVHCARCRVPWHIEGGKLLLELDRLLRPGGYFVWSATPVYQKLPEDVEIWQAMSALTSSMCWKMVNKVKDRVNRVGIAIYRKPTDNSCYEARSETNPPLCGEYDDPDAAWNISLGACMHKLPVDPTVRGSQWPELWPLRLEKPPYWLRGSEAGVYGKPAPEDFQADYEHWKRVVSNSYMNGLGIDWSTVRNVMDMKAVYAGFAAALRDLKVWVMNVVPIDSPDTLPIIYERGLFGLYHDWCESFSTYPRTYDLVHANHLFSKVKKRCELLPVIVEVDRVLRPQGRLIVRDNIETTSEVENILKSLHWEVRMSYFQEKEGLLLVQKTTWRPNETEAKL

SEQ ID NO: 18663 - protein, 378 aa, Zea mays subsp. mays
  misc_feature (1)..(378): Ceres Seq. ID no. 12366267
MSFAPKDEHEAQVQFALERGIPAISAVMGTKRLPFPSRVFDVVHCARCRVPWHIEGGKLLLELDRLLRPGGYFVWSATPVYQKLPEDVEIWQAMSALTSSMCWKMVNKVKDRVNRVGIAIYRKPTDNSCYEARSETNPPLCGEYDDPDAAWNISLGACMHKLPVDPTVRGSQWPELWPLRLEKPPYWLRGSEAGVYGKPAPEDFQADYEHWKRVVSNSYMNGLGIDWSTVRNVMDMKAVYAGFAAALRDLKVWVMNVVPIDSPDTLPIIYERGLFGLYHDWCESFSTYPRTYDLVHANHLFSKVKKRCELLPVIVEVDRVLRPQGRLIVRDNIETTSEVENILKSLHWEVRMSYFQEKEGLLLVQKTTWRPNETEAKL

SEQ ID NO: 18664 - protein, 351 aa, Zea mays subsp. mays
  misc_feature (1)..(351): Ceres Seq. ID no. 12366268
MGTKRLPFPSRVFDVVHCARCRVPWHIEGGKLLLELDRLLRPGGYFVWSATPVYQKLPEDVEIWQAMSALTSSMCWKMVNKVKDRVNRVGIAIYRKPTDNSCYEARSETNPPLCGEYDDPDAAWNISLGACMHKLPVDPTVRGSQWPELWPLRLEKPPYWLRGSEAGVYGKPAPEDFQADYEHWKRVVSNSYMNGLGIDWSTVRNVMDMKAVYAGFAAALRDLKVWVMNVVPIDSPDTLPIIYERGLFGLYHDWCESFSTYPRTYDLVHANHLFSKVKKRCELLPVIVEVDRVLRPQGRLIVRDNIETTSEVENILKSLHWEVRMSYFQEKEGLLLVQKTTWRPNETEAKL

SEQ ID NO: 18665 - DNA, 1529 bp, Zea mays subsp. mays
  misc_feature (1)..(1529): Ceres Seq. ID no. 12366273
cactccgtaaaaccacaggaaacctcacacgtcttcctccgtccagcctgtctccggccggccccccgccttccttaactccgcatcatccccttccaatctcgtcttcccagcacccgaaccgatcaaattcacttccgctcgattctccgggagggggagggtagctgaaggacatcccggggacgcaatgcgcgtcctcgccgtgttcctcctcggcgcagcgttcgcggcggcggccggaggcggcggggagcttccggagttccgggaagctccggcgttccgcaacggcgcagcctgcgcggacgcgccgacgatccacatcgcgatgacgctggacggcacctacctgcggggctccctcgccggcgtcctctccgtgctccgccacgccgcctgtccggagtccgtcgccttccacttcgtcgcctcctcggcctccccggcgcgccgcctcgcctcgctccgccgtgcgctggcggctgccttccccacgctcccggccaccgtgcatcgcttcgacgcacgcctcgtccggggcaagatctcctcatccgtccggcgcgcgctcgaccagcccctcaactacgcccgcatctacctcgcggacctcctgccgcgctccgtctcccgcgtgctctacctcgactccgacctcctcgtggtcgacgacgtggcccgcctctgggcgaccgacctcggccccgacgccgccctcgntgcccccgagtactgccacgccaactttacctcctatttcaccgacgcgttctggagccaccccgagtacaccgccgtcttcgccaaccggacgcgcgtcccctgctacttcaacaccggggtaatggtcatcgacctggacaggtggcgctccggtgggtacaccgcgaagctggaatactggatggaggtgcagaagcaggaggccaggatttacgagctgggctccctcccgccgtttctcctggtgttcgccggcgaggtgaaagccgtggagcaccggtggaaccagcacgggctcggcggcgacaacgtggcggggcagtgccggcagctgcaccccggtccggttagcctgctgcactggagtgggaaggggaagccgtggctgcggctggacgccgggcggccgtgcccgctcgacgcgctctggatgccctacgacctccttcgccgccgcggcgctcgggacgatctcctcgccgccgtctcctgacaatgctgtccgcgcatcgctgcagggcgatcgatttgctcgcgtccgatcggatcatatgccacggcgcttggctgctccgctcgttccgtcgtcccacgggtcggcgtcggtcaccaagtcacagacacgttggacccacctggacactctcctctccgcatgggtccatgcgcaatggcgttagttggtgtggccctgtcggtactgaagtccgtcggccccactcgttggtggcggatggggatttttggggtgggggccaaggtgaaattcagacatggggctgtgtacagctgttgtttttggc

SEQ ID NO: 18666 - protein, 342 aa, Zea mays subsp. mays
  misc_feature (1)..(342): Ceres Seq. ID no. 12366274
  misc_feature (178)..(178): Xaa is any aa, unknown or other
MRVLAVFLLGAAFAAAAGGGGELPEFREAPAFRNGAACADAPTIHIAMTLDGTYLRGSLAGVLSVLRHAACPESVAFHFVASSASPARRLASLRRALAAAFPTLPATVHRFDARLVRGKISSSVRRALDQPLNYARIYLADLLPRSVSRVLYLDSDLLVVDDVARLWATDLGPDAALXAPEYCHANFTSYFTDAFWSHPEYTAVFANRTRVPCYFNTGVMVIDLDRWRSGGYTAKLEYWMEVQKQEARIYELGSLPPFLLVFAGEVKAVEHRWNQHGLGGDNVAGQCRQLHPGPVSLLHWSGKGKPWLRLDAGRPCPLDALWMPYDLLRRRGARDDLLAAVS

SEQ ID NO: 18667 - protein, 295 aa, Zea mays subsp. mays
  misc_feature (1)..(295): Ceres Seq. ID no. 12366275
  misc_feature (131)..(131): Xaa is any aa, unknown or other
MTLDGTYLRGSLAGVLSVLRHAACPESVAFHFVASSASPARRLASLRRALAAAFPTLPATVHRFDARLVRGKISSSVRRALDQPLNYARIYLADLLPRSVSRVLYLDSDLLVVDDVARLWATDLGPDAALXAPEYCHANFTSYFTDAFWSHPEYTAVFANRTRVPCYFNTGVMVIDLDRWRSGGYTAKLEYWMEVQKQEARIYELGSLPPFLLVFAGEVKAVEHRWNQHGLGGDNVAGQCRQLHPGPVSLLHWSGKGKPWLRLDAGRPCPLDALWMPYDLLRRRGARDDLLAAVS

SEQ ID NO: 18668 - DNA, 1670 bp, Zea mays subsp. mays
  misc_feature (1)..(1670): Ceres Seq. ID no. 12366280
gcacgagaccattacctagaacatcctaatcgaaaaccctgtgcagtggtccatattctgggcggcgatccgcaggcgggctacacacacatacatggcggcggagggcgccggaggccggggacgagccatgcggtacccgcctctgtcggcactcgtggtctccgccatcgcagccttctccgccgtgatcgtcctcgccgtcgtccactcggcgtacgacgacgccatgtcgcggacgcggacgctgctgggccacaacctggagccgacgccgtggcacccgttcccgcacgacaagggccggccgccggcgcgcgcggcgctgcggtgcgcgccctccatcgcctgcctgccgccgctatcaccgtcgtcgtcggtcgtcgccgccgcaaggtaacaagaagaagaagcagaagcagtgccctgcctacttcgctgccatccaccgggacctggctccgtggcgcgggcagggccggggcgtgacgcgcgcgctcctggacgaggcgcggcggcgcgcgtccatgcgcgtcaccatcacgggcggcgggcggcggctgcacgtggacctctactacgcctgcgtgcagagccgcgccctgttcacggtgtggagcctgctgcagctgatgcggcggtaccccgggcgcgtgcccgacgtggacctcatgttcgactgcatggaccgccccgccatcaaccggaccgagcacggggacggcgctctgccgccgccgccgctcttccgctactgcaccaccagggaccacttcgacatccccttccctgactggtccttctggggctggccggacacgaacatcgagccatggaaccacgagttcaagaacatcagggcgggcgccagggcaacgagatgggcggacagggtgccgacggcgtactggaagggcaacccggacgtggcgtcgccgctgcgggaggcgctgctgggctgcaacgacacggccctgtggcgcgccgagatcatgcgccagaactgggacgacgaggccaggtccggctaccagcactcgaggctctcggcgcagtgcacgcaccgctacaagatctacgccgagggattcgcgtggtcggtcagcctcaagtacatcctctcctgcggctccatggcgctgctcatcgagccgcgctaccaggacttcttcagccgcgggctggagccccgggtgaactactggccggtcgccgccctgggcatgtgcgagtccatccgggacgccgtcgactggggcaacgccaacccggacgaggccgagcgcgtcggcaggcgcgggcagaggctcgtgcaggacctccgcatgcacgccgtctacgactacatgctgcacctgctcaccgagtatgcgcgcctcctcatagaccaggaccacggcttgagcccgccgccccacgcgcaggaggcatgcgaggcatccctgctctgcctcgcagacgacaagcagcggaggttcctccacgcatccaaggcagaccccgcgccgggcgacccgtgcgtgctcccgccgccgtgatccctccccctccctctctctctaggatttctttctttctttatttatttatttattagactcaacagacagatcagaacgagttgggaggatttcaatgatggttctaaagcttctgacaaaagcatgttc

SEQ ID NO: 18669 - protein, 336 aa, Zea mays subsp. mays
  misc_feature (1)..(336): Ceres Seq. ID no. 12366281
MRVTITGGGRRLHVDLYYACVQSRALFTVWSLLQLMRRYPGRVPDVDLMFDCMDRPAINRTEHGDGALPPPPLFRYCTTRDHFDIPFPDWSFWGWPDTNIEPWNHEFKNIRAGARATRWADRVPTAYWKGNPDVASPLREALLGCNDTALWRAEIMRQNWDDEARSGYQHSRLSAQCTHRYKIYAEGFAWSVSLKYILSCGSMALLIEPRYQDFFSRGLEPRVNYWPVAALGMCESIRDAVDWGNANPDEAERVGRRGQRLVQDLRMHAVYDYMLHLLTEYARLLIDQDHGLSPPPHAQEACEASLLCLADDKQRRFLHASKADPAPGDPCVLPPP

SEQ ID NO: 18670 - protein, 301 aa, Zea mays subsp. mays
  misc_feature (1)..(301): Ceres Seq. ID no. 12366282
MRRYPGRVPDVDLMFDCMDRPAINRTEHGDGALPPPPLFRYCTTRDHFDIPFPDWSFWGWPDTNIEPWNHEFKNIRAGARATRWADRVPTAYWKGNPDVASPLREALLGCNDTALWRAEIMRQNWDDEARSGYQHSRLSAQCTHRYKIYAEGFAWSVSLKYILSCGSMALLIEPRYQDFFSRGLEPRVNYWPVAALGMCESIRDAVDWGNANPDEAERVGRRGQRLVQDLRMHAVYDYMLHLLTEYARLLIDQDHGLSPPPHAQEACEASLLCLADDKQRRFLHASKADPAPGDPCVLPPP

SEQ ID NO: 18671 - protein, 288 aa, Zea mays subsp. mays
  misc_feature (1)..(288): Ceres Seq. ID no. 12366283
MFDCMDRPAINRTEHGDGALPPPPLFRYCTTRDHFDIPFPDWSFWGWPDTNIEPWNHEFKNIRAGARATRWADRVPTAYWKGNPDVASPLREALLGCNDTALWRAEIMRQNWDDEARSGYQHSRLSAQCTHRYKIYAEGFAWSVSLKYILSCGSMALLIEPRYQDFFSRGLEPRVNYWPVAALGMCESIRDAVDWGNANPDEAERVGRRGQRLVQDLRMHAVYDYMLHLLTEYARLLIDQDHGLSPPPHAQEACEASLLCLADDKQRRFLHASKADPAPGDPCVLPPP

SEQ ID NO: 18672 - DNA, 1833 bp, Zea mays subsp. mays
  misc_feature (1)..(1833): Ceres Seq. ID no. 12366371
acagcaaaggcggcactgctcaaaccacctctttggccacacacacgcatactgccaccgctactgcttcatcagcagctagcagcaagcggccggtggtgcagcgctgcgcctgcgccgggtaatcgaacacatggctcagatgatctcaaccatgcccatgctagacgccgccccggcctcgtcagccattatgcccaagctgccgcccgccgcctgcctggacgcgccgccggcctcgggcatcaccgtcgtgtcgaggcagcacgttcgcccggacgccgcgtcggcggtcggcgacctcacgctgtccgtctccgacctgcccatgctgtcgtgccactacatccagaaggggctcttcttcccggcacccgacctgcccatgtcctcggtcgtgtcgctgctcctgtcctcgctgtcgcgggcgctcgccgtccgtcccggccctcgccggccgcttcgtcacgctgcccgacgaccgcatcgtcatccgctgcaacgacgcgggcgtggacttcctccacgccgtcgcacccggcctgtcgcttgacgactttctcgtccctgacgccgacgtgccgaccaagcacacaaaggacctgttccccatggaccggaccgtgagctacgatgggcaccgtcgcccgctcacgtcgttccaggtcaccgcactcggagacggcaccgtctttatcggcatcgtcgccaaccacgccgtcgtggacggcacctccttttggcaattcttcaatacctgggcggccatctgccgcggcgagtcccccaaactgccggacttccgccgaaacttcttcggcgagtccactgccgtcctccgcttccccggcggcgtcggcccgtccgtgaccttcgacgtggacgcgcctctccgtgagcgcgtctttcacttcagcgctgacgcaattcgcgagctgaaagcgattgccaaccgccgtccgagcggtggccaagacgccgaggtgtacggcaagatggcgcaggaccccaagaatccccaagtgcgcggggagatctcgtcgttccagtcactgtgcgcgcagatatggctctcggtcacgcgtgcccggaaacgcctggcgcccgacgcgacgacgacgttccgaatggcggtgaactgccggcaccggctgcagccggccatctcccctgtctactttggcaacgccatccagagcgctgcgacgatggcgacagtctccgagctggctcgcagcgatctaaggtgggcggcaggcaagctgaacgcgacccttgcggcctatggcgacggcacgatccggctcgcggcggccgcgtggcaggccgcaccccggtgcttcccgctgggcaaccccgacggctcggtgatcacgatggggagctccaaccggttcccgatgtacgtgggcaacgatttcggctggggccggcccctcgctgtgcggagcgggcgcgccaacaagttcgacggcaagatgtcggcgttcccgggacgcgccggggacggcagcgtggacatcgaggtgtgcctgcctccggagaccatggcggcgctgctccacgacgccgagttcatgcactacgtgtcgtgcccgtcgcatctgttgtgatgtactgcagccgtgcgggcgggcgggcgcgagtgggggccatcggccgtgacatgccatcaggcacctgttggattgctcggtcgtccactcgtccttgcctttcgggattcaggaatactagctagttggtgtcaagacattgtatctgtctcgctttttcggagtgctgcgtgtaatcgtgtgttagcagctactagtagtagtacttggaaattgg

SEQ ID NO: 18673 - protein, 333 aa, Zea mays subsp. mays
  misc_feature (1)..(333): Ceres Seq. ID no. 12366372
MDRTVSYDGHRRPLTSFQVTALGDGTVFIGIVANHAVVDGTSFWQFFNTWAAICRGESPKLPDFRRNFFGESTAVLRFPGGVGPSVTFDVDAPLRERVFHFSADAIRELKAIANRRPSGGQDAEVYGKMAQDPKNPQVRGEISSFQSLCAQIWLSVTRARKRLAPDATTTFRMAVNCRHRLQPAISPVYFGNAIQSAATMATVSELARSDLRWAAGKLNATLAAYGDGTIRLAAAAWQAAPRCFPLGNPDGSVITMGSSNRFPMYVGNDFGWGRPLAVRSGRANKFDGKMSAFPGRAGDGSVDIEVCLPPETMAALLHDAEFMHYVSCPSHLL

SEQ ID NO: 18674 - protein, 224 aa, Zea mays subsp. mays
  misc_feature (1)..(224): Ceres Seq. ID no. 12366373
MALGHACPETPGARRDDDVPNGGELPAPAAAGHLPCLLWQRHPERCDDGDSLRAGSQRSKVGGRQAERDPCGLWRRHDPARGGRVAGRTPVLPAGQPRRLGDHDGELQPVPDVRGQRFRLGPAPRCAERARQQVRRQDVGVPGTRRGRQRGHRGVPASGDHGGAAPRRRVHALRVVPVASVVMYCSRAGGRARVGAIGRDMPSGTCWIARSSTRPCLSGFRNTS

SEQ ID NO: 18675 - protein, 208 aa, Zea mays subsp. mays
  misc_feature (1)..(208): Ceres Seq. ID no. 12366374
TAKAALLKPPLWPHTRILPPLLLHQQLAASGRWCSAAPAPGNRTHGSDDLNHAHARRRPGLVSHYAQAAARRLPGRAAGLGHHRRVEAARSPGRRVGGRRPHAVRLRPAHAVVPLHPEGALLPGTRPAHVLGRVAAPVLAVAGARRPSRPSPAASSRCPTTASSSAATTRAWTSSTPSHPACRLTTFSSLTPTCRPSTQRTCSPWTGP

SEQ ID NO: 18676 - DNA, 2625 bp, Zea mays subsp. mays
  misc_feature (1)..(2625): Ceres Seq. ID no. 12366382
gcacgagaccattacctagaacatcctaatctaaaagatagagaaatgagcttcgctgttcgagaaaacagcagagcccggccgaattcgttgggcagcctgcggagatgcagtagaggccgccaggcgcagatggaatgagcgaccgggctctgctccgccgctagcctgccgccgcaccgcgccgtcgatcgccgcgccatgaacggtccccgcggctaccccctttctccaccggcaccttacccccgtatggcgtgatccaatgatagcaccaagagcgcaccttcccctctccctgacggcgtcgtcctccccgcacggcggcgcgcgcacccgcaccaagaagaggaagaaaccatgtcccccaacctggacagcgccatcaagatccaggtgccggcgctgctcctgaggcgtctcttcggcgcgtcccggcgggacgaggccaagcagctccagcggaccccggcgccggtggggaggcggcgggtgtttgtgcagacgggagaccggctgcgtgctcggcatggacctggaccgcggggacaacgcgcacaccgtcaagcgccggctgcagctcgcgctcaacatgcccaccggcgggacctcgctcaccttcggcgatcgcctcctggagaacgacctgtccttcatacgcccggactcgccgctgctgctcacccggaacagcatcaaccggagctgctccaccccgtgcctctgccccgtctccaaggacttcgagcacaaggactgcagcggactggttgagatgctcggctgttccagcagctgtgcccgggtgaagcgcctcgtggacgacgtggtgactgccatcaggagcggcgtggatccggtccccattagcagcggccttggtggctcgtactacttcaggaacgtcttgggcgacagggttgctattgtgaagccgacggacgaggagccctttgcgccaaacaatcccaaggggttcgtcgggagggcgctcggtcagccgggcctcaagagatctgtgcgagtgggagagacggggtttagggaggttgcggcattcctgttggaccatgacaacttcgccaacgttcctgccacggctctggtgaagataacacactccattttcaacataaactgcccggtaaatggaggaaacctggcaccggctcatgaccagcaacagcaagttaacagcaagattgcttcgttccagcagttcatagcccatgacttcgacgccagcgaccatggcacgtcaagcttccctgtcgctgctgttcataggatcggcatactagatatccggattttcaacactgacaggcacgccggcaatgtgctggtgaggaagcttaacggtggcacaggccgctttggttgccagacagagctgttcccaattgatcatggcatgtgcttgccggagaacttggaggacccttacttcgagtggatccattgggctcaggcttctattccgttctctgaggaagagctcgagtacatcagaaatcttgatccaaggaaagatgtgcagatgctgcgccgggaacttccgatgatacgtgaggcctgcctacatgtactggccctgtgcacaatcttccttaaggaggctgcagctttcggactctgcttggccgagataggcgagatgatgaccagggagttcagagggatggaggaggaaccaagccagctggaggttatgtgtatggaggccaggaagagagtagcagagtgggagcccttctctgccacggctgaacatggagaagataccgatttccagttctcggtggatatgctaggagaatacagtgatgtagtgcgatcaccgaggttcaatggctcaggttccaaggtgtccagtttcagaagccctttgtctaagctcgtcgagagtgtcgacgagggcagtgatggccatgaagatcaaaacgagtctgatcgagtcttgtatgctggatggaatacatccagcgttcctagcaaagctatgggccatagtggcaatgcctcaaaaagtgcaatgaacaggagtgccgatgaacaacttccatcaagtatgtgttttgtcaggctgtcggatatgagtgcagatgagtgggatgtattcctcgaaaaattccaggagctgctgaaagaggcactgcacgagagcgcaagggcagcagtaggtcaaaggatgaagcagcggctgggcacttcatgcaagttttgagcagggcaatagcgcatcagagaagaaaaaaatgcagtgctacttgtactgcttgcttatggagtgagtacaggatgaagatatcatcgtatgtggcaccttcaaccttgtgcaacgatctaggttgcagcagccatgtccagcaggtagataggaccacaagcatatgtagtgacggtgtggagaactgctacgcgtgtttattagctatatgtttacgaaggggaatgcttaataataaatgtttgtcagcctgtgtatattggcttgatgttagatactccagctttagcatgcaatttcttagtcgctgaaaattctttgtagcttgtgatgtgacctgtgagcagtgtaaacgttgcacctttgatggaaaaataatgcttacctgttgttgt

SEQ ID NO: 18677 - protein, 565 aa, Zea mays subsp. mays
  misc_feature (1)..(565): Ceres Seq. ID no. 12366383
MDLDRGDNAHTVKRRLQLALNMPTGGTSLTFGDRLLENDLSFIRPDSPLLLTRNSINRSCSTPCLCPVSKDFEHKDCSGLVEMLGCSSSCARVKRLVDDVVTAIRSGVDPVPISSGLGGSYYFRNVLGDRVAIVKPTDEEPFAPNNPKGFVGRALGQPGLKRSVRVGETGFREVAAFLLDHDNFANVPATALVKITHSIFNINCPVNGGNLAPAHDQQQQVNSKIASFQQFIAHDFDASDHGTSSFPVAAVHRIGILDIRIFNTDRHAGNVLVRKLNGGTGRFGCQTELFPIDHGMCLPENLEDPYFEWIHWAQASIPFSEEELEYIRNLDPRKDVQMLRRELPMIREACLHVLALCTIFLKEAAAFGLCLAEIGEMMTREFRGMEEEPSQLEVMCMEARKRVAEWEPFSATAEHGEDTDFQFSVDMLGEYSDVVRSPRFNGSGSKVSSFRSPLSKLVESVDEGSDGHEDQNESDRVLYAGWNTSSVPSKAMGHSGNASKSAMNRSADEQLPSSMCFVRLSDMSADEWDVFLEKFQELLKEALHESARAAVGQRMKQRLGTSCKF

SEQ ID NO: 18678 - protein, 544 aa, Zea mays subsp. mays
  misc_feature (1)..(544): Ceres Seq. ID no. 12366384
MPTGGTSLTFGDRLLENDLSFIRPDSPLLLTRNSINRSCSTPCLCPVSKDFEHKDCSGLVEMLGCSSSCARVKRLVDDVVTAIRSGVDPVPISSGLGGSYYFRNVLGDRVAIVKPTDEEPFAPNNPKGFVGRALGQPGLKRSVRVGETGFREVAAFLLDHDNFANVPATALVKITHSIFNINCPVNGGNLAPAHDQQQQVNSKIASFQQFIAHDFDASDHGTSSFPVAAVHRIGILDIRIFNTDRHAGNVLVRKLNGGTGRFGCQTELFPIDHGMCLPENLEDPYFEWIHWAQASIPFSEEELEYIRNLDPRKDVQMLRRELPMIREACLHVLALCTIFLKEAAAFGLCLAEIGEMMTREFRGMEEEPSQLEVMCMEARKRVAEWEPFSATAEHGEDTDFQFSVDMLGEYSDVVRSPRFNGSGSKVSSFRSPLSKLVESVDEGSDGHEDQNESDRVLYAGWNTSSVPSKAMGHSGNASKSAMNRSADEQLPSSMCFVRLSDMSADEWDVFLEKFQELLKEALHESARAAVGQRMKQRLGTSCKF

SEQ ID NO: 18679 - protein, 483 aa, Zea mays subsp. mays
  misc_feature (1)..(483): Ceres Seq. ID no. 12366385
MLGCSSSCARVKRLVDDVVTAIRSGVDPVPISSGLGGSYYFRNVLGDRVAIVKPTDEEPFAPNNPKGFVGRALGQPGLKRSVRVGETGFREVAAFLLDHDNFANVPATALVKITHSIFNINCPVNGGNLAPAHDQQQQVNSKIASFQQFIAHDFDASDHGTSSFPVAAVHRIGILDIRIFNTDRHAGNVLVRKLNGGTGRFGCQTELFPIDHGMCLPENLEDPYFEWIHWAQASIPFSEEELEYIRNLDPRKDVQMLRRELPMIREACLHVLALCTIFLKEAAAFGLCLAEIGEMMTREFRGMEEEPSQLEVMCMEARKRVAEWEPFSATAEHGEDTDFQFSVDMLGEYSDVVRSPRFNGSGSKVSSFRSPLSKLVESVDEGSDGHEDQNESDRVLYAGWNTSSVPSKAMGHSGNASKSAMNRSADEQLPSSMCFVRLSDMSADEWDVFLEKFQELLKEALHESARAAVGQRMKQRLGTSCKF

SEQ ID NO: 18680 - DNA, 1868 bp, Zea mays subsp. mays
  misc_feature (1)..(1868): Ceres Seq. ID no. 12366477
gcacgagaccattacctagaacatcctaatcaaaaaatgacactacctgacaaccacaaacgtcgtctccctccatggcactccgccacggcaataattgaagcaacgctgatctgttgcatctccggcgaggcagagcgcagcagctcgtgcatatatctagctaagccaattgcgcaccaccgcgcgcgccaccccaagatccccgtgccttttcagagcatctctccgtcgccgtgacaatgaagcagcagcagaccgtcatcctgtacccgagccctggcgtcggccacatcgtccccatggtgcagctcgccaaggtgtttctgaggcacggctgcgacgtgaccatggtgatcgccgagccagccgccagctcgcccgacttccgcatcgtcgacctcgaccgcgtggctgcctccaaccccgccatcaccttccacgtcctccctccggtcccgtacgccgacctcgccgtccccggcaagcaccatttcctcctcacgctgcaagtgctgcgacggtacaacggcgagctggagaggttcctccgctccgtcccgcgcgagcgcctgcactccctggtggtcggcatgttctgcaccgacgcggtcgacgtcggcgcaaagctgggcgtccccgtgtacacgttcttcgcctcggccgccgctactctggccgtcgtggcccagctgccggcgttgctctccggcaggcgagcgggcctcaaggagctcggggacacgccactccagttcctcggcgtcccgccgttcccagcgtcccatctcgtcagggagctgctggagcacccggacgacgacgagctgtgcaagaccatggtggacgtctggaagcgctgcacggacggcagcggcgtcttggtcaacacgttcgagtcgctggagagcccggccgtgcaggcgctgagggatccccggtgcgtgcccggccgcgtgctgcccccggtctactgcgtggggccgctgatcggtggcgacggcggcacaagagcagcagcggagcaagagcgcgcggcggagacgcggcacgagtgccttgcgtggctcgacgagcagcccgagaacagcgtcgtgttcctctgcttcggaagcagatgcgcgcactcggctgagcagctaaggggcatcgccgtcggccttgagaggtccgggcagcgcttcttgtggtctgtgcggacgccggccggcaccgacggcggttcggagaatctcggcgcgctctttccagaggggttcttgcagcggaccaaggaccggggcctcgtcgtgcggtcatgggcaccgcaggttgaggtgctacggcatccatcgacgggcgcgttcatgacgcactgcggatggaactcgacgctggaagccatcacagcaggggtgccgatgctatgctggccgttctacgcggagcagctgatgaacaaggtgttcgtgaccgagggcatgggcgtcggggtggagatggaggggtacacgacgggcttcatcaaatccgaggaggtggaagccaaggtgaggctggtgatggaatctgaggagggcaggcacctcaggggtcgagcggtagcactcaagaatgaagcacaagcagcgctgcgggatgacggcccatcggagacctcgttcgccaggttcctctttgatgcgaagaatcttcagggacacctcggtcacggatcggagtgaattttctttaattttctattgaggccttgttcgaaatttatattaggaataagatgcaggaagggttcttgaacttggcagtcatttgagtctcagggtcgacaatgtatcaaatacatatgtgttggagacttgttctcaaatgctataagttaagaacaaggc

SEQ ID NO: 18681 - protein, 486 aa, Zea mays subsp. mays
  misc_feature (1)..(486): Ceres Seq. ID no. 12366478
MKQQQTVILYPSPGVGHIVPMVQLAKVFLRHGCDVTMVIAEPAASSPDFRIVDLDRVAASNPAITFHVLPPVPYADLAVPGKHHFLLTLQVLRRYNGELERFLRSVPRERLHSLVVGMFCTDAVDVGAKLGVPVYTFFASAAATLAVVAQLPALLSGRRAGLKELGDTPLQFLGVPPFPASHLVRELLEHPDDDELCKTMVDVWKRCTDGSGVLVNTFESLESPAVQALRDPRCVPGRVLPPVYCVGPLIGGDGGTRAAAEQERAAETRHECLAWLDEQPENSVVFLCFGSRCAHSAEQLRGIAVGLERSGQRFLWSVRTPAGTDGGSENLGALFPEGFLQRTKDRGLVVRSWAPQVEVLRHPSTGAFMTHCGWNSTLEAITAGVPMLCWPFYAEQLMNKVFVTEGMGVGVEMEGYTTGFIKSEEVEAKVRLVMESEEGRHLRGRAVALKNEAQAALRDDGPSETSFARFLFDAKNLQGHLGHGSE

SEQ ID NO: 18682 - protein, 466 aa, Zea mays subsp. mays
  misc_feature (1)..(466): Ceres Seq. ID no. 12366479
MVQLAKVFLRHGCDVTMVIAEPAASSPDFRIVDLDRVAASNPAITFHVLPPVPYADLAVPGKHHFLLTLQVLRRYNGELERFLRSVPRERLHSLVVGMFCTDAVDVGAKLGVPVYTFFASAAATLAVVAQLPALLSGRRAGLKELGDTPLQFLGVPPFPASHLVRELLEHPDDDELCKTMVDVWKRCTDGSGVLVNTFESLESPAVQALRDPRCVPGRVLPPVYCVGPLIGGDGGTRAAAEQERAAETRHECLAWLDEQPENSVVFLCFGSRCAHSAEQLRGIAVGLERSGQRFLWSVRTPAGTDGGSENLGALFPEGFLQRTKDRGLVVRSWAPQVEVLRHPSTGAFMTHCGWNSTLEAITAGVPMLCWPFYAEQLMNKVFVTEGMGVGVEMEGYTTGFIKSEEVEAKVRLVMESEEGRHLRGRAVALKNEAQAALRDDGPSETSFARFLFDAKNLQGHLGHGSE

SEQ ID NO: 18683 - protein, 450 aa, Zea mays subsp. mays
  misc_feature (1)..(450): Ceres Seq. ID no. 12366480
MVIAEPAASSPDFRIVDLDRVAASNPAITFHVLPPVPYADLAVPGKHHFLLTLQVLRRYNGELERFLRSVPRERLHSLVVGMFCTDAVDVGAKLGVPVYTFFASAAATLAVVAQLPALLSGRRAGLKELGDTPLQFLGVPPFPASHLVRELLEHPDDDELCKTMVDVWKRCTDGSGVLVNTFESLESPAVQALRDPRCVPGRVLPPVYCVGPLIGGDGGTRAAAEQERAAETRHECLAWLDEQPENSVVFLCFGSRCAHSAEQLRGIAVGLERSGQRFLWSVRTPAGTDGGSENLGALFPEGFLQRTKDRGLVVRSWAPQVEVLRHPSTGAFMTHCGWNSTLEAITAGVPMLCWPFYAEQLMNKVFVTEGMGVGVEMEGYTTGFIKSEEVEAKVRLVMESEEGRHLRGRAVALKNEAQAALRDDGPSETSFARFLFDAKNLQGHLGHGSE

SEQ ID NO: 18684 - DNA, 1599 bp, Zea mays subsp. mays
  misc_feature (1)..(1599): Ceres Seq. ID no. 12366495
gcacgagaccattacctagaacatcctaatcgaaaaagctcagccgtcctgcatctggcgccggtgcaggcaatgaacacatatcacccccggatcacggacagacagctgaggaaagtgatgcgagggaagactacccggcaatggctactaccacgccagcagaggacgggtacagctggaggaagtacggacagaagcaggtgaagcacagcgagtacccgcgtagctacttcaagtgcacgcatcccaactgcctggtgaagaagaaggtcgagcgctcgcacgaggggcacatcacggagatcatctacaagggcgcgcacaaccacccgaagcccacgcagagccgccgtccaggcgtccagcccgtgcacccgtttggcgacagtgcgcaggcggacgcagccgacaacctggggtcacaggcaaacgcagtggacgccaaccagccgaggcgtgcgggtgttcaggatggcatggacgcgacgtcgtcgccctcagttcccattgagcgctgtgactcgccggcctcgatgcaggtcgactcggcagccccggtttggatcccccgagggcgcggatgtgacgtctgtgtccgacgaggtgggcggggacgacagggtgactcgtggcagtatgtctcagggcggtgccgacgcggagggtgacgagctggaatgtaaacgaaggaagctggagtcgtacgccatcgatatgagcaccgcgtcgagagctgttcgcgagcctcgcgtggtgatccagacgacgagcgaggtggacatcctagatgacggctaccgctggcgcaagtacggccagaaggtcgtcaagggcaacccgaatccaaggagctactacaagtgcacgtacccgggctgcgtggtgcggaagcacgtggagcgcgcgtcgcacgacctcaagtccgtgatcaccacgtacgagggcaggcacaaccacgaggtccccgccgccaggaacagcggccacccgggcaccgcggcggcgacaggcgcgggtggcccgcgcaggctggagcacccgtcgctgcgcgacggcctgatggggcacttgggcggctgcggcgtgccgttcggcctgccgccgcctagggatccgctggcgccgatgggcaattacccgacgtatgcctcctccattccccttggcggcgccggccccacgtcactgccgagcctgccggtgccggcggggaccctcancgccgtcgatgggctgaagctcccgatgctggcgccgtcgtccctgcagcagcacccgctgctgaggcaccggcaggcgatgcaggccgctggcctcgtggcgcccaaggacgacgtgaaggtcgagggcaacgttgccggcggcgctgccccgtcggtgtaccagcagatgatgtgcagcgggctgcggttgcgccagcagatgtagatacataaataaatgtggagaggattagtgattctcaagttattagtttcttaccagtcgtattaggatgagttcgtgataattgttataacgtgggaacaaacacccgttgctttctgtttttttttcacccttccacttcatttttagctcagcaactatttattt

SEQ ID NO: 18685 - protein, 318 aa, Zea mays subsp. mays
  misc_feature (1)..(318): Ceres Seq. ID no. 12366496
  misc_feature (250)..(250): Xaa is any aa, unknown or other
MAWTRRRRPQFPLSAVTRRPRCRSTRQPRFGSPEGADVTSVSDEVGGDDRVTRGSMSQGGADAEGDELECKRRKLESYAIDMSTASRAVREPRVVIQTTSEVDILDDGYRWRKYGQKVVKGNPNPRSYYKCTYPGCVVRKHVERASHDLKSVITTYEGRHNHEVPAARNSGHPGTAAATGAGGPRRLEHPSLRDGLMGHLGGCGVPFGLPPPRDPLAPMGNYPTYASSIPLGGAGPTSLPSLPVPAGTLXAVDGLKLPMLAPSSLQQHPLLRHRQAMQAAGLVAPKDDVKVEGNVAGGAAPSVYQQMMCSGLRLRQQM

SEQ ID NO: 18686 - protein, 263 aa, Zea mays subsp. mays
  misc_feature (1)..(263): Ceres Seq. ID no. 12366497
  misc_feature (195)..(195): Xaa is any aa, unknown or other
MSQGGADAEGDELECKRRKLESYAIDMSTASRAVREPRVVIQTTSEVDILDDGYRWRKYGQKVVKGNPNPRSYYKCTYPGCVVRKHVERASHDLKSVITTYEGRHNHEVPAARNSGHPGTAAATGAGGPRRLEHPSLRDGLMGHLGGCGVPFGLPPPRDPLAPMGNYPTYASSIPLGGAGPTSLPSLPVPAGTLXAVDGLKLPMLAPSSLQQHPLLRHRQAMQAAGLVAPKDDVKVEGNVAGGAAPSVYQQMMCSGLRLRQQM

SEQ ID NO: 18687 - protein, 237 aa, Zea mays subsp. mays
  misc_feature (1)..(237): Ceres Seq. ID no. 12366498
  misc_feature (169)..(169): Xaa is any aa, unknown or other
MSTASRAVREPRVVIQTTSEVDILDDGYRWRKYGQKVVKGNPNPRSYYKCTYPGCVVRKHVERASHDLKSVITTYEGRHNHEVPAARNSGHPGTAAATGAGGPRRLEHPSLRDGLMGHLGGCGVPFGLPPPRDPLAPMGNYPTYASSIPLGGAGPTSLPSLPVPAGTLXAVDGLKLPMLAPSSLQQHPLLRHRQAMQAAGLVAPKDDVKVEGNVAGGAAPSVYQQMMCSGLRLRQQM

SEQ ID NO: 18688 - DNA, 1492 bp, Zea mays subsp. mays
  misc_feature (1)..(1492): Ceres Seq. ID no. 12366507
atccaccagcagctagcgtagcgagcgatggccaccgaactccggtcgccgctcctcccgccgccgccgcagcgacgactaagcccgcgggcagccgcgtgggcggcgctcgccgtctcggcgacggtcctgctcctccccttcctgatcggcagcagaagcaccaccaccagcaccagcagcacgagacacccccggccccgatcctccccaccatccaaccccgtggagctgaccctcctgaccgccgccagcgacaagggcgcggtgtgcctggacgggagccccccgggctaccacctgcaggcggggtccggcgccgggtccggcagctggctcatccatctcatggggggcggctggtgcgacaccgtccgcagctgctccgaccgcaggacgacctacctcggctcgtccctcttcatgcagaaagtcatggacttcactggcattctcagcaacgacccggcacagaatcctgatttctacagctggaacagagtgttcgttaggtactgcgacggggcatcgttttcgggggattcccagcgcgaggctgggcctgggaacggcacgctcttcttcagaggcctgcgcatctgggaggcagtcctcgacgagctcatgcacaagggcctcgcgcattccaaacaggccttgctcacaggttgttccgctggtggtctggccacgctgctgcactgcgacgattttcgcgcacggtttccccctgaggttcctgtgaaatgcctctccgatgccgggttctttgttgacgcgaaggatttgtcagggcagcgctccatgcgttctgtgtacagcggagttgttcatcttcagaacgttactaaagttttgcccaaggactgcctcctcgcaaacaaggacgatcccacgcagtgtttcttcccggcggagcttgttaagagcatcagcacgcccacgttgatcgtaaactctgcttacgactcttggcaggtacggtttgtcgttgcgccagacaggtcgtctcccgacgagtcatggcgcggctgcagagacgacgttcgcagatgcaattcctcccagatccaagtcctcaatgcatttaggaagacgatggtagatgacctcgtcgaggctgccgacggcaccaacagcagctggttcatcgactcttgcttcacacattgtcagactatcttcgacagctcaggatggaactcagcggccgcgccgaggatcgggaacaagacactgacggaggtgatcggggactggtactttggtaggagcccgagcccggtggtgaggcaggttggctgcgagtatccatgcaaccccacatgcaataggcagccaccagttgccggcttctacaacaaagctcttccgccgcgtgaacaagcgaacattcttgtattgggatgaaacatacaagtaaacggatgaaacatacaagtaaatgttgggtgtgtcctctacagctggtcatcagtgaccggattgggcc

SEQ ID NO: 18689 - protein, 460 aa, Zea mays subsp. mays
  misc_feature (1)..(460): Ceres Seq. ID no. 12366508
MATELRSPLLPPPPQRRLSPRAAAWAALAVSATVLLLPFLIGSRSTTTSTSSTRHPRPRSSPPSNPVELTLLTAASDKGAVCLDGSPPGYHLQAGSGAGSGSWLIHLMGGGWCDTVRSCSDRRTTYLGSSLFMQKVMDFTGILSNDPAQNPDFYSWNRVFVRYCDGASFSGDSQREAGPGNGTLFFRGLRIWEAVLDELMHKGLAHSKQALLTGCSAGGLATLLHCDDFRARFPPEVPVKCLSDAGFFVDAKDLSGQRSMRSVYSGVVHLQNVTKVLPKDCLLANKDDPTQCFFPAELVKSISTPTLIVNSAYDSWQVRFVVAPDRSSPDESWRGCRDDVRRCNSSQIQVLNAFRKTMVDDLVEAADGTNSSWFIDSCFTHCQTIFDSSGWNSAAAPRIGNKTLTEVIGDWYFGRSPSPVVRQVGCEYPCNPTCNRQPPVAGFYNKALPPREQANILVLG

SEQ ID NO: 18690 - protein, 353 aa, Zea mays subsp. mays
  misc_feature (1)..(353): Ceres Seq. ID no. 12366509
MGGGWCDTVRSCSDRRTTYLGSSLFMQKVMDFTGILSNDPAQNPDFYSWNRVFVRYCDGASFSGDSQREAGPGNGTLFFRGLRIWEAVLDELMHKGLAHSKQALLTGCSAGGLATLLHCDDFRARFPPEVPVKCLSDAGFFVDAKDLSGQRSMRSVYSGVVHLQNVTKVLPKDCLLANKDDPTQCFFPAELVKSISTPTLIVNSAYDSWQVRFVVAPDRSSPDESWRGCRDDVRRCNSSQIQVLNAFRKTMVDDLVEAADGTNSSWFIDSCFTHCQTIFDSSGWNSAAAPRIGNKTLTEVIGDWYFGRSPSPVVRQVGCEYPCNPTCNRQPPVAGFYNKALPPREQANILVLG

SEQ ID NO: 18691 - protein, 328 aa, Zea mays subsp. mays
  misc_feature (1)..(328): Ceres Seq. ID no. 12366510
MQKVMDFTGILSNDPAQNPDFYSWNRVFVRYCDGASFSGDSQREAGPGNGTLFFRGLRIWEAVLDELMHKGLAHSKQALLTGCSAGGLATLLHCDDFRARFPPEVPVKCLSDAGFFVDAKDLSGQRSMRSVYSGVVHLQNVTKVLPKDCLLANKDDPTQCFFPAELVKSISTPTLIVNSAYDSWQVRFVVAPDRSSPDESWRGCRDDVRRCNSSQIQVLNAFRKTMVDDLVEAADGTNSSWFIDSCFTHCQTIFDSSGWNSAAAPRIGNKTLTEVIGDWYFGRSPSPVVRQVGCEYPCNPTCNRQPPVAGFYNKALPPREQANILVLG

SEQ ID NO: 18692 - DNA, 1486 bp, Zea mays subsp. mays
  misc_feature (1)..(1486): Ceres Seq. ID no. 12366543
aataataaaaagattctcgattcgatttactcgccaattttcagtgagcggcggcgatcggcttcggatcggcgcagcgcggcggagcggagatggttgccgtggcggtggatggcctgatccgcggtgcggacgccgtgccggcggcggagagggaagcggtgagggcggcagctgcggaggcggcggccaagggcggtgagggggaatcggggaaggaggaggtgagggagtatgagagcgacatgaggaagctggaggagctgctttctaagctgaacccctcggcggaggagttcgtgccgcagtcccgccgccgcgtggacggcggcgctccccgcctttcggccgacgcgcccgtgttcgtgtcgccggcgatcgactactacgcgcgccaccaccagctcccgccgccgccgcttctgcagcagcagcagccgatgcacgtgctgcagtttgtgggtggcgtcggcggggttggcatgggtggcggcggggggatggactccagcagcgacggatccgccaatggtcagccgaatcgacggagaaggaacggtttcatccaggggaggagaaggatgatgggtgcccggcctcgtcgagctgacagggaggatagtgtcggcggacagtctatgtctctgacgttgatcagcatgtaactgaacagaaacttgctgaagttttttcaacctgtggacaggtggtagattgccgtatctgtggtgatcctaactcagtgcttcgttttgcttttatcgagtttgctgatgacgttgctgcacaagcagcactagcacttggtggaaccgtgcttggcttttatcctgtcaaggttctgccatcaaagacagcaattttacctgtgaaccctaaatttcttcctcacactgatgatgagaaagaaatggtatccaggactgtgtattgtactaacattgacaagaagatcgcagaagatgaagtgaagcaattctttgagggaacatgtggtgaagtttctcgtctgaggctacttggtgattatgtgcactccacatgcatcgcttttgttgagtttgtccaagcagatagtgctattctcgctctgaactgcagtggcattgttcttggaacgcttcctgttagggtgagcccatcaaagacaccagtccgctcgcgatcgccccgtgtgacgtcatactgaattcggctcatctgaagccgtcgtccagggcagcaaatttctgggcaacaaagccctagtcgtgtggccttagagactgccgcatcgcggataagtaattgtcgttgagcagagttctcgttggttaaagtccagtctagtaggaggcgcagagacccgtctgtatggtcgctgggagatctatcttgacctcctttttctgttctttttggtcttagttatcgtggttggattctatagcagccttgacaggcattcgaacaacaatgtttatggttatcctatccgctttggact

SEQ ID NO: 18693 - protein, 190 aa, Zea mays subsp. mays
  misc_feature (1)..(190): Ceres Seq. ID no. 12366544
MVAVAVDGLIRGADAVPAAEREAVRAAAAEAAAKGGEGESGKEEVREYESDMRKLEELLSKLNPSAEEFVPQSRRRVDGGAPRLSADAPVFVSPAIDYYARHHQLPPPPLLQQQQPMHVLQFVGGVGGVGMGGGGGMDSSSDGSANGQPNRRRRNGFIQGRRRMMGARPRRADREDSVGGQSMSLTLISM

SEQ ID NO: 18694 - protein, 139 aa, Zea mays subsp. mays
  misc_feature (1)..(139): Ceres Seq. ID no. 12366545
MRKLEELLSKLNPSAEEFVPQSRRRVDGGAPRLSADAPVFVSPAIDYYARHHQLPPPPLLQQQQPMHVLQFVGGVGGVGMGGGGGMDSSSDGSANGQPNRRRRNGFIQGRRRMMGARPRRADREDSVGGQSMSLTLISM

SEQ ID NO: 18695 - DNA, 1319 bp, Zea mays subsp. mays
  misc_feature (1)..(1319): Ceres Seq. ID no. 12366624
ctcaaagctagctcagaccaataatcagctcttctcctcctagcttgatctctccaatcaagctctctctctctctctctctctcaacacataccaaacttccactcctcctagatagctagctactagctagacagaaatcccccatgtaattggagagagaacttatgtgttctatgatagattagatatgatgcttctctagctcatcagatcaaattagtactcgaccgataccaagttaattaagaagaagttctctcagcgaagaggcgcgtcaagctggcgaaccggtggtggagcgtgcccggtcacttgggcctgccggagcagccgtccggcggccccaaccccaagacggagcccccggccatgaaggatccggagcccagcagcccggcagtcggcgcgccgggcgaccacggagccgatgagaccaacgagtccggtggcgccgtggtggcggcgcccagccggcggcctcgcggacgcccgccggggtccaagaacaagcccaagccgcccatcttcgtcacgcgcgacagccccaacgcgctgcgcagccacgtcatggaggtggcgggcggcgccgatgtggcggacgccatcgcgcagttctcgcgccgccgccagcgcggtgtctgcgtgctcagcggcgccgggaccgtcgccaacgtggcgctgcggcaaccgtccgcgcccacggccgtggtcgcgctccgcggccgcttcgagatcctctcgcttaccggcaccttcctgcccggccccgcgccgccggggtccacggggctcaccgtgtacctggccgggggccaggggcaggtggttggcggcagcgttgtaggcaccctcatcgccgccggcccggtcatggtgatcgcgtccacgttcgccaacgcaacctacgagcgccttccgctcgaagaggaggatgaagggccagctccaccgatggcgtccggcggcggcgccgatccgctcatgggtggaggcctcggcatcgccgacccgtcagcgctgcccatgttcaacttgccgccgagcaacgggcagcttggaggcggcgacggcttcccgtcatgggcgcacccgcggccaccgtactgatgatcctgatgcgcccaaggtcgagcacagttgctagaatgcaatggcgaatgctgtgcgtgcactgcatggtcgttactgttccattggagacgacgacggccggatcggagtggcgcgccattagtaggttagtacatatgatgaagtgtggccgtcgtccctagtgctactttgttgccgtgcaataatcagatgtcgttggtctc

SEQ ID NO: 18696 - protein, 245 aa, Zea mays subsp. mays
  misc_feature (1)..(245): Ceres Seq. ID no. 12366625
MKDPEPSSPAVGAPGDHGADETNESGGAVVAAPSRRPRGRPPGSKNKPKPPIFVTRDSPNALRSHVMEVAGGADVADAIAQFSRRRQRGVCVLSGAGTVANVALRQPSAPTAVVALRGRFEILSLTGTFLPGPAPPGSTGLTVYLAGGQGQVVGGSVVGTLIAAGPVMVIASTFANATYERLPLEEEDEGPAPPMASGGGADPLMGGGLGIADPSALPMFNLPPSNGQLGGGDGFPSWAHPRPPY

SEQ ID NO: 18697 - protein, 179 aa, Zea mays subsp. mays
  misc_feature (1)..(179): Ceres Seq. ID no. 12366626
MEVAGGADVADAIAQFSRRRQRGVCVLSGAGTVANVALRQPSAPTAVVALRGRFEILSLTGTFLPGPAPPGSTGLTVYLAGGQGQVVGGSVVGTLIAAGPVMVIASTFANATYERLPLEEEDEGPAPPMASGGGADPLMGGGLGIADPSALPMFNLPPSNGQLGGGDGFPSWAHPRPPY

SEQ ID NO: 18698 - protein, 138 aa, Zea mays subsp. mays
  misc_feature (1)..(138): Ceres Seq. ID no. 12366627
MRPTSPVAPWWRRPAGGLADARRGPRTSPSRPSSSRATAPTRCAATSWRWRAAPMWRTPSRSSRAAASAVSACSAAPGPSPTWRCGNRPRPRPWSRSAAASRSSRLPAPSCPAPRRRGPRGSPCTWPGARGRWLAAAL

SEQ ID NO: 18699 - DNA, 1246 bp, Zea mays subsp. mays
  misc_feature (1)..(1246): Ceres Seq. ID no. 12366640
gcacgagaccattacctagaacatcctaatcgaaaatcgacacacagatcgaacttctcctgtcgtctgcctaccagtagctagctctaatacatagcagccctcgctcgcaaggtactgcactacgatggccgccacctcctcctcctcctcctccacggtagttgcacttgcggcgcttctcttcttgctccttgtaacgtgtggctcgtgcgcgagaccggcgagctttaacgcctccgactttaccgccgaccccaactgggaggctgcccgggccacctggtacggtgcgcccaccggcgccggccctgatgacgacggtggtgcctgtggattcaagaacgtgaacctgccgccgttctcggcgatgacatcgtgcggcaacgagcccctcttcaaggacggcaagggctgcggctcctgctaccagatacgatgccaaaaccacccagcctgctccggcaatccggagacggtgatcatcaccgacatgaactactaccccgtggccaagtaccacttcgacctcagcggcacggcgttcggcgccatggccaagcccggccgcaccgacgagctccgccacgccggcatcatcgacatccagttcaagagggtgccctgcaactaccccgggcagaaggtgacgttccacatcgaggaggggtccaacccggtgtacctggcggtgctcgtcgagttcgaggacggcgacggcgacgtggtgcaggtggacctcatggaggccaactccgggtcgtggacgccgatgcgcgagtcgtgggggtccatctggcggctggactccggccaccgcctcgccgcgcccttctccctgcgcatcaccaacgagtccggcaagacgctggtggccaaccaggtcatcccggccaactgggttcccaacacctactaccgttccatcatccagtactagctctcggcggccgccgcgcaccacgatagctctgcgtccttgtgcttgattagtttggtagtgctattgtattgctgcatatgcagcatgggactgatgagcactgtgcgaggtgcctcagtcgattattactggtagatggtggtggcgtgcgcgcggccttcacggcggagttggagactgggaacgaaatggaggaaggccaagttaatttgcagatgctttcccgcccattgtccatgcatgtaatgtaccagggcgattgaaattataaattattaatggtgtgtttgttttgtggagtcg

SEQ ID NO: 18700 - protein, 270 aa, Zea mays subsp. mays
  misc_feature (1)..(270): Ceres Seq. ID no. 12366641
MAATSSSSSSTVVALAALLFLLLVTCGSCARPASFNASDFTADPNWEAARATWYGAPTGAGPDDDGGACGFKNVNLPPFSAMTSCGNEPLFKDGKGCGSCYQIRCQNHPACSGNPETVIITDMNYYPVAKYHFDLSGTAFGAMAKPGRTDELRHAGIIDIQFKRVPCNYPGQKVTFHIEEGSNPVYLAVLVEFEDGDGDVVQVDLMEANSGSWTPMRESWGSIWRLDSGHRLAAPFSLRITNESGKTLVANQVIPANWVPNTYYRSIIQY

SEQ ID NO: 18701 - protein, 189 aa, Zea mays subsp. mays
  misc_feature (1)..(189): Ceres Seq. ID no. 12366642
MTSCGNEPLFKDGKGCGSCYQIRCQNHPACSGNPETVIITDMNYYPVAKYHFDLSGTAFGAMAKPGRTDELRHAGIIDIQFKRVPCNYPGQKVTFHIEEGSNPVYLAVLVEFEDGDGDVVQVDLMEANSGSWTPMRESWGSIWRLDSGHRLAAPFSLRITNESGKTLVANQVIPANWVPNTYYRSIIQY

SEQ ID NO: 18702 - protein, 176 aa, Zea mays subsp. mays
  misc_feature (1)..(176): Ceres Seq. ID no. 12366643
MPKPPSLLRQSGDGDHHRHELLPRGQVPLRPQRHGVRRHGQARPHRRAPPRRHHRHPVQEGALQLPRAEGDVPHRGGVQPGVPGGARRVRGRRRRRGAGGPHGGQLRVVDADARVVGVHLAAGLRPPPRRALLPAHHQRVRQDAGGQPGHPGQLGSQHLLPFHHPVLALGGRRAPR

SEQ ID NO: 18703 - DNA, 1266 bp, Zea mays subsp. mays
  misc_feature (1)..(1266): Ceres Seq. ID no. 12366644
acacactcgctctgctactagctactagcagtagagcagtagaggagagagcatctacctagcgccgtcggacggatcggagctacctcaccgccgaccgcgcgcgaagagatcgatggctcatgctgctacgctcgctgctgcagccgcggtcgtcgtcctcatcgtcgtctgctgctgctcctcttcggaggccgccagccacagcgccaacgcgaggcagccgccgctggcgcccggcctgtccttggacttctacaagcggagctgcgcccagggcggagtccgtcgtgcggaggttcgtgcaggacgccgtgcgcagggacgccggcctcgccgccggcctcctccgcctccacttccacgactgcttcgtccagggctgcgacgcgtccgtgctcctggacggctcagccaccggccccgggcgagcagcaggcgccgcccaacctcacgctgcgccccaccgcgttcaaggccatcaacgacatccacgaccgcctccagaaggagtgcggtggcgcagtcgtgtcctgctccgacgtcctcgcgctcgccgccagggactcagtcgtcgtgtccggaggtcccagctacaaggtgccgctgggtcggcgcgacagcgcgagcttcgcgacgcgagaggacgtcctgagcgggctcccgccgccgacggccgccgtgccggcgcttctcgccgtgctgtcaacctggacgcgacggacctggtggcgctgtcgggcggccacaccatcgggctgggccactgcgcgtccttcgagagccgcctgttcccgcgccaggacccgacgctgaacgccaccttcgccggccacctgcgccggacctgcccggccaagggcaccgaccgccggacgccgctggacgtgcgcacgcccgacgcgttcgacaacaagtactacgtcaacctggtgaaccgtgaggggctcttcacctccgaccaggacctcttcagcaaccccggcaccaggcccctcgtcgagaagttcgcgcgcagccagagagacttcttcgaccagttcgccttctccgtggtgaagatggggcagatcaaggtgctcacgggcgcgcaggggcagatccgcaggaactgctccgcccgcaacgcaggcatgacgtggtccgtcgtcgacgaggctgcacagcagagcttcgtgttctagactttgtacgtactagctggctactgtgtgggcggcggtgtcctgtcaacagaacagatagctagcagtagcactggacggc

SEQ ID NO: 18704 - protein, 353 aa, Zea mays subsp. mays
  misc_feature (1)..(353): Ceres Seq. ID no. 12366645
MLLRSLLQPRSSSSSSSAAAPLRRPPATAPTRGSRRWRPACPWTSTSGAAPRAESVVRRFVQDAVRRDAGLAAGLLRLHFHDCFVQGCDASVLLDGSATGPGRAAGAAQPHAAPHRVQGHQRHPRPPPEGVRWRSRVLLRRPRARRQGLSRRVRRSQLQGAAGSARQRELRDARGRPERAPAADGRRAGASRRAVNLDATDLVALSGGHTIGLGHCASFESRLFPRQDPTLNATFAGHLRRTCPAKGTDRRTPLDVRTPDAFDNKYYVNLVNREGLFTSDQDLFSNPGTRPLVEKFARSQRDFFDQFAFSVVKMGQIKVLTGAQGQIRRNCSARNAGMTWSVVDEAAQQSFVF

SEQ ID NO: 18705 - protein, 179 aa, Zea mays subsp. mays
  misc_feature (1)..(179): Ceres Seq. ID no. 12366646
MAHAATLAAAAAVVVLIVVCCCSSSEAASHSANARQPPLAPGLSLDFYKRSCAQGGVRRAEVRAGRRAQGRRPRRRPPPPPLPRLLRPGLRRVRAPGRLSHRPRASSRRRPTSRCAPPRSRPSTTSTTASRRSAVAQSCPAPTSSRSPPGTQSSCPEVPATRCRWVGATARASRRERTS

SEQ ID NO: 18706 - DNA, 1397 bp, Zea mays subsp. mays
  misc_feature (1)..(1397): Ceres Seq. ID no. 12366678
aactcactcatcgtcagtcagtcgtcacagtactcgatcgagcgcgatctgatctctttccgagcaatcatccgttctagcgtagtagagcgcatggacatggcctcgtcctctgcatcagcagctctcctcctggctgtctccctcgccgctctgcacttgtgctgccgccatgggcacggtgccggcgacgccgccggcaacggcatcactgccatctacagcctcggcgactccatcactgacaccgggaacctcgtcaaggaggcgcctccgggcatgttcgagaccatcaagcacctcccctacggcgtcacgttcgggtacccgaccgggcggtgctccgacggcctcctcatgatcgacttcctggctcaggacctgggtctcccgttcctgaacccgtacctgggcaagaacaagagcttcgaccacggcgtcaacttcgccgtcgccggagccaccgccgtggacccggccgaccagttcaacctccccgccgtccccgtgccgttcgcctccaagtccctcaaggtgcagctccggtggttcaaggacttcctcaagtacaccttcggcaccgatgaagagattcgcagacggcttcaagcttctctggttttggtcggggagatcggcgggaacgactacaactacgccttcttccaggccaagcctgtggccgaggtggagaagctcatcccaggggtcgtgaagaccatcgtcggcgccgccaaggaggtgctggacatgggcgccaccagggtcatcgtcccgggcaacttccccatcggctgcgtgccgggctacctggccatgaacgccgcctcgtcggagccggcggactacgactcggcggggtgcctccgggagctcaacgacttcgccgccaagcacaactcgcggctccggcgcgccgtcgccgacctgcaggcgtcgtacccgggcgccgccgtcgcctacgccgactacttcgactccttcctcaccctcctccacaacgcctcctcgttcggtttcgacgccgcgagcacgcgcaaggcctgctgcggcgccggtgccggcgagtacaacttcgactggcggcggatgtgcggcttcccggggacggcggcgtgcgctgacccgtccacgtacctgagctgggacggcatacacatgacgcaggcggcgtacagggccatgtccaggctcatctaccacggcaagtacctgcagccacagatactgagcttcccggagaaaaacgggcagacataaactcacgtcgtcatcatatatagaacttagttagaaaatatactcgaaacaccggctacaaataagctgtcagtagtcagctgtatcggtaagtacatgcgcgctgttcaactaatgctatcatcaagctgtgagcc

SEQ ID NO: 18707 - protein, 419 aa, Zea mays subsp. mays
  misc_feature (1)..(419): Ceres Seq. ID no. 12366679
NSLIVSQSSQYSIERDLISFRAIIRSSVVERMDMASSSASAALLLAVSLAALHLCCRHGHGAGDAAGNGITAIYSLGDSITDTGNLVKEAPPGMFETIKHLPYGVTFGYPTGRCSDGLLMIDFLAQDLGLPFLNPYLGKNKSFDHGVNFAVAGATAVDPADQFNLPAVPVPFASKSLKVQLRWFKDFLKYTFGTDEEIRRRLQASLVLVGEIGGNDYNYAFFQAKPVAEVEKLIPGVVKTIVGAAKEVLDMGATRVIVPGNFPIGCVPGYLAMNAASSEPADYDSAGCLRELNDFAAKHNSRLRRAVADLQASYPGAAVAYADYFDSFLTLLHNASSFGFDAASTRKACCGAGAGEYNFDWRRMCGFPGTAACADPSTYLSWDGIHMTQAAYRAMSRLIYHGKYLQPQILSFPEKNGQT

SEQ ID NO: 18708 - protein, 388 aa, Zea mays subsp. mays
  misc_feature (1)..(388): Ceres Seq. ID no. 12366680
MDMASSSASAALLLAVSLAALHLCCRHGHGAGDAAGNGITAIYSLGDSITDTGNLVKEAPPGMFETIKHLPYGVTFGYPTGRCSDGLLMIDFLAQDLGLPFLNPYLGKNKSFDHGVNFAVAGATAVDPADQFNLPAVPVPFASKSLKVQLRWFKDFLKYTFGTDEEIRRRLQASLVLVGEIGGNDYNYAFFQAKPVAEVEKLIPGVVKTIVGAAKEVLDMGATRVIVPGNFPIGCVPGYLAMNAASSEPADYDSAGCLRELNDFAAKHNSRLRRAVADLQASYPGAAVAYADYFDSFLTLLHNASSFGFDAASTRKACCGAGAGEYNFDWRRMCGFPGTAACADPSTYLSWDGIHMTQAAYRAMSRLIYHGKYLQPQILSFPEKNGQT

SEQ ID NO: 18709 - protein, 386 aa, Zea mays subsp. mays
  misc_feature (1)..(386): Ceres Seq. ID no. 12366681
MASSSASAALLLAVSLAALHLCCRHGHGAGDAAGNGITAIYSLGDSITDTGNLVKEAPPGMFETIKHLPYGVTFGYPTGRCSDGLLMIDFLAQDLGLPFLNPYLGKNKSFDHGVNFAVAGATAVDPADQFNLPAVPVPFASKSLKVQLRWFKDFLKYTFGTDEEIRRRLQASLVLVGEIGGNDYNYAFFQAKPVAEVEKLIPGVVKTIVGAAKEVLDMGATRVIVPGNFPIGCVPGYLAMNAASSEPADYDSAGCLRELNDFAAKHNSRLRRAVADLQASYPGAAVAYADYFDSFLTLLHNASSFGFDAASTRKACCGAGAGEYNFDWRRMCGFPGTAACADPSTYLSWDGIHMTQAAYRAMSRLIYHGKYLQPQILSFPEKNGQT

SEQ ID NO: 18710 - DNA, 1251 bp, Zea mays subsp. mays
  misc_feature (1)..(1251): Ceres Seq. ID no. 12366718
gtcggaaaaaccatcatctaaagttcaacgcccgcaccgcaagcgcaacacgccaacacccgagacccgacgcggccttcgccttccctccgcgcgagggagattcgaggggagagaggttctcaccttcgcgcctgcggttgcttggcgcagagtcgtcgcagatggaccggtaccagagggtggagaagccgcgggaggagtcccctatcggcgccaacgagatccgcatcacggcgcagggccggccccgcaactacatcacctatgcgctcgccctggtccaggacaatgcaacagatgacattgtcatcaaggccatgggaagggcgatcaacaagacagttgccatcgtggagcttcttaagagaaggattgctggtctccatcagaatacctctattgaatccattgatataacagacacttgggagccattggaagaaggccttgtcactcttgagaccattcgccatgtgtccttaatcactattaaattgtcaaagaaggagctggatacatcatccccaggttaccagccgcccataccagctgaccaggtcaggccagcagctgactttgatcaggatgcagaggccgtaccaagtggtcgtggaagaggacgtggtcgtcgcagcaggggcaggggaaggggaagggggttcagcagtggagtagactatgatgatgagattggagagccagaggaggctccgcgtggatatcgtggcagagggaggggccgtggagggcgtggatcttttgcagttggaaggggctatggtggtgataattatgcgatggaagaagctggtagatatgatgatgatggatataacgcaccacctatgcaacgatatgaaggtggcagaggaaggggcagagggcgtggacgcggtcgtgggcggggaaggcaaggccatggacctcctccgcagcagtagattggttggcacatcacctttgggatgtcataacctccatttctttccataagataaatgttaccgtccattatattttttatctggttattaggttcatgttgaaagttgacatagtgactctagcgtggaggatgcggctagttaagatttggtagctaggttgttcgtccatttgcctatttattatctcagatcagacttggtgccgttccagttgtgcattgtagcctctttttaccatgaaagttagttcagaagattcttttatgttgttgcaaatcacagactgaaaacgtttgttttc

SEQ ID NO: 18711 - protein, 313 aa, Zea mays subsp. mays
  misc_feature (1)..(313): Ceres Seq. ID no. 12366719
RKNHHLKFNARTASATRQHPRPDAAFAFPPREGDSRGERFSPSRLRLLGAESSQMDRYQRVEKPREESPIGANEIRITAQGRPRNYITYALALVQDNATDDIVIKAMGRAINKTVAIVELLKRRIAGLHQNTSIESIDITDTWEPLEEGLVTLETIRHVSLITIKLSKKELDTSSPGYQPPIPADQVRPAADFDQDAEAVPSGRGRGRGRRSRGRGRGRGFSSGVDYDDEIGEPEEAPRGYRGRGRGRGGRGSFAVGRGYGGDNYAMEEAGRYDDDGYNAPPMQRYEGGRGRGRGRGRGRGRGRQGHGPPPQQ

SEQ ID NO: 18712 - protein, 259 aa, Zea mays subsp. mays
  misc_feature (1)..(259): Ceres Seq. ID no. 12366720
MDRYQRVEKPREESPIGANEIRITAQGRPRNYITYALALVQDNATDDIVIKAMGRAINKTVAIVELLKRRIAGLHQNTSIESIDITDTWEPLEEGLVTLETIRHVSLITIKLSKKELDTSSPGYQPPIPADQVRPAADFDQDAEAVPSGRGRGRGRRSRGRGRGRGFSSGVDYDDEIGEPEEAPRGYRGRGRGRGGRGSFAVGRGYGGDNYAMEEAGRYDDDGYNAPPMQRYEGGRGRGRGRGRGRGRGRQGHGPPPQQ

SEQ ID NO: 18713 - protein, 207 aa, Zea mays subsp. mays
  misc_feature (1)..(207): Ceres Seq. ID no. 12366721
MGRAINKTVAIVELLKRRIAGLHQNTSIESIDITDTWEPLEEGLVTLETIRHVSLITIKLSKKELDTSSPGYQPPIPADQVRPAADFDQDAEAVPSGRGRGRGRRSRGRGRGRGFSSGVDYDDEIGEPEEAPRGYRGRGRGRGGRGSFAVGRGYGGDNYAMEEAGRYDDDGYNAPPMQRYEGGRGRGRGRGRGRGRGRQGHGPPPQQ

SEQ ID NO: 18714 - DNA, 1520 bp, Zea mays subsp. mays
  misc_feature (1)..(1520): Ceres Seq. ID no. 12366737
atcgaaattcacggccggcctaacccaagccggtcctccccgactcccggcgacgaccaatttctccctgttctcgcccctccaacccttcatgatgcttagataatatacagtgctgggttttagcactgttttgagtttttaaattgagctaaggcttcagtgttagtcttgaaagatgaacggttcaagtggttcccaagggcatcatgtcagtggagagaagaagcaagtgtgtcatgttagccggcccattcttaacaatggaccgaagcaccgtccattgacccccatgaggcgatgccgtggtgtagcatgtgtagtgattatactgtcaacagcattcctgttggtagtttacttggctcctattactacttttgctgtgcggctgttcagtgtgcattacagccgaaaggcgacttcctttctatttggaatgtggttatctttatggccgttcttgtttgagaagataaacaaaaccaaggttgtcttctccggtgaaaatgtgcctccaaaacgacgtgtattgttatttgctaaccacaggaccgaggttgactggatgtacttgtgggatcttgcactgaggaaaggccatttaggatatatcaagtacatacttaagagcagcttgatgaagttgcctatttttagctgggcatttcacatttttgagtttatcccggtagaacggaaatgggagattgatgaagcaattattcagaacaagctatcaaaatttaagaacccgagagatcctatctggttggcggtttttcctgaaggcacggattatactgagaagaaatgcatcatgagtcaagagtatgcttcagaacatggccttgcctatgctagaacatgtcctccttccaaagacaaagggcttcatttgttgtttgcaagagctgaggagttccttagatgcagtttatgatgtcacaatagcatacaagcatcgactcccagattttctggacaatgtgtatggcgttgatccttctgaagtccacatccacgtcagaatggttcagctccatcacatccccacaacagaagacaagataacagaatggatggtagagaggtttaggcagaaggaccagctcctggcagatttcttcatgaaggggcactttcctgatgaaggaactgaaggagatctgtcgacgccgaagtgcctggcaaacttcttaacagtagtatgcttgacggccatctgtttgttacctattactccatactaccaccccaactgataggttcaccagagggtgatgtcaaggccaaaaaggttgtgtagatgttgatgtaacttgccatgaaaactgtacatccgcaaacgatttttactgctggagtttctgccttgtgacatttaaggttccctttctgcagtaggaggtatgaatgtatgatagtgcgtatgtaggaattttctgtgattcatcagtgtgtgagggccctatctgaaggcagtaaactgattttagatatatgttcttaacattttt

SEQ ID NO: 18715 - protein, 254 aa, Zea mays subsp. mays
  misc_feature (1)..(254): Ceres Seq. ID no. 12366738
MNGSSGSQGHHVSGEKKQVCHVSRPILNNGPKHRPLTPMRRCRGVACVVIILSTAFLLVVYLAPITTFAVRLFSVHYSRKATSFLFGMWLSLWPFLFEKINKTKVVFSGENVPPKRRVLLFANHRTEVDWMYLWDLALRKGHLGYIKYILKSSLMKLPIFSWAFHIFEFIPVERKWEIDEAIIQNKLSKFKNPRDPIWLAVFPEGTDYTEKKCIMSQEYASEHGLAYARTCPPSKDKGLHLLFARAEEFLRCSL

SEQ ID NO: 18716 - protein, 216 aa, Zea mays subsp. mays
  misc_feature (1)..(216): Ceres Seq. ID no. 12366739
MRRCRGVACVVIILSTAFLLVVYLAPITTFAVRLFSVHYSRKATSFLFGMWLSLWPFLFEKINKTKVVFSGENVPPKRRVLLFANHRTEVDWMYLWDLALRKGHLGYIKYILKSSLMKLPIFSWAFHIFEFIPVERKWEIDEAIIQNKLSKFKNPRDPIWLAVFPEGTDYTEKKCIMSQEYASEHGLAYARTCPPSKDKGLHLLFARAEEFLRCSL

SEQ ID NO: 18717 - protein, 167 aa, Zea mays subsp. mays
  misc_feature (1)..(167): Ceres Seq. ID no. 12366740
MWLSLWPFLFEKINKTKVVFSGENVPPKRRVLLFANHRTEVDWMYLWDLALRKGHLGYIKYILKSSLMKLPIFSWAFHIFEFIPVERKWEIDEAIIQNKLSKFKNPRDPIWLAVFPEGTDYTEKKCIMSQEYASEHGLAYARTCPPSKDKGLHLLFARAEEFLRCSL

SEQ ID NO: 18718 - DNA, 938 bp, Zea mays subsp. mays
  misc_feature (1)..(938): Ceres Seq. ID no. 12366741
attcacgcatcacaagctggaaggcactgtgggcaataatggctctgctcacgctccagcagccagcgatacccttcctcctgctcctcctcctgctccccgccgcgtccgctaggctgcccggtggccggacactggtcttcatcctggctgggcagtccaacatgagcggccgcggcggcgccaccaacggcacctgggacggcatcgtcccgccggagtgcgcgccctcggaccgcatcgtccgtctctcccccgccttcgctgggagcaggcgcgcgagccgctgcacgccggcgtcgacgtgggcaacgttctcggcgtcgggcccggcatgcccttcgcgcacgccgtgctcaccagcgagggcgcagccgcagagccccccgtcgtcgtcgggctcgtgccgtgcgcacagggcggcacgccgatcgccaactggtcccgggggacggagctgtacgagcggatggtgacgcgcgccagggcggccgtggccgagtgcagcggacgcggtcacctggccgccttgctttggtaccagggggaggcggacaccatgaggcgccaggatgctgagctctaccagcggcggatggagactctcgtgcgtgacgttcgctgcgacctcggccggcccgacctcctcgtcatccaggtgggcattgcaactgcgcagtacaatggcaagttcctcggcgtggtgagggaagctcagaaggcagtgaagctcccaaatgtcaagtacgttgatgccatggggctgcccatcgcgagcgaccacacgcatctcaccacggaggctcaagtccagctcggcaacaaactagccgagtcgtatttagaaacgctgtaattttcaaataccggtatgcctaccaaaaacaaggcattcccccacgatttggaaacggacagagcaagcaatatgtacactc

SEQ ID NO: 18719 - protein, 173 aa, Zea mays subsp. mays
  misc_feature (1)..(173): Ceres Seq. ID no. 12366742
MPFAHAVLTSEGAAAEPPVVVGLVPCAQGGTPIANWSRGTELYERMVTRARAAVAECSGRGHLAALLWYQGEADTMRRQDAELYQRRMETLVRDVRCDLGRPDLLVIQVGIATAQYNGKFLGVVREAQKAVKLPNVKYVDAMGLPIASDHTHLTTEAQVQLGNKLAESYLETL

SEQ ID NO: 18720 - protein, 157 aa, Zea mays subsp. mays
  misc_feature (1)..(157): Ceres Seq. ID no. 12366743
SRITSWKALWAIMALLTLQQPAIPFLLLLLLLPAASARLPGGRTLVFILAGQSNMSGRGGATNGTWDGIVPPECAPSDRIVRLSPAFAGSRRASRCTPASTWATFSASGPACPSRTPCSPARAQPQSPPSSSGSCRAHRAARRSPTGPGGRSCTSGW

SEQ ID NO: 18721 - protein, 145 aa, Zea mays subsp. mays
  misc_feature (1)..(145): Ceres Seq. ID no. 12366744
MALLTLQQPAIPFLLLLLLLPAASARLPGGRTLVFILAGQSNMSGRGGATNGTWDGIVPPECAPSDRIVRLSPAFAGSRRASRCTPASTWATFSASGPACPSRTPCSPARAQPQSPPSSSGSCRAHRAARRSPTGPGGRSCTSGW

SEQ ID NO: 18722 - DNA, 1294 bp, Zea mays subsp. mays
  misc_feature (1)..(1294): Ceres Seq. ID no. 12366762
gaagactacagcagtggtgttcaggaagcagagaggaataaattggttttcttcgagggcagttcatttaattttgacttggaggatttgttgagagcttctgctgaagtccttggcaaaggaagttatggaactacctacaaagctgttcttgaggatggaaccatagttgttgtcaagagattgaaggaagtggtggttagcaagaaggattttgaacagcagatggagataattggtagggttggccagcatcaaaatgtaattccattgcgggcttactattactccaaggatgagaagttgttggtgtttgattatgtcccatctggtagccttgctgctgttttgcatgggaataaagctgctggaagagcttcattgaactgggagacaagagtcaagatatctctggacgtggcccatggaatcgcccaccttcatgccgagggaggagggaagttcatccacggcaacatcaaagcatcgaacgtcctcctatcgcagaacctcgacggctgcgtctccgagttcggcctggcacagatcatgaccaccccacagaccccgccgcggcccgtcgggtaccgggcgcccgaagtcctcgagaacaagaaatcgacccagcagtccgacgtctacagcttcggcgtcctgctcctcgaaatgctcacgggaaaagcccccctcaggtctcccgggcgcgaggacccctccgtcgagcaccttccgaggtgggtgcagtccgtggtccgtgaggagtggaccgccgaggtcttcgacgtggacttgctacggcaccccaacgtcgaggacgagatggtccagatgctccaggtcgcgatggcgtgcgtggccgctcaccccgaggagcggcccaagatggaggaagtgatcaggagggtcacggaggtccggaattcttactcttctgggacgaggacgcccctggaggacaagccatcggagactgcacgagcgccatgagggggtacagcgtagtttagcaggagacggtagctaggttgcatagtggattccttacagagcttcagcaaagttgatagccacctgcatagcgcagtttccctcgcgattcccgatcgtttccagtaaatctgttgtgttgtttcctctcttttttttcccccttgattctagcggtctggttgtcgatccatgccattgtattgttgttcagttaaatcagcagctcttctggttagtgttgcactgtaatttgacataatctttgcagcgtgattaatgaatttaatttgccttctgtttctgc

SEQ ID NO: 18723 - protein, 328 aa, Zea mays subsp. mays
  misc_feature (1)..(328): Ceres Seq. ID no. 12366763
EDYSSGVQEAERNKLVFFEGSSFNFDLEDLLRASAEVLGKGSYGTTYKAVLEDGTIVVVKRLKEVVVSKKDFEQQMEIIGRVGQHQNVIPLRAYYYSKDEKLLVFDYVPSGSLAAVLHGNKAAGRASLNWETRVKISLDVAHGIAHLHAEGGGKFIHGNIKASNVLLSQNLDGCVSEFGLAQIMTTPQTPPRPVGYRAPEVLENKKSTQQSDVYSFGVLLLEMLTGKAPLRSPGREDPSVEHLPRWVQSVVREEWTAEVFDVDLLRHPNVEDEMVQMLQVAMACVAAHPEERPKMEEVIRRVTEVRNSYSSGTRTPLEDKPSETARAP

SEQ ID NO: 18724 - protein, 253 aa, Zea mays subsp. mays
  misc_feature (1)..(253): Ceres Seq. ID no. 12366764
MEIIGRVGQHQNVIPLRAYYYSKDEKLLVFDYVPSGSLAAVLHGNKAAGRASLNWETRVKISLDVAHGIAHLHAEGGGKFIHGNIKASNVLLSQNLDGCVSEFGLAQIMTTPQTPPRPVGYRAPEVLENKKSTQQSDVYSFGVLLLEMLTGKAPLRSPGREDPSVEHLPRWVQSVVREEWTAEVFDVDLLRHPNVEDEMVQMLQVAMACVAAHPEERPKMEEVIRRVTEVRNSYSSGTRTPLEDKPSETARAP

SEQ ID NO: 18725 - DNA, 1318 bp, Zea mays subsp. mays
  misc_feature (1)..(1318): Ceres Seq. ID no. 12366785
actgtggaagaaccgttgagctgagccgagcagggagaaggacgcgagagcagcatggagacggcggagaggggcaccaccgtgtgcgtgaccggcgcggggggctttgtggcatcgtggctcgtcaagctcctcctctccaccggccgctacaccgtccggggtaccgtgcgtcatctcggtgatggcaagaatgcccatcttaagacactggaagatgccggggagaggctgcagttggtcaaggctgacatgctggactatggcagcgttgcgtccgcggtcgccggctgtcagggtgtcttccatgtcgcgagccctgtcccctccggcaaatcctccaaccctgaggaagatgtcattgctcctgctgtaactggcacactgaatgtgttgaaagcttgctatgaggccaaagcgaagagagttgttgtggtatcttcagtggctgctgtgttcaataatcctgactggcctaagggcgaggcctttactgaggatagctggtcagatggggaatattgcagaaaaaatgaggaatggtatttcctttctaaaacattggcagaacatgaggcttttgcttatgcagccaaaactgggctagacattgtaactatttgcccatcattggtaattggacctttgttgcaacctgcagtaaatacaagtattaaagtcttcctcagttatatcaaaggagatcaggagatagttaaagatggacccaaaaatcttgtggatgttcgtgatgtcgctggtgcccttctgttggcttacgaaaatctgcaggcatctggacgatacctctgcagctcaccagcaataagagtctctgatattgtaaacatactgaagaccgaatatccaacatacacttaccctcaaaaattcgttgaagcagaaggtagcaacacatacaacacggagaagcttcggaagctagggtggacctctaggcccatggaggaaaccctccgggacagcatcgaatgctacagagctttgggcatcctgaactgagcttcccttcagctttgggctttggctgctgctgctgctgctacttttcagcttctttcttcttcatgtaaacagtgaatcagaaattcagaatacgctggtataggaactagagaagtggatcatggaagatgctgatgctaaaaatgaatttggatactatccatcatttgtgcctgcgggattgagggcaaattaattaagtacttatatttgtaaatctggggccgtcgaactgaaccaacaatgaagaggtgaagaacaaatcgaagtggtagatgagtgcattgctgtg

SEQ ID NO: 18726 - protein, 322 aa, Zea mays subsp. mays
  misc_feature (1)..(322): Ceres Seq. ID no. 12366786
METAERGTTVCVTGAGGFVASWLVKLLLSTGRYTVRGTVRHLGDGKNAHLKTLEDAGERLQLVKADMLDYGSVASAVAGCQGVFHVASPVPSGKSSNPEEDVIAPAVTGTLNVLKACYEAKAKRVVVVSSVAAVFNNPDWPKGEAFTEDSWSDGEYCRKNEEWYFLSKTLAEHEAFAYAAKTGLDIVTICPSLVIGPLLQPAVNTSIKVFLSYIKGDQEIVKDGPKNLVDVRDVAGALLLAYENLQASGRYLCSSPAIRVSDIVNILKTEYPTYTYPQKFVEAEGSNTYNTEKLRKLGWTSRPMEETLRDSIECYRALGILN

SEQ ID NO: 18727 - protein, 256 aa, Zea mays subsp. mays
  misc_feature (1)..(256): Ceres Seq. ID no. 12366787
MLDYGSVASAVAGCQGVFHVASPVPSGKSSNPEEDVIAPAVTGTLNVLKACYEAKAKRVVVVSSVAAVFNNPDWPKGEAFTEDSWSDGEYCRKNEEWYFLSKTLAEHEAFAYAAKTGLDIVTICPSLVIGPLLQPAVNTSIKVFLSYIKGDQEIVKDGPKNLVDVRDVAGALLLAYENLQASGRYLCSSPAIRVSDIVNILKTEYPTYTYPQKFVEAEGSNTYNTEKLRKLGWTSRPMEETLRDSIECYRALGILN

SEQ ID NO: 18728 - DNA, 1482 bp, Zea mays subsp. mays
  misc_feature (1)..(1482): Ceres Seq. ID no. 12366791
cagtaggtggaccattctgtcgtgctcacccaatgccaatggagtcggttgcggtcgtggcggtgccgttcccggcgcagggccaccttaacgcgctgctgcacctgtcgctgcagctggcggcgcgcggggtacccgtacactacgcggcgcccatggagcacgtccgccaggcccggtcgcgcgttcaaggctggggcgacgacaccctctgccgcgtacacttccacgagctctccgtctccgcgtacgcctccccgccgccagaccctgccgccgaatcggccttcccctcgcacctcgtgcccatgtgggaggccttcaccaccgacgcgcccgccccgctcgcggcgctcctcggcgggatctccgcctcctgccgccgcttcgtcgtcctgtacgacatcgccaacgggttcgccgccgaagaggccgcgcggctgcccaacggcgaggggttcgggctggtgtgcaccgcggtgtcgtgcatcgtcgggcggacggacgccggcagccggctcgtgcgtgagcgcgggctcgacttcttccccgtcaactcctttgtgacggaggagtttctggctaccgtcggcaagcgggcgagatgggcgcagtccataccgtgcagcgtcggcatcctcgccaacacctgccgcgcgctcgagggtgagttcatcgatattttcgcgcagcagcttgccgccgccggcaagaacctctttgtcgtcggccccttgaacccactactgctgccggacgcgaggtcgcccaagcatggaattagcaaggagcgccacgagtgcctggactggctcgacctgcagccgccggcatcggtggtctacgtgtcgttgggttctacgtcgtcgctgcgagacgagcaagtcgaggagctcgcatctgcgctgcgcgacagcaagcagcggttcatctgggtgctgcgcgacgccgaccgggccaacatattcgcggaccacggcgagagcccccggcacgccaagttcctgcccgagttcgctgaacacacccaggacagggggctggtgatcaccgggtgggcgccgcagctggagatcctggcgcacggcgccacggcggcgttcctgagccactgcggctggaactcgatcatggagagcatgggacacgggaagcccatcctcgcctggcccatgcactccgaccagccatgggacgctgagctcgtatgcaagcaccacaaggcgggcatcctgatccgcccgatggagaagcaaagggaggtgatttcggcagcggccatacaggaggcaatcgagaagatgatggtctctgatgaaggctacaagatccaacagcgcgcaatggcgctgggccaagctatccgtgcgtcagcagcagtaggcggtgggtcagagaacaaggacctggataagttcattgcccacatctcaaggtgatttggggatttctggttggtttgggaaatgtcaagcatatttc

SEQ ID NO: 18729 - protein, 478 aa, Zea mays subsp. mays
  misc_feature (1)..(478): Ceres Seq. ID no. 12366792
VGGPFCRAHPMPMESVAVVAVPFPAQGHLNALLHLSLQLAARGVPVHYAAPMEHVRQARSRVQGWGDDTLCRVHFHELSVSAYASPPPDPAAESAFPSHLVPMWEAFTTDAPAPLAALLGGISASCRRFVVLYDIANGFAAEEAARLPNGEGFGLVCTAVSCIVGRTDAGSRLVRERGLDFFPVNSFVTEEFLATVGKRARWAQSIPCSVGILANTCRALEGEFIDIFAQQLAAAGKNLFVVGPLNPLLLPDARSPKHGISKERHECLDWLDLQPPASVVYVSLGSTSSLRDEQVEELASALRDSKQRFIWVLRDADRANIFADHGESPRHAKFLPEFAEHTQDRGLVITGWAPQLEILAHGATAAFLSHCGWNSIMESMGHGKPILAWPMHSDQPWDAELVCKHHKAGILIRPMEKQREVISAAAIQEAIEKMMVSDEGYKIQQRAMALGQAIRASAAVGGGSENKDLDKFIAHISR

SEQ ID NO: 18730 - protein, 468 aa, Zea mays subsp. mays
  misc_feature (1)..(468): Ceres Seq. ID no. 12366793
MPMESVAVVAVPFPAQGHLNALLHLSLQLAARGVPVHYAAPMEHVRQARSRVQGWGDDTLCRVHFHELSVSAYASPPPDPAAESAFPSHLVPMWEAFTTDAPAPLAALLGGISASCRRFVVLYDIANGFAAEEAARLPNGEGFGLVCTAVSCIVGRTDAGSRLVRERGLDFFPVNSFVTEEFLATVGKRARWAQSIPCSVGILANTCRALEGEFIDIFAQQLAAAGKNLFVVGPLNPLLLPDARSPKHGISKERHECLDWLDLQPPASVVYVSLGSTSSLRDEQVEELASALRDSKQRFIWVLRDADRANIFADHGESPRHAKFLPEFAEHTQDRGLVITGWAPQLEILAHGATAAFLSHCGWNSIMESMGHGKPILAWPMHSDQPWDAELVCKHHKAGILIRPMEKQREVISAAAIQEAIEKMMVSDEGYKIQQRAMALGQAIRASAAVGGGSENKDLDKFIAHISR

SEQ ID NO: 18731 - protein, 466 aa, Zea mays subsp. mays
  misc_feature (1)..(466): Ceres Seq. ID no. 12366794
MESVAVVAVPFPAQGHLNALLHLSLQLAARGVPVHYAAPMEHVRQARSRVQGWGDDTLCRVHFHELSVSAYASPPPDPAAESAFPSHLVPMWEAFTTDAPAPLAALLGGISASCRRFVVLYDIANGFAAEEAARLPNGEGFGLVCTAVSCIVGRTDAGSRLVRERGLDFFPVNSFVTEEFLATVGKRARWAQSIPCSVGILANTCRALEGEFIDIFAQQLAAAGKNLFVVGPLNPLLLPDARSPKHGISKERHECLDWLDLQPPASVVYVSLGSTSSLRDEQVEELASALRDSKQRFIWVLRDADRANIFADHGESPRHAKFLPEFAEHTQDRGLVITGWAPQLEILAHGATAAFLSHCGWNSIMESMGHGKPILAWPMHSDQPWDAELVCKHHKAGILIRPMEKQREVISAAAIQEAIEKMMVSDEGYKIQQRAMALGQAIRASAAVGGGSENKDLDKFIAHISR

SEQ ID NO: 18732 - DNA, 1220 bp, Zea mays subsp. mays
  misc_feature (1)..(1220): Ceres Seq. ID no. 12366799
aattcacgattgagaaaccctcacctcttcccttccttggttcctccccaccgccgccaccgccggaaaaaaaaaaaatgggtgccgatggggaagaagcgtcgcggatagtcgtgccaatggcggtggaggggacctcggagcagctggcgttcgtggaggagtcgaagctgcagaagcgcaaggagaacgcggactgggccgtcaggaaccgggagcgcagggcggtaaagcgccagcgcatccgcgacgagcacaaggtcaccgtaaggcggcctgaggacttcgttgccgcgttccggaacaaggaacgcgacttcctgcggatgaggacccgcctcaaggtccgcaagcagccgcccgccgaggcgctcggctccaagctcgtcttcgcaattcgcatccctggctgcgtggacttgcatccgaacatcaggaaggtcttgaggaagctacggctgacgacggtcctcaccggcgtattcctcagggccaccgagctgacgctgaagaggcttcttgtggtcgaaccctttgtcacctacgggtttccaaacttgaagaacgtgaaagagcttatttacaagaagggccgtgggtttttcgacaaggagcctttccctcttaccagtaacgatctaattgagaaggctcttggagatcacggcatcatatgcttggaagacgttgtgcacgagatcgccacggttggccgcacttccgagaagcatcgaggttcctcatgcccttcaggctcaagtgtccggagaggaggctgcagatgaagaggaaaccctacaaggatggcggcgactcgggcgaccgtggcgacaagatcaacgaactaatcgagaagctgaactagaagcgcagaccttgcctcctccggccgtcgttttgcgttggagctatggatctgttattaccttgtcggttttgtaatagcattagctgagtgtgccttcggctttgaaaccttacctgcacttgtgcgatcaggtcatgaaatagcaggcgcttctttggttatccacatgcctcttcggttggtgcgacaatatatcagctgtgttatgaatgatgtagtgtgctagtgtagtgcagacgcttataatgtatgcacacttacaaccgtgaacggacatatatgcaaacacttctatgatcttcgaaggagattgatgaaagtcactttgcttgatttagggcctgtttaattc

SEQ ID NO: 18733 - protein, 260 aa, Zea mays subsp. mays
  misc_feature (1)..(260): Ceres Seq. ID no. 12366800
FTIEKPSPLPFLGSSPPPPPPEKKKMGADGEEASRIVVPMAVEGTSEQLAFVEESKLQKRKENADWAVRNRERRAVKRQRIRDEHKVTVRRPEDFVAAFRNKERDFLRMRTRLKVRKQPPAEALGSKLVFAIRIPGCVDLHPNIRKVLRKLRLTTVLTGVFLRATELTLKRLLVVEPFVTYGFPNLKNVKELIYKKGRGFFDKEPFPLTSNDLIEKALGDHGIICLEDVVHEIATVGRTSEKHRGSSCPSGSSVRRGGCR

SEQ ID NO: 18734 - protein, 235 aa, Zea mays subsp. mays
  misc_feature (1)..(235): Ceres Seq. ID no. 12366801
MGADGEEASRIVVPMAVEGTSEQLAFVEESKLQKRKENADWAVRNRERRAVKRQRIRDEHKVTVRRPEDFVAAFRNKERDFLRMRTRLKVRKQPPAEALGSKLVFAIRIPGCVDLHPNIRKVLRKLRLTTVLTGVFLRATELTLKRLLVVEPFVTYGFPNLKNVKELIYKKGRGFFDKEPFPLTSNDLIEKALGDHGIICLEDVVHEIATVGRTSEKHRGSSCPSGSSVRRGGCR

SEQ ID NO: 18735 - protein, 221 aa, Zea mays subsp. mays
  misc_feature (1)..(221): Ceres Seq. ID no. 12366802
MAVEGTSEQLAFVEESKLQKRKENADWAVRNRERRAVKRQRIRDEHKVTVRRPEDFVAAFRNKERDFLRMRTRLKVRKQPPAEALGSKLVFAIRIPGCVDLHPNIRKVLRKLRLTTVLTGVFLRATELTLKRLLVVEPFVTYGFPNLKNVKELIYKKGRGFFDKEPFPLTSNDLIEKALGDHGIICLEDVVHEIATVGRTSEKHRGSSCPSGSSVRRGGCR

SEQ ID NO: 18736 - DNA, 1954 bp, Zea mays subsp. mays
  misc_feature (1)..(1954): Ceres Seq. ID no. 12366827
ctcttccgagtctgatccctccttccttccgtcagcgcacatctctagggttttagcgccccatttccgcatcgccattcccgatcggatcgcccccttcccacccgccgccgaccagatcccggcgcgagtgctacccaaccctccggcgccgccacccttagtctcagagggtcggtctccaccgaaagcttcgcacaaatcccctccgtttgtcggtgccatttgttgcaaagattgtgttttcctcctcatccgtgcctcgcgttctatttctgccgtccccgaaaatgccaccgctttgttgagatctctcgtttctcgatctgatctcgcctcggtatggcgtgagagttcctaggggagggcaaaatcctcggagttgagattcttgcgtccatttgctagtctcaataccgagcatccgatctcgaacagtgagacaaagtagcgacctttgtgccgttccttgtaactgagcttgcccccgcctgcgtatcggtgggtgacggcgagctctacggcgctgcccattcctatgaatggacgggagggagtccacggtggcgtcggggcccaacttctcgtcgttctacacgcagcaccggggcatcggggcgccgggtgtccccggccactcggcggtgctccatgacccgccgcccgctgggtaccggcagcatcttgatgctgtctctgctgggtacgcattccagaccccgcaggttgggggttcccacattggacaggggtaccaccatgtcgaggcctcaccccatgtggcgcaatacagctccggtggcggcaccagctccggcggtgatatggacattggcatgggttcggctgtgtgcaccaatgttaagggggagctggggagcgggcctgcccaagatgagcaggtgaagaagaagcggggtaggccaaggaagtataagcctgatggggcggtgactctcgggttatcaccctcttcatcattaacacctcactcggccagcttggggatgggaaccatggttagtgctccaggttctggatttgggtcggggggatcaggggcttcaggcttgggtgcgccatcagagaagcgtggcagggggcggccacctggctctggaaagatgcaacagttggcttcgcttggaaagtggtttcttggctctgttggaactggttttactcctcatgtgattattattcagccaggagaggacgttgctgccagaataatggccttctcacaacaagggcccaaggggcagtgtgcatcatttcagcaactggagctgtttctgcagcaacccttcaccaggattcagaatctggcagtgtggttacatatgagggtcggtttgagatcctgtgcctttctgggtcatacttggtagtagatgaaggtggcggcgcacggacccgaagtggagggctttgcatagctttgtgtggtcctgacaacagggttattggtgggagtgtaggtggagtcctgatggcagctggagcggttcaggtgatagtggggagcttcatgtacggcggaggttcgaagaagaacaaggtgaaagccgagttggatgcggggcctgaggaggcgaatgccggcgaccaagaggtggcacttgcggagcacagcagcatggcccctcatcctgccatgagtggtggtggcgggtgggcatctggcatgatgaggcagatggagtcgagaactcccaacatcgatatcaactccatccgcgagtagtttgcctgtttggttgggtggatgaggaaggctcctcctccttggatgcacacagcacagcggcatgcatatgtttggttgtaggcgttgctatgttttaggactccagagtatattgtgatgtgatgttgtacttggatgttgttgtataagatcatgggaacgcttggtcgtgttattatgttaataaaaatatataatggatgg

SEQ ID NO: 18737 - protein, 282 aa, Zea mays subsp. mays
  misc_feature (1)..(282): Ceres Seq. ID no. 12366828
MDGRESTVASGPNFSSFYTQHRGIGAPGVPGHSAVLHDPPPAGYRQHLDAVSAGYAFQTPQVGGSHIGQGYHHVEASPHVAQYSSGGGTSSGGDMDIGMGSAVCTNVKGELGSGPAQDEQVKKKRGRPRKYKPDGAVTLGLSPSSSLTPHSASLGMGTMVSAPGSGFGSGGSGASGLGAPSEKRGRGRPPGSGKMQQLASLGKWFLGSVGTGFTPHVIIIQPGEDVAARIMAFSQQGPKGQCASFQQLELFLQQPFTRIQNLAVWLHMRVGLRSCAFLGHTW

SEQ ID NO: 18738 - protein, 188 aa, Zea mays subsp. mays
  misc_feature (1)..(188): Ceres Seq. ID no. 12366829
MDIGMGSAVCTNVKGELGSGPAQDEQVKKKRGRPRKYKPDGAVTLGLSPSSSLTPHSASLGMGTMVSAPGSGFGSGGSGASGLGAPSEKRGRGRPPGSGKMQQLASLGKWFLGSVGTGFTPHVIIIQPGEDVAARIMAFSQQGPKGQCASFQQLELFLQQPFTRIQNLAVWLHMRVGLRSCAFLGHTW

SEQ ID NO: 18739 - protein, 184 aa, Zea mays subsp. mays
  misc_feature (1)..(184): Ceres Seq. ID no. 12366830
MGSAVCTNVKGELGSGPAQDEQVKKKRGRPRKYKPDGAVTLGLSPSSSLTPHSASLGMGTMVSAPGSGFGSGGSGASGLGAPSEKRGRGRPPGSGKMQQLASLGKWFLGSVGTGFTPHVIIIQPGEDVAARIMAFSQQGPKGQCASFQQLELFLQQPFTRIQNLAVWLHMRVGLRSCAFLGHTW

SEQ ID NO: 18740 - DNA, 822 bp, Zea mays subsp. mays
  misc_feature (1)..(822): Ceres Seq. ID no. 12366902
caagttcagtcacagccacaggtatgctgacactcctgccccttcgcttgccattctcgctacctgtagccgccacactcccgaacgccgccttgctcctcccggcaagcaccagggtctccctccgccagatcacgcagggagccagcatgaacgctgccgccgcctcctccgctccggacgctgctgcggccgccactggcgaggagggcgcgaaggaggccgtggacgtgctggtccagtacgtggtcctgcggcgcgatctggcggacgcgtggccgctggggagcgtcgtggcgcagggctgccacgccgccgtggccgccgtgtgggcgcaccgggaccacccggacaccgccgcctactgcgcgcccgacaacctcgaccgaatgcacaaggtaacactggaggtgaaaggagagacacagctgaataacctggctgagaagctggcagcagctggtgtccggtacaagctgtggatagagcagcctgagaacatcccaacatgcatagctacagcaccctgcccaaagtcgcaggtttcttctttcttcaagaagctcaagctttgcaaatgagcaaagaacaacagttgttcattgctccgtctgctactgtcattacggaggatcatcaaaactttcaaaactgcccatgtatgtttcatgacatgttctgctagcaacaagccatagataattagatatctcagtgatgtaatggagatatttgtgtcgttattcgccttgctgattttacatgattgtccattcacttactgtgtacctgtctcagcagttaattaatgcgaataaattg

SEQ ID NO: 18741 - protein, 192 aa, Zea mays subsp. mays
  misc_feature (1)..(192): Ceres Seq. ID no. 12366903
SSVTATGMLTLLPLRLPFSLPVAATLPNAALLLPASTRVSLRQITQGASMNAAAASSAPDAAAAATGEEGAKEAVDVLVQYVVLRRDLADAWPLGSVVAQGCHAAVAAVWAHRDHPDTAAYCAPDNLDRMHKVTLEVKGETQLNNLAEKLAAAGVRYKLWIEQPENIPTCIATAPCPKSQVSSFFKKLKLCK

SEQ ID NO: 18742 - protein, 185 aa, Zea mays subsp. mays
  misc_feature (1)..(185): Ceres Seq. ID no. 12366904
MLTLLPLRLPFSLPVAATLPNAALLLPASTRVSLRQITQGASMNAAAASSAPDAAAAATGEEGAKEAVDVLVQYVVLRRDLADAWPLGSVVAQGCHAAVAAVWAHRDHPDTAAYCAPDNLDRMHKVTLEVKGETQLNNLAEKLAAAGVRYKLWIEQPENIPTCIATAPCPKSQVSSFFKKLKLCK

SEQ ID NO: 18743 - protein, 144 aa, Zea mays subsp. mays
  misc_feature (1)..(144): Ceres Seq. ID no. 12366905
KFSHSHRYADTPAPSLAILATCSRHTPERRLAPPGKHQGLPPPDHAGSQHERCRRLLRSGRCCGRHWRGGREGGRGRAGPVRGPAARSGGRVAAGERRGAGLPRRRGRRVGAPGPPGHRRLLRARQPRPNAQGNTGGERRDTAE

SEQ ID NO: 18744 - DNA, 1367 bp, Zea mays subsp. mays
  misc_feature (1)..(1367): Ceres Seq. ID no. 12366910
aaatcatacgtgtagtgatagccatgaggtctcttctccacaccaccaatagcagtagcccgccccctggcagcagcaggaagcagcagcactgcggcagcagatgcttcgtcgtatcccttctcctggtcctgctagctcttgtagcctcggacgtgtatctcagcttcccaaaccgacgacgggttcttccattgttcccccagcagcttttgtctcgcagacagcagcgaggcggcgagggcggctgtgacattttcaggggcgagtgggtgccggacccggacgcgccctactacaccaacgacacctgcaaggtgatccacgagcactacgactgtatggggtacggcaagccggacctgggctttgtcaactggaggtggcagcctgacggctgcgaccttccccgcttcaacccatggcgcttcctccacatgatgaggggcaagacccttgccttcgttggcgactccctcggcaggaaccacaaggactcgctcatctgcctcttgaccacagtcgcggagcctacgacgagctggccgagcagcaagcacaccgtgtactactacgccgactacaacttcaccgtggcccacttctgggcgccgtaccttgtccggcacgagcagatcgacgaggacgggccagcgcacacgggcgtctggaacctctacctggacgagccggacggcgtgtgggcggcgcacgtcgcggagttcgactacgccgtcgtgtccgcgtccagctggttctaccgcccctccatgctgtacgaggccggccggctcgtcggctgccactactgccggctgcccaacgtcaccgacctcacgctgcgctacgcgctgcgcatggccacgcgggccgcgctgcgggcgctgtccggcgccgacggccgcttccgcggcacggccctgctgcgcaccgtggacccgtcgcagtacgagggcggggagtggaacgaggacggcaactgcatccggacggcgccgttccggcgtggccagaacgcggtccagggcctcgagcgtgagttccgcacgctgcagctggaggagttcgcgtcggtggcgaaggcggcgacggacagtggcggtaaggtgaggatgctgctgatggacaccacggaagccatgatactgcgtgcggacgcgcacccgagcaagtaccgggggtggacgccggagaagcacttcaccctgcacaacgactgcgtgcactggtgcctgcccggggccattgatgcgtggaacgacatgctgcttcatatgttgaaatgatcatcagtaattttaattaataatgccaaaccagtgtggctgtgtagtgtgtacaatatggtgctccctccgttgacaagt

SEQ ID NO: 18745 - protein, 427 aa, Zea mays subsp. mays
  misc_feature (1)..(427): Ceres Seq. ID no. 12366911
IIRVVIAMRSLLHTTNSSSPPPGSSRKQQHCGSRCFVVSLLLVLLALVASDVYLSFPNRRRVLPLFPQQLLSRRQQRGGEGGCDIFRGEWVPDPDAPYYTNDTCKVIHEHYDCMGYGKPDLGFVNWRWQPDGCDLPRFNPWRFLHMMRGKTLAFVGDSLGRNHKDSLICLLTTVAEPTTSWPSSKHTVYYYADYNFTVAHFWAPYLVRHEQIDEDGPAHTGVWNLYLDEPDGVWAAHVAEFDYAVVSASSWFYRPSMLYEAGRLVGCHYCRLPNVTDLTLRYALRMATRAALRALSGADGRFRGTALLRTVDPSQYEGGEWNEDGNCIRTAPFRRGQNAVQGLEREFRTLQLEEFASVAKAATDSGGKVRMLLMDTTEAMILRADAHPSKYRGWTPEKHFTLHNDCVHWCLPGAIDAWNDMLLHMLK

SEQ ID NO: 18746 - protein, 420 aa, Zea mays subsp. mays
  misc_feature (1)..(420): Ceres Seq. ID no. 12366912
MRSLLHTTNSSSPPPGSSRKQQHCGSRCFVVSLLLVLLALVASDVYLSFPNRRRVLPLFPQQLLSRRQQRGGEGGCDIFRGEWVPDPDAPYYTNDTCKVIHEHYDCMGYGKPDLGFVNWRWQPDGCDLPRFNPWRFLHMMRGKTLAFVGDSLGRNHKDSLICLLTTVAEPTTSWPSSKHTVYYYADYNFTVAHFWAPYLVRHEQIDEDGPAHTGVWNLYLDEPDGVWAAHVAEFDYAVVSASSWFYRPSMLYEAGRLVGCHYCRLPNVTDLTLRYALRMATRAALRALSGADGRFRGTALLRTVDPSQYEGGEWNEDGNCIRTAPFRRGQNAVQGLEREFRTLQLEEFASVAKAATDSGGKVRMLLMDTTEAMILRADAHPSKYRGWTPEKHFTLHNDCVHWCLPGAIDAWNDMLLHMLK

SEQ ID NO: 18747 - protein, 314 aa, Zea mays subsp. mays
  misc_feature (1)..(314): Ceres Seq. ID no. 12366913
MGYGKPDLGFVNWRWQPDGCDLPRFNPWRFLHMMRGKTLAFVGDSLGRNHKDSLICLLTTVAEPTTSWPSSKHTVYYYADYNFTVAHFWAPYLVRHEQIDEDGPAHTGVWNLYLDEPDGVWAAHVAEFDYAVVSASSWFYRPSMLYEAGRLVGCHYCRLPNVTDLTLRYALRMATRAALRALSGADGRFRGTALLRTVDPSQYEGGEWNEDGNCIRTAPFRRGQNAVQGLEREFRTLQLEEFASVAKAATDSGGKVRMLLMDTTEAMILRADAHPSKYRGWTPEKHFTLHNDCVHWCLPGAIDAWNDMLLHMLK

SEQ ID NO: 18748 - DNA, 1495 bp, Zea mays subsp. mays
  misc_feature (1)..(1495): Ceres Seq. ID no. 12366927
acaacacctcatcacaaacacaaagacagccagccagagccagccagagccagccatcactgatcatagcatcagcagcttagtataccgtaccgctccacatccgagctagaagaagaagcccgcgcggccagtacctgcctagcggcgcgagcgaagcagagatggcgagagcgctgccgctggtgctcgcggcgtccgtcctgctggcggccgccgcgctgctgctggccgcggcgccggcgccggcggccgcggtcgacttcggcgcggaggacctggcgtcggaggaggcgctgtgggcgctgtacgagcgctggcgcggccgccacgcggtggcgcgggacctgggcgacaaggcgcgccgcttcaacgtcttcaaggccaacgtgcgcctcatccacgagttcaaccgccgggacgagccctacaagctccgcctcaaccgcttcggcgacatgaccgccgacgagttccgacgccactacgcgggctccagggtcgcgcaccaccgcatgttccgcggcgacaggcagggctcctcggcgtcggcgtcgttcatgtacgccgacgcgcgcgacgtcccggcctccgtcgactggaggcagaagggcgccgtcaccgacgtcaaggaccagggccagtgcggtagctgctgggcgttctcgacgatcgccgccgtggagggcatcaacgcgatcaagaccaagaacctgacgtcgctgtcggagcagcagctggtggactgcgacaccaaggccaacgccggctgcaacgggggcctcatggactacgcgttccagtacatcgccaagcacggcggggtggcggcggaggacgcgtacccgtacagagcgcgccaggcgtcctgcaagaagtcgccggccccggtcgtcaccatcgacggctacgaggacgtgccggccaacgacgagtcggcgctcaagaaggcggtggcgcaccagcccgtgtccgtcgccatcgaggccagtggctcgcacttccagttctactccgagggggtcttctccggcaggtgcgggacggagctggaccacggcgtcgcggcggtcggctacggggtcaccgcggacggcaccaagtactggctggtcaagaactcgtggggccccgagtggggcgagaaggggtacatccgcatggcgcgcgacgtggccgccaaggagggacactgcggcatcgccatggaggcatcctaccccgtcaagacctcgcccaaccccaaggtccacgccgtcgtcgacgaggacggctccagccacgacgagctctgaattgcgcactacactactacgtactagctatagcctatatagctatactatgattgatccatgtatgctcggacaggaacatcgccgactgtgaatgtctgaatggcatacgcacatcttacacctgcattcatgtaataccagtcgagagttgatcttccagcaactttcatttcattcggttattattatattatttg

SEQ ID NO: 18749 - protein, 376 aa, Zea mays subsp. mays
  misc_feature (1)..(376): Ceres Seq. ID no. 12366928
MARALPLVLAASVLLAAAALLLAAAPAPAAAVDFGAEDLASEEALWALYERWRGRHAVARDLGDKARRFNVFKANVRLIHEFNRRDEPYKLRLNRFGDMTADEFRRHYAGSRVAHHRMFRGDRQGSSASASFMYADARDVPASVDWRQKGAVTDVKDQGQCGSCWAFSTIAAVEGINAIKTKNLTSLSEQQLVDCDTKANAGCNGGLMDYAFQYIAKHGGVAAEDAYPYRARQASCKKSPAPVVTIDGYEDVPANDESALKKAVAHQPVSVAIEASGSHFQFYSEGVFSGRCGTELDHGVAAVGYGVTADGTKYWLVKNSWGPEWGEKGYIRMARDVAAKEGHCGIAMEASYPVKTSPNPKVHAVVDEDGSSHDEL

SEQ ID NO: 18750 - protein, 278 aa, Zea mays subsp. mays
  misc_feature (1)..(278): Ceres Seq. ID no. 12366929
MTADEFRRHYAGSRVAHHRMFRGDRQGSSASASFMYADARDVPASVDWRQKGAVTDVKDQGQCGSCWAFSTIAAVEGINAIKTKNLTSLSEQQLVDCDTKANAGCNGGLMDYAFQYIAKHGGVAAEDAYPYRARQASCKKSPAPVVTIDGYEDVPANDESALKKAVAHQPVSVAIEASGSHFQFYSEGVFSGRCGTELDHGVAAVGYGVTADGTKYWLVKNSWGPEWGEKGYIRMARDVAAKEGHCGIAMEASYPVKTSPNPKVHAVVDEDGSSHDEL

SEQ ID NO: 18751 - protein, 259 aa, Zea mays subsp. mays
  misc_feature (1)..(259): Ceres Seq. ID no. 12366930
MFRGDRQGSSASASFMYADARDVPASVDWRQKGAVTDVKDQGQCGSCWAFSTIAAVEGINAIKTKNLTSLSEQQLVDCDTKANAGCNGGLMDYAFQYIAKHGGVAAEDAYPYRARQASCKKSPAPVVTIDGYEDVPANDESALKKAVAHQPVSVAIEASGSHFQFYSEGVFSGRCGTELDHGVAAVGYGVTADGTKYWLVKNSWGPEWGEKGYIRMARDVAAKEGHCGIAMEASYPVKTSPNPKVHAVVDEDGSSHDEL

SEQ ID NO: 18752 - DNA, 2101 bp, Zea mays subsp. mays
  misc_feature (1)..(2101): Ceres Seq. ID no. 12366931
agctggattggatatttggactagtgttcttcttggcttggccacccgcctactccgtcttcttcatacgagacaagccgtgcgcttcttcttggcctagcccttcgagcagggcaggagaggaggccactctgactgtcactctgagcttcgcgtcacctgagtactgacggacgacatgggagaagttgaggacatgtacacccaagacgggaccgtggacatgaaagggaatcccgccgtgaagaagggcaccggcaactggcgcgcctgcccctacatcctcgcgaacgagtgctgcgagaggctggcttactatggcatgagcaccaacctggtgaactacatgaagacccgacttggccaggtgaactccgttgcctccaacaacgtcaccaactggcaagggacgtgctacatcacgccgctcatcggcgccttcttcgccgacgcgtacatggggaggttctggaccatcgccatcttcatgatcatctacattttcggcctggcgctgctgacgatggcttcgtcggtgaaggggctggtgcctacgtcgtgcggcgacaaggatgtgtgccacccgacggacgcgcaggcggcggtggtgttcgtggcgctgtacctcatcgcgctgggcacgggcgggatcaagccgtgcgtgtcctccttcggcgccgaccagttcgacgagaacgacgagcgggagaagaagagcaagagctccttcttcaactggttctacttctccatcaacatcggcgcgctggtggcgtccacagtgctggtgtacgtgcagacgcacgtgggctggggctggggcttcggcatccccgccgtggtcatggccatcgccgtcggcagcttcttcgtgggcacgccgctgtacaggcaccagaagcccgggggcagcccgctgacgcgcatcgcgcaggtgctcgtcgcgtgcgcgcgcaagtggaacgtggccgtgcccgcggacaagtcgcggctgcacgagacggtggacggggagtccggcatcgaggggagccgcaagctggagcactcggagcagctggcgtgcctcgacagggctgccgtggtgacggccgaggacggcgcggaggcgagcccgtggcgcctgtgctcggtgacgcaggtggaggagctcaagagcgtgatccggctgctgcccatctgggccagcgggatcgtgttcgcggcggtgtactcgcagatgagcaccatgttcgtgctgcagggtaacacgctggaccagagcatggggccccggttcaagatcccctcggcgacgctgtccatggtggacaccatcagcgtcatcgtctgggtcccccgtgtacgaccgcgccatcgtgcccctggtgcgctcctacaccgggaggccgcgcgggttcacgcagctgcagcgcatgggcatcggcctcgtcgtctccatcttctccatggtggcggcgggcgtgctggacatcgtgcggctgcgcgccatcgcgcggcacggcctgtacggcgaggacgacatcgtgcccatctccatcttctggcagataccgcagtacttcatcatcgggtgcgcggaggtgttcaccttcgtggggcagctggagttcttctacgaccaggcgcccgacgccatgaggagcatgtgctccgcgctgtcgctcaccaccgtcgcgctcggcaactacctcagcacggtcctggtgaccatcgtcacccacatcaccaccaggcacggccgcatcgggtggatcccggagaacctcaaccgcggccacctcgactacttcttctggctgctcgccgtgctcagccttctcaacttccttgcctacctcgtcatcgccagctggtacaagtacaagaagacggccgatgattaccctggcgccaaaggggagcacggtacagagcactgatgggcgagatggcggaaatggagtgatttctatgtgtggttagctgtctgtcgacttgttttgccacagtttgggtgcttaaacgttaacgtacgtactagttcaatatagtgtctcgggggcgaattggttgtttacatgtcatgtgtttatatatgcgcaatgttcgatctcagtgg

SEQ ID NO: 18753 - protein, 567 aa, Zea mays subsp. mays
  misc_feature (1)..(567): Ceres Seq. ID no. 12366932
MGEVEDMYTQDGTVDMKGNPAVKKGTGNWRACPYILANECCERLAYYGMSTNLVNYMKTRLGQVNSVASNNVTNWQGTCYITPLIGAFFADAYMGRFWTIAIFMIIYIFGLALLTMASSVKGLVPTSCGDKDVCHPTDAQAAVVFVALYLIALGTGGIKPCVSSFGADQFDENDEREKKSKSSFFNWFYFSINIGALVASTVLVYVQTHVGWGWGFGIPAVVMAIAVGSFFVGTPLYRHQKPGGSPLTRIAQVLVACARKWNVAVPADKSRLHETVDGESGIEGSRKLEHSEQLACLDRAAVVTAEDGAEASPWRLCSVTQVEELKSVIRLLPIWASGIVFAAVYSQMSTMFVLQGNTLDQSMGPRFKIPSATLSMVDTISVIVWVPRVRPRHRAPGALLHREAARVHAAAAHGHRPRRLHLLHGGGGRAGHRAAARHRAARPVRRGRHRAHLHLLADTAVLHHRVRGGVHLRGAAGVLLRPGARRHEEHVLRAVAHHRRARQLPQHGPGDHRHPHHHQARPHRVDPGEPQPRPPRLLLLAARRAQPSQLPCLPRHRQLVQVQEDGR

SEQ ID NO: 18754 - protein, 561 aa, Zea mays subsp. mays
  misc_feature (1)..(561): Ceres Seq. ID no. 12366933
MYTQDGTVDMKGNPAVKKGTGNWRACPYILANECCERLAYYGMSTNLVNYMKTRLGQVNSVASNNVTNWQGTCYITPLIGAFFADAYMGRFWTIAIFMIIYIFGLALLTMASSVKGLVPTSCGDKDVCHPTDAQAAVVFVALYLIALGTGGIKPCVSSFGADQFDENDEREKKSKSSFFNWFYFSINIGALVASTVLVYVQTHVGWGWGFGIPAVVMAIAVGSFFVGTPLYRHQKPGGSPLTRIAQVLVACARKWNVAVPADKSRLHETVDGESGIEGSRKLEHSEQLACLDRAAVVTAEDGAEASPWRLCSVTQVEELKSVIRLLPIWASGIVFAAVYSQMSTMFVLQGNTLDQSMGPRFKIPSATLSMVDTISVIVWVPRVRPRHRAPGALLHREAARVHAAAAHGHRPRRLHLLHGGGGRAGHRAAARHRAARPVRRGRHRAHLHLLADTAVLHHRVRGGVHLRGAAGVLLRPGARRHEEHVLRAVAHHRRARQLPQHGPGDHRHPHHHQARPHRVDPGEPQPRPPRLLLLAARRAQPSQLPCLPRHRQLVQVQEDGR

SEQ ID NO: 18755 - protein, 552 aa, Zea mays subsp. mays
  misc_feature (1)..(552): Ceres Seq. ID no. 12366934
MKGNPAVKKGTGNWRACPYILANECCERLAYYGMSTNLVNYMKTRLGQVNSVASNNVTNWQGTCYITPLIGAFFADAYMGRFWTIAIFMIIYIFGLALLTMASSVKGLVPTSCGDKDVCHPTDAQAAVVFVALYLIALGTGGIKPCVSSFGADQFDENDEREKKSKSSFFNWFYFSINIGALVASTVLVYVQTHVGWGWGFGIPAVVMAIAVGSFFVGTPLYRHQKPGGSPLTRIAQVLVACARKWNVAVPADKSRLHETVDGESGIEGSRKLEHSEQLACLDRAAVVTAEDGAEASPWRLCSVTQVEELKSVIRLLPIWASGIVFAAVYSQMSTMFVLQGNTLDQSMGPRFKIPSATLSMVDTISVIVWVPRVRPRHRAPGALLHREAARVHAAAAHGHRPRRLHLLHGGGGRAGHRAAARHRAARPVRRGRHRAHLHLLADTAVLHHRVRGGVHLRGAAGVLLRPGARRHEEHVLRAVAHHRRARQLPQHGPGDHRHPHHHQARPHRVDPGEPQPRPPRLLLLAARRAQPSQLPCLPRHRQLVQVQEDGR

SEQ ID NO: 18756 - DNA, 921 bp, Zea mays subsp. mays
  misc_feature (1)..(921): Ceres Seq. ID no. 12367023
aagctcgcactcactcacacccgcagcgaaggagggagcttgcacgggccaacgcacacacaacacaagctcgtcgtcgatggcgcggtgggctgcggtgctggcgctggccgcggccacggccatcgccgtggcgtccgtggcgggcggcgacatgaacgcggacaagacggagtgcgcggaccagctggtgggcctggcgccgtgcctgcagtacgtgcaggggcaggcccgcgcgccgccgcccgactgctgcggcggcctgcgccaggtgctggggaagagccccaagtgcctgtgcgtgctcgtcaaggacaaggacgaccccaacctgggcatcaagatcaacgccaccctcgcgctcgcgctccccaacgcctgcggcgccacccgcgccaacgtctcccactgcgctcagctcctgcatattcccccgggctccaaagacgccgccgtcttcagtcccggcagcgacaagggctccactgccgctccagccaaggacaactcgacggcgacgaccaactcccgcgcgctgcaggcgaccaccggacgcggcgtctcctcctcggcggcgaccgccggtgctgcactcgcggtgctgctcgccggctacctcctcctgctcgtgccagagctgtcgcctagctcgttctagaccctctgtcaagttgtgccaccagtaggatttgatgtgttgttgttctttctagtacgtgacgtgacagacaatttgctgctggtgtccttgttgttgtagtagttgcactgtgtgttcctgttatgctatgggtacgagatgttagggcatgggttaagctaagctaaggcgatggggtatcagcagtaccttacctctcatctggctgctgatcctttttgttcttggcactgctgttttatctgaacatttgatcagcc

SEQ ID NO: 18757 - protein, 218 aa, Zea mays subsp. mays
  misc_feature (1)..(218): Ceres Seq. ID no. 12367024
SSHSLTPAAKEGACTGQRTHNTSSSSMARWAAVLALAAATAIAVASVAGGDMNADKTECADQLVGLAPCLQYVQGQARAPPPDCCGGLRQVLGKSPKCLCVLVKDKDDPNLGIKINATLALALPNACGATRANVSHCAQLLHIPPGSKDAAVFSPGSDKGSTAAPAKDNSTATTNSRALQATTGRGVSSSAATAGAALAVLLAGYLLLLVPELSPSSF

SEQ ID NO: 18758 - protein, 215 aa, Zea mays subsp. mays
  misc_feature (1)..(215): Ceres Seq. ID no. 12367025
KLALTHTRSEGGSLHGPTHTQHKLVVDGAVGCGAGAGRGHGHRRGVRGGRRHERGQDGVRGPAGGPGAVPAVRAGAGPRAAARLLRRPAPGAGEEPQVPVRARQGQGRPQPGHQDQRHPRARAPQRLRRHPRQRLPLRSAPAYSPGLQRRRRLQSRQRQGLHCRSSQGQLDGDDQLPRAAGDHRTRRLLLGGDRRCCTRGAARRLPPPARARAVA

SEQ ID NO: 18759 - protein, 192 aa, Zea mays subsp. mays
  misc_feature (1)..(192): Ceres Seq. ID no. 12367026
MARWAAVLALAAATAIAVASVAGGDMNADKTECADQLVGLAPCLQYVQGQARAPPPDCCGGLRQVLGKSPKCLCVLVKDKDDPNLGIKINATLALALPNACGATRANVSHCAQLLHIPPGSKDAAVFSPGSDKGSTAAPAKDNSTATTNSRALQATTGRGVSSSAATAGAALAVLLAGYLLLLVPELSPSSF

SEQ ID NO: 18760 - DNA, 1639 bp, Zea mays subsp. mays
  misc_feature (1)..(1639): Ceres Seq. ID no. 12367070
gcacgagaccattacctagaacatcctaatcgaaaaaaagccactcgctgactcatctccatccacaacatcacatactcgctccaacagtcccacccacgctacctagacagtagacacgtgtaccatggtgttcttcaaggcgcgtcgcatggatcctgagttggtgttgccggcgcggccgacgccggccgagacgaaagcgctctccgacctcgacgaccagcggacgctgaggtactacgagacggtgatcgccttcttccgcagccggcgtggctacagcagccacagacgacggccagacgatccagccaaggccatcaaggcggccctcgcggaggcgctcgtgtactactaccccatcgccgggcggctcagggaggccgccggtgggaagctggtggtggattgcaccgcgcagggggtggtgtttgtggaggccgatgcggatgtncggctggaggagctgggcaggcctctgttgccgccgtacccgtgtgtggaggaactgctgtgcgatgcgggtgaaacaagagcggtgattggcaagccattagtcctcatgcaggtgacgaggctcaaatgtggcggatttgtcattggattccacatgtgccatagcattgcagatggattcggcatggttcaattcttcagatgtgtcgccgaactagctcgcggtgaaaaagtgcccacacttttgcccgtgtggagaagagagctcctaacacgacacaggtcaaatactactgcatataatcacacagccacggttaggtccgagtccgactccgacgactacaaatctgacgacgtcatgctgtcaactccaatggacgacatggtagtccagtacttcctcttcgggccaagggagatcgcaaccctacgaagccacctgaggggagacgaccagctgctgctcgccacctccgctacatccttcgagctgctagcggccgtcatgtggcggtgccgcaccttggcgctgggctacgagtcccatcggcgcgttcgcctcatggttaccatgaacgcgcgcgggaagtggaaccagcacacgcccatcccgcggggttactacggcaacgcgcacgtgtcccccatggcggaggccaccgccggcgagctctgcagccagccgctcgcccgcacggtcgatctcgtgcgcaggaccaagctcagcgtcaccaaggaacgcatggagtcgatggtggacacgatcgcttcgacgcgccagtggccgcctccgacgatggacaggatctacgaggtttctgacaccaagtggattgccaccaatgcgacgcagtttgggtgggccgagctggtgggtggtgggataccactggctggcgaccttgcctccaagctgggaagcgaccacatgagctgcaggaaccaggatggcgaccactcgaccatcgtgtcgatgcttctgcccaagccggcgatggacaagtttagcagtgagctgtctgtttggttgaacaacaagcatgatcacaagaacttggttatactcagttctctctagtctaccaacagatttaaacaatattaatgtacctacaatttgttgtacgaaagagaaatgattggctcaatgagaatgaaataatttcggtgttcttct

SEQ ID NO: 18761 - protein, 470 aa, Zea mays subsp. mays
  misc_feature (1)..(470): Ceres Seq. ID no. 12367071
  misc_feature (110)..(110): Xaa is any aa, unknown or other
MVFFKARRMDPELVLPARPTPAETKALSDLDDQRTLRYYETVIAFFRSRRGYSSHRRRPDDPAKAIKAALAEALVYYYPIAGRLREAAGGKLVVDCTAQGVVFVEADADXRLEELGRPLLPPYPCVEELLCDAGETRAVIGKPLVLMQVTRLKCGGFVIGFHMCHSIADGFGMVQFFRCVAELARGEKVPTLLPVWRRELLTRHRSNTTAYNHTATVRSESDSDDYKSDDVMLSTPMDDMVVQYFLFGPREIATLRSHLRGDDQLLLATSATSFELLAAVMWRCRTLALGYESHRRVRLMVTMNARGKWNQHTPIPRGYYGNAHVSPMAEATAGELCSQPLARTVDLVRRTKLSVTKERMESMVDTIASTRQWPPPTMDRIYEVSDTKWIATNATQFGWAELVGGGIPLAGDLASKLGSDHMSCRNQDGDHSTIVSMLLPKPAMDKFSSELSVWLNNKHDHKNLVILSSL

SEQ ID NO: 18762 - protein, 462 aa, Zea mays subsp. mays
  misc_feature (1)..(462): Ceres Seq. ID no. 12367072
  misc_feature (102)..(102): Xaa is any aa, unknown or other
MDPELVLPARPTPAETKALSDLDDQRTLRYYETVIAFFRSRRGYSSHRRRPDDPAKAIKAALAEALVYYYPIAGRLREAAGGKLVVDCTAQGVVFVEADADXRLEELGRPLLPPYPCVEELLCDAGETRAVIGKPLVLMQVTRLKCGGFVIGFHMCHSIADGFGMVQFFRCVAELARGEKVPTLLPVWRRELLTRHRSNTTAYNHTATVRSESDSDDYKSDDVMLSTPMDDMVVQYFLFGPREIATLRSHLRGDDQLLLATSATSFELLAAVMWRCRTLALGYESHRRVRLMVTMNARGKWNQHTPIPRGYYGNAHVSPMAEATAGELCSQPLARTVDLVRRTKLSVTKERMESMVDTIASTRQWPPPTMDRIYEVSDTKWIATNATQFGWAELVGGGIPLAGDLASKLGSDHMSCRNQDGDHSTIVSMLLPKPAMDKFSSELSVWLNNKHDHKNLVILSSL

SEQ ID NO: 18763 - protein, 324 aa, Zea mays subsp. mays
  misc_feature (1)..(324): Ceres Seq. ID no. 12367073
MQVTRLKCGGFVIGFHMCHSIADGFGMVQFFRCVAELARGEKVPTLLPVWRRELLTRHRSNTTAYNHTATVRSESDSDDYKSDDVMLSTPMDDMVVQYFLFGPREIATLRSHLRGDDQLLLATSATSFELLAAVMWRCRTLALGYESHRRVRLMVTMNARGKWNQHTPIPRGYYGNAHVSPMAEATAGELCSQPLARTVDLVRRTKLSVTKERMESMVDTIASTRQWPPPTMDRIYEVSDTKWIATNATQFGWAELVGGGIPLAGDLASKLGSDHMSCRNQDGDHSTIVSMLLPKPAMDKFSSELSVWLNNKHDHKNLVILSSL

SEQ ID NO: 18764 - DNA, 1229 bp, Zea mays subsp. mays
  misc_feature (1)..(1229): Ceres Seq. ID no. 12367074
cctggccaccaaagaagcaaaagtcttccaggttctcccacccacacggccacacgcccacacccactgctcctctaatctcacatgctcatgcatcctcctaatgtaacctgaagctttaagaaaacaaagtgctcccggaagactccaagctgcagctaccggccttcctctcccccattccaattccgagaacaggggcggcggagtcaaccaggtacgatgtgctcggtagcgaggctggcgtttgtgcttgcactggccatagccgcctcatcaattacggttgcggagagcagagattttaatatctttgctcagggcagcttgcctgatgcaaccaagggatcgtcaggtctagctgcaaccagtggaaagttgtgtcagttatgcgagcagtactcatccgaggcgctcctctatctcacacaaaacgagacccagactgagattcttagcattctacaccatgaatgtgccagccttgccccactcaagcagcagtgcatcacgctggttgactactacgtaccccttttcttcttggaggtctccatggttacccctgagaagttctgcgagtcgatgcatctctgcaagaaggggatgaagattagcctacccacccgggagggtacttgtggtttgtgccaccatgttgttgttgagattcttatcatgcttaaagaccccaacatgcagctggaagtaatcgacctactcaccaaaacatgcagcaaggcgcagaactatgaacagcagtgcaagcggctggtcctcaagtatattccactgattctggtgaagggccagaaattccttgagacaacggatgtctgctctgtgatacatgcatgcaaagcaggcacacaagcatcaatggaagccatgcctctgtctgccatgttgtgaaggtgatgcgaatcagaataaggcttatttgcctaggagatcaaattggggagaaacgatgaaaagtcagatgactgttttaagctctcttcctctattgctgaaacactattgatcggtgaaaattcgtctgtgtaaaattcttgtgtaaatttgggggtatatccagtgtttctctgaagtatacagcaactgcagctacaccaatctcttcggcattgggttgagaagttctaagcagtaattgcattttactgtatcatctatttgtttgtaactactgagagttattaattccttgtttctctgttgctctg

SEQ ID NO: 18765 - protein, 229 aa, Zea mays subsp. mays
  misc_feature (1)..(229): Ceres Seq. ID no. 12367075
MCSVARLAFVLALAIAASSITVAESRDFNIFAQGSLPDATKGSSGLAATSGKLCQLCEQYSSEALLYLTQNETQTEILSILHHECASLAPLKQQCITLVDYYVPLFFLEVSMVTPEKFCESMHLCKKGMKISLPTREGTCGLCHHVVVEILIMLKDPNMQLEVIDLLTKTCSKAQNYEQQCKRLVLKYIPLILVKGQKFLETTDVCSVIHACKAGTQASMEAMPLSAML

SEQ ID NO: 18766 - protein, 118 aa, Zea mays subsp. mays
  misc_feature (1)..(118): Ceres Seq. ID no. 12367076
MVTPEKFCESMHLCKKGMKISLPTREGTCGLCHHVVVEILIMLKDPNMQLEVIDLLTKTCSKAQNYEQQCKRLVLKYIPLILVKGQKFLETTDVCSVIHACKAGTQASMEAMPLSAML

SEQ ID NO: 18767 - DNA, 774 bp, Zea mays subsp. mays
  misc_feature (1)..(774): Ceres Seq. ID no. 12367092
agtcatcatgactcactaagcactgtccttcctgatcccaccgcggtctccttccgcgacacgcgcacacgccacagcgcattcgcgtacgtcaacggacgtcgaacccatcgcccatgggaggagggcacgaggagcaggagggtggcggcgcaaaggccgggggctactcctccggtctcccgccgtcggagccgccgcaggagtacgggtacggcacgttccagggccctcggcatcctcccgtcgggttcccgcagcctgccccgcctcccgggttcggcggcggcggcggctaccacaaccagcaacagccgtacgcgcacgcggagacgtactacgcccaggggtaccaggccgtgccaggctatggtcctgttgctgaaggaagacctgtgagaatgaggcgtctcccatgttgtggcctcggcttaggctggtgcctgttcattgctgggtttttccttgctgccattccatggtacattggggctttcgttctgatatgcgtgcgggtacatgaccaccgagagaaaccaggatatgttgcttgcacaattgctgccgttgttgctgccgttgccatattcctgggggtaactaagggaacacacgtgtggtgaattgcttccagagaaggcaatggatttatacttgtatagtatctgtgtgtattaaaagtgtggagcgacatcgagatgctcttatgacttatgttcatacatattctactttgtaatgaaattttagatgtagtaatgcaccgtctgcttc

SEQ ID NO: 18768 - protein, 168 aa, Zea mays subsp. mays
  misc_feature (1)..(168): Ceres Seq. ID no. 12367093
MGGGHEEQEGGGAKAGGYSSGLPPSEPPQEYGYGTFQGPRHPPVGFPQPAPPPGFGGGGGYHNQQQPYAHAETYYAQGYQAVPGYGPVAEGRPVRMRRLPCCGLGLGWCLFIAGFFLAAIPWYIGAFVLICVRVHDHREKPGYVACTIAAVVAAVAIFLGVTKGTHVW

SEQ ID NO: 18769 - protein, 132 aa, Zea mays subsp. mays
  misc_feature (1)..(132): Ceres Seq. ID no. 12367094
SHHDSLSTVLPDPTAVSFRDTRTRHSAFAYVNGRRTHRPWEEGTRSRRVAAQRPGATPPVSRRRSRRRSTGTARSRALGILPSGSRSLPRLPGSAAAAATTTSNSRTRTRRRTTPRGTRPCQAMVLLLKEDL

SEQ ID NO: 18770 - DNA, 1016 bp, Zea mays subsp. mays
  misc_feature (1)..(1016): Ceres Seq. ID no. 12367141
aaccttttgccgtcttgcggcggccttctgctccgccgctcgttctcatctcttgcagcggcctggggaaaaagaggaggagagatcggagatgaaggcgtgtgcgaaggctgcgggggagaggctgccgctggtctgtgctccgtcaactaggcagcctctagctcggagctttgttaaggtaagaagattaccctctcaacatgagacgaagtcacaagtatcctgctcagttagggtgtcagaaaacacagctcacagaatagatgccacagcagaaaacattttcccagcaatgaaagatcatgtcttgaaagcaactgatgcaatcaacagaggagaagtgattgcggtgcctactgataccatatacgggtttgcatgtgatgcatgctctgcaggagcagttaatcgtatttatgagatcaaaggacgcatacaaacacggcctctggcaatttgtgttggtgatgtctcagacatatcacggtttgctttagtggaccacttgccacatggcttgcttgatagtctacttcctgggcctgtcactattgttctaaaacgaggtgaaaacagcatattagagagatcacttaatcctggcttggatagcattggagttcgtgtgccggatctggatttcatacgttccattgttcgtggtactggaagtgcacttgcacttaccagcgccaacttaagcggacagcctagtagtgtctgtgtcaaagatttcgagggtttatggccacattgttcatatgtctttgatggtggagtacttccttctgggcgtgctggttcaacaatcgttgatctaataacaccaggagtttacaagatattgagggacggaagctcaaggaaggaaacagcagcagtgctcggcaagttcggctttgttgaagcgttgtaactactcggcactttaagaaagttagcacgatcaaagagtggctgtcttatccacagtatatcttgtttaattagtgatacattagagcttttgttgc

SEQ ID NO: 18771 - protein, 305 aa, Zea mays subsp. mays
  misc_feature (1)..(305): Ceres Seq. ID no. 12367142
TFCRLAAAFCSAARSHLLQRPGEKEEERSEMKACAKAAGERLPLVCAPSTRQPLARSFVKVRRLPSQHETKSQVSCSVRVSENTAHRIDATAENIFPAMKDHVLKATDAINRGEVIAVPTDTIYGFACDACSAGAVNRIYEIKGRIQTRPLAICVGDVSDISRFALVDHLPHGLLDSLLPGPVTIVLKRGENSILERSLNPGLDSIGVRVPDLDFIRSIVRGTGSALALTSANLSGQPSSVCVKDFEGLWPHCSYVFDGGVLPSGRAGSTIVDLITPGVYKILRDGSSRKETAAVLGKFGFVEAL

SEQ ID NO: 18772 - protein, 275 aa, Zea mays subsp. mays
  misc_feature (1)..(275): Ceres Seq. ID no. 12367143
MKACAKAAGERLPLVCAPSTRQPLARSFVKVRRLPSQHETKSQVSCSVRVSENTAHRIDATAENIFPAMKDHVLKATDAINRGEVIAVPTDTIYGFACDACSAGAVNRIYEIKGRIQTRPLAICVGDVSDISRFALVDHLPHGLLDSLLPGPVTIVLKRGENSILERSLNPGLDSIGVRVPDLDFIRSIVRGTGSALALTSANLSGQPSSVCVKDFEGLWPHCSYVFDGGVLPSGRAGSTIVDLITPGVYKILRDGSSRKETAAVLGKFGFVEAL

SEQ ID NO: 18773 - protein, 207 aa, Zea mays subsp. mays
  misc_feature (1)..(207): Ceres Seq. ID no. 12367144
MKDHVLKATDAINRGEVIAVPTDTIYGFACDACSAGAVNRIYEIKGRIQTRPLAICVGDVSDISRFALVDHLPHGLLDSLLPGPVTIVLKRGENSILERSLNPGLDSIGVRVPDLDFIRSIVRGTGSALALTSANLSGQPSSVCVKDFEGLWPHCSYVFDGGVLPSGRAGSTIVDLITPGVYKILRDGSSRKETAAVLGKFGFVEAL

SEQ ID NO: 18774 - DNA, 1968 bp, Zea mays subsp. mays
  misc_feature (1)..(1968): Ceres Seq. ID no. 12367168
gcacgagaccattacctagaacatcctaatcgaaaaagtcccgtactcccgtccaaggcagcagagaccagagagcgaaggaggccaaggccatcgctctcctagcctcggagacttgcctttgcatacacatccccccggagggcggtggccggagctgacccctgatcggacgcgcttagcgcctgagggcatggctgcaaccgtgaggagggctgcttcctccgtcctctctcgcttcctcctcacaaagccttcgccttcgcctgcttctgccgccggcaataattccgctctcctcggatcaggggctgctgctcttcacaggttcagcaccgcaccggcatccgcggccgcggccgcagaggagccgatccagcccgcggtggaggtgaagcacacccagctcctcatcaatggcaacttcgtcgacgctgcttctgggaagacgttcccgacgctggacccgcgcaccggcgaggtcatcgcgcgcgtcgccgagggcgacagcgaggacatcgaccgcgccgtggccgccgcccgcagggccttcgacgagggcccgtggccgaggatgaccgcctacgatcggtgccgcgtgctgctgcgcttcgcggacctgatcgagcggcacgcggaggaggtcgcggcgctggagacgtgggacaacggcaagacgctggcgcaggcggcgggggccgaggtgcccatggtggcgcggtgcgtccggtactacgccggctgggcggacaagatccacggcctggtggcgccggccgacggcgcgcaccacgtgcaggtgctgcacgagccggtcggcgtggccggccagatcatcccctggaacttcccgctgctcatgttcgcctggaaggtcggcccggcgctcgcctgcggcaacaccgtcgtcctcaagaccgccgagcagacgccgctctccgcgctctacgtggccaacctcctccacgaggctgggctccccgagggtgttctgaacgtggtgtccggcttcggcccgacggccggcgcagcgctctccagccacatgggtgtcgacaagcttgcgttcacgggatcgacgggcacggggcagatcgtgctcgagctggcggcgaggagcaaccttaagccggtgacgctggagctcggtggcaagtcccctttcatcgtcatggacgacgccgacgtcgaccaggccgtcgagctcgcgcaccaggcggtcttcttcaaccagggccaatgctgctgcgccgggtcgcggacgttcgtgcacgagcgcgtgtacgacgagttcgtggagaagtccaaggcccgcgccctgaagcgcgtcgtcggcgaccccttcagggacggggtcgaacaggggcctcagatcgacggcgagcaattcaacaagatcttgcggtacgtccagtccggcgtcgacagcggtgccaccctcgtcgccggcggcgacagggtaggcgacaggggcttctacatacagccgacggtgtttgccgacgccaaggacgaaatgaagatcgctcgggaggagatattcgggccggtgcaaaccattctcaagttcagcggcgtggaggaggtgatccggcgcgcgaacgcgacgccctacgggctggcggcgggggtgttcacgcggagcctggacgcggccaacaccctgtcgcgggcgctgcgggcgggcaccgtgtgggtgaactgctacgacgtgttcgacgccaccatcccgttcggcggctacaagatgagcggcgtcgggcgggagaagggcatctacgccctccgcaactacctccagacaaaggccgtcgtcacacccatcaagaaccccgcatggctgtaaatcacatcctccgtccttgcccgcacggcgctgcgccggttctcggagaacgtgacgaataaaacaaacggtttggttaaaaagacaaggacgacggaaaatgggtcatttttatctccccc

SEQ ID NO: 18775 - protein, 550 aa, Zea mays subsp. mays
  misc_feature (1)..(550): Ceres Seq. ID no. 12367169
MAATVRRAASSVLSRFLLTKPSPSPASAAGNNSALLGSGAAALHRFSTAPASAAAAAEEPIQPAVEVKHTQLLINGNFVDAASGKTFPTLDPRTGEVIARVAEGDSEDIDRAVAAARRAFDEGPWPRMTAYDRCRVLLRFADLIERHAEEVAALETWDNGKTLAQAAGAEVPMVARCVRYYAGWADKIHGLVAPADGAHHVQVLHEPVGVAGQIIPWNFPLLMFAWKVGPALACGNTVVLKTAEQTPLSALYVANLLHEAGLPEGVLNVVSGFGPTAGAALSSHMGVDKLAFTGSTGTGQIVLELAARSNLKPVTLELGGKSPFIVMDDADVDQAVELAHQAVFFNQGQCCCAGSRTFVHERVYDEFVEKSKARALKRVVGDPFRDGVEQGPQIDGEQFNKILRYVQSGVDSGATLVAGGDRVGDRGFYIQPTVFADAKDEMKIAREEIFGPVQTILKFSGVEEVIRRANATPYGLAAGVFTRSLDAANTLSRALRAGTVWVNCYDVFDATIPFGGYKMSGVGREKGIYALRNYLQTKAVVTPIKNPAWL

SEQ ID NO: 18776 - protein, 423 aa, Zea mays subsp. mays
  misc_feature (1)..(423): Ceres Seq. ID no. 12367170
MTAYDRCRVLLRFADLIERHAEEVAALETWDNGKTLAQAAGAEVPMVARCVRYYAGWADKIHGLVAPADGAHHVQVLHEPVGVAGQIIPWNFPLLMFAWKVGPALACGNTVVLKTAEQTPLSALYVANLLHEAGLPEGVLNVVSGFGPTAGAALSSHMGVDKLAFTGSTGTGQIVLELAARSNLKPVTLELGGKSPFIVMDDADVDQAVELAHQAVFFNQGQCCCAGSRTFVHERVYDEFVEKSKARALKRVVGDPFRDGVEQGPQIDGEQFNKILRYVQSGVDSGATLVAGGDRVGDRGFYIQPTVFADAKDEMKIAREEIFGPVQTILKFSGVEEVIRRANATPYGLAAGVFTRSLDAANTLSRALRAGTVWVNCYDVFDATIPFGGYKMSGVGREKGIYALRNYLQTKAVVTPIKNPAWL

SEQ ID NO: 18777 - protein, 378 aa, Zea mays subsp. mays
  misc_feature (1)..(378): Ceres Seq. ID no. 12367171
MVARCVRYYAGWADKIHGLVAPADGAHHVQVLHEPVGVAGQIIPWNFPLLMFAWKVGPALACGNTVVLKTAEQTPLSALYVANLLHEAGLPEGVLNVVSGFGPTAGAALSSHMGVDKLAFTGSTGTGQIVLELAARSNLKPVTLELGGKSPFIVMDDADVDQAVELAHQAVFFNQGQCCCAGSRTFVHERVYDEFVEKSKARALKRVVGDPFRDGVEQGPQIDGEQFNKILRYVQSGVDSGATLVAGGDRVGDRGFYIQPTVFADAKDEMKIAREEIFGPVQTILKFSGVEEVIRRANATPYGLAAGVFTRSLDAANTLSRALRAGTVWVNCYDVFDATIPFGGYKMSGVGREKGIYALRNYLQTKAVVTPIKNPAWL

SEQ ID NO: 18778 - DNA, 924 bp, Zea mays subsp. mays
  misc_feature (1)..(924): Ceres Seq. ID no. 12367187
agtttttcatgggctgacccggttatgtggccttgttagttttcgcctaatttcaaataacagcaatttcttagtggcccgtacactctgcagcagtgcggtgcgggcgtgcggcctccctttttttctccagttcctccggcggcggcgtgcttggcggtgcgccaggtgcccagatctccaccatcttagtcgccggcgacgagcatcaccaggttcccgatgaccatggcgcagcgcacgatgtgcctgcttcggcggtccattgggtttacagcgccgcaggcacagagagccctgagtaccactgccgcaccagcggcggagggtgcggccgtggctgaagctacggcgaaggaggcgaagaggaggaggaagaatctgtttgacgtagtgcagttcctgccagagtggggcattggatacaaggttgccaagaccacctggcgtgacgtctcctatcagatcaccaagatcaacctgtacaaggatggtcggcatggaaaggcgtgggggcttcggtacaaggcaggtgtgcaagctgcagacaccccaactaggatcagcggtgttaacaaacgtgggtggaagtacataaaagaatcacagaagaaactacaagaagcccccaaagtagacgtagctgttgctgctgcctagttcgtagttacatgcatgtttgttgtaagatgattcggtaaatctttagatggctgttgccagggtgagaacagggaaccacttttttttggatcgactctatacttttttgtcgatgacgactgaacctctctgcaacatgtccagtttcttttcttttccttatggaacgaacctttaccgtaatgtactgatgcagaagaactgcgttgattgtggcgatctagttttcattcaaacgcaagccttgtttcattctgagcc

SEQ ID NO: 18779 - protein, 145 aa, Zea mays subsp. mays
  misc_feature (1)..(145): Ceres Seq. ID no. 12367188
MTMAQRTMCLLRRSIGFTAPQAQRALSTTAAPAAEGAAVAEATAKEAKRRRKNLFDVVQFLPEWGIGYKVAKTTWRDVSYQITKINLYKDGRHGKAWGLRYKAGVQAADTPTRISGVNKRGWKYIKESQKKLQEAPKVDVAVAAA

SEQ ID NO: 18780 - protein, 143 aa, Zea mays subsp. mays
  misc_feature (1)..(143): Ceres Seq. ID no. 12367189
MAQRTMCLLRRSIGFTAPQAQRALSTTAAPAAEGAAVAEATAKEAKRRRKNLFDVVQFLPEWGIGYKVAKTTWRDVSYQITKINLYKDGRHGKAWGLRYKAGVQAADTPTRISGVNKRGWKYIKESQKKLQEAPKVDVAVAAA

SEQ ID NO: 18781 - protein, 138 aa, Zea mays subsp. mays
  misc_feature (1)..(138): Ceres Seq. ID no. 12367190
MCLLRRSIGFTAPQAQRALSTTAAPAAEGAAVAEATAKEAKRRRKNLFDVVQFLPEWGIGYKVAKTTWRDVSYQITKINLYKDGRHGKAWGLRYKAGVQAADTPTRISGVNKRGWKYIKESQKKLQEAPKVDVAVAAA

SEQ ID NO: 18782 - DNA, 887 bp, Zea mays subsp. mays
  misc_feature (1)..(887): Ceres Seq. ID no. 12367194
gtacagacagccgccgccgccggcggtggttcacaatcacaagccaccgctactccaccaaaccgcacggaggcggaacccaaattccaacccgactcctccagccaacagcccaagcgaagcgagggcccttgagctcccctcccgcatgacgtccccatggtgcctctcggcaccgcccgccgccccgcccgtggcggctgcgcccggcgccctcggcttctccgcgtctgcctccaccctcgcgcgtgtgccggttcccggaagtaggcggcgcaggtggaacgcgctcgtggtctgcgcggcccccgatgaggagaagattacgaagcggtcgcccctggatttccccatcgaatgggagagaccaaaacctgggaggagacctgatatcttccctaagtttagcccaatgaagacaccattaccgcatccattgccagctgatgatcctctggatgatgatgaagaggaagaggaagaacaagcaccacctcaggaggagccacaagaggacgatccagacaaggaagaacctgaggaagatgacccagataagccaaccgagtaattttcgattggcttgaacagtgatagattaggcaatggggaaaaaatgtgctacgtctttggagcgcgcaagagatctcagttctatttgaactgccggcttatataggctctagatgcataagtttgttatatgacctctgagcttttctaaagctatgaaagttctgtttcacggattacagattacagtgcgatatctgtgatgacatgtattctcactttttctatgttttgagtaagcaacgtgtacattgcaaaacctgtatttggtgtagttgcatcattgatttgtgaaacggatactgagatttttg

SEQ ID NO: 18783 - protein, 189 aa, Zea mays subsp. mays
  misc_feature (1)..(189): Ceres Seq. ID no. 12367195
YRQPPPPAVVHNHKPPLLHQTARRRNPNSNPTPPANSPSEARALELPSRMTSPWCLSAPPAAPPVAAAPGALGFSASASTLARVPVPGSRRRRWNALVVCAAPDEEKITKRSPLDFPIEWERPKPGRRPDIFPKFSPMKTPLPHPLPADDPLDDDEEEEEEQAPPQEEPQEDDPDKEEPEEDDPDKPTE

SEQ ID NO: 18784 - protein, 140 aa, Zea mays subsp. mays
  misc_feature (1)..(140): Ceres Seq. ID no. 12367196
MTSPWCLSAPPAAPPVAAAPGALGFSASASTLARVPVPGSRRRRWNALVVCAAPDEEKITKRSPLDFPIEWERPKPGRRPDIFPKFSPMKTPLPHPLPADDPLDDDEEEEEEQAPPQEEPQEDDPDKEEPEEDDPDKPTE

SEQ ID NO: 18785 - DNA, 1061 bp, Zea mays subsp. mays
  misc_feature (1)..(1061): Ceres Seq. ID no. 12367225
acgaatcccgtcttcttcctttcttggccttctccacctcatcgccgagacgagatctctcccacacgaggaagggagagatgggcgggcgggtggatcacgagtactcctacctgttcaagatggtcctcatcggagacagcggcgtcggcaagtccaatatcctctctcgcttcacgcgcaaccacttctccctcgactccaagtccaccatcggcgtcgagttcgccaccaagtccctgcagatggacggcaaaacaataaaggctcagatctgggacacagctgggcaggaaaggtaccgtgcaattacaagtgcctactaccgtggagccgtgggagccctccttgtgtacgacatcacaaagaggcagagcttcgacaatgttcacaggtggcttcgtgaactccgcgaccatgctgactccagtattgtgatcatgatggtcggtaacaaatctgacctaatccacctgagagctatctctgaggatgaaggcaaagcgttggctgagaaggaggggttgttcttcctcgagacatcagctatggaggctataaacgtggagcaagccttccagactatcatgacggaggtctatggcattgtcaacaggaaagcgctggctgccaaagaagcagcagctgcaactgcttcgttgccctcccagggtaaaattatcagcattgacagcactgcaggaaacacaaagagggcatgctgctctacctaaaaatgttcaaacaccacattatacagaaccttggagacaattgttggtagaaaatggagcatagtgatcacaaatgatgtcgtggcaatatctactcttattctattctattctattcttttcttttctttattgtgtggacaaaatgggggtacatgcagtttagtttgttcagtgtgtgttagtcaaaagttagatattttcgttaggatccataccatttatcttctcaagttaaatgatactgcagtataactcagaatcatatagtcccaagttgctacagaattcaactgcgaatttgtgatttcatcatgcttacattct

SEQ ID NO: 18786 - protein, 243 aa, Zea mays subsp. mays
  misc_feature (1)..(243): Ceres Seq. ID no. 12367226
ESRLLPFLAFSTSSPRRDLSHTRKGEMGGRVDHEYSYLFKMVLIGDSGVGKSNILSRFTRNHFSLDSKSTIGVEFATKSLQMDGKTIKAQIWDTAGQERYRAITSAYYRGAVGALLVYDITKRQSFDNVHRWLRELRDHADSSIVIMMVGNKSDLIHLRAISEDEGKALAEKEGLFFLETSAMEAINVEQAFQTIMTEVYGIVNRKALAAKEAAAATASLPSQGKIISIDSTAGNTKRACCST

SEQ ID NO: 18787 - protein, 217 aa, Zea mays subsp. mays
  misc_feature (1)..(217): Ceres Seq. ID no. 12367227
MGGRVDHEYSYLFKMVLIGDSGVGKSNILSRFTRNHFSLDSKSTIGVEFATKSLQMDGKTIKAQIWDTAGQERYRAITSAYYRGAVGALLVYDITKRQSFDNVHRWLRELRDHADSSIVIMMVGNKSDLIHLRAISEDEGKALAEKEGLFFLETSAMEAINVEQAFQTIMTEVYGIVNRKALAAKEAAAATASLPSQGKIISIDSTAGNTKRACCST

SEQ ID NO: 18788 - protein, 203 aa, Zea mays subsp. mays
  misc_feature (1)..(203): Ceres Seq. ID no. 12367228
MVLIGDSGVGKSNILSRFTRNHFSLDSKSTIGVEFATKSLQMDGKTIKAQIWDTAGQERYRAITSAYYRGAVGALLVYDITKRQSFDNVHRWLRELRDHADSSIVIMMVGNKSDLIHLRAISEDEGKALAEKEGLFFLETSAMEAINVEQAFQTIMTEVYGIVNRKALAAKEAAAATASLPSQGKIISIDSTAGNTKRACCST

SEQ ID NO: 18789 - DNA, 1116 bp, Zea mays subsp. mays
  misc_feature (1)..(1116): Ceres Seq. ID no. 12367240
aacacacacattctgcgtggatttggctcgggggtcccgacagatctcagatgagagatctcgggcgttaggtttctggagcgtgctaatgaggtgctgatttggtgctgtgcagaatggaggcggaggagcgcgtggcggaggcgtcaagccgcagtacgggttccggccgacggagcccgcggggttcggcggcggcaggggcgatgcgaccaccgacatccctctggacaccatgaacgattcgaagggcaaggcgaaggagctgtctcagtgggagtcagatctcaggaggagggagtcggatatcaggaggagggaggaagctctcaagagcgctggggtgcccatggaggacaagaactggccgcctttcttcccaatcatccaccatgatattgccaatgagataccagcaaacgctcagaagttgcagtatcttgcgtttgcgagctggcttggtattgtgctttgcctcttttggaattttattgctgtcatagtctgttggatcagagggggagattctaaactatttttcctggctaccatctatggtatgcttggcatccctttgtcctacttgatgtggtatagacctctgtaccgagcaatgagaactgacagtgctttcagctttggatggtttttcctttgttacctgctccatattggtttttgcatatttgctgccattgctcctgcagttgtattccgtggaaaatcattaacgggtatactggcagcgatcgacaccttttctgatcatgcaatagttgggatcttttactttgtcggatttgccttgttttgcttggagacacttgtgagcatatgggttcttcagaaagtatacatgtacttcagagggcacaagtaggctatggaagcacttgcaatagtcaaccaactaccatctcatctgattgccatgtggttttgtatgttaggacaacgtatatttttccgtttgcattgtggagggtaagtacgactatatgtataattttcggtttgcatggtggagggtaaatacgactatattgtagcgtctctctcgactgatctgtttttaaccccaattctttgctcatatacaaattgtgctttgtatgc

SEQ ID NO: 18790 - protein, 214 aa, Zea mays subsp. mays
  misc_feature (1)..(214): Ceres Seq. ID no. 12367241
MNDSKGKAKELSQWESDLRRRESDIRRREEALKSAGVPMEDKNWPPFFPIIHHDIANEIPANAQKLQYLAFASWLGIVLCLFWNFIAVIVCWIRGGDSKLFFLATIYGMLGIPLSYLMWYRPLYRAMRTDSAFSFGWFFLCYLLHIGFCIFAAIAPAVVFRGKSLTGILAAIDTFSDHAIVGIFYFVGFALFCLETLVSIWVLQKVYMYFRGHK

SEQ ID NO: 18791 - protein, 176 aa, Zea mays subsp. mays; identical to SEQ ID NO: 15390
  misc_feature (1)..(176): Ceres Seq. ID no. 12367242

SEQ ID NO: 18792 - DNA, 1057 bp, Zea mays subsp. mays
  misc_feature (1)..(1057): Ceres Seq. ID no. 12367248
actggaaaatgtgccaacagaaaatggagtctctgctgacaatagagaggacgaatctgaaccagtagcggatgacaatgaagaatcctctagatcaaggaatctatactttacaattggtgatgccaaatgtcgagctgctgtacaactcctgttgattcaggctgtgatggaggtatataacatgtacagaggacagttatcagcacagaacacagtaatcctcttcgaagccttgcatactgttgccgcacatgctcacaaaataaacagtgatagtgatttgcgttccaagttgcaagagttgggctcgatgacacagatgcaggacccgccattgttacgccttgagaatgagtcgtaccagctgtgcctcagtatccttcagaacatatttctggacagctctcctgatcatggaagcacagaggtggtggagagtcaccttattgtcttgtgcaaggaggtccttgaggtatacttgagcacagcaagaccttctcagccttccagtggcacacagccgctaggccattggcttatccctgttggttcatcgaagcgaagggaacttgcggcaagagcacctcttgttgtctcaaccctgcaagctatcagcggactaggtgactcagctttcgagaagaaccttcgccagttctttcctcttctcgctgggctcataagctgcgagcatggttctagtgaagtacaggtggccctgagtgatatgttcagcacttgggttggcccactcgttctccagtcttgctgatgctgaacatcatgttatacatagtagtatacatcccatcgtgttcctcctttcctccattatgttatgttaatcttttagtcgctgggagttcatattgttgtgctgaactgatcatgcagatcaatttttccttgacgttattttcttgttcgtatcgggaggagtgtatgtcactatagagaactgaattatgtacggtagtttagctaaaattgtgcccattctgttcctaatgtgctgatttctagatttttaggcatgttttgcatgcttttgctc

SEQ ID NO: 18793 - protein, 257 aa, Zea mays subsp. mays
  misc_feature (1)..(257): Ceres Seq. ID no. 12367249
LENVPTENGVSADNREDESEPVADDNEESSRSRNLYFTIGDAKCRAAVQLLLIQAVMEVYNMYRGQLSAQNTVILFEALHTVAAHAHKINSDSDLRSKLQELGSMTQMQDPPLLRLENESYQLCLSILQNIFLDSSPDHGSTEVVESHLIVLCKEVLEVYLSTARPSQPSSGTQPLGHWLIPVGSSKRRELAARAPLVVSTLQAISGLGDSAFEKNLRQFFPLLAGLISCEHGSSEVQVALSDMFSTWVGPLVLQSC

SEQ ID NO: 18794 - protein, 201 aa, Zea mays subsp. mays
  misc_feature (1)..(201): Ceres Seq. ID no. 12367250
MEVYNMYRGQLSAQNTVILFEALHTVAAHAHKINSDSDLRSKLQELGSMTQMQDPPLLRLENESYQLCLSILQNIFLDSSPDHGSTEVVESHLIVLCKEVLEVYLSTARPSQPSSGTQPLGHWLIPVGSSKRRELAARAPLVVSTLQAISGLGDSAFEKNLRQFFPLLAGLISCEHGSSEVQVALSDMFSTWVGPLVLQSC

SEQ ID NO: 18795 - protein, 196 aa, Zea mays subsp. mays
  misc_feature (1)..(196): Ceres Seq. ID no. 12367251
MYRGQLSAQNTVILFEALHTVAAHAHKINSDSDLRSKLQELGSMTQMQDPPLLRLENESYQLCLSILQNIFLDSSPDHGSTEVVESHLIVLCKEVLEVYLSTARPSQPSSGTQPLGHWLIPVGSSKRRELAARAPLVVSTLQAISGLGDSAFEKNLRQFFPLLAGLISCEHGSSEVQVALSDMFSTWVGPLVLQSC

SEQ ID NO: 18796 - DNA, 1036 bp, Zea mays subsp. mays
  misc_feature (1)..(1036): Ceres Seq. ID no. 12367283
gccacacacacagtacgtacaagcctcatcagctcgctagcatagcagcaaccagcaatggactccaccaagttatccgcgctgctggcgctcgccatgctcgcgctctcctcgtcgccgctcgctcttgcgtgggagaaggcggagccggagtgcaactcgtgcgagtccggctcgccgccgtcgaccggcgtccccctgcccccgatcagcataccgtcagtccccctgcccccaatcagcataccgtcagtcccactgccccctgtcagtataccgtcggtccccatcccaccggtcaccgagctgcccccagtcgtcggactgccgccggtgacccttcctcccattccgatcatcggaggaagcccgccgaagaagggccaccggaaggcgtgcccgccgcctccgtctcccccgacgcccacgcccacgcccacgccgtcctcggacaagtgccccatcgacgcgctgaagctcggcgcgtgcgtggacattctcggggacgaggtgcacatcggcgacgccaacgtcaagtgctgcccgctcgtgaagggcatcgccgggctctccgccggcggcgtgcctgtgcaccgccatcaaggccaaggtgctggacatctccgtctacgtgcccatcgcgctggaggtgctcgtcaactgcggctgcgaggtcccgccaggctacaaatgcacttaaacgactccattccatttcatcccatctcaccatgcgtgcacagcgaggtctccttttgccctcccgaatgcaaagtttgaaaggctcgtcgacggatttgggtctccttttgcccacccgaatgcaaagtttcgaaaggctcgtcgacggattgggctcttcggctactgcattcttccttatttcatttgatttgctattcttgttgcatgtctgtatatgcatctagtgtcttctcaaatgtcactttgtactttgtgtgaacctgtatcaaacttttttttgttggattcgattattgtttgaagtgttaaattgaggcgcattgtcaccgtc

SEQ ID NO: 18797 - protein, 308 aa, Zea mays subsp. mays
  misc_feature (1)..(308): Ceres Seq. ID no. 12367284
HTHSTYKPHQLASIAATSNGLHQVIRAAGARHARALLVAARSCVGEGGAGVQLVRVRLAAVDRRPPAPDQHTVSPPAPNQHTVSPTAPCQYTVGPHPTGHRAAPSRRTAAGDPSSHSDHRRKPAEEGPPEGVPAASVSPDAHAHAHAVLGQVPHRRAEARRVRGHSRGRGAHRRRQRQVLPAREGHRRALRRRRACAPPSRPRCWTSPSTCPSRWRCSSTAAARSRQATNALKRLHSISSHLTMRAQRGLLLPSRMQSLKGSSTDLGLLLPTRMQSFERLVDGLGSSATAFFLISFDLLFLLHVCICI

SEQ ID NO: 18798 - protein, 240 aa, Zea mays subsp. mays
  misc_feature (1)..(240): Ceres Seq. ID no. 12367285
MDSTKLSALLALAMLALSSSPLALAWEKAEPECNSCESGSPPSTGVPLPPISIPSVPLPPISIPSVPLPPVSIPSVPIPPVTELPPVVGLPPVTLPPIPIIGGSPPKKGHRKACPPPPSPPTPTPTPTPSSDKCPIDALKLGACVDILGDEVHIGDANVKCCPLVKGIAGLSAGGVPVHRHQGQGAGHLRLRAHRAGGARQLRLRGPARLQMHLNDSIPFHPISPCVHSEVSFCPPECKV

SEQ ID NO: 18799 - protein, 227 aa, Zea mays subsp. mays
  misc_feature (1)..(227): Ceres Seq. ID no. 12367286
MLALSSSPLALAWEKAEPECNSCESGSPPSTGVPLPPISIPSVPLPPISIPSVPLPPVSIPSVPIPPVTELPPVVGLPPVTLPPIPIIGGSPPKKGHRKACPPPPSPPTPTPTPTPSSDKCPIDALKLGACVDILGDEVHIGDANVKCCPLVKGIAGLSAGGVPVHRHQGQGAGHLRLRAHRAGGARQLRLRGPARLQMHLNDSIPFHPISPCVHSEVSFCPPECKV

SEQ ID NO: 18800 - DNA, 1784 bp, Zea mays subsp. mays
  misc_feature (1)..(1784): Ceres Seq. ID no. 12367303
cttggattggggagctccgcctccctctcctcaagtttgaccaaccctcacccacctccctccgtcgtctagtatgcttcttgcctcccgcctgcttcctccgccgccctcctccgccgcggccggttcctcctcatcctctctgactccgatcccaactcaaaacacagagaactctgaaagctaatcggcaatggataaccacatccatagtcagccagctgctaacctctactaccagttcggcatggggactgagcagcaatacccaccaccgttcgcctcaccaccatccaccaacatcccgcacatggactggaacccggccacgatgctagacaacctcaccttcatcgaggagaagatacagcaagtgaaggacgtcatccgcacaatggtggacaacgccgggcaggtgcaggtccagtgccaccaccaaggcaggcgagctgctggctcagaagcagaagcagcaggtggtcaacgcggacctgacatgccttatagttcagctcatctccaccgccggcagcctgctcccgtcactgaagaactcgtcgttcctcagccacccccaccctgctggccacgtggacatggctaaccatgttggcccaagctcgagcctagtgcctaatgcgatgaccgtttctgaagactatgaggagctgttcaagggatggaccgatggcggcattgaggtcgacgacgacggcgttcttgtcgaggagcaggaaattaccaaggacggagacagcctctcgtacgagctgctgcagctggaggaggacgagatactggcgccgcacacgcacttttgcaccatctgcgggaaagggttcaagcgggacgcgaacctgcggatgcacatgcgagggcacggcgacgagtacaagagcccggcggcgctggccaagccgccgagggacccgggcgcggagcaggagccggcgaagcggcggtactcgtgcccgttcgcggggtgcaagcggaacaagctgcacaaaagcttccagcccctcaagaccatcctgtgcgtgaagaaccactacaggcggagccactgcgagaagagccacacctgcggccggtgccacgccaagaagttctccatcgtggccgacctgaggacgcacgagaagcactgcggccgccgggacaggtgggtgtgctcctgcgggacgagtttctcgaggaaggacaagctcttcgcgcacgtcgccttgttccaaggtcacacgcccgcgttgtcgtcgccgctggaggaggagccgccgaaggcttgctcggaccagcaccagaccggccgtgctgggagccgtcgggaaccagcgaaagtcccagctggctcagtgggcggcggcagcggcagcagcttcgtgtggggtgcctcgtcctcaggggagaacagtgctctggatatcaaaggttttgttgatggatgcagtggtgacttcctctcgacggcgaactttggctccttcaacctcagcttcgggcctgctgacgggttcacaggagagccttctagtggtggttcgttctcgatgctacctcctgagcactttcagagtgctcagaagaaggggcagaactgaatatggataatctcagacagctttagatgtatgtatctgggcggcttcagatgcaccaccatcatctctggttcatgctcgtttttctccactgtagtgtagaacattgtcacagtttgagattgttgtctccttccttcctatgtacccgcctttatcgctggaagccgactgttgaactttcgc

SEQ ID NO: 18801 - protein, 333 aa, Zea mays subsp. mays
  misc_feature (1)..(333): Ceres Seq. ID no. 12367304
MANHVGPSSSLVPNAMTVSEDYEELFKGWTDGGIEVDDDGVLVEEQEITKDGDSLSYELLQLEEDEILAPHTHFCTICGKGFKRDANLRMHMRGHGDEYKSPAALAKPPRDPGAEQEPAKRRYSCPFAGCKRNKLHKSFQPLKTILCVKNHYRRSHCEKSHTCGRCHAKKFSIVADLRTHEKHCGRRDRWVCSCGTSFSRKDKLFAHVALFQGHTPALSSPLEEEPPKACSDQHQTGRAGSRREPAKVPAGSVGGGSGSSFVWGASSSGENSALDIKGFVDGCSGDFLSTANFGSFNLSFGPADGFTGEPSSGGSFSMLPPEHFQSAQKKGQN

SEQ ID NO: 18802 - protein, 318 aa, Zea mays subsp. mays
  misc_feature (1)..(318): Ceres Seq. ID no. 12367305
MTVSEDYEELFKGWTDGGIEVDDDGVLVEEQEITKDGDSLSYELLQLEEDEILAPHTHFCTICGKGFKRDANLRMHMRGHGDEYKSPAALAKPPRDPGAEQEPAKRRYSCPFAGCKRNKLHKSFQPLKTILCVKNHYRRSHCEKSHTCGRCHAKKFSIVADLRTHEKHCGRRDRWVCSCGTSFSRKDKLFAHVALFQGHTPALSSPLEEEPPKACSDQHQTGRAGSRREPAKVPAGSVGGGSGSSFVWGASSSGENSALDIKGFVDGCSGDFLSTANFGSFNLSFGPADGFTGEPSSGGSFSMLPPEHFQSAQKKGQN

SEQ ID NO: 18803 - protein, 244 aa, Zea mays subsp. mays
  misc_feature (1)..(244): Ceres Seq. ID no. 12367306
MHMRGHGDEYKSPAALAKPPRDPGAEQEPAKRRYSCPFAGCKRNKLHKSFQPLKTILCVKNHYRRSHCEKSHTCGRCHAKKFSIVADLRTHEKHCGRRDRWVCSCGTSFSRKDKLFAHVALFQGHTPALSSPLEEEPPKACSDQHQTGRAGSRREPAKVPAGSVGGGSGSSFVWGASSSGENSALDIKGFVDGCSGDFLSTANFGSFNLSFGPADGFTGEPSSGGSFSMLPPEHFQSAQKKGQN

SEQ ID NO: 18804 - DNA, 1196 bp, Zea mays subsp. mays
  misc_feature (1)..(1196): Ceres Seq. ID no. 12367307
cccagtcgtgtcgccactcgccgccatccgctccgcaggtcacgtgaaaagcagtgcagggcgcaagggcaccgccgaggcagaaaagggcggataaactgcttgaactggaagcgaccctagtccaaaccaccgcaccgacaccgactccgagccccgccgcgccgcgctacctccgctcctctcttcgcccctgccggcgtcgaggccgaagcgaaggcgagcatgcatcacgaccccaaccccttcgacgagggcagcgccgaggacaaccccttctcaaatggaggagccggaggcggcaagcagcagtacggcttccggccgactgagcccgtcgggttcggcggcgctagcaggggcgacgccgtcgttgacgtcccgctcgagaccatgggggactctcggagcaaggtgaaggagctctcgtcgtgggaatcagatctgaagcggcgagaggcggatatcaagaggagggaagaggcgctgaagaatgctggcgtgccaatggaggagaagaactggccaccattcttccccatcatccaccatgatattgccaatgagataccagcaaatgtgcagaagttgcagtatcttgcatttgcaagctggcttggaattgtgctttgtttgtcctggaacttcgttgctgtcatagtctgctggatcaaggagggagattcaaagttgtttttccttgcaacaatctatgctttgcttggaattcctctgtcatatttgatatggtacaggccactctaccgtgcaatgaggactaacagtgctttcagttttggatggtttttcctgtgttacctgatccacattggtttttgcataattgctgccattgctccaccaattgtatttcatgggaaatcattaactggtattctggctgcgattgacactttctctgaacatgtgataattgggatcttttactttgtggggtttgcactgttttgtctggagacactgctgagcattggggttcttcagaaagtgtacatgtacttcagagggaacaagtgaagccagtcatgatggagagttacgtttgttgagaaaatttggagttacttgtggctacttgtagcacatgttcattcgatggttttgtgcatacctgtcagtacaccttgaatctataatttcttatgtcagttattggtgccgagaattgttttttt

SEQ ID NO: 18805 - protein, 270 aa, Zea mays subsp. mays
  misc_feature (1)..(270): Ceres Seq. ID no. 12367308
MHHDPNPFDEGSAEDNPFSNGGAGGGKQQYGFRPTEPVGFGGASRGDAVVDVPLETMGDSRSKVKELSSWESDLKRREADIKRREEALKNAGVPMEEKNWPPFFPIIHHDIANEIPANVQKLQYLAFASWLGIVLCLSWNFVAVIVCWIKEGDSKLFFLATIYALLGIPLSYLIWYRPLYRAMRTNSAFSFGWFFLCYLIHIGFCIIAAIAPPIVFHGKSLTGILAAIDTFSEHVIIGIFYFVGFALFCLETLLSIGVLQKVYMYFRGNK

SEQ ID NO: 18806 - protein, 214 aa, Zea mays subsp. mays
  misc_feature (1)..(214): Ceres Seq. ID no. 12367309
MGDSRSKVKELSSWESDLKRREADIKRREEALKNAGVPMEEKNWPPFFPIIHHDIANEIPANVQKLQYLAFASWLGIVLCLSWNFVAVIVCWIKEGDSKLFFLATIYALLGIPLSYLIWYRPLYRAMRTNSAFSFGWFFLCYLIHIGFCIIAAIAPPIVFHGKSLTGILAAIDTFSEHVIIGIFYFVGFALFCLETLLSIGVLQKVYMYFRGNK

SEQ ID NO: 18807 - protein, 176 aa, Zea mays subsp. mays
  misc_feature (1)..(176): Ceres Seq. ID no. 12367310
MEEKNWPPFFPIIHHDIANEIPANVQKLQYLAFASWLGIVLCLSWNFVAVIVCWIKEGDSKLFFLATIYALLGIPLSYLIWYRPLYRAMRTNSAFSFGWFFLCYLIHIGFCIIAAIAPPIVFHGKSLTGILAAIDTFSEHVIIGIFYFVGFALFCLETLLSIGVLQKVYMYFRGNK

SEQ ID NO: 18808 - DNA, 1335 bp, Zea mays subsp. mays
  misc_feature (1)..(1335): Ceres Seq. ID no. 12367315
gggaatcaatcacgcacacgcgcacgcaccgccacccttcccgaaaagtctcctcacctcccggtcccggcctcccttcctctctctccccccctctcaaacatccccgcgccgatggatctccgcctcgcccactaggcctccggcgcgaccgagggtgggcagggggatggggctcctcgggcggaggacgttgctgcggctcctcgccctcgcttccgcggccgtcgccgtcgccgtcaccgtggaagcctacgagggcgacgctgatccgctctacagagcttgtgtggaaggatgccaaaagacaggctccctgaaggagacttctattaaacattgtatggtgccaaccgatggccaacctgttgacaagtcatggtacacgcatgagccactgtacttgcaatggaaggactggaactgcaagagtgaatgcagataccactgtatgatggaaagggagaatgaaagggcaaagcttggcctccagcctgttaagtatcatggaaaatggcctttgaagcgtgcctctgtgtttcaggaacctttatctgcagctctctctgcgcttactcttgttgtgcaatttaatgggtggctatcatttttcctcttgctttattataaacttcctctgcggccagaaactcacaagacatactatgaatacactggcttgtggcacatctatgggctccttgccatgaattcatggttctggagtgccatatatcacagttgtgacacaatttggacagaaaaactatatttttcatcagatgctgcctttctggggtattccctcattttggcgatactgcggactttaaatttaagagacgaagcatctagagttatggttgccgctcctattctagcatttgtgacaacccacattctgtacctcaacttctacgaacttgacaaaggcctgaacatgaaggtttgtactgtgataatcattgctcagtgtctcctatgggcactgtgggctgtcatgactcggcatccttcacggctgaagatcatatttgttgccatcggaggtgcggctgcggtacttctggaagcttctgacattcctccgcgatggggatatgtggatggccgtgctatatgccttgctgtggctatcccccttttacctttggtggagctttgccaaggaagatgcggagatgcgaacgtcagcaatcctgaagaaggcacgttaacaagtcgcctgtgtgataatttcatgcctgcgcccagccattgtaaagataaaagtttcacttgtaatcttaggtaactactaacttagcatgtgaattaccgtcttatttttgttcc

SEQ ID NO: 18809 - protein, 430 aa, Zea mays subsp. mays
  misc_feature (1)..(430): Ceres Seq. ID no. 12367316
GINHAHAHAPPPFPKSLLTSRSRPPFLSLPPSQTSPRRWISASPTRPPARPRVGRGMGLLGRRTLLRLLALASAAVAVAVTVEAYEGDADPLYRACVEGCQKTGSLKETSIKHCMVPTDGQPVDKSWYTHEPLYLQWKDWNCKSECRYHCMMERENERAKLGLQPVKYHGKWPLKRASVFQEPLSAALSALTLVVQFNGWLSFFLLLYYKLPLRPETHKTYYEYTGLWHIYGLLAMNSWFWSAIYHSCDTIWTEKLYFSSDAAFLGYSLILAILRTLNLRDEASRVMVAAPILAFVTTHILYLNFYELDKGLNMKVCTVIIIAQCLLWALWAVMTRHPSRLKIIFVAIGGAAAVLLEASDIPPRWGYVDGRAICLAVAIPLLPLVELCQGRCGDANVSNPEEGTLTSRLCDNFMPAPSHCKDKSFTCNLR

SEQ ID NO: 18810 - protein, 374 aa, Zea mays subsp. mays
  misc_feature (1)..(374): Ceres Seq. ID no. 12367317
MGLLGRRTLLRLLALASAAVAVAVTVEAYEGDADPLYRACVEGCQKTGSLKETSIKHCMVPTDGQPVDKSWYTHEPLYLQWKDWNCKSECRYHCMMERENERAKLGLQPVKYHGKWPLKRASVFQEPLSAALSALTLVVQFNGWLSFFLLLYYKLPLRPETHKTYYEYTGLWHIYGLLAMNSWFWSAIYHSCDTIWTEKLYFSSDAAFLGYSLILAILRTLNLRDEASRVMVAAPILAFVTTHILYLNFYELDKGLNMKVCTVIIIAQCLLWALWAVMTRHPSRLKIIFVAIGGAAAVLLEASDIPPRWGYVDGRAICLAVAIPLLPLVELCQGRCGDANVSNPEEGTLTSRLCDNFMPAPSHCKDKSFTCNLR

SEQ ID NO: 18811 - protein, 316 aa, Zea mays subsp. mays
  misc_feature (1)..(316): Ceres Seq. ID no. 12367318
MVPTDGQPVDKSWYTHEPLYLQWKDWNCKSECRYHCMMERENERAKLGLQPVKYHGKWPLKRASVFQEPLSAALSALTLVVQFNGWLSFFLLLYYKLPLRPETHKTYYEYTGLWHIYGLLAMNSWFWSAIYHSCDTIWTEKLYFSSDAAFLGYSLILAILRTLNLRDEASRVMVAAPILAFVTTHILYLNFYELDKGLNMKVCTVIIIAQCLLWALWAVMTRHPSRLKIIFVAIGGAAAVLLEASDIPPRWGYVDGRAICLAVAIPLLPLVELCQGRCGDANVSNPEEGTLTSRLCDNFMPAPSHCKDKSFTCNLR

SEQ ID NO: 18812 - DNA, 1728 bp, Zea mays subsp. mays
  misc_feature (1)..(1728): Ceres Seq. ID no. 12367331
ccaatcggacggcctagacggctcccttcctctccttgccacacttgcgctcctcttcgagactccgagttgtcgtctccgtcgctgctggctgctgcgccactcccccagccccgagatctgctcaacaatggcgacgcggcgccacatcctcctcctcgccgctgccttcgtgtcccttctcgcgctcgaggctgtggagggcctcgaagaggggccccgcgggcgccggctgctggtcctgctggacgacctggccgtgcggtcgtcgcactcggccttcttcggctcgctccaggcgcgcgggttcgatctcgaattccgcctcgccgacgaccccaagctctcgctgcaccgctacggccagtacctctacgatggcctcgtgctgttcgccccctccaccccacgttttggtggatcagtggaccagaacgcagtccttgaatttattgatgctgggcatgatatgatcctggcggcagattcctctgcctctgatcttattcgtggcattgcgacagagtgtggggttgattttgatgaggatccagaggcaatggttattgaccacattaactatgccgctatggatgttgaaggcgatcacaccttgattgttggtgatgatcttattcaatcagatgtcatactggggtctaaaaagattgaggctcctgtattatttcgtggaattggacacacggctaatccatcaaacagtttggttctgaaagtcctatctgcctctccatcagcatactcagctaacccaaagactaagttattgttgcctccatcgcttactgggtcagctatatcactggtttcggttatgcaggcaagaaataatgctcgggtgctgctatctggatcacttgatctttttagcaaccggttcctgaagtctggtgttcaaaaggctggtagcaaaacgagatacgagagagctggaaatgagcaatttgtgacagagacaagcaaatgggtcttccatgagagggggcaccttaaggctgttaatgttaagcaccacaaggttggggagaccaatgaaccaggcatgtaccgcattaacgatgacctggaatactctgttgagatctatgaatggtctggaacaagctggaagccatatgttgctgatgatgtgcaactccagtttttcatgatgagtccttatgttctgaaaactatgtcgaatgacaacaagggtttatactcaacatccttcaaagttcctgatgtctacggagttttccagttcaaagttgagtaccagaggctgggatatactggtttgtcttttacaaagcagattccagtgcgcccttacaggcataacgagtatgagaggttcataacatcagcgtacccatactacactgcctcattttcaacgatgtgtgctttcttcatattctcgcttgtgtacctgtaccacaaataaaggactcacgggagcgcacaagtttctggaggctgctgatgcgacctagatctgtggccaagtgttacccggtgcaattttatggaatcatatatttgtagtaggccaacttagctagaattagacgaccgtgaccgcaatcatgggaaatttactcgtgctagtaggatgttcgatctgccccacaattttttgttttcggatccttctgatcagcacttgtgaaaacgtttacagtctgtagcattgaaaggatgatgaagcatgtagtgattttg

SEQ ID NO: 18813 - protein, 482 aa, Zea mays subsp. mays
  misc_feature (1)..(482): Ceres Seq. ID no. 12367332
QSDGLDGSLPLLATLALLFETPSCRLRRCWLLRHSPSPEICSTMATRRHILLLAAAFVSLLALEAVEGLEEGPRGRRLLVLLDDLAVRSSHSAFFGSLQARGFDLEFRLADDPKLSLHRYGQYLYDGLVLFAPSTPRFGGSVDQNAVLEFIDAGHDMILAADSSASDLIRGIATECGVDFDEDPEAMVIDHINYAAMDVEGDHTLIVGDDLIQSDVILGSKKIEAPVLFRGIGHTANPSNSLVLKVLSASPSAYSANPKTKLLLPPSLTGSAISLVSVMQARNNARVLLSGSLDLFSNRFLKSGVQKAGSKTRYERAGNEQFVTETSKWVFHERGHLKAVNVKHHKVGETNEPGMYRINDDLEYSVEIYEWSGTSWKPYVADDVQLQFFMMSPYVLKTMSNDNKGLYSTSFKVPDVYGVFQFKVEYQRLGYTGLSFTKQIPVRPYRHNEYERFITSAYPYYTASFSTMCAFFIFSLVYLYHK

SEQ ID NO: 18814 - protein, 439 aa, Zea mays subsp. mays
  misc_feature (1)..(439): Ceres Seq. ID no. 12367333
MATRRHILLLAAAFVSLLALEAVEGLEEGPRGRRLLVLLDDLAVRSSHSAFFGSLQARGFDLEFRLADDPKLSLHRYGQYLYDGLVLFAPSTPRFGGSVDQNAVLEFIDAGHDMILAADSSASDLIRGIATECGVDFDEDPEAMVIDHINYAAMDVEGDHTLIVGDDLIQSDVILGSKKIEAPVLFRGIGHTANPSNSLVLKVLSASPSAYSANPKTKLLLPPSLTGSAISLVSVMQARNNARVLLSGSLDLFSNRFLKSGVQKAGSKTRYERAGNEQFVTETSKWVFHERGHLKAVNVKHHKVGETNEPGMYRINDDLEYSVEIYEWSGTSWKPYVADDVQLQFFMMSPYVLKTMSNDNKGLYSTSFKVPDVYGVFQFKVEYQRLGYTGLSFTKQIPVRPYRHNEYERFITSAYPYYTASFSTMCAFFIFSLVYLYHK

SEQ ID NO: 18815 - protein, 326 aa, Zea mays subsp. mays
  misc_feature (1)..(326): Ceres Seq. ID no. 12367334
MILAADSSASDLIRGIATECGVDFDEDPEAMVIDHINYAAMDVEGDHTLIVGDDLIQSDVILGSKKIEAPVLFRGIGHTANPSNSLVLKVLSASPSAYSANPKTKLLLPPSLTGSAISLVSVMQARNNARVLLSGSLDLFSNRFLKSGVQKAGSKTRYERAGNEQFVTETSKWVFHERGHLKAVNVKHHKVGETNEPGMYRINDDLEYSVEIYEWSGTSWKPYVADDVQLQFFMMSPYVLKTMSNDNKGLYSTSFKVPDVYGVFQFKVEYQRLGYTGLSFTKQIPVRPYRHNEYERFITSAYPYYTASFSTMCAFFIFSLVYLYHK

SEQ ID NO: 18816 - DNA, 1780 bp, Zea mays subsp. mays
  misc_feature (1)..(1780): Ceres Seq. ID no. 12367347
ataaataggccagcatttgcaatccaactttagctgccatctgtttctgaaccatggatccatttgttctctccatcctcttatgctcatcgatctttgttgtagtgtactggagaaggctgaacagcatgaggctaagacttccaccgggacctccaacatggccaattttcggcaatcttctccagttgagccctcttccccacaaagactttgcccaattttgcaccaaatatggccctctcgtctatcttcgcctgggaaccatcgatgccatcaccactgatgaccccgaagtgatccgtgaaatactcatccggcaagatgaggtctttgcttcgcggcctcggacactggctgccgtccatctcgcctatgggtgtggtgatgtggctctagctccactgggacccaactggaaaaggatgaggagagtttgcatggagcacttgctgacgaccaggcggctcgagtctttcgctgctcaccgagctcaggaggccgagcacctctgccagtttgtgtgggctaaatctcagtccgggaagcccgtgaacctcagagaggttctcggtgccttctcgatgaacaacgtcacgcggatgctgctggggaagcagtactttgggatccagtcggcaggccccggcgaggcaatggagttcatgcacatcacccacgagctgttcttcctgctgggcctgatctatctcggggactacttgccggcttggaggtgggtcgacccgtacgggtgtgagaagaggatgagggaggtggagaagaaggtggacgacttccaccagaagatcattgatgagcacaggagagctagggaggccaggaagagtcgttcctccgttgaggaagatggcggcaacggcaaagatgagatggacttcgtcgatgtgctgttatctttgcctggtgagaacgggaaggagcacatggacgacatggagatcaaagcgttgatgcaggacatgatcgctgctgctactgatacttcatcggtgacgaacgagtgggtgatggcggaggtaatcaagaacccgcgcgtgctccggcgcgtccaggaggagctggacgcggtggtggggcgcgaccggatggtggcggagtcggacctggcccacctcccctacctccggtgcgtggtgcgcgagtcattccggatgcacccggcggggccgttccttatcccgcacgagtcgctgaaggcgacgaccatcatggggtaccacgtgccggcgcgcacgcgcgtgttcatcaacacgcacgcgctggggcggaacccgcgcgtgtgggactcccgtgggcgagttccggccggagcggcacctgccggcggaggagggggcgcgggtggagatcagccacctgccggacttcaagatcctgccgttcagcgccgggaagcgcaagtgccccggcgcgccgctgggcgtggcgctggtgctcatggcgctcgccaggctcttccactgcttcgactggtccccgcccgacggcctccgccccgaggacgtggacacccgggaggtgtacggcatgaccatgcccaaggccacgcccctcgtcgccgtcgccactccgcgcctgccgccgcacttgtacggcggcggcggcggcagctcggctccttagttcgatgacactttgacgcacgtgcgctgcactgccagtctcattagtcattatacgcatgatgtacttccctccatatacaatacaccgcataaaccaaacgatgaatgaaatgtagtcgttctatggtttc

SEQ ID NO: 18817 - protein, 533 aa, Zea mays subsp. mays
  misc_feature (1)..(533): Ceres Seq. ID no. 12367348
MDPFVLSILLCSSIFVVVYWRRLNSMRLRLPPGPPTWPIFGNLLQLSPLPHKDFAQFCTKYGPLVYLRLGTIDAITTDDPEVIREILIRQDEVFASRPRTLAAVHLAYGCGDVALAPLGPNWKRMRRVCMEHLLTTRRLESFAAHRAQEAEHLCQFVWAKSQSGKPVNLREVLGAFSMNNVTRMLLGKQYFGIQSAGPGEAMEFMHITHELFFLLGLIYLGDYLPAWRWVDPYGCEKRMREVEKKVDDFHQKIIDEHRRAREARKSRSSVEEDGGNGKDEMDFVDVLLSLPGENGKEHMDDMEIKALMQDMIAAATDTSSVTNEWVMAEVIKNPRVLRRVQEELDAVVGRDRMVAESDLAHLPYLRCVVRESFRMHPAGPFLIPHESLKATTIMGYHVPARTRVFINTHALGRNPRVWDSRGRVPAGAAPAGGGGGAGGDQPPAGLQDPAVQRREAQVPRRAAGRGAGAHGARQALPLLRLVPARRPPPRGRGHPGGVRHDHAQGHAPRRRRHSAPAAALVRRRRRQLGSLVR

SEQ ID NO: 18818 - protein, 508 aa, Zea mays subsp. mays
  misc_feature (1)..(508): Ceres Seq. ID no. 12367349
MRLRLPPGPPTWPIFGNLLQLSPLPHKDFAQFCTKYGPLVYLRLGTIDAITTDDPEVIREILIRQDEVFASRPRTLAAVHLAYGCGDVALAPLGPNWKRMRRVCMEHLLTTRRLESFAAHRAQEAEHLCQFVWAKSQSGKPVNLREVLGAFSMNNVTRMLLGKQYFGIQSAGPGEAMEFMHITHELFFLLGLIYLGDYLPAWRWVDPYGCEKRMREVEKKVDDFHQKIIDEHRRAREARKSRSSVEEDGGNGKDEMDFVDVLLSLPGENGKEHMDDMEIKALMQDMIAAATDTSSVTNEWVMAEVIKNPRVLRRVQEELDAVVGRDRMVAESDLAHLPYLRCVVRESFRMHPAGPFLIPHESLKATTIMGYHVPARTRVFINTHALGRNPRVWDSRGRVPAGAAPAGGGGGAGGDQPPAGLQDPAVQRREAQVPRRAAGRGAGAHGARQALPLLRLVPARRPPPRGRGHPGGVRHDHAQGHAPRRRRHSAPAAALVRRRRRQLGSLVR

SEQ ID NO: 18819 - protein, 409 aa, Zea mays subsp. mays
  misc_feature (1)..(409): Ceres Seq. ID no. 12367350
MRRVCMEHLLTTRRLESFAAHRAQEAEHLCQFVWAKSQSGKPVNLREVLGAFSMNNVTRMLLGKQYFGIQSAGPGEAMEFMHITHELFFLLGLIYLGDYLPAWRWVDPYGCEKRMREVEKKVDDFHQKIIDEHRRAREARKSRSSVEEDGGNGKDEMDFVDVLLSLPGENGKEHMDDMEIKALMQDMIAAATDTSSVTNEWVMAEVIKNPRVLRRVQEELDAVVGRDRMVAESDLAHLPYLRCVVRESFRMHPAGPFLIPHESLKATTIMGYHVPARTRVFINTHALGRNPRVWDSRGRVPAGAAPAGGGGGAGGDQPPAGLQDPAVQRREAQVPRRAAGRGAGAHGARQALPLLRLVPARRPPPRGRGHPGGVRHDHAQGHAPRRRRHSAPAAALVRRRRRQLGSLVR

SEQ ID NO: 18820 - DNA, 1221 bp, Zea mays subsp. mays
  misc_feature (1)..(1221): Ceres Seq. ID no. 12367375
cgcctgggccggctgcatctttctcctcccaccatcacctcctcctctttatccatctgccagggcgcacgaggagaacggcggcgtctgagatcgcgaggccgaggcttgtcccgtcctcgctcggctccgctcctctcacccacggtttctggaggacaattctttgctatctagccttcctcaaaagtaaaaagggtaaatgggatcagaaggaccttcagttgtgactgtccatgttactggatttaagaagttccatggggttgctgagaacccaactgagaaaattgtgaccaatcttaaatctttcttggaaaagcgagggttgccaaaaaatcttgtcctcggaagctgcacagttctcgaaacagcaggggaaggggcacttgccacattatataaggttttagagtctgctgttgcagacagaggaactgggtcctcggcacagggacaagtaatttggatccactttggggtcaacagtggcgcaataaggtttgcccttgagaaccaagctgttaatgaggctaccttccggtgtccagatgagctaggatggaaaccacagagggtccctattgtgccctctgatggaagcatctcacggacgagagagactaccctgccagtcaatgaattaaccaagtcactccggaagataggctacgacgtggtgccctccggcgacgccggtcggtttgtatgcaactacgtgtactaccactctcttcggttcgcggagcaacacggcatcaaatccctgttcgtgcatgttcccctcttcttgacgatcgacgaggaggtccagatgcacttcgtcgcttccctccttgaagtcatcgctttctcctccaactaggaacagcagttggaagatcagcgtctgaattcctatctcaaggatggatgtaaagctggaatgctgcatgtaggctgaataaggtggtgtggtcattggcgatagatgttaatcttgctccagagggtgtgtttgggaatcgggagagaaaaaaagagaggtcattggcgatagatgttgatcttgctccagagggtgtgtttgggaattgggagggggaaaaaagaggaaattgctgcatagagtcagacggtgtatcagcttgtacgccatcaatcaagtgctgtaaacatgcctgggaaataattggggacctggatttgaataagatttgagttgttgggggcggacgcgct

SEQ ID NO: 18821 - protein, 220 aa, Zea mays subsp. mays
  misc_feature (1)..(220): Ceres Seq. ID no. 12367376
MGSEGPSVVTVHVTGFKKFHGVAENPTEKIVTNLKSFLEKRGLPKNLVLGSCTVLETAGEGALATLYKVLESAVADRGTGSSAQGQVIWIHFGVNSGAIRFALENQAVNEATFRCPDELGWKPQRVPIVPSDGSISRTRETTLPVNELTKSLRKIGYDVVPSGDAGRFVCNYVYYHSLRFAEQHGIKSLFVHVPLFLTIDEEVQMHFVASLLEVIAFSSN

SEQ ID NO: 18822 - DNA, 1782 bp, Zea mays subsp. mays
  misc_feature (1)..(1782): Ceres Seq. ID no. 12367381
accgttccttttctccaccattgaaacactctctgaccctcactcgctccctgtcacacacactacactcgcaattcatccgcagtcacaagctcggctgctgctcccgcctaacggttgaggcgttgctggtgcacacaggaagggaagggaagggagagctgcacacagctttgctctggctcttggctcccctgtccacctgtcctgtccgtccatcatggaggaaacgcccagcccgcagctctagccgccgtcaatctcgtctcgtatcggagtcgaaggaagtaagaggcgggatggcatgaagcgacctaccaagaatgagaggctgggcaacccccggcacaagtaggaggaagaacccgagcaaccgagccacagggaggaggaggagatgggcaactgcggcacacgggaggagaatgccgtcgtcgctgcgcacgcgcaagttcagcaactccacttgttacaacagccttccaagaacgccaatgcagataggaagcacacctgcatgtcatcagatataagtgacccttccacacctaggaaagttgaagatgccaagaacatttccatatacaacgatgtgattgccttcacattgtttgagctagagacaatcacaaagagcttccgtgttgattatgttcttggcgaaggaggatttgggaccgtttacaagggttacatagatgaaaatgtcagggttgggctgaagtcactgcctgttgcagtcaaggtgctcaacaaagatggacatcaagggcacagagaatggcttaccgaggttaactgcctggggcagttgaggcatccaaatttggtgaagttgatcggatattgctgcgaagatgaccatcggctgcttgtctacgagttcatgtttcgaggaagtctagaaaaccacttattccgaaagacagctacgccattgccctggggtactaggatgtcaatcgcgctgggagccgctaaagggctcgcttgcctccacaacgctcaaaggcccgtcatctacagagatttcaagacatcaaacattctgctggactccgattatactgccaaactgtctgactttggcctcgcaaaagatggccctgaaggtgatcagacgcatgtgtcgacacgggtgatgggaacctacggttatgctgcccctgaatatgtgatgaccggtcacttgactgctcggagtgacgtgtacagcttcggcgtggtcctgctggagctcctgacggggcgcaagtcgatcgacaagtcgcggcccagcagggagcagagcctggtggactgggcgctcccgaagctcaacgacaagaggaggctcctccagatcatcgacccgaggctggaggggcagtactcggccagagccgctcacaagtcctgcagcctcgcgttctactgcctgagccagaaccccaaggccaggccgctcatgagcgacgtcgtcgagaccctcgcgccgttgcagcagggcggcggcggcggcagcgacgcgtcctccggccttcctgactgcagaggccgccgcaggctgaccggcaacagcgtcgtccacttcagggccatccccaaccccaagtgcacgcctgttgtcccggcttgcagagtgcggtgatgttgctgcgcttcggttgaagctgctgggataggttcaggtgtgtactgtgaccatgggtggtggtgcgttttgatgatctgcatgttggattaatgtgggcttggcccaaattaatattcaataatagtcaatgctaatggcccactttt

SEQ ID NO: 18823 - protein, 410 aa, Zea mays subsp. mays
  misc_feature (1)..(410): Ceres Seq. ID no. 12367382
MGNCGTREENAVVAAHAQVQQLHLLQQPSKNANADRKHTCMSSDISDPSTPRKVEDAKNISIYNDVIAFTLFELETITKSFRVDYVLGEGGFGTVYKGYIDENVRVGLKSLPVAVKVLNKDGHQGHREWLTEVNCLGQLRHPNLVKLIGYCCEDDHRLLVYEFMFRGSLENHLFRKTATPLPWGTRMSIALGAAKGLACLHNAQRPVIYRDFKTSNILLDSDYTAKLSDFGLAKDGPEGDQTHVSTRVMGTYGYAAPEYVMTGHLTARSDVYSFGVVLLELLTGRKSIDKSRPSREQSLVDWALPKLNDKRRLLQIIDPRLEGQYSARAAHKSCSLAFYCLSQNPKARPLMSDVVETLAPLQQGGGGGSDASSGLPDCRGRRRLTGNSVVHFRAIPNPKCTPVVPACRVR

SEQ ID NO: 18824 - protein, 370 aa, Zea mays subsp. mays
  misc_feature (1)..(370): Ceres Seq. ID no. 12367383
MSSDISDPSTPRKVEDAKNISIYNDVIAFTLFELETITKSFRVDYVLGEGGFGTVYKGYIDENVRVGLKSLPVAVKVLNKDGHQGHREWLTEVNCLGQLRHPNLVKLIGYCCEDDHRLLVYEFMFRGSLENHLFRKTATPLPWGTRMSIALGAAKGLACLHNAQRPVIYRDFKTSNILLDSDYTAKLSDFGLAKDGPEGDQTHVSTRVMGTYGYAAPEYVMTGHLTARSDVYSFGVVLLELLTGRKSIDKSRPSREQSLVDWALPKLNDKRRLLQIIDPRLEGQYSARAAHKSCSLAFYCLSQNPKARPLMSDVVETLAPLQQGGGGGSDASSGLPDCRGRRRLTGNSVVHFRAIPNPKCTPVVPACRVR

SEQ ID NO: 18825 - protein, 247 aa, Zea mays subsp. mays
  misc_feature (1)..(247): Ceres Seq. ID no. 12367384
MFRGSLENHLFRKTATPLPWGTRMSIALGAAKGLACLHNAQRPVIYRDFKTSNILLDSDYTAKLSDFGLAKDGPEGDQTHVSTRVMGTYGYAAPEYVMTGHLTARSDVYSFGVVLLELLTGRKSIDKSRPSREQSLVDWALPKLNDKRRLLQIIDPRLEGQYSARAAHKSCSLAFYCLSQNPKARPLMSDVVETLAPLQQGGGGGSDASSGLPDCRGRRRLTGNSVVHFRAIPNPKCTPVVPACRVR

SEQ ID NO: 18826 - DNA, 1946 bp, Zea mays subsp. mays
  misc_feature (1)..(1946): Ceres Seq. ID no. 12367399
gcacgagaccattacctagaacatcctaatcgaaaaatcggggtctccttcccctcctccggttgtccggtcccccagaaaccgtgtccttccgtcgtgacagctcccgaccttctggcggtcttcccctctcgtagtcggcgcgaatcccgaggtggaggaggaagaggtagagggggcgggccccatcatccatgagccttgcgggctccgcgctggaggcagcgctactggcggtggggcgcggcctcgacgcagctggagaccaccggctgctctactgcaagggagacggaaggctcgtcgcgctcgaggaccgtgcgcgggacctcccgctccccgacggcggcgtcctcccgagcgtgccccacgacgtcgaggtcgagcagtgccgcagagacctcgagcgcgtccgccccttcccgtccgggtccggcccaagctccgccgcagcggacggtccctttgtctgcagcttcgataagatggctgagtatttcaacaggaagtcatgtttgtccgagacagtaccgctgggttccttcaactctctcttcagcttcaccggttcttggaagaatgatgcggcgaccacgaaggcccttgcgattgatggctattctctgcctctgtttcgagtgaaaattaggaattctgaactgacgctgcttgagagcgttaagcgaaggatcccaaatgtttgggatccatcagcattggcaagctttattgagaactatggtacccatattattatctctgttacggttggtggtaaggatgaggtatacattaagcagcattcattgtcccaattgtcagagctggagttcaaaaattatgcgagggaaattgggagggaaagatttgcagatgtggaaaataagtcaaatgcatcttctatcaattacagtgagaaggatatgacagtaatattcagaaggaggggtggttgcgaccttgttcaaagttttagtgattggagaggaactgttgcctcagcaccagatgtcataggcatcacctttctatcaattgtctctcttgttgacgatataccaggaaagaagcaccttgctcgtgcagttgagctatacttgacctacaagcctccaattgaagaattacagtacttcttagattttcgagtcccactagtttgggctccagctccaccaggtattgctggtcaccataggaaagaaccagtctgcccatcgcttcagtttagcttaatgggcccaaagctcttcattagcacagaacagatctctgttggccgtcgaccagttgttggcctcaaactgattttggaaggagccaaacagaatcgtctggctattcatttgcagcaccttggctcattaccaaaaatattcctacctcattgggactcctatattactattggacctccaaaatggcaaggtcctgaagaacaggacagccgatggtttgagccaatcaaatggaagaactttgctcatgttagcacagcacccatagagtacactgaaacaaatattacggacctatctggtgtttatattgttacaggagcacagttgggagtgtgggattttggtgcaaagagtgttctccaccttaaacttttgttctccagggttcctgggtgcacaattagaagatcagtgtgggaccacagcccatcaagttcctcggtacatagaacagatgaatcttcgtcatcctcaagtgataatgctaaacttctgaagatcgttgacctgacagaaacattcaagggcccacaagatgcgcctggccattggctgatcacaggtgctaagttgggtgtcgagaaaggcaggattgttgtgcgtgcaaagtactccttattgaattattaaccaaatgtttaaatcattcaatcactctgatattgagcactgtgttttaaggtagcatttgttcttttgtttttc

SEQ ID NO: 18827 - protein, 558 aa, Zea mays subsp. mays
  misc_feature (1)..(558): Ceres Seq. ID no. 12367400
MSLAGSALEAALLAVGRGLDAAGDHRLLYCKGDGRLVALEDRARDLPLPDGGVLPSVPHDVEVEQCRRDLERVRPFPSGSGPSSAAADGPFVCSFDKMAEYFNRKSCLSETVPLGSFNSLFSFTGSWKNDAATTKALAIDGYSLPLFRVKIRNSELTLLESVKRRIPNVWDPSALASFIENYGTHIIISVTVGGKDEVYIKQHSLSQLSELEFKNYAREIGRERFADVENKSNASSINYSEKDMTVIFRRRGGCDLVQSFSDWRGTVASAPDVIGITFLSIVSLVDDIPGKKHLARAVELYLTYKPPIEELQYFLDFRVPLVWAPAPPGIAGHHRKEPVCPSLQFSLMGPKLFISTEQISVGRRPVVGLKLILEGAKQNRLAIHLQHLGSLPKIFLPHWDSYITIGPPKWQGPEEQDSRWFEPIKWKNFAHVSTAPIEYTETNITDLSGVYIVTGAQLGVWDFGAKSVLHLKLLFSRVPGCTIRRSVWDHSPSSSSVHRTDESSSSSSDNAKLLKIVDLTETFKGPQDAPGHWLITGAKLGVEKGRIVVRAKYSLLNY

SEQ ID NO: 18828 - protein, 461 aa, Zea mays subsp. mays
  misc_feature (1)..(461): Ceres Seq. ID no. 12367401
MAEYFNRKSCLSETVPLGSFNSLFSFTGSWKNDAATTKALAIDGYSLPLFRVKIRNSELTLLESVKRRIPNVWDPSALASFIENYGTHIIISVTVGGKDEVYIKQHSLSQLSELEFKNYAREIGRERFADVENKSNASSINYSEKDMTVIFRRRGGCDLVQSFSDWRGTVASAPDVIGITFLSIVSLVDDIPGKKHLARAVELYLTYKPPIEELQYFLDFRVPLVWAPAPPGIAGHHRKEPVCPSLQFSLMGPKLFISTEQISVGRRPVVGLKLILEGAKQNRLAIHLQHLGSLPKIFLPHWDSYITIGPPKWQGPEEQDSRWFEPIKWKNFAHVSTAPIEYTETNITDLSGVYIVTGAQLGVWDFGAKSVLHLKLLFSRVPGCTIRRSVWDHSPSSSSVHRTDESSSSSSDNAKLLKIVDLTETFKGPQDAPGHWLITGAKLGVEKGRIVVRAKYSLLNY

SEQ ID NO: 18829 - protein, 315 aa, Zea mays subsp. mays
  misc_feature (1)..(315): Ceres Seq. ID no. 12367402
MTVIFRRRGGCDLVQSFSDWRGTVASAPDVIGITFLSIVSLVDDIPGKKHLARAVELYLTYKPPIEELQYFLDFRVPLVWAPAPPGIAGHHRKEPVCPSLQFSLMGPKLFISTEQISVGRRPVVGLKLILEGAKQNRLAIHLQHLGSLPKIFLPHWDSYITIGPPKWQGPEEQDSRWFEPIKWKNFAHVSTAPIEYTETNITDLSGVYIVTGAQLGVWDFGAKSVLHLKLLFSRVPGCTIRRSVWDHSPSSSSVHRTDESSSSSSDNAKLLKIVDLTETFKGPQDAPGHWLITGAKLGVEKGRIVVRAKYSLLNY

SEQ ID NO: 18830 - DNA, 2056 bp, Zea mays subsp. mays
  misc_feature (1)..(2056): Ceres Seq. ID no. 12367419
accctcccacactccaccacccgcgccgccgcctcctactccgccccggcccctctgatccggaccgagcgccggccatggcgctcgccttcgacgagttcgggcgccccttcattatcctgcgggagcaggagaagaagacgcgccttcgggggcttgacgcgcagaaggccaacatcgcctcggccaaggccgtcgcgcggatcctccgcacgtcgctgggacccaagggcatggacaagatgctccagtcccccgacggcgacgtcatcatcacaaatgatggagcgaccatcctggagcagatggatgttgacaaccagatagcaaagctgatggtggagctgtcccgtagtcaagactatgaaatcggggatggtaccaccggggtggtagtcatggcaggggctcttctcgagcaggctgagaagcttctggagcgtggtattcaccccattagggtggctgaaggctatgagatggcgtcaaaggtagcttttgaccacctagaacatatatccgaaaagtttgagttcagtgcagacaacattgaacccctggtccagacctgcatgacaactctatcctcaaagattgttaaccgttgcaagcgggcgttggcagagattgctgtcaaagcagtacttgcggttgcagatttggagaggaaggatgttaacttggatctaattaaagtagaaggcaaggttggtgggaagctggaggacactgaacttgtatatggaattattgttgacaaagatatgagccatccacaaatgccaaagagaattgaggatgctaagattgccatcttgacatgcccatttgagcctccgaagccaaagacaaagcataaggttgacattgacactgtcgagaaattccagacactgcgtgagcaagagcagaaatactttgatgaaatggttcagaagtgcaaggatgctggtgcaaccctggttatttgccagtggggttttgatgatgaagccaatcatttattgatgcatagaaatctgccagcagtgagatgggttggtggtgttgaattggaactgattgccattgctacaggagggcggattgttccgagattccaagagttgagtcctgaaaagcttggaaaggctggattagtcagagagaaatcattcggaacaacaaaggaccggatgctttacattgagaagtgtgccaattctagagctgtaaccattttcatccgtgggggaaacaaaatgatgattgaggagaccaagcgcagtcttcatgatgctctttgcgtagcaaggaatctgatccggaataactcgattgtgtacggtggcggctcagccgagatatcttgctcaattgctgttgaaactgctgcagatcggcacccgggagttgagcagtatgctatcaggtcattcgctgatgcattagatgctgttccactagcgttggccgaaaacagtggtttgtcaccaattgataccttaactgcggtaaaagctcaacaagtcaaggagagcaacccccactgtggcatagactgcaacgacgttggcaccaccgacatgaaagaacagaacgtcttcgagaccctgattggcaagcagcaacagatcttgcttgccacccaggtggtgaagatgatcctgaagatcgacgatgtcatctcaccgtccgagtactgacggaaagaaggaacggatggctatgctggatatgcgtaggcggcattgctgatgtgttttgattggtgtacctccttgtccaggcttgctgcctaccactcactccctgtgtgacgttttgctgaaattggtttgtactgtgcacgataatatctggaaatagactctagacagtccttagttatctttttattatataaaaaaagtcagcgccttctcgttagggttgagatgtttgcagtattgatgcttttgtagtgtttttatagctcagcttaagctgtcatttttgtttgatgatttgcaatagttggacgccctcatgaacaaaatgcaatggttcatcttttggttcacatggacaaaatgtc

SEQ ID NO: 18831 - protein, 560 aa, Zea mays subsp. mays
  misc_feature (1)..(560): Ceres Seq. ID no. 12367420
PPTLHHPRRRLLLRPGPSDPDRAPAMALAFDEFGRPFIILREQEKKTRLRGLDAQKANIASAKAVARILRTSLGPKGMDKMLQSPDGDVIITNDGATILEQMDVDNQIAKLMVELSRSQDYEIGDGTTGVVVMAGALLEQAEKLLERGIHPIRVAEGYEMASKVAFDHLEHISEKFEFSADNIEPLVQTCMTTLSSKIVNRCKRALAEIAVKAVLAVADLERKDVNLDLIKVEGKVGGKLEDTELVYGIIVDKDMSHPQMPKRIEDAKIAILTCPFEPPKPKTKHKVDIDTVEKFQTLREQEQKYFDEMVQKCKDAGATLVICQWGFDDEANHLLMHRNLPAVRWVGGVELELIAIATGGRIVPRFQELSPEKLGKAGLVREKSFGTTKDRMLYIEKCANSRAVTIFIRGGNKMMIEETKRSLHDALCVARNLIRNNSIVYGGGSAEISCSIAVETAADRHPGVEQYAIRSFADALDAVPLALAENSGLSPIDTLTAVKAQQVKESNPHCGIDCNDVGTTDMKEQNVFETLIGKQQQILLATQVVKMILKIDDVISPSEY

SEQ ID NO: 18832 - protein, 535 aa, Zea mays subsp. mays
  misc_feature (1)..(535): Ceres Seq. ID no. 12367421
MALAFDEFGRPFIILREQEKKTRLRGLDAQKANIASAKAVARILRTSLGPKGMDKMLQSPDGDVIITNDGATILEQMDVDNQIAKLMVELSRSQDYEIGDGTTGVVVMAGALLEQAEKLLERGIHPIRVAEGYEMASKVAFDHLEHISEKFEFSADNIEPLVQTCMTTLSSKIVNRCKRALAEIAVKAVLAVADLERKDVNLDLIKVEGKVGGKLEDTELVYGIIVDKDMSHPQMPKRIEDAKIAILTCPFEPPKPKTKHKVDIDTVEKFQTLREQEQKYFDEMVQKCKDAGATLVICQWGFDDEANHLLMHRNLPAVRWVGGVELELIAIATGGRIVPRFQELSPEKLGKAGLVREKSFGTTKDRMLYIEKCANSRAVTIFIRGGNKMMIEETKRSLHDALCVARNLIRNNSIVYGGGSAEISCSIAVETAADRHPGVEQYAIRSFADALDAVPLALAENSGLSPIDTLTAVKAQQVKESNPHCGIDCNDVGTTDMKEQNVFETLIGKQQQILLATQVVKMILKIDDVISPSEY

SEQ ID NO: 18833 - protein, 483 aa, Zea mays subsp. mays
  misc_feature (1)..(483): Ceres Seq. ID no. 12367422
MDKMLQSPDGDVIITNDGATILEQMDVDNQIAKLMVELSRSQDYEIGDGTTGVVVMAGALLEQAEKLLERGIHPIRVAEGYEMASKVAFDHLEHISEKFEFSADNIEPLVQTCMTTLSSKIVNRCKRALAEIAVKAVLAVADLERKDVNLDLIKVEGKVGGKLEDTELVYGIIVDKDMSHPQMPKRIEDAKIAILTCPFEPPKPKTKHKVDIDTVEKFQTLREQEQKYFDEMVQKCKDAGATLVICQWGFDDEANHLLMHRNLPAVRWVGGVELELIAIATGGRIVPRFQELSPEKLGKAGLVREKSFGTTKDRMLYIEKCANSRAVTIFIRGGNKMMIEETKRSLHDALCVARNLIRNNSIVYGGGSAEISCSIAVETAADRHPGVEQYAIRSFADALDAVPLALAENSGLSPIDTLTAVKAQQVKESNPHCGIDCNDVGTTDMKEQNVFETLIGKQQQILLATQVVKMILKIDDVISPSEY

SEQ ID NO: 18834 - DNA, 1521 bp, Zea mays subsp. mays
  misc_feature (1)..(1521): Ceres Seq. ID no. 12367423
aattggccgttattattgtactccccttctccattccactcgtccccttcctccccttccgtctcgcaacaggcgaggcgagagaactcgtcgtcgaagcgaaatatagccagcgcaccaatcccaattcccaacccgacgcaacgcaacgcaacgcaacgcacctcatcccggttgcttgcgccaacgtaggggatcgcctcgccccgccccgccccgccccgccccgcttcgcgctcctccttcctgcctgccgtaaccgcgccgtgcagctgtgcaagggcatttctgcattcatgtgggcaagctggatgattcaaagttgttgatatgtggtggttcagtaggttgttgagtctagataccagatgatggacctgtccacgacttcagtgctggcagctaaagcttacaaatacaaagcagaatcacttgttaaggagtaccttcttgcagattcgtatgtttcatacactgctgtacttggtgggatcctgatgtgcaagatggcttatgacataacaagcataatcagctcattgtactacaagggttatggttcacttacaaaaacccaaaagcttgagtggaacaacaggggcatgtccactatccatgcgatattcatcacagtggtgtcagtgtacctggttttcttctccaacctattctctgatgagctggatggactagtaacttatcggagttcaaatctatccaatttcactttgggggtttctgttgggtatttcatcactgaccttgctatgatattatgggcttatccttctcttggtggaatggagtatgtccttcaccatatgctgtcgcttatttctatagtctatgctatgtattctggggaaggacagttgtacacatacatggttctcatctctgaaacaaccacacctggaatcaacctccgatggttccttgataccgctggactgaaaaaatccaaggcctatcttgtcaatggtgttacgatgtttattgcatggctggtggcacggatcattttgttcgtctacttgttttaccacatttacttccactatgatcaggtcaagcagatgcatacgtttagctgcattctgatatttgctgtgcctacaatactgctcgtcatgaacacaatgtggtttgccaagatcttgagaggccttaaaaagacgctagccaagaggcagtgaaaagaagaatggtaaaacaagctcaaggacatcgatagccaaaatccatcccctcgtacagtcactttacagttacatgcacttcccgagtaaagccgtcagtgcagctcgccgtcagtaaagcccttgtacatgatcctgaaatacgctaaacacagctcatttttttccctggatgctctgccttgtacatacggccgtctgtattgggtgcttacaccttgagggatcatttggtgaccagaaaaatagatgggaaagaaatccctttgttacggcctcgttcgtaatatttttttctgaataataattcacatttttttct

SEQ ID NO: 18835 - protein, 275 aa, Zea mays subsp. mays
  misc_feature (1)..(275): Ceres Seq. ID no. 12367424
MMDLSTTSVLAAKAYKYKAESLVKEYLLADSYVSYTAVLGGILMCKMAYDITSIISSLYYKGYGSLTKTQKLEWNNRGMSTIHAIFITVVSVYLVFFSNLFSDELDGLVTYRSSNLSNFTLGVSVGYFITDLAMILWAYPSLGGMEYVLHHMLSLISIVYAMYSGEGQLYTYMVLISETTTPGINLRWFLDTAGLKKSKAYLVNGVTMFIAWLVARIILFVYLFYHIYFHYDQVKQMHTFSCILIFAVPTILLVMNTMWFAKILRGLKKTLAKRQ

SEQ ID NO: 18836 - protein, 274 aa, Zea mays subsp. mays
  misc_feature (1)..(274): Ceres Seq. ID no. 12367425
MDLSTTSVLAAKAYKYKAESLVKEYLLADSYVSYTAVLGGILMCKMAYDITSIISSLYYKGYGSLTKTQKLEWNNRGMSTIHAIFITVVSVYLVFFSNLFSDELDGLVTYRSSNLSNFTLGVSVGYFITDLAMILWAYPSLGGMEYVLHHMLSLISIVYAMYSGEGQLYTYMVLISETTTPGINLRWFLDTAGLKKSKAYLVNGVTMFIAWLVARIILFVYLFYHIYFHYDQVKQMHTFSCILIFAVPTILLVMNTMWFAKILRGLKKTLAKRQ

SEQ ID NO: 18837 - protein, 232 aa, Zea mays subsp. mays
  misc_feature (1)..(232): Ceres Seq. ID no. 12367426
MCKMAYDITSIISSLYYKGYGSLTKTQKLEWNNRGMSTIHAIFITVVSVYLVFFSNLFSDELDGLVTYRSSNLSNFTLGVSVGYFITDLAMILWAYPSLGGMEYVLHHMLSLISIVYAMYSGEGQLYTYMVLISETTTPGINLRWFLDTAGLKKSKAYLVNGVTMFIAWLVARIILFVYLFYHIYFHYDQVKQMHTFSCILIFAVPTILLVMNTMWFAKILRGLKKTLAKRQ

SEQ ID NO: 18838 - DNA, 1554 bp, Zea mays subsp. mays
  misc_feature (1)..(1554): Ceres Seq. ID no. 12367443
gtcgaacacatacctaattatcacctgtaagccagctgaaccacatctcgtcgtgcacatccggagcccgggaacacacacacacattgccatggccatgcccatgcccaagcccgtcctgagcctgctcgtgcacctacacgccgccgtcctgttccttcccgccccggccggcggcgcggtctacaacgttctgcgctacggcgcgcgccccgacggcgtgacggacgcggcggggcccttcctccgcgcgtgggcggacgcctgccgctcgcccctcccggccgccatgtacgtgccgccagggaggtacctggtgcggagcgccacgttcaccggcccgtgccacagccgcgccgtgacgttcgccgtcgccggcacggtcgtcgcccccgcggcctacggcgcgcgcggctcgtcggggaggtggatcacgttcgagaacatggacggcctcgtcgtcgccggcggcggcacgctggacggccgcggcagggcgctctggacctgcagacagcgcgggcagcgcgactgtccgacccccacgtccactctgacgatcgccaactccaaggacgtggtggtggcccgggctgcggtcggtggacagcgagctgttccacgtggtggtgctgcagtgccacggcgtgacggtgcgcggggtgacggtggaggcgccggcggacagccccaacaccgacggcatccacctacacatgtccacccacgtgtcggtgtacgacgccaggatcagcaccggcgacgactgcatctccatcggccccggccaactctcacctctggatcgagcgcgtcgcctgcggccccggccacggcatcagcatcgggagcctgggcaagcagcagggcacggaggtggaggcggtgcagaacgtgacggtgaagacgacgtggttcaccggcaccatgaacgggctgcggatcaagacgtggggcggctccaagcgcggcttcgtcacgggcgtcaccttcgccgactccaccatgtccggcgtggacaaccccatcattatcgaccagaactactgccccgccagcagcggctgccccggcgccggccggagctccagcatcaggatcagcgacgtgcggtacgtgggcatccggggctcgtccgccacgccggtggccgtcaacttcgactgcagccggagctacccctgcagtggcatcagcctgcaggacgtggcgctgacgtaccagaaccgggccgccgccaagtcctactgccggaacgtgcaggggaccgcgctcggcctcgtgctgccgccgagctgcctctgatcagacgatcgaccttgcaacttacattgccggccggacgcagcagttcagttagctgcatgcgttgtcacgtgtatatagatgcatatgtcgagtgtattatgtacggagtatgtggggagtgcttagactaggagaacattacgagcttcttctgacagtagatggttatatagtcgatatatgttggttcttttctttaacccttcacctttttcgcagcacgattattatatgagcgagtttttt

SEQ ID NO: 18839 - protein, 298 aa, Zea mays subsp. mays
  misc_feature (1)..(298): Ceres Seq. ID no. 12367444
SNTYLIITCKPAEPHLVVHIRSPGTHTHIAMAMPMPKPVLSLLVHLHAAVLFLPAPAGGAVYNVLRYGARPDGVTDAAGPFLRAWADACRSPLPAAMYVPPGRYLVRSATFTGPCHSRAVTFAVAGTVVAPAAYGARGSSGRWITFENMDGLVVAGGGTLDGRGRALWTCRQRGQRDCPTPTSTLTIANSKDVVVARAAVGGQRAVPRGGAAVPRRDGARGDGGGAGGQPQHRRHPPTHVHPRVGVRRQDQHRRRLHLHRPRPTLTSGSSASPAAPATASASGAWASSRARRWRRCRT

SEQ ID NO: 18840 - protein, 268 aa, Zea mays subsp. mays
  misc_feature (1)..(268): Ceres Seq. ID no. 12367445
MAMPMPKPVLSLLVHLHAAVLFLPAPAGGAVYNVLRYGARPDGVTDAAGPFLRAWADACRSPLPAAMYVPPGRYLVRSATFTGPCHSRAVTFAVAGTVVAPAAYGARGSSGRWITFENMDGLVVAGGGTLDGRGRALWTCRQRGQRDCPTPTSTLTIANSKDVVVARAAVGGQRAVPRGGAAVPRRDGARGDGGGAGGQPQHRRHPPTHVHPRVGVRRQDQHRRRLHLHRPRPTLTSGSSASPAAPATASASGAWASSRARRWRRCRT

SEQ ID NO: 18841 - protein, 266 aa, Zea mays subsp. mays
  misc_feature (1)..(266): Ceres Seq. ID no. 12367446
MPMPKPVLSLLVHLHAAVLFLPAPAGGAVYNVLRYGARPDGVTDAAGPFLRAWADACRSPLPAAMYVPPGRYLVRSATFTGPCHSRAVTFAVAGTVVAPAAYGARGSSGRWITFENMDGLVVAGGGTLDGRGRALWTCRQRGQRDCPTPTSTLTIANSKDVVVARAAVGGQRAVPRGGAAVPRRDGARGDGGGAGGQPQHRRHPPTHVHPRVGVRRQDQHRRRLHLHRPRPTLTSGSSASPAAPATASASGAWASSRARRWRRCRT

SEQ ID NO: 18842 - DNA, 1672 bp, Zea mays subsp. mays
  misc_feature (1)..(1672): Ceres Seq. ID no. 12367459
gcactccgcaattccgcatcacgcaccccaccccaccgcccgcaaccgcaagctcagattccctcccaccccaccccaccgtcccgctcactccagcccagcccgcgtccccacagcccagcgacagcgagcaccggcggcatccagccatgtgcggcggcgccatcctgtcggacatcatcccgccgccgccgccgcggcgtgtcacggcgggccacctctggcccgagagcaagaagccgaggagggctgcagccggcaggaggagagcccccgtggagcaggagcaggaggaggatttcgaggccgacttcgaggagttcgaggtggagtccggcgagtcggagctcgagtccgaggacgagcccaagcccaagcccttcgccgcccccagcagcgcgctcgccagaggtggactaaacactggtgcagctggtgtcgatggccctgctgcaaattcagttaaaaggaagaggaagaaccagttcaggggtatccgccggcgcccgtggggcaaatgggctgctgagatcagagatcctcgcaagggcgtgcgcgtctggctcggtacattcaactctcccgaagaagctgccagagcttacgacgccgaggcacgcaggatccgcggcaagaaggctaaagtcaacttcccggatgaggttcctacggcggtttctcagaagcgccgtgctgctgggcttgcctctctgaaagcgcctaagatggacgttgaggaggagaagccgatcatcaagctcgcagtgaacaatatgaccaactcaaacgcatatcactaccctgccgtcgtcggccaccacaacatcatacccgagccattcatgcagactcagaacatgccattcgctcctctggtgaattatgctgccctcgtgaacctgtcttcacaccaaggcagcaactcgttcggttgctcggacttcagcctcgagaacgactccaggacccctgacataacttcggtgcctgcgcccgttgccaccttggccgccgttggagagtctgcgttcgtccagaacacggccggccatgctgtggcgcctcctgcgacggggaacactggtgttgatctcgctgagttggagccgtatatggatttcctgatggacggtggttcagacgactcgatcagcactctcttgagctgtgatggatcccaggacgtggtcagcaacatggacctttggagcttcgacgacatgcccatgtctgctggtttctactgaggctgaggcccagcgactggtgcttgactgcttgtgtacatagggggggacaaagggtaagagcctgcagtaacagagattggctctttctggtacttgcaatttctatcccttcaactctttcttccgcccccgtgtttcaggaataatgttctggagatgaagaatcgcttgcgtgggcgtgcctgcaggcacgcgtgtagtagctgcggtattagtatatatgcttagatgttcagtcactttctttaagtacaatttggcgctggacatgtaccttattttactatgtatccgtgacaacagctatgtgtctgctccttttattttcttgtctttgcttcaaaaaaatggctctgaacattgcgagtttgtactttgtagacaatatatatatatgtgtgtgtatgtgcttggtttgcttc

SEQ ID NO: 18843 - protein, 414 aa, Zea mays subsp. mays
  misc_feature (1)..(414): Ceres Seq. ID no. 12367460
TPQFRITHPTPPPATASSDSLPPHPTVPLTPAQPASPQPSDSEHRRHPAMCGGAILSDIIPPPPPRRVTAGHLWPESKKPRRAAAGRRRAPVEQEQEEDFEADFEEFEVESGESELESEDEPKPKPFAAPSSALARGGLNTGAAGVDGPAANSVKRKRKNQFRGIRRRPWGKWAAEIRDPRKGVRVWLGTFNSPEEAARAYDAEARRIRGKKAKVNFPDEVPTAVSQKRRAAGLASLKAPKMDVEEEKPIIKLAVNNMTNSNAYHYPAVVGHHNIIPEPFMQTQNMPFAPLVNYAALVNLSSHQGSNSFGCSDFSLENDSRTPDITSVPAPVATLAAVGESAFVQNTAGHAVAPPATGNTGVDLAELEPYMDFLMDGGSDDSISTLLSCDGSQDVVSNMDLWSFDDMPMSAGFY

SEQ ID NO: 18844 - protein, 365 aa, Zea mays subsp. mays
  misc_feature (1)..(365): Ceres Seq. ID no. 12367461
MCGGAILSDIIPPPPPRRVTAGHLWPESKKPRRAAAGRRRAPVEQEQEEDFEADFEEFEVESGESELESEDEPKPKPFAAPSSALARGGLNTGAAGVDGPAANSVKRKRKNQFRGIRRRPWGKWAAEIRDPRKGVRVWLGTFNSPEEAARAYDAEARRIRGKKAKVNFPDEVPTAVSQKRRAAGLASLKAPKMDVEEEKPIIKLAVNNMTNSNAYHYPAVVGHHNIIPEPFMQTQNMPFAPLVNYAALVNLSSHQGSNSFGCSDFSLENDSRTPDITSVPAPVATLAAVGESAFVQNTAGHAVAPPATGNTGVDLAELEPYMDFLMDGGSDDSISTLLSCDGSQDVVSNMDLWSFDDMPMSAGFY

SEQ ID NO: 18845 - DNA, 1620 bp, Zea mays subsp. mays
  misc_feature (1)..(1620): Ceres Seq. ID no. 12367514
aatggccgcctcctccccttccacctcctcccctaatggcagatgctaggcggcggcgcccctcttgagaagtgaaagggaaagatttgttttgccgcccgcgccctgctcaggcgctccgcctcggtcgggccacacaaggtagcgccttccgcctcgttgcctgacccattcctgtttcgttcgaagcactgaagcagccccagaccgacgccaggcgcccaggccagtggtcgacgcctgtggtgagctgataggcgatgtcgtcaccgtctccggtgctggcaagggctgcgcgtctcacgtgtaggttgtgatctttctgcccagagatgtgcgatttgtcttcgcttgatctgagtgacagtaaaacggagaccggctagtgttgttcctgaaacctgttgatttatggggagccagacaatcgcatcacaggctgggggaggtggaagaggcatgggtagtagtggtggtgccggtgcagcgcaacgcgggcagatgcagagtctggcaagacaagggtctctgtataaccttacccttgatgaggtgcagagccatttgggagaacccctacacagcatgaaccttgaggagctgctgaagagtgtctttcctgatgacctggaccctgatggtggcactaccagccaatatgagcagagttcgggcctcttgcgacagggaagtatcacaatgccgcctgagctcagcaggagaactgtggacgaggtgtggaaggacatccaggatgcaccaaacagaaatgttggggagagtggtcggcggaagcgggagcggcagccaacgcttggagagatgacgcttgaggatttcttggtgaaagctggggttgtcgccgaaggatatctgaaggacttgaatggcataggcagtgtggaacaggttggtagcactggggctgcgggtttgacagcaggggcacaatggttagaccactatcagcagcggattacagctatcgagccccatcagcacaggcaacatagtttgccaggtgcttacataccgggtcagttaagccttcagtccctgaatgttggaccaagtgctattttggagtcatactctgatggccacatttcttcaccgatgatgggtgcactttctgattctccgatgcctggtagaaagcgtggttccccaggagatgtggctgataagttggtggagagaaggcagaagaggatgatcaagaatagggagtcagctgctcgttcaagggctaggaagcaggcatacactaatgaactggaaaacaaggtttctcgattagaagaggagaataagaagctaaccacgttaaaggagttggaaaatatacttttctctgagcctcttccggaacccaagtaccaactgaggagaaccggctcagcgactttctgattgtatgcagaatatcttgttttgctgtaggttgtaagtcctgtagcttactagcaggagccgagcatgtgctgtccgaggccttgctaccagtatagtatgtaaaatcttcaggacacatgtaggtggtcggagcttgtttacatggtgtgacttaacagatggatacatataactatgagaagtatgggagccctttctttggtg

SEQ ID NO: 18846 - protein, 333 aa, Zea mays subsp. mays
  misc_feature (1)..(333): Ceres Seq. ID no. 12367515
MGSQTIASQAGGGGRGMGSSGGAGAAQRGQMQSLARQGSLYNLTLDEVQSHLGEPLHSMNLEELLKSVFPDDLDPDGGTTSQYEQSSGLLRQGSITMPPELSRRTVDEVWKDIQDAPNRNVGESGRRKRERQPTLGEMTLEDFLVKAGVVAEGYLKDLNGIGSVEQVGSTGAAGLTAGAQWLDHYQQRITAIEPHQHRQHSLPGAYIPGQLSLQSLNVGPSAILESYSDGHISSPMMGALSDSPMPGRKRGSPGDVADKLVERRQKRMIKNRESAARSRARKQAYTNELENKVSRLEEENKKLTTLKELENILFSEPLPEPKYQLRRTGSATF

SEQ ID NO: 18847 - protein, 317 aa, Zea mays subsp. mays
  misc_feature (1)..(317): Ceres Seq. ID no. 12367516
MGSSGGAGAAQRGQMQSLARQGSLYNLTLDEVQSHLGEPLHSMNLEELLKSVFPDDLDPDGGTTSQYEQSSGLLRQGSITMPPELSRRTVDEVWKDIQDAPNRNVGESGRRKRERQPTLGEMTLEDFLVKAGVVAEGYLKDLNGIGSVEQVGSTGAAGLTAGAQWLDHYQQRITAIEPHQHRQHSLPGAYIPGQLSLQSLNVGPSAILESYSDGHISSPMMGALSDSPMPGRKRGSPGDVADKLVERRQKRMIKNRESAARSRARKQAYTNELENKVSRLEEENKKLTTLKELENILFSEPLPEPKYQLRRTGSATF

SEQ ID NO: 18848 - protein, 303 aa, Zea mays subsp. mays
  misc_feature (1)..(303): Ceres Seq. ID no. 12367517
MQSLARQGSLYNLTLDEVQSHLGEPLHSMNLEELLKSVFPDDLDPDGGTTSQYEQSSGLLRQGSITMPPELSRRTVDEVWKDIQDAPNRNVGESGRRKRERQPTLGEMTLEDFLVKAGVVAEGYLKDLNGIGSVEQVGSTGAAGLTAGAQWLDHYQQRITAIEPHQHRQHSLPGAYIPGQLSLQSLNVGPSAILESYSDGHISSPMMGALSDSPMPGRKRGSPGDVADKLVERRQKRMIKNRESAARSRARKQAYTNELENKVSRLEEENKKLTTLKELENILFSEPLPEPKYQLRRTGSATF

SEQ ID NO: 18849 - DNA, 1365 bp, Zea mays subsp. mays
  misc_feature (1)..(1365): Ceres Seq. ID no. 12367526
agttccattcaagcgcactgctggactccaactcgactgctctgcgtagcggagtaggctgatcagaggcgagatatgaggagcggccggcggatggcggcagctctggtggcgctggcgtgggcgctcgcggctgtggctgtggcggcggcgcagaagtacaatgccatcttcaacttcggcgactccatcaccgacacggggaacctctgcaccagcgggaggccgtcgcagatcaccttcacgcagccgccctacggcgagacctacttcggcacgccgacgtgccgctgctgcgacggccgcgtgatcccggacttcctctgctccaagttcgggctgccgttcctgccgccgtccaagtcgacgacggccgacttcaaggagggcgccaacatggccatcaccggcgcgactgccatggacgcgcccttcttccgctcgctggggctctccgacaagatctggaacaacgggcccatcagcttccagctggagtggttccagcaggtcgcgtccgccgtgtgcggcggggggcaggcgcagcaggccgactgcaagagctacctggccaactccctgttcgtgttcggcgagttcggcggcaacgactacaacgccatgctgttcggcaactacagcgcggaccaggccagcacgtacacgccgcagggtcgtggccgccgtcgccagcggcgtcgagaagctggtggccatgggcgccaccgacatcgtggtgcccggcgtcctccccatcggctgcttccccatctacctcaccttctacggcacctccagcagcgccgactacgacagcctcggctgcctcaggaagttcaacgacctgtccaccaaccacaacaaccagctgcaggcccagatctccggcctccaggccaagtacaagtcggcgcgcatcatgtacgccgacttctactccgccgtctacgacatggtcaagaatccaggcagctacgggttcagcacggccgttccagacgtgctgcgggtccggaggcggcaagtacaactaccagaacatcgcgcggtgcggcatgccgggcgcctccgcgtgctccaacccggcggcgcacctcagctgggacggcatccacctcaccgaggccgcgtacaagcagatcaccgacggctggctcaacgggccctactgccacccggccattctccacagctaaagcgacagggggggccgattaattattaattattattatttgttgtttacgttgccgggaaagaaagaaagaaaagtgtctcagcaactgcatgcatgtgttcctggtccctcactgctgtgacttacagagtattatatatatattagtactatgtatactggtcctt

SEQ ID NO: 18850 - protein, 380 aa, Zea mays subsp. mays
  misc_feature (1)..(380): Ceres Seq. ID no. 12367527
MRSGRRMAAALVALAWALAAVAVAAAQKYNAIFNFGDSITDTGNLCTSGRPSQITFTQPPYGETYFGTPTCRCCDGRVIPDFLCSKFGLPFLPPSKSTTADFKEGANMAITGATAMDAPFFRSLGLSDKIWNNGPISFQLEWFQQVASAVCGGGQAQQADCKSYLANSLFVFGEFGGNDYNAMLFGNYSADQASTYTPQGRGRRRQRRREAGGHGRHRHRGARRPPHRLLPHLPHLLRHLQQRRLRQPRLPQEVQRPVHQPQQPAAGPDLRPPGQVQVGAHHVRRLLLRRLRHGQESRQLRVQHGRSRRAAGPEAASTTTRTSRGAACRAPPRAPTRRRTSAGTASTSPRPRTSRSPTAGSTGPTATRPFSTAKATGGAD

SEQ ID NO: 18851 - protein, 374 aa, Zea mays subsp. mays
  misc_feature (1)..(374): Ceres Seq. ID no. 12367528
MAAALVALAWALAAVAVAAAQKYNAIFNFGDSITDTGNLCTSGRPSQITFTQPPYGETYFGTPTCRCCDGRVIPDFLCSKFGLPFLPPSKSTTADFKEGANMAITGATAMDAPFFRSLGLSDKIWNNGPISFQLEWFQQVASAVCGGGQAQQADCKSYLANSLFVFGEFGGNDYNAMLFGNYSADQASTYTPQGRGRRRQRRREAGGHGRHRHRGARRPPHRLLPHLPHLLRHLQQRRLRQPRLPQEVQRPVHQPQQPAAGPDLRPPGQVQVGAHHVRRLLLRRLRHGQESRQLRVQHGRSRRAAGPEAASTTTRTSRGAACRAPPRAPTRRRTSAGTASTSPRPRTSRSPTAGSTGPTATRPFSTAKATGGAD

SEQ ID NO: 18852 - protein, 273 aa, Zea mays subsp. mays
  misc_feature (1)..(273): Ceres Seq. ID no. 12367529
MAITGATAMDAPFFRSLGLSDKIWNNGPISFQLEWFQQVASAVCGGGQAQQADCKSYLANSLFVFGEFGGNDYNAMLFGNYSADQASTYTPQGRGRRRQRRREAGGHGRHRHRGARRPPHRLLPHLPHLLRHLQQRRLRQPRLPQEVQRPVHQPQQPAAGPDLRPPGQVQVGAHHVRRLLLRRLRHGQESRQLRVQHGRSRRAAGPEAASTTTRTSRGAACRAPPRAPTRRRTSAGTASTSPRPRTSRSPTAGSTGPTATRPFSTAKATGGAD

SEQ ID NO: 18853 - DNA, 1826 bp, Zea mays subsp. mays
  misc_feature (1)..(1826): Ceres Seq. ID no. 12367546
aaaagagtaattgcggtcgtggttccggattccccccgccgccgccgcaagaccggagccctaattccaagcggtaaacgatgaggccgcacgcgttgggtatgggtggcggtggcgtggggaggcggaaggcggtggccgccgccgccgcggctagccgggagtggatggtggtgccggcgtcgggcccggcgcgggtggaggaagcagggaagcacgcggtgatggcgcgtacggggcttcccgcgcgcgatctcagggtgctcgacccgttactctcgtacccgtccacgatcctgggccgcgagcgcgccatcgtggtcaacttggagcgcgtcaaagctctgatcacagccgcggaggtgctgcttcctaacaccaaggatcccgccttcgcgcgcttcgttcgcgacctccagacccgcgtcctcgcatcttcgtctgaccagctgaactcactgacatggaaggtgaatcacctattgttgcttcaccatttcctgtaccaagttcatccaaagggcatgaaatggagatgactaagaagactgctgctgttgtgcctgaaatgactagcagcagcagtatgcccaatttagctgttgcaaaagatggaaataccaaggttttgcctttcgaatttcgagctcttgaagtgtgccttgaatcagcctgcagatctttggaagaggaaacttctactctggagctagaggcatatccagcattagatgagctgacatcaaagatcagcacattaaaccttgaacgagttaggcaaatcaagagtcgtctggttgcgatatctggtcgagtacagaaggtgagggatgagcttgagcatttactggatgatgaaatggatatggctgaaatgtacttgacagagaagcttactcaacaagaaatcagtgaggcttcatctagagctgaggttgatgatgcatctcttacagaagacgatagggatgaagattatagaagtgaaccagatggaagcaatggtagtgttataggttataagcccaatattgaagagctagagatgcttctagaggcttactttgtgcaaattgatggcacacttaacaagctatcacatctgagggagtacgtcgatgacacagaagattatatcaatataatgttggacgacaagcagaatcagctgctgcagatgggagttatgctgtcaactgctactgtcgtcatcactgctggagtggctgtagttggtctttttggtatgaatattggcatatcactttacgcagacccaacaaccgaggaggaaactcgagcagcaaataggaaattttgggaaactactttcgggaccgttgctggctgcgtgattttgtacatcatagccatgggttggggaaagagaagtggattactgcaatgatgcggaagcatgactgcatgagtgttctgtacccagtgaatactgggttcacaaaaatctccaaaatgagagattattgtattggctaacatctcctgagtgagcggcgcctaactagacaaagaattagctaacattttctacaatactagtattgtcttgactatttaacttggagaactcaagaacatgatgcttaagagggaatggtgcaaggccatacgtcttaaggtagggcttggaataatcagttgagttttcttttggtgttatgccaaaattatctcataggatttcagtgagtttgtccatggttaatgtagtcttagtttcttcaagttttgacttgtacatattgttccactctatgtcttccagttctatctcatttgcccttctagcactaaagggttgttct

SEQ ID NO: 18854 - protein, 314 aa, Zea mays subsp. mays
  misc_feature (1)..(314): Ceres Seq. ID no. 12367547
MEGESPIVASPFPVPSSSKGHEMEMTKKTAAVVPEMTSSSSMPNLAVAKDGNTKVLPFEFRALEVCLESACRSLEEETSTLELEAYPALDELTSKISTLNLERVRQIKSRLVAISGRVQKVRDELEHLLDDEMDMAEMYLTEKLTQQEISEASSRAEVDDASLTEDDRDEDYRSEPDGSNGSVIGYKPNIEELEMLLEAYFVQIDGTLNKLSHLREYVDDTEDYINIMLDDKQNQLLQMGVMLSTATVVITAGVAVVGLFGMNIGISLYADPTTEEETRAANRKFWETTFGTVAGCVILYIIAMGWGKRSGLLQ

SEQ ID NO: 18855 - protein, 292 aa, Zea mays subsp. mays
  misc_feature (1)..(292): Ceres Seq. ID no. 12367548
MEMTKKTAAVVPEMTSSSSMPNLAVAKDGNTKVLPFEFRALEVCLESACRSLEEETSTLELEAYPALDELTSKISTLNLERVRQIKSRLVAISGRVQKVRDELEHLLDDEMDMAEMYLTEKLTQQEISEASSRAEVDDASLTEDDRDEDYRSEPDGSNGSVIGYKPNIEELEMLLEAYFVQIDGTLNKLSHLREYVDDTEDYINIMLDDKQNQLLQMGVMLSTATVVITAGVAVVGLFGMNIGISLYADPTTEEETRAANRKFWETTFGTVAGCVILYIIAMGWGKRSGLLQ

SEQ ID NO: 18856 - protein, 290 aa, Zea mays subsp. mays
  misc_feature (1)..(290): Ceres Seq. ID no. 12367549
MTKKTAAVVPEMTSSSSMPNLAVAKDGNTKVLPFEFRALEVCLESACRSLEEETSTLELEAYPALDELTSKISTLNLERVRQIKSRLVAISGRVQKVRDELEHLLDDEMDMAEMYLTEKLTQQEISEASSRAEVDDASLTEDDRDEDYRSEPDGSNGSVIGYKPNIEELEMLLEAYFVQIDGTLNKLSHLREYVDDTEDYINIMLDDKQNQLLQMGVMLSTATVVITAGVAVVGLFGMNIGISLYADPTTEEETRAANRKFWETTFGTVAGCVILYIIAMGWGKRSGLLQ

SEQ ID NO: 18857 - DNA, 1582 bp, Zea mays subsp. mays
  misc_feature (1)..(1582): Ceres Seq. ID no. 12367584
ctttttctctctccccgtctgcctccccctccacaccaggccacgccacacacaggatagcgagcgggagcgacggcggcggcggaggagctagggttttgatccggcctcgccggctaggctgcgccgccccgacgccgaagccatggacagggagcttctagagacgtttgacgcggccaagaaggcggccgacgcggcggcaggggacggcaactcgccggaggctggccgctgcctcgacgcgctgcggcggctgcgcgacattcgcgtcaacaccgacatcctcgtctcgacgcaggttggcaaacgccttcgaccccttactaagcatcctcactcaggcattcaagcagttgctgccgacctttttgggtactggaaaaaggttgtccttgaagagtcaggaaagaaaaatggcggctcagagaatgaaagatcaagtgactcttcaggaaaggttgagaaggcgaggtccgtgaagattgaaaagaactctgcatcagcaagcatgaagcttgagaaaagagatgtggatgttaggggtcagaagcctaacaatgccaaagttgagaagactactagtaatggttccaaagctcaatctgtgaaggtggaaagggtatccaaagaagtcataaggactcctgacgcgaagaggccagcatccgtccccaatggccacccaaagcttacatctcttgtcaaatgcaatgatcctacccgagataaaatccgggaactacttgcctgaagcctttgtaagggtttccagagagactagtgatgatgacagagacgaagtgagaaacatcttggatgaagtcgaggcacgcgacccatacagggttgccgtgacagtagagctctgcactattcgagaggcttggaccttcccactgggactcacagggcgaaatacaggtcaatcatgttcaacctgagggctgaaagcaataccgatttccggaggagggtcctcatcggtctagtggcgccggagaggcttccagacgtatcccccgatgagatggctagcgacgcaaggaagcaagagaacatgcagatcaaggagaaggctctgttcgactgcgagcgtggagcggcaccaaaggcgacgacggaccagttcaagtgtgccagatgtgggcagcggaagacgacctactaccagctgcagactcggagtgctgatgaaccgatgacgacgttcgtcacatgcgtgaactgcaacaatcactggaagttctgctgagtggcagccttggtaaagtgtttacttagttgtgctgagcacactatcctgctgtgatgtgtgtgctctgttagttgtgactggaagttcgacagggcaggctgaacaactcaccttttttccccttttttaccccccgtaaactaggagcagttatcctcttcctctgtcaggcagcctcctgattcattcagattgtactagtcgaacgcgtgaatgttgttgacttgatcgcatcgtcaccagctgtgaattttcttgggtggagttagaatagaatggtgccaagctcagacgatgctgatggattagtggtgctgtgtgctc

SEQ ID NO: 18858 - protein, 202 aa, Zea mays subsp. mays
  misc_feature (1)..(202): Ceres Seq. ID no. 12367585
MDRELLETFDAAKKAADAAAGDGNSPEAGRCLDALRRLRDIRVNTDILVSTQVGKRLRPLTKHPHSGIQAVAADLFGYWKKVVLEESGKKNGGSENERSSDSSGKVEKARSVKIEKNSASASMKLEKRDVDVRGQKPNNAKVEKTTSNGSKAQSVKVERVSKEVIRTPDAKRPASVPNGHPKLTSLVKCNDPTRDKIRELLA

SEQ ID NO: 18859 - protein, 107 aa, Zea mays subsp. mays
  misc_feature (1)..(107): Ceres Seq. ID no. 12367586
MFNLRAESNTDFRRRVLIGLVAPERLPDVSPDEMASDARKQENMQIKEKALFDCERGAAPKATTDQFKCARCGQRKTTYYQLQTRSADEPMTTFVTCVNCNNHWKFC

SEQ ID NO: 18860 - DNA, 1320 bp, Zea mays subsp. mays
  misc_feature (1)..(1320): Ceres Seq. ID no. 12367593
agatgggacaaaaaaaaaatcgcgccgagtaccagagcgacgctacgcggcgtgacttctcccgaaacctccacatacccaaacccaccgaccgccgcctaggcttccacctctcccgctcaaactccggccactgaggtcgaacccgagcccgcgccgcagcggcacgatggtgaacgacgccgcggcgatggccgtcgtgagggcggcgcgcccagccctccgtggcgcccacgatggcgtcgccttcgccgcccacgccgccttcctcgccgatgggtactcgctctgcgccgtcggccctgccgcgctcgccgacccctcgcccttaggtgatgaggaggtggggattgatggttggaacatcatggagaattgttacgcctttttgtatagcaaggaggagaagggcaagaagaaaagggtactagtgaaatgtctggtgatcggtgaagtacttgcaattgatgtcttggatcttgaggcacaagataaggcgccttataatatccagattaatgtgaaagacttctttgtcgaagagcagccaaagaattatggggatatgtacaagaattttacaagtctcattgagactgtgaactcaaatgtgttgtgcaaattggatggagacggttccggtgctgaggctgctaagagcactgccgccgctgctgctaagaactctgatgggagaagttcaccaatacagagctctggagatccaggtcctagaactgctgacccttccggcctaatttatcctccaatagcaccgattggttctgatgatctctaccctgggcctggtgcaggcttctaccctcacagtggcattgggagcggtggcagcatgcatgttggtcctaatgatccgcgcttctttccttctaatcccttctctgccccatttggtgggcttgggagtgttccaccaggtagtcgctatgatccaattggcccacctgacgtcccagggtttgagccatctagctttgttaggcgtccaaggcggcctccaggcgggagcacccaccccgacctcgagttcttccagcaaggcccagacttctgagagtcgcgcagaggccggccggagcctcgccctaccctcacgaaataacttcaaaatgctgagccctcgagctagatatctcgcttggtgtgattgcaactgctgtatcaagtatagtcctagtgcgctttggctgtaaagatggatgtgaacatcgtcctagtgtatttactcttaattccaaaccatcgcctgtcatagcctaatatactcttttgtgtataatatcgggtgtaccggagccc

SEQ ID NO: 18861 - protein, 301 aa, Zea mays subsp. mays
  misc_feature (1)..(301): Ceres Seq. ID no. 12367594
MVNDAAAMAVVRAARPALRGAHDGVAFAAHAAFLADGYSLCAVGPAALADPSPLGDEEVGIDGWNIMENCYAFLYSKEEKGKKKRVLVKCLVIGEVLAIDVLDLEAQDKAPYNIQINVKDFFVEEQPKNYGDMYKNFTSLIETVNSNVLCKLDGDGSGAEAAKSTAAAAAKNSDGRSSPIQSSGDPGPRTADPSGLIYPPIAPIGSDDLYPGPGAGFYPHSGIGSGGSMHVGPNDPRFFPSNPFSAPFGGLGSVPPGSRYDPIGPPDVPGFEPSSFVRRPRRPPGGSTHPDLEFFQQGPDF

SEQ ID NO: 18862 - protein, 294 aa, Zea mays subsp. mays
  misc_feature (1)..(294): Ceres Seq. ID no. 12367595
MAVVRAARPALRGAHDGVAFAAHAAFLADGYSLCAVGPAALADPSPLGDEEVGIDGWNIMENCYAFLYSKEEKGKKKRVLVKCLVIGEVLAIDVLDLEAQDKAPYNIQINVKDFFVEEQPKNYGDMYKNFTSLIETVNSNVLCKLDGDGSGAEAAKSTAAAAAKNSDGRSSPIQSSGDPGPRTADPSGLIYPPIAPIGSDDLYPGPGAGFYPHSGIGSGGSMHVGPNDPRFFPSNPFSAPFGGLGSVPPGSRYDPIGPPDVPGFEPSSFVRRPRRPPGGSTHPDLEFFQQGPDF

SEQ ID NO: 18863 - protein, 235 aa, Zea mays subsp. mays
  misc_feature (1)..(235): Ceres Seq. ID no. 12367596
MENCYAFLYSKEEKGKKKRVLVKCLVIGEVLAIDVLDLEAQDKAPYNIQINVKDFFVEEQPKNYGDMYKNFTSLIETVNSNVLCKLDGDGSGAEAAKSTAAAAAKNSDGRSSPIQSSGDPGPRTADPSGLIYPPIAPIGSDDLYPGPGAGFYPHSGIGSGGSMHVGPNDPRFFPSNPFSAPFGGLGSVPPGSRYDPIGPPDVPGFEPSSFVRRPRRPPGGSTHPDLEFFQQGPDF

SEQ ID NO: 18864 - DNA, 1559 bp, Zea mays subsp. mays
  misc_feature (1)..(1559): Ceres Seq. ID no. 12367597
cctaatcgaaaactggtctgaaagccctcactccaaatctcgcgcactgtcagctgacgccaccgcctgcgccagccctcgccaagccggtgaaaacctcgtgccctccgccgcctccgcccgcctcttccagagtaccgcggtctcatctcctcccgggacgggcatgcagagcgcggctgccatcggtctcgttcggccatgcgccgcgcggccgctccccacctaccctagcccacggcgcggcgccggcgcgtgcagcggcgccgcccagccgatcctcgcgccccgcggcctctgcctctccgcccgcgccagcctactgccggcctcgccgctggaggaggagtaccggagatgcagggccggccggcacgtgccggcgcgggaaggtggccgcggctgatggggccgtagaggaagcggggggagggctcgtcaagacgctgcagctggggtcgctcttcgggctctggtacctcttcaacatctacttcaacatctacaacaagcaggttctgaaggttctgccataccctataaacatcaccacagtgcagtttgccgttggaagtgccattgctttgtttatgtggatcaccggtatccttaaaaggccaaagatttctggtgcccagctttttgctatccttcctctagctatcgttcataccatgggcaatcttttcacaaacatgagccttggaaaggttgcggtgtcatttacacatactatcaaggccatggaacctttcttctcagttctcctttcagcaattttccttggtgagttgcctacgccttgggttgtgttgtctcttcttccgatcgttggtggtgtggcattggcatcccttactgaggcctcctttaactgggctggattttggagtgcaatggcttcaaatgtaaccttccagtcaaggaatgtgctaagcaagaaacttatggtgaagaaagaggaatctctcgacaacattaatctattttcgataattacagtcatgtcattcttcctgttggccccagtaaccttacttacagaaggtgttaaagttagtccagcagttttgcagtctgctggtttgaacttgaaacagatatacacaaggtcattgattgctgcatgctgcttccatgcataccaacaggtgtcatacatgatcctcgccagggtatccccagtcacacattcagtgggcaattgcgtcaagcgtgtggtggtcattgtgacctctgttctgttcttcaggacccctgtttctcccatcaactcactcggtaccgggatcgctcttgctggagttttcctatactcgcaattgaagaggcttaagcccaagcccaaggctgcttgatcatagacctttgcaggtccatccaatagaacttttgaagttatgctatgccattggaatgattagtgagtgccgtagttagaatgatgtttaaagaagagctaccacttcagcagataatttgtgacttgcttgcattttttggacggatttgttcgtgtattaataattttgcagtgacgatacttctgttgtgctgtt

SEQ ID NO: 18865 - protein, 255 aa, Zea mays subsp. mays
  misc_feature (1)..(255): Ceres Seq. ID no. 12367598
MWITGILKRPKISGAQLFAILPLAIVHTMGNLFTNMSLGKVAVSFTHTIKAMEPFFSVLLSAIFLGELPTPWVVLSLLPIVGGVALASLTEASFNWAGFWSAMASNVTFQSRNVLSKKLMVKKEESLDNINLFSIITVMSFFLLAPVTLLTEGVKVSPAVLQSAGLNLKQIYTRSLIAACCFHAYQQVSYMILARVSPVTHSVGNCVKRVVVIVTSVLFFRTPVSPINSLGTGIALAGVFLYSQLKRLKPKPKAA

SEQ ID NO: 18866 - protein, 227 aa, Zea mays subsp. mays
  misc_feature (1)..(227): Ceres Seq. ID no. 12367599
MGNLFTNMSLGKVAVSFTHTIKAMEPFFSVLLSAIFLGELPTPWVVLSLLPIVGGVALASLTEASFNWAGFWSAMASNVTFQSRNVLSKKLMVKKEESLDNINLFSIITVMSFFLLAPVTLLTEGVKVSPAVLQSAGLNLKQIYTRSLIAACCFHAYQQVSYMILARVSPVTHSVGNCVKRVVVIVTSVLFFRTPVSPINSLGTGIALAGVFLYSQLKRLKPKPKAA

SEQ ID NO: 18867 - protein, 220 aa, Zea mays subsp. mays
  misc_feature (1)..(220): Ceres Seq. ID no. 12367600
MSLGKVAVSFTHTIKAMEPFFSVLLSAIFLGELPTPWVVLSLLPIVGGVALASLTEASFNWAGFWSAMASNVTFQSRNVLSKKLMVKKEESLDNINLFSIITVMSFFLLAPVTLLTEGVKVSPAVLQSAGLNLKQIYTRSLIAACCFHAYQQVSYMILARVSPVTHSVGNCVKRVVVIVTSVLFFRTPVSPINSLGTGIALAGVFLYSQLKRLKPKPKAA

SEQ ID NO: 18868 - DNA, 1097 bp, Zea mays subsp. mays
  misc_feature (1)..(1097): Ceres Seq. ID no. 12367604
gctcccctccgcatctccgttcgccatggcatcctcctccgagccctcggcgctgccgacgctcctggtgttccgcgtccgagagctgcggttcctcgcggcgctgcgcgagcggtaccgcgtcctcgacttcttcacgtcgggctcgccgctcgccgccttcctggccgcggcggccggcggcgcggacccgccccgcgcgttggtgaccgtggggggcgactccgtccgcgtggacgccgcgctcctggacgccgtcccgtcgctccgcttcgtccacagcacgggggccgggctggaccacatcgacctcggcgagtgcgcgcgccgcggcgtgggcgtcgccagctccggcacggtctactccaccgacgtcgccgaccacgccgtcggcttgctcgtcgacgtgctccgccgcgtgtccgccgccgaccggttcgtccgccgcgggctctggccgctccacggcgactatcccctcggcagcaagctgggcggcaagcgcgtgggcatcatcggcctgggcaacatcggcacgctgatcgcgaagaggctggcagccttcggctgcgtcatctgctacagctccagaaagcccaaggaatccgtctcctactggtacttccctagcgtccacgacctcgcgtcggaatcggacgtgctcgtcgtcgcgtgcgcgctgaccagggagacgcgccacatcgtgaacaaggacgtgctggcggcgctcgggaaggacggggtcgtggtaaacatcggccggggcccgaacatcgacgaggcggagctggtcgcggcgctcaaggaggggaggatcgccggagccagcctggatgtctttgataaggagcctaaggtgccggcagaggctcttctccatggacaatgtggtgctgacgcatcacgtcgcggtcttcacgacagagtccaggtccgacctccgtgacgtcaccatcagtaaccttgaagctttcttcgccggtaggccgctgcttaacccggtgcttcactcttgatggtttgttcgtgttattgcagcaggtcgatccatgtacgtgtaggaatgtgatttgttgaatacattttattttcgaccc

SEQ ID NO: 18869 - protein, 314 aa, Zea mays subsp. mays
  misc_feature (1)..(314): Ceres Seq. ID no. 12367605
LPSASPFAMASSSEPSALPTLLVFRVRELRFLAALRERYRVLDFFTSGSPLAAFLAAAAGGADPPRALVTVGGDSVRVDAALLDAVPSLRFVHSTGAGLDHIDLGECARRGVGVASSGTVYSTDVADHAVGLLVDVLRRVSAADRFVRRGLWPLHGDYPLGSKLGGKRVGIIGLGNIGTLIAKRLAAFGCVICYSSRKPKESVSYWYFPSVHDLASESDVLVVACALTRETRHIVNKDVLAALGKDGVVVNIGRGPNIDEAELVAALKEGRIAGASLDVFDKEPKVPAEALLHGQCGADASRRGLHDRVQVRPP

SEQ ID NO: 18870 - protein, 306 aa, Zea mays subsp. mays
  misc_feature (1)..(306): Ceres Seq. ID no. 12367606
MASSSEPSALPTLLVFRVRELRFLAALRERYRVLDFFTSGSPLAAFLAAAAGGADPPRALVTVGGDSVRVDAALLDAVPSLRFVHSTGAGLDHIDLGECARRGVGVASSGTVYSTDVADHAVGLLVDVLRRVSAADRFVRRGLWPLHGDYPLGSKLGGKRVGIIGLGNIGTLIAKRLAAFGCVICYSSRKPKESVSYWYFPSVHDLASESDVLVVACALTRETRHIVNKDVLAALGKDGVVVNIGRGPNIDEAELVAALKEGRIAGASLDVFDKEPKVPAEALLHGQCGADASRRGLHDRVQVRPP

SEQ ID NO: 18871 - protein, 209 aa, Zea mays subsp. mays
  misc_feature (1)..(209): Ceres Seq. ID no. 12367607
APLRISVRHGILLRALGAADAPGVPRPRAAVPRGAARAVPRPRLLHVGLAARRLPGRGGRRRGPAPRVGDRGGRLRPRGRRAPGRRPVAPLRPQHGGRAGPHRPRRVRAPRRGRRQLRHGLLHRRRRPRRRLARRRAPPRVRRRPVRPPRALAAPRRLSPRQQAGRQARGHHRPGQHRHADREEAGSLRLRHLLQLQKAQGIRLLLVLP

SEQ ID NO: 18872 - DNA, 1233 bp, Zea mays subsp. mays
  misc_feature (1)..(1233): Ceres Seq. ID no. 12367623
aacatcatcaccacacgctaaatttacagctagctagctgaattcgatcgatatccgggaactaataatccaccgaccccctcatggcggcttcgtcgcgaatgggcgtatctgtctacctcgccatcatggcggcggtgctcgcctcggcgctcggagcggagctcaccgcggactactatagcgagacgtgcccgcaagcgctgaccaccatcaagctcctcgtcggcgccgccatcctgagggagcccaggatgggggcgtcgctggtccgcctccactttcacgattgcttcgtcaatggctgcgacggctccatcctgctggacgacaccgacgacatggtcggagagaagacggcgaagcccaacaacaactccgtgagaggctacgacgtcatcgacaccatcaagtcggcggtgaacacgatatgcttgggcaacgtcgtctcctgcgccgatatcttggccgtggccgctcgcgattccattgtcgctctgggaggaacctcgtacgacgtgctcctggggcggcgcgacgcgacgacggcgagcatggacgacgcgaacaacgacatcccgacgccgttcatggacctgccggcgctacaggacagcttcgagtcccacggcctgtccctgcacgacctggtggtgctctccggcggccacacgctgggctactcccgctgcctcttcttccgcggccgcctgtacaacgagaccggcacgctggacccggcgtacgccgggtcgctggacgagcgctgcccgctggcgggcgacgacgacgcgctgtcggcgctggacgacacccccaccaccgtcgacgctgactactaccagggcctcatgcagggacgcgcgctgctgcactcggatcagcagctttaccaggcaggcggcgccgctggcgacctggtggagtactacgccgacaacccgaccaagttctgggaggacttcggcgcggcaatggtcaagctgggcagcctgagcccgctcaccggcgacgaaggggatgtcagggagaactgccgggtcgtcaaccaggtgtgagtgtgacttcgccgccatcgtcgaatcaacgaggcatcagcttcgttccgtacgtacactctggctgctagctgcaccggcaagctatgcaccaagattctgtagcgtgtgtctgatcattatttgtattcgcgtgcctacttaattttgtgagaaattggtcttatgtttggtt

SEQ ID NO: 18873 - protein, 324 aa, Zea mays subsp. mays
  misc_feature (1)..(324): Ceres Seq. ID no. 12367624
MAASSRMGVSVYLAIMAAVLASALGAELTADYYSETCPQALTTIKLLVGAAILREPRMGASLVRLHFHDCFVNGCDGSILLDDTDDMVGEKTAKPNNNSVRGYDVIDTIKSAVNTICLGNVVSCADILAVAARDSIVALGGTSYDVLLGRRDATTASMDDANNDIPTPFMDLPALQDSFESHGLSLHDLVVLSGGHTLGYSRCLFFRGRLYNETGTLDPAYAGSLDERCPLAGDDDALSALDDTPTTVDADYYQGLMQGRALLHSDQQLYQAGGAAGDLVEYYADNPTKFWEDFGAAMVKLGSLSPLTGDEGDVRENCRVVNQV

SEQ ID NO: 18874 - protein, 318 aa, Zea mays subsp. mays
  misc_feature (1)..(318): Ceres Seq. ID no. 12367625
MGVSVYLAIMAAVLASALGAELTADYYSETCPQALTTIKLLVGAAILREPRMGASLVRLHFHDCFVNGCDGSILLDDTDDMVGEKTAKPNNNSVRGYDVIDTIKSAVNTICLGNVVSCADILAVAARDSIVALGGTSYDVLLGRRDATTASMDDANNDIPTPFMDLPALQDSFESHGLSLHDLVVLSGGHTLGYSRCLFFRGRLYNETGTLDPAYAGSLDERCPLAGDDDALSALDDTPTTVDADYYQGLMQGRALLHSDQQLYQAGGAAGDLVEYYADNPTKFWEDFGAAMVKLGSLSPLTGDEGDVRENCRVVNQV

SEQ ID NO: 18875 - protein, 309 aa, Zea mays subsp. mays
  misc_feature (1)..(309): Ceres Seq. ID no. 12367626
MAAVLASALGAELTADYYSETCPQALTTIKLLVGAAILREPRMGASLVRLHFHDCFVNGCDGSILLDDTDDMVGEKTAKPNNNSVRGYDVIDTIKSAVNTICLGNVVSCADILAVAARDSIVALGGTSYDVLLGRRDATTASMDDANNDIPTPFMDLPALQDSFESHGLSLHDLVVLSGGHTLGYSRCLFFRGRLYNETGTLDPAYAGSLDERCPLAGDDDALSALDDTPTTVDADYYQGLMQGRALLHSDQQLYQAGGAAGDLVEYYADNPTKFWEDFGAAMVKLGSLSPLTGDEGDVRENCRVVNQV

SEQ ID NO: 18876 - DNA, 1141 bp, Zea mays subsp. mays
  misc_feature (1)..(1141): Ceres Seq. ID no. 12367647
gcgacacacaccacacacacacattttcaaatctagcttgttcgctaagctcaggctagctgagctgatctgagaaacgatcgctgcttcagtttcagcttgatcgctagctcgctacacagatcgatcgacctcttatttagcttgttcctccaaggaccgagatcggttgttgttgataaaccagccatggttgcggttgcggaggcagcggtgacgacgaccatgacgacgacgggcgggcggtacgcgctgctgatggcggcgcacgactcggagtacgtgctcaacaagtacggcgggtacctccacgtcttcgtggcggccttcggcgacgccggcgagacgtgggacctgtatcgggccatcgacagcgagctccctggccccggtgagcttgaggcctacgacgggttcgtgatcagcggcagcccccacgacgcgtacgccgacgagctgtggatcctgcggctgtgcctcctggtgcgggcgctgcacggcatgcgcaagcgggtcctcggcgtctgcttcggccaccaggtgatctgccgcgcgctgggaggccgcgtgggcaaggcccgcgccggctgggacgtcggcgtcagggaggtggccatcgccgaggcgccgccgcgcaggttcctcgacgcgctgcgggagcgggaccagctgccgctccgcgccaggatcaccgaggtccatcaggacgaggtgtgggaggtgccggagggcgcggaggttctggcctcctccgacaagaccggcgtcgagatgttctgcgtcggcgagcacgtgctgggcatccaggggcacccggagtacaccaaggacatcttcctcagcctcgtcgaccgcctcctcgccgccggatccatcaccattccctttgctgaggccgtgaacaggcagctggagatcactgcgccggaccgggagttctggctcatgctctgcaagagcttcctcaaggctcgtgaagaataagagtattaattagagtttgcacactgtgatgtcattgtcacttaattaccattaaaacggttgtaaatcttctatcacttcaacaaataaacctctctcgagtcaaatacttgaccatcttcttcaaatgagagaaaaaaaatggaagaccactttc

SEQ ID NO: 18877 - protein, 264 aa, Zea mays subsp. mays
  misc_feature (1)..(264): Ceres Seq. ID no. 12367648
MVAVAEAAVTTTMTTTGGRYALLMAAHDSEYVLNKYGGYLHVFVAAFGDAGETWDLYRAIDSELPGPGELEAYDGFVISGSPHDAYADELWILRLCLLVRALHGMRKRVLGVCFGHQVICRALGGRVGKARAGWDVGVREVAIAEAPPRRFLDALRERDQLPLRARITEVHQDEVWEVPEGAEVLASSDKTGVEMFCVGEHVLGIQGHPEYTKDIFLSLVDRLLAAGSITIPFAEAVNRQLEITAPDREFWLMLCKSFLKAREE

SEQ ID NO: 18878 - protein, 252 aa, Zea mays subsp. mays
  misc_feature (1)..(252): Ceres Seq. ID no. 12367649
MTTTGGRYALLMAAHDSEYVLNKYGGYLHVFVAAFGDAGETWDLYRAIDSELPGPGELEAYDGFVISGSPHDAYADELWILRLCLLVRALHGMRKRVLGVCFGHQVICRALGGRVGKARAGWDVGVREVAIAEAPPRRFLDALRERDQLPLRARITEVHQDEVWEVPEGAEVLASSDKTGVEMFCVGEHVLGIQGHPEYTKDIFLSLVDRLLAAGSITIPFAEAVNRQLEITAPDREFWLMLCKSFLKAREE

SEQ ID NO: 18879 - protein, 241 aa, Zea mays subsp. mays
  misc_feature (1)..(241): Ceres Seq. ID no. 12367650
MAAHDSEYVLNKYGGYLHVFVAAFGDAGETWDLYRAIDSELPGPGELEAYDGFVISGSPHDAYADELWILRLCLLVRALHGMRKRVLGVCFGHQVICRALGGRVGKARAGWDVGVREVAIAEAPPRRFLDALRERDQLPLRARITEVHQDEVWEVPEGAEVLASSDKTGVEMFCVGEHVLGIQGHPEYTKDIFLSLVDRLLAAGSITIPFAEAVNRQLEITAPDREFWLMLCKSFLKAREE

SEQ ID NO: 18880 - DNA, 975 bp, Zea mays subsp. mays
  misc_feature (1)..(975): Ceres Seq. ID no. 12367671
gcataacgccgctgccggaggtctccaaggccagcgacgtcgccggcggcgcggtgaagagatggccgcagcggctcacggccgtgccgcccagggtctcccgcggcaccgtcaggggcgtcacggccaggtcgttcgcgcaggacacggagctgtggcggaggagggtccggcactacaagtcggtggccagccagctcgagcagaaggggcggtaccgcaacgtgctggacatgaacgcgcgcctgggcgggttcgccgcggcgctggcgctggcgggcgacccgctgtgggtcatgaacatggtcccgaccgtggcgaacgcgaccacgctcggggccatctacgagcgcgggctcatcggaagctaccaggactggtgcgagggcatgtctacctacccgaggacctacgacctcatccatgcggattcggtgttcaccctgtacaaggacaggtgtgagatggaccgcatcctcctggagatggacaggatcctgaggcccaggggcacggtgatcgtcagggaagacgtggacatgctggtgaaggtcaagagcctggcggacgggatgaggtgggagagccagatcgtcgaccacgaatacggcccgctcgtcagggagaagatcctcctggttgtcaagacgtactggactgcccaggaccaagaccagtagcaggaccggacttgtcaagcgaagttcagcaatgttgataagcatttttcttgcttcgaattgcattggatcgccatttctagctccttgagctagtagtgttctctgtttgtttgctgttccttttggactgtacttgctcagataggaaatttgtatcctaaggtgtaacagggggaaatggaagggcttaggtaaaacccctggcccctgcaaagttttttttttttgttttccttcaattgcgaaattgtggcaagtggtaaatagaaagtcactgttgcgagtcatcccg

SEQ ID NO: 18881 - protein, 225 aa, Zea mays subsp. mays
  misc_feature (1)..(225): Ceres Seq. ID no. 12367672
ITPLPEVSKASDVAGGAVKRWPQRLTAVPPRVSRGTVRGVTARSFAQDTELWRRRVRHYKSVASQLEQKGRYRNVLDMNARLGGFAAALALAGDPLWVMNMVPTVANATTLGAIYERGLIGSYQDWCEGMSTYPRTYDLIHADSVFTLYKDRCEMDRILLEMDRILRPRGTVIVREDVDMLVKVKSLADGMRWESQIVDHEYGPLVREKILLVVKTYWTAQDQDQ

SEQ ID NO: 18882 - protein, 153 aa, Zea mays subsp. mays
  misc_feature (1)..(153): Ceres Seq. ID no. 12367673
HNAAAGGLQGQRRRRRRGEEMAAAAHGRAAQGLPRHRQGRHGQVVRAGHGAVAEEGPALQVGGQPARAEGAVPQRAGHERAPGRVRRGAGAGGRPAVGHEHGPDRGERDHARGHLRARAHRKLPGLVRGHVYLPEDLRPHPCGFGVHPVQGQV

SEQ ID NO: 18883 - protein, 148 aa, Zea mays subsp. mays
  misc_feature (1)..(148): Ceres Seq. ID no. 12367674
MNARLGGFAAALALAGDPLWVMNMVPTVANATTLGAIYERGLIGSYQDWCEGMSTYPRTYDLIHADSVFTLYKDRCEMDRILLEMDRILRPRGTVIVREDVDMLVKVKSLADGMRWESQIVDHEYGPLVREKILLVVKTYWTAQDQDQ

SEQ ID NO: 18884 - DNA, 2131 bp, Zea mays subsp. mays
  misc_feature (1)..(2131): Ceres Seq. ID no. 12367699
ataacacaacaatctctctcccctcactccctctctgcagcgcgcagctttcaaagcgttgggagagatggcagaggagacgcaaccagaggccgcagccgccgccgcgcccgccgcggccgaggtagtcgtgaccgaagctgcgccggcggaggcggaggtgcctgcggcggcggaagctgaagccgaggccaaggatgagaagaaaggtgacgaggcggagctcaccgccgatgacgcgggggtggggaccggctcgttcaaggaggaaagcaacctggtggaagacctgcccgacccggagaagaaggcgctcgacgagttcaagcagctgatcgctgctgccctcgccgccggtgagttcaacctgcctcccccgccgccgccgccgaaggccaaggaaacaaaggtggaggaagccaaggccgaggagcccgccaaagaagagcccgcggccgaggcggaggaagccaaggcccaggtggctgcggatgccccggttgaggaggtcaagacggaggtgccgccggccgaggaggccaaggctgagacactggctgaggaagccaagccttccgagcccgagccgcaggagaagaccgtcgtggtcactgaggaggagactgccaccaagacggtggaagcaatcgaggaaaccgtcgtgtccgcccccgccgccatcccggaggaagcagcggcgccggaggcggtggtcgaggctcaggcgaccgcgcctgaacccgtgctgatttggggcgtgccgctgggtcggcgacgacgagcgcacggacacggttctgctcaagttcctgcgtgcgcgggagttcaaggtgaaggaggccatggcgatgctcaagtccgcggtgctgtggcgcaagcgcttcggcatcacctcgctcctcgacgccgaccttggcctgacggagctggagaacgtggtgttctaccgcggcacggaccgcgaaggccaccccgtgtgctacaacgtctacggcgagttccaggacaaggatctctacgagaaggccttcggcgacgatgagaagagggagcgcttcctcaagtggcgcatccagctgctggagcgcggcattctgtcgaagctggacttctcgcccagcggcatctgctccatggttcaggttaccgacctcaagaactcgccgcccatgctcggcaagcaccgcgccgtcacccgccaggctgtcacgctgctccaggacaactaccccgagttcattgccaagaaggtgttcatcaatgtgccgtggtggtatctagccgccaacaagatgatgagcccgttcctcacacagcgcaccaagagcaagttcgtctttgctagcccagccaaatcagcagcgactctattcagatacatcgcaccggaacaagttcctgtccaatttggaggcctcttcaaggaggatgatcctgagttcaccacctctgacactgtctccgagctcactatcaaaccatcctcaaaagaaaccgttgagatccctgtcaccgagaactccacaattgtatgggaactccgggtgctgagttgggaagtgagctatggcgccgagttcacccccgacgcggagggtgggtacaccgtcattgtacagaagacaaggaaggtgcctgctaacgaggaaccgatcatgaagggaagcttcaaggcaggcgagcctggaaaacttgtgctaactgtgaacaaccctgcatccaagaagaagactctactttacagatcgaaggtgaagagcgccagcgagtgagtgtgaggtcacgccgctagctgcctgggccctacagttaaaacgatctacagcatgatagaagagagaaggaaccttttggtttggttcgttaatttactgggatttgctgggttttttattttttgggttcgcattctacattttgtttggttgaaaccaaagtgagcttgtttttgtgacagtagatgggagaagtataatggcattgtgtgatggatggttgttgatgagggcagggaggacgaaaatgaggggaaggaaaggctggagaatgtctgttcctctgtagatgtgtgttctgtacattgcatctcttggattctcattgatatgttaaaatttaggagtacttggtc

SEQ ID NO: 18885 - protein, 324 aa, Zea mays subsp. mays
  misc_feature (1)..(324): Ceres Seq. ID no. 12367700
MAEETQPEAAAAAAPAAAEVVVTEAAPAEAEVPAAAEAEAEAKDEKKGDEAELTADDAGVGTGSFKEESNLVEDLPDPEKKALDEFKQLIAAALAAGEFNLPPPPPPPKAKETKVEEAKAEEPAKEEPAAEAEEAKAQVAADAPVEEVKTEVPPAEEAKAETLAEEAKPSEPEPQEKTVVVTEEETATKTVEAIEETVVSAPAAIPEEAAAPEAVVEAQATAPEPVLIWGVPLGRRRRAHGHGSAQVPACAGVQGEGGHGDAQVRGAVAQALRHHLAPRRRPWPDGAGERGVLPRHGPRRPPRVLQRLRRVPGQGSLREGLRRR

SEQ ID NO: 18886 - protein, 309 aa, Zea mays subsp. mays
  misc_feature (1)..(309): Ceres Seq. ID no. 12367701
MAMLKSAVLWRKRFGITSLLDADLGLTELENVVFYRGTDREGHPVCYNVYGEFQDKDLYEKAFGDDEKRERFLKWRIQLLERGILSKLDFSPSGICSMVQVTDLKNSPPMLGKHRAVTRQAVTLLQDNYPEFIAKKVFINVPWWYLAANKMMSPFLTQRTKSKFVFASPAKSAATLFRYIAPEQVPVQFGGLFKEDDPEFTTSDTVSELTIKPSSKETVEIPVTENSTIVWELRVLSWEVSYGAEFTPDAEGGYTVIVQKTRKVPANEEPIMKGSFKAGEPGKLVLTVNNPASKKKTLLYRSKVKSASE

SEQ ID NO: 18887 - protein, 307 aa, Zea mays subsp. mays
  misc_feature (1)..(307): Ceres Seq. ID no. 12367702
MLKSAVLWRKRFGITSLLDADLGLTELENVVFYRGTDREGHPVCYNVYGEFQDKDLYEKAFGDDEKRERFLKWRIQLLERGILSKLDFSPSGICSMVQVTDLKNSPPMLGKHRAVTRQAVTLLQDNYPEFIAKKVFINVPWWYLAANKMMSPFLTQRTKSKFVFASPAKSAATLFRYIAPEQVPVQFGGLFKEDDPEFTTSDTVSELTIKPSSKETVEIPVTENSTIVWELRVLSWEVSYGAEFTPDAEGGYTVIVQKTRKVPANEEPIMKGSFKAGEPGKLVLTVNNPASKKKTLLYRSKVKSASE

SEQ ID NO: 18888 - DNA, 1722 bp, Zea mays subsp. mays
  misc_feature (1)..(1722): Ceres Seq. ID no. 12367714
cgttgtatgatgatgatgacgagggaaccaaaaaagaagaagaaagaattccaaaaccctccctctcctgttctgtatcttctgcggctccgccgtggattcttcgtgcgataaactaagcagggcgctgcacgaggatggggtgcggggcgtcgagccagaaggacgccggggcgccgcggaggcggccggtgagcgtcggcgacgtggtcgtcttcctcccgggcctccgcgtgccgagggccgtcgacttggcccaggcgctcggcggctgcctggccaggagcgccgtggaccggctgtcggctctgcgatcgcgggtcgtcgagatggcaatgcgagagtcggcggcggcgctcaagcccaggcggagggcggcggcacggcacgggtctagtacagccaatcttctacaggccctcgaagactacttgccggctctgctaggactggtaaaagaaggtagcgtcttgaggaacaaagtgcacttcacctggagtaaccaggaggataatgctgaggagacggccatgccagacgcctggtacgaggtgctgtccatgctgcatctgatggccatggtctgcctgctgcaggccaacgccctgcttctcccgaggtcatacggcgatggctatgccccaagggtttctgaagagagtcgacgggccactgttgatgtcttcttgaaggcagctggatacctagactgtgcagttcggcatgtactcccgaagatgccactcgagctaaggagacagcttccagtagacctggctgaaggaaatctcaaagctctaagcctccaagccctgggtcagggggttgacatgcagcttggtttggctattgatagtccaaaggccactttagcagtaaaacggcgcttagcctgtgagatggtcaaatattggcaacaagttcaagagagcattccagagcttcctatctctgatggatggggtaaaaagcaccggctgtttataaagtggaaatatgttgaagctaaggctgcagcatactatttccacggtttgattcttgacgagggaaataccgaaaaatcccatggaatggcaatagctgcactccaagcttcagaggaatttctaaaagaaagcaaaagggtttcagaagccttccatgcaactcctccaacatcgaggagtcccaatccattcggaacagcaaaatatctgtttgacaagatcccaagagatgcttccagcaaggttcgaatcaaccaggacctgtatactcaagaaaaggtcattggagcgccacccccattaccagattttgcattggcgctaacacctgaagaatatgatcttcctccactagatccactttggaacaaagaagacacaagccattaagtgtatatgcagcagaatggttgcttctggcaaaaatattggctctggagagaaaggaaggaccaagatctgccatgtcaagagctgatgtgtaatgaatgaagtgtacaaagtattttcaaacaaaaatacatgttcacaaatttacgcaaggcctgaagacaatctgaagagctttgtacaggcgattcttcttctgacaagggaaatgctatgtcaaagggttccttgatcattgtgcatcttgatgcttgcattttgtcaaaaacagattttcagcaatttatgtagaactgtaaactagcctctgatcgaaagtggcagccttcaaattttttttttc

SEQ ID NO: 18889 - protein, 413 aa, Zea mays subsp. mays
  misc_feature (1)..(413): Ceres Seq. ID no. 12367715
MGCGASSQKDAGAPRRRPVSVGDVVVFLPGLRVPRAVDLAQALGGCLARSAVDRLSALRSRVVEMAMRESAAALKPRRRAAARHGSSTANLLQALEDYLPALLGLVKEGSVLRNKVHFTWSNQEDNAEETAMPDAWYEVLSMLHLMAMVCLLQANALLLPRSYGDGYAPRVSEESRRATVDVFLKAAGYLDCAVRHVLPKMPLELRRQLPVDLAEGNLKALSLQALGQGVDMQLGLAIDSPKATLAVKRRLACEMVKYWQQVQESIPELPISDGWGKKHRLFIKWKYVEAKAAAYYFHGLILDEGNTEKSHGMAIAALQASEEFLKESKRVSEAFHATPPTSRSPNPFGTAKYLFDKIPRDASSKVRINQDLYTQEKVIGAPPPLPDFALALTPEEYDLPPLDPLWNKEDTSH

SEQ ID NO: 18890 - protein, 349 aa, Zea mays subsp. mays
  misc_feature (1)..(349): Ceres Seq. ID no. 12367716
MAMRESAAALKPRRRAAARHGSSTANLLQALEDYLPALLGLVKEGSVLRNKVHFTWSNQEDNAEETAMPDAWYEVLSMLHLMAMVCLLQANALLLPRSYGDGYAPRVSEESRRATVDVFLKAAGYLDCAVRHVLPKMPLELRRQLPVDLAEGNLKALSLQALGQGVDMQLGLAIDSPKATLAVKRRLACEMVKYWQQVQESIPELPISDGWGKKHRLFIKWKYVEAKAAAYYFHGLILDEGNTEKSHGMAIAALQASEEFLKESKRVSEAFHATPPTSRSPNPFGTAKYLFDKIPRDASSKVRINQDLYTQEKVIGAPPPLPDFALALTPEEYDLPPLDPLWNKEDTSH

SEQ ID NO: 18891 - protein, 347 aa, Zea mays subsp. mays
  misc_feature (1)..(347): Ceres Seq. ID no. 12367717
MRESAAALKPRRRAAARHGSSTANLLQALEDYLPALLGLVKEGSVLRNKVHFTWSNQEDNAEETAMPDAWYEVLSMLHLMAMVCLLQANALLLPRSYGDGYAPRVSEESRRATVDVFLKAAGYLDCAVRHVLPKMPLELRRQLPVDLAEGNLKALSLQALGQGVDMQLGLAIDSPKATLAVKRRLACEMVKYWQQVQESIPELPISDGWGKKHRLFIKWKYVEAKAAAYYFHGLILDEGNTEKSHGMAIAALQASEEFLKESKRVSEAFHATPPTSRSPNPFGTAKYLFDKIPRDASSKVRINQDLYTQEKVIGAPPPLPDFALALTPEEYDLPPLDPLWNKEDTSH

SEQ ID NO: 18892 - DNA, 1276 bp, Zea mays subsp. mays
  misc_feature (1)..(1276): Ceres Seq. ID no. 12367734
ccctctactagtcattctcctctctctctctctcacacacacacacggccaaattccgctctctgctttgtttacacaggcgacgcaagccacgcagcgcgccgccaccgcgtctgcactccgcccccgcgaagcttccggggggccctcttccttcctccgccccagccctcgagtcggtctccaccggcggcggcggcaggcttccgcgccggcgccggactgggtcggcccggccgcgaggtgcaccaggtatcactagcaggtccctgacaaggagggcttactatcctgtggttggaagtagcaactcaagcgttgatgccgttccaactatccgtggatcatctggcgcagcaatatttgctaatggtggctatgctcttaatgctgatgctggaactgtttctatctaccctaatccagctcctgctacttcatctggctctataaccatgcccatgcccatgctccatcagatggtcattcagagccatccacctgctacctctgcagcaacctctacatccatgtggatcgctcaaccactacctgccagaactgctgcggcttctagacatgcaagacgcgtatcagcagggcttgccaacaatggaaggtacagaagggctaggagctcttactacagccttcatccactgatgatggtagaggcagagttggtcttttacgaatcaagagcagcagccgctgacccccacagggacatgagactggacatcgacaacatgagctacgaggacctgttggctttgggagaatctatgggcaatgtcaacacaggcttggccgatgagaaaatttcgaagtgcgtgaaagaagtggtctgctgcagttccgaccagacgcaaaccgatcaagatgaccaggatgacggaagctgcgtcatctgcctggagggttacagagacaaggatatgctggggatactgaaatgcaggcacgacttccacgccggctgcatcaagaagtggctgcagacgaagaactcgtgcccggtgtgcaaagccgccgccgcctaggacgacaccagaggagcgagcaactattttgtgctcctcctcgatctattcatttttttaggctcaggtcgaattatatatgtcgttccattcttttgattccagccagtcgtgtaaataaatgccgtgtgttggttattttagttatcacttgggttacattagcccaaattctcctgttgcattgtaaacaatccagtggtgaaggcaattgatcaagtggttgcaagcgc

SEQ ID NO: 18893 - protein, 195 aa, Zea mays subsp. mays
  misc_feature (1)..(195): Ceres Seq. ID no. 12367735
MPMPMLHQMVIQSHPPATSAATSTSMWIAQPLPARTAAASRHARRVSAGLANNGRYRRARSSYYSLHPLMMVEAELVFYESRAAAADPHRDMRLDIDNMSYEDLLALGESMGNVNTGLADEKISKCVKEVVCCSSDQTQTDQDDQDDGSCVICLEGYRDKDMLGILKCRHDFHAGCIKKWLQTKNSCPVCKAAAA

SEQ ID NO: 18894 - protein, 193 aa, Zea mays subsp. mays
  misc_feature (1)..(193): Ceres Seq. ID no. 12367736
MPMLHQMVIQSHPPATSAATSTSMWIAQPLPARTAAASRHARRVSAGLANNGRYRRARSSYYSLHPLMMVEAELVFYESRAAAADPHRDMRLDIDNMSYEDLLALGESMGNVNTGLADEKISKCVKEVVCCSSDQTQTDQDDQDDGSCVICLEGYRDKDMLGILKCRHDFHAGCIKKWLQTKNSCPVCKAAAA

SEQ ID NO: 18895 - protein, 191 aa, Zea mays subsp. mays
  misc_feature (1)..(191): Ceres Seq. ID no. 12367737
MLHQMVIQSHPPATSAATSTSMWIAQPLPARTAAASRHARRVSAGLANNGRYRRARSSYYSLHPLMMVEAELVFYESRAAAADPHRDMRLDIDNMSYEDLLALGESMGNVNTGLADEKISKCVKEVVCCSSDQTQTDQDDQDDGSCVICLEGYRDKDMLGILKCRHDFHAGCIKKWLQTKNSCPVCKAAAA

SEQ ID NO: 18896 - DNA, 1449 bp, Zea mays subsp. mays
  misc_feature (1)..(1449): Ceres Seq. ID no. 12367750
gcacgagaccattacctagaacatcctaatcgaaaactccacgccgcgcccgcggagctcgacgcccaccggcgctgcccgtcggagccggggggacgcgccggcgccggagctggcgggagcggagctggcggccatcttccgggtgatggcggacctcctcagcgacccagcgtggccgcagctccatccgcggccctgcaccgacacgccgtggccgggcctgcaatgcgagctcgtgcccgacgacgcgcgcgtgctccgcatcacccgcctccacctgggtctcgacgtcgccaccccgccctgcaggcccgaggccagactagaccccgcctcgctgcgcggactaccgcacctccggacgctctccatcttcagctgctttggcgccgcccaagcctccgttgagctgccgcccgcgctgttcacgtcgtcgtcctcgctcgagcagatcgtgctcaagtccaaccccggcctcaccggcctcataccggcgacgttgggcagcctgcggagcctgcgcgtgctcagcctctcgcagaacggcttccgcggcgggatccccagggagctcggcggcctcgccgcgctgcagcagctcgacctcagctacaacaacatcaccggcgagatccccgaggagattggtgcgatgtcgagtctgacgatccttgacctgagctggaacagcatcggcggcggcgtgccggcgacgctgggcaagctccagaggatgcagaaggcggacctgagctacaaccgcctcgccggccgcgtgccgccggaggcggggtcgctgcgggagctggtgttcctggacctgagccacaacagcctcgcgggcccgctgccgagctcgctggccggcctgtccaggctgcagtacctgctgctgcaggacaaccccctcggcacggcggtgccggcggtggtcgggtcgctgcggcggctgcaggtgctgggcctgtccgggtgcaacctgacggggcccatcccgcgcggcgcgttcgcggcgctggccagcctcacggcgctgtcgctggaccggaaccggctggacgggccgatcccggcgagcctggccgcgctgccccaactgggccagctcaacctcagccagaaccggctggccggggagatcgcgctgccgggggagtttgtcgcgcggctcggcaggcgcctcgacgtccggggcaacgacgagctgtgcatcggcaggggcctacagggtagcggctatctgggagcgcccccgtgcgtggacagccacaacggcgacggatcgccggaaatatcaggtgctgctgcggcggccgtcggcctattcgacgggtcggcgtgtcatctttttgtgtcgtgtctggcgttcgtgttccagttgtgatgtgacatgtaactccggtcgctttctccgcccgactgctgcgacgcgagttttttcctgcc

SEQ ID NO: 18897 - protein, 412 aa, Zea mays subsp. mays
  misc_feature (1)..(412): Ceres Seq. ID no. 12367751
MADLLSDPAWPQLHPRPCTDTPWPGLQCELVPDDARVLRITRLHLGLDVATPPCRPEARLDPASLRGLPHLRTLSIFSCFGAAQASVELPPALFTSSSSLEQIVLKSNPGLTGLIPATLGSLRSLRVLSLSQNGFRGGIPRELGGLAALQQLDLSYNNITGEIPEEIGAMSSLTILDLSWNSIGGGVPATLGKLQRMQKADLSYNRLAGRVPPEAGSLRELVFLDLSHNSLAGPLPSSLAGLSRLQYLLLQDNPLGTAVPAVVGSLRRLQVLGLSGCNLTGPIPRGAFAALASLTALSLDRNRLDGPIPASLAALPQLGQLNLSQNRLAGEIALPGEFVARLGRRLDVRGNDELCIGRGLQGSGYLGAPPCVDSHNGDGSPEISGAAAAAVGLFDGSACHLFVSCLAFVFQL

SEQ ID NO: 18898 - protein, 243 aa, Zea mays subsp. mays
  misc_feature (1)..(243): Ceres Seq. ID no. 12367752
MSSLTILDLSWNSIGGGVPATLGKLQRMQKADLSYNRLAGRVPPEAGSLRELVFLDLSHNSLAGPLPSSLAGLSRLQYLLLQDNPLGTAVPAVVGSLRRLQVLGLSGCNLTGPIPRGAFAALASLTALSLDRNRLDGPIPASLAALPQLGQLNLSQNRLAGEIALPGEFVARLGRRLDVRGNDELCIGRGLQGSGYLGAPPCVDSHNGDGSPEISGAAAAAVGLFDGSACHLFVSCLAFVFQL

SEQ ID NO: 18899 - protein, 216 aa, Zea mays subsp. mays
  misc_feature (1)..(216): Ceres Seq. ID no. 12367753
MQKADLSYNRLAGRVPPEAGSLRELVFLDLSHNSLAGPLPSSLAGLSRLQYLLLQDNPLGTAVPAVVGSLRRLQVLGLSGCNLTGPIPRGAFAALASLTALSLDRNRLDGPIPASLAALPQLGQLNLSQNRLAGEIALPGEFVARLGRRLDVRGNDELCIGRGLQGSGYLGAPPCVDSHNGDGSPEISGAAAAAVGLFDGSACHLFVSCLAFVFQL

SEQ ID NO: 18900 - DNA, 2010 bp, Zea mays subsp. mays
  misc_feature (1)..(2010): Ceres Seq. ID no. 12367754
aaaaaagatctccactccagtatcccctccccgacttgcaacctctcctgaatcccaccgatcacgcgagctccccgccgcgatgtccgatcaccgagcgaagcggccgtccgacggcgcagccactgtggcatcgccggcggcgaagcgcgcccgcgacccgcccgcgccggcgttacccacgaacaaggaagctcccgacatggcccccaagacccgcatcttctgcgacatcctggcctcccgcgccgacgacgaggaactgaatgccgagctcgacaaggccgacatccgcgtaagcatcgctgacgtcgagcaggtgctccgcttctcctacgcgcacccgcgcgccgccgccgccttctttcgctggggcgggataccggtacctcggccacgagcactccccctactcgtggaacctcctcgtcgacatcctcggtaagaatcgtctcttcgagcccatgtgggacacagtcaaatctatgcagtcgcagcagctgctctcgctcgccactttcgcctccatattctcctccctggcggcgacccccggcggttccccgctcaaggcgttcatggacatgccccgctacggcatgacccgcgacacgccggcgctcaactcgctcctctccgcgctgtgtcgtgccaaccgcctcgacgacgctcgcgccgcgatcccagtagcccgcgccgaggctggcacgcgcccggatgccgactcctacgccatcctcctcgagggcagcgaggccgccgccgatctgcgggttgcgcgcgaggtgttcgacgaaatggtgcaggccattggattttatcctgacaacgtgcctgcctatgactccttcctcactacgcttgtttcaagtgactcctccacggcgctaccgggaagcaatggagtacctaaatgtcttgagcaggcacggctgttcgccaggagagaagttcttccgtgctgctcttgctgcacaccttgaggcacgacaattgcgcggagccatgaatctctgggatgactttgttgggcgtcgaggactcgtcccagatatggaaatgtacaacacaatgatcaagctgcagggcagtctcgggcatgctgagctgatagtgggttatctcgacgacatgatctccaatggagtcttccctgataccaacacatacaatgtggtcctccagcttttgttgaagggaaagaagcaccgagaggcagcggcaatatttagcgagatggtcaagaacgaatgttggccaaacgagggaaattgttcacttgcacttcgcatgtttttggatacacactattgggagactgggatcaaagtctggtgctgcatggtggagaatggcttgccacctttacaggagtgtgggaacatgcttgtagcaaagctgaaggatgacaggctacctgaggcatgcaaatatgcagaagacatgattgatcggggtatcaagttgagttcagcgacactgtccaagctgaagcagcgcctgcagaggattaagaaaggagagatccatgatcacctgcttgcaaaatggaaggcacattagtttgttgtgctcccctcgtatgggtaacctggtgcgatctcagtgttgacaatgaggttgagccttttatcactctgcaacgtttcaaacaacagttggaagtctctttctagtttctacattgaaattatcatattaatcagctggagcatttgggtctcaaggagtgagctggaacatcttccaagaaattctaccgtctgtatcaaatggctaagcctttttcaagaaagagtttgcccaggttatccatagagcatagaagaaatatttccttgaagaatgactagagcgtcagttgtggtctttttttaatatcttttgtgtcctttttttgtttcatgaattttgttgcttgcagctgtctggctgcaatttaggtagctgttccttttatgtatttgcataattatcaatgcaacattctaggcgtaaaagtgcattctc

SEQ ID NO: 18901 - protein, 281 aa, Zea mays subsp. mays
  misc_feature (1)..(281): Ceres Seq. ID no. 12367755
MPTPTPSSSRAARPPPICGLRARCSTKWCRPLDFILTTCLPMTPSSLRLFQVTPPRRYREAMEYLNVLSRHGCSPGEKFFRAALAAHLEARQLRGAMNLWDDFVGRRGLVPDMEMYNTMIKLQGSLGHAELIVGYLDDMISNGVFPDTNTYNVVLQLLLKGKKHREAAAIFSEMVKNECWPNEGNCSLALRMFLDTHYWETGIKVWCCMVENGLPPLQECGNMLVAKLKDDRLPEACKYAEDMIDRGIKLSSATLSKLKQRLQRIKKGEIHDHLLAKWKAH

SEQ ID NO: 18902 - protein, 240 aa, Zea mays subsp. mays
  misc_feature (1)..(240): Ceres Seq. ID no. 12367756
MTPSSLRLFQVTPPRRYREAMEYLNVLSRHGCSPGEKFFRAALAAHLEARQLRGAMNLWDDFVGRRGLVPDMEMYNTMIKLQGSLGHAELIVGYLDDMISNGVFPDTNTYNVVLQLLLKGKKHREAAAIFSEMVKNECWPNEGNCSLALRMFLDTHYWETGIKVWCCMVENGLPPLQECGNMLVAKLKDDRLPEACKYAEDMIDRGIKLSSATLSKLKQRLQRIKKGEIHDHLLAKWKAH

SEQ ID NO: 18903 - protein, 220 aa, Zea mays subsp. mays
  misc_feature (1)..(220): Ceres Seq. ID no. 12367757
MEYLNVLSRHGCSPGEKFFRAALAAHLEARQLRGAMNLWDDFVGRRGLVPDMEMYNTMIKLQGSLGHAELIVGYLDDMISNGVFPDTNTYNVVLQLLLKGKKHREAAAIFSEMVKNECWPNEGNCSLALRMFLDTHYWETGIKVWCCMVENGLPPLQECGNMLVAKLKDDRLPEACKYAEDMIDRGIKLSSATLSKLKQRLQRIKKGEIHDHLLAKWKAH

SEQ ID NO: 18904 - DNA, 1483 bp, Zea mays subsp. mays
  misc_feature (1)..(1483): Ceres Seq. ID no. 12367762
aactagcacctccgcctcgcggctcgctccatcccttccaccaccaccgcctcaccagtcaccactcccctatcacgggacgggaccaccgccgccgcgtcctatgacgtcgccgtcctcgcaccacccggactccacctcggcgtcctctacccctcgcgccggtgtcgggaacggcggcatccaccacctccatccgccatctctgcacccggcgcccgcgcctaccccggctgctccccccgcgcaggcgcaggcggcgcacgggggcccgcaagtgcgcctcatgtgcagcttcggcggccgcatcttaccgcgccctggggaccgccagctgcgctacgtcggcggggagacccgcatcgtctccttcccgcgcgccgcaacttccttcgccgccctcgtcgccgcgctcgccaaggtcgcgcccgtgctcttcgccccgggggcgcccaggccgtcgctcaagtaccagctgccccaggacgacctcgactcgctcgtctccatcacctccgacgacgacgtcgaccacctcatggacgagcttgaccgcatccaagacctctccgccaacgtcgccaggccaccccgcctccgcgtcttcctcttcgcgcccgcgcctgacgccgccttcggctccgtcttctccggcaccaccagtgaggccgcctccaccgaccagtggtttgtcgacgcgctaaacgcccccgcgccgcagccgcaccccaccgagcgcggccgatccgaggcctcctcgatcgtctccgaggtccccgactacctcttcggcctcgaaaccacgtccggtgagcccagccccggccccgcggccgtccgcgccaagtccgatgccacggagactccgcgccaccacgacgacgacgaatgcgacgtgccaccttccgcgcgccagatgccgtacgtcgtagagggagcgtcatcgtggcccgcccccgccgccgccgtacatggcgcagcctgtgtactacttccccgtgccgccgccggtccactatctcgaaccgtctgcgcagggcggctacatgcctcgcccggtctaccacattgtcggtggcggaggaagcgaggcgcctggcggagatcttcacgcggccggcggcgtctacggcgtcccgcaggcacatgcaggcgttcccggcgatgatgtacgcgccgccgcgcgcggtcgtctacaactacaactcggaggggatgccatcgctgcctcccgaaggtggggcacactcttcctaggcgcatcggctgcttcacatctctggttcctgattattattgcagatgcctgagttctgcgtgcgtattagatttttatcgattcgtcttggttggtgtatagatgactaagatgagggaggcggatgatggatagatattattgcagttttcgtctagtggaaatatattcgtgaaatggatctatgagcatgatataatactaagtagtatagtatttggtgtg

SEQ ID NO: 18905 - protein, 388 aa, Zea mays subsp. mays
  misc_feature (1)..(388): Ceres Seq. ID no. 12367763
TSTSASRLAPSLPPPPPHQSPLPYHGTGPPPPRPMTSPSSHHPDSTSASSTPRAGVGNGGIHHLHPPSLHPAPAPTPAAPPAQAQAAHGGPQVRLMCSFGGRILPRPGDRQLRYVGGETRIVSFPRAATSFAALVAALAKVAPVLFAPGAPRPSLKYQLPQDDLDSLVSITSDDDVDHLMDELDRIQDLSANVARPPRLRVFLFAPAPDAAFGSVFSGTTSEAASTDQWFVDALNAPAPQPHPTERGRSEASSIVSEVPDYLFGLETTSGEPSPGPAAVRAKSDATETPRHHDDDECDVPPSARQMPYVVEGASSWPAPAAAVHGAACVLLPRAAAGPLSRTVCAGRLHASPGLPHCRWRRKRGAWRRSSRGRRRLRRPAGTCRRSRR

SEQ ID NO: 18906 - protein, 354 aa, Zea mays subsp. mays
  misc_feature (1)..(354): Ceres Seq. ID no. 12367764
MTSPSSHHPDSTSASSTPRAGVGNGGIHHLHPPSLHPAPAPTPAAPPAQAQAAHGGPQVRLMCSFGGRILPRPGDRQLRYVGGETRIVSFPRAATSFAALVAALAKVAPVLFAPGAPRPSLKYQLPQDDLDSLVSITSDDDVDHLMDELDRIQDLSANVARPPRLRVFLFAPAPDAAFGSVFSGTTSEAASTDQWFVDALNAPAPQPHPTERGRSEASSIVSEVPDYLFGLETTSGEPSPGPAAVRAKSDATETPRHHDDDECDVPPSARQMPYVVEGASSWPAPAAAVHGAACVLLPRAAAGPLSRTVCAGRLHASPGLPHCRWRRKRGAWRRSSRGRRRLRRPAGTCRRSRR

SEQ ID NO: 18907 - protein, 293 aa, Zea mays subsp. mays
  misc_feature (1)..(293): Ceres Seq. ID no. 12367765
MCSFGGRILPRPGDRQLRYVGGETRIVSFPRAATSFAALVAALAKVAPVLFAPGAPRPSLKYQLPQDDLDSLVSITSDDDVDHLMDELDRIQDLSANVARPPRLRVFLFAPAPDAAFGSVFSGTTSEAASTDQWFVDALNAPAPQPHPTERGRSEASSIVSEVPDYLFGLETTSGEPSPGPAAVRAKSDATETPRHHDDDECDVPPSARQMPYVVEGASSWPAPAAAVHGAACVLLPRAAAGPLSRTVCAGRLHASPGLPHCRWRRKRGAWRRSSRGRRRLRRPAGTCRRSRR

SEQ ID NO: 18908 - DNA, 1590 bp, Zea mays subsp. mays
  misc_feature (1)..(1590): Ceres Seq. ID no. 12367781
agctttctaagtccagtctcccgggcagaagaggcacgagaggaaggtgggaaaggaaaccacagccgcttctggcgggcgctcaccgtgccccttccgcctcgcctcgcaatggaggtttccaggtggaccccggcggccggcctcctgctcctgttgctcctcccgctcgcggccaccccgtcacgcgccgccacgatggcgagatcgccgtcgtcgtccaccgccgtgttccagctccagggagacgtataccccaccggccactactatgtcacgatgaacattgggaacccagcgaagccctacttcctggacgtggacactggcagcgatctcacctggctgcagtgcgacgcaccctgtcggagttgcaacaaggtgccacatcccttgtatcgaccaacggcaaaccgccttgtaccgtgtgcaaacgcactctgcactgcacttcacagcggacagggctctaataacaagtgcccttcaccaaaacaatgcgactatcagataaagtacaccgacagtgcatcttctcagggtgtgctgatcaacgacagcttctcactgcccatgagatcctccaacattcgtcctggcctcacatttggctgtggatatgaccagcaagtggggaaaaatggcgctgtgcaggcagcgattgacggcatgcttgggctcgggaggggatcagttagccttgtttcacagctcaagcagcaagggatcaccaaaaatgtcgtcggccattgcctaagcacgaatggaggggggttcctcttctttggggatgatgttgtgccttcatcacgtgtaacttgggtgccgatggctcagaggacatctgggaactactactcacctggctcaggaacactgtacttcgatagacgttcactaggcgtgaagccaatggaggtggtatttgacagtggtagcacgtatacttattttactgctcaaccataccaagctgttgtttctgcgctcaaaggtggtctcagcaaatcacttaaacaggtgtcagatcccactctgcctctgtgctggaaagggcagaaagcattcaaatctgtgtttgacgtcaagaatgaattcaagtcaatgtttctgagcttttccagtgccaagaatgccgccatggagatcccacctgaaaactacctcattgtcacaaaaaatggaaatgtgtgcctgggcattcttgatggaacggctgccaagctgagtttcaacgtaattggagacatcacgatgcaggatcagatggtgatctatgacaacgagaaatcgcagctgggatgggcgcgtggggcatgcactaggagcgccaagtctattctgtcttcctttccctgagctcagttctatgtacttctgatagagtttaagaaaatcactatatcaaacctcctcgcaatgcatgaatttcctaactgaagagggagggagggagggagggagagagagagagagaatgttcctgtttatgtagagatggagtccaaaatttgtgtgcctgatgagttcttccccatatgatattaactgaaatagtatatcaattgagtgtattccattttaagtttc

SEQ ID NO: 18909 - protein, 452 aa, Zea mays subsp. mays
  misc_feature (1)..(452): Ceres Seq. ID no. 12367782
SFLSPVSRAEEAREEGGKGNHSRFWRALTVPLPPRLAMEVSRWTPAAGLLLLLLLPLAATPSRAATMARSPSSSTAVFQLQGDVYPTGHYYVTMNIGNPAKPYFLDVDTGSDLTWLQCDAPCRSCNKVPHPLYRPTANRLVPCANALCTALHSGQGSNNKCPSPKQCDYQIKYTDSASSQGVLINDSFSLPMRSSNIRPGLTFGCGYDQQVGKNGAVQAAIDGMLGLGRGSVSLVSQLKQQGITKNVVGHCLSTNGGGFLFFGDDVVPSSRVTWVPMAQRTSGNYYSPGSGTLYFDRRSLGVKPMEVVFDSGSTYTYFTAQPYQAVVSALKGGLSKSLKQVSDPTLPLCWKGQKAFKSVFDVKNEFKSMFLSFSSAKNAAMEIPPENYLIVTKNGNVCLGILDGTAAKLSFNVIGDITMQDQMVIYDNEKSQLGWARGACTRSAKSILSSFP

SEQ ID NO: 18910 - protein, 415 aa, Zea mays subsp. mays
  misc_feature (1)..(415): Ceres Seq. ID no. 12367783
MEVSRWTPAAGLLLLLLLPLAATPSRAATMARSPSSSTAVFQLQGDVYPTGHYYVTMNIGNPAKPYFLDVDTGSDLTWLQCDAPCRSCNKVPHPLYRPTANRLVPCANALCTALHSGQGSNNKCPSPKQCDYQIKYTDSASSQGVLINDSFSLPMRSSNIRPGLTFGCGYDQQVGKNGAVQAAIDGMLGLGRGSVSLVSQLKQQGITKNVVGHCLSTNGGGFLFFGDDVVPSSRVTWVPMAQRTSGNYYSPGSGTLYFDRRSLGVKPMEVVFDSGSTYTYFTAQPYQAVVSALKGGLSKSLKQVSDPTLPLCWKGQKAFKSVFDVKNEFKSMFLSFSSAKNAAMEIPPENYLIVTKNGNVCLGILDGTAAKLSFNVIGDITMQDQMVIYDNEKSQLGWARGACTRSAKSILSSFP

SEQ ID NO: 18911 - protein, 386 aa, Zea mays subsp. mays
  misc_feature (1)..(386): Ceres Seq. ID no. 12367784
MARSPSSSTAVFQLQGDVYPTGHYYVTMNIGNPAKPYFLDVDTGSDLTWLQCDAPCRSCNKVPHPLYRPTANRLVPCANALCTALHSGQGSNNKCPSPKQCDYQIKYTDSASSQGVLINDSFSLPMRSSNIRPGLTFGCGYDQQVGKNGAVQAAIDGMLGLGRGSVSLVSQLKQQGITKNVVGHCLSTNGGGFLFFGDDVVPSSRVTWVPMAQRTSGNYYSPGSGTLYFDRRSLGVKPMEVVFDSGSTYTYFTAQPYQAVVSALKGGLSKSLKQVSDPTLPLCWKGQKAFKSVFDVKNEFKSMFLSFSSAKNAAMEIPPENYLIVTKNGNVCLGILDGTAAKLSFNVIGDITMQDQMVIYDNEKSQLGWARGACTRSAKSILSSFP

SEQ ID NO: 18912 - DNA, 1728 bp, Zea mays subsp. mays
  misc_feature (1)..(1728): Ceres Seq. ID no. 12367809
gcacgagaccattacctagaacatcctaatcaaaaaaaggagtgaggaaccagatccttgcttgcattggcggagcagcatcatgccttccacgacagcgcagcagaagccccacgtcgtgctggtgccgttcccggcgcacggccacatcgcgccgcacgtgcagctggcgcgcgccctccgcgcccgcggcgtccacgccacgctcgtccacaccgagctgtaccaccgccgcctgctgcgcaccaagcagcagcaggccacgggcggcgacgacgccctggacccggacgagggcttctccgtcgaggtcatcccggacgggctatcgctggaggacccaccgcgcacgctgcgtgcgtaccacgaggcgatggagcgcaactgcctcgagccgttcaaggcgctgctgcgggacctgctgttgccgcccaccggcgtgccgccggtcagctgcgtcgtggccgacaccccgatgccgttcgcggccgtggcggcgcgcgaggttggcgtcccggacgtgcagttcttcacggcgtccgcgtgcggcctcatgggctacctccagttccaggagctcttggcgagggaggtcatccctcttagacccacctacgagaccgacggctccctcgacgccccgctggactgggtgcccgggatgaaggccgtgcgcctaagggacctgccgacgttctgccacaccacggacgccgacgactggcttgtgcacttccacgtccaccagatgaagacggccgccgcctccaaggccgtcgtcctcaacactctctacgacatggagaaggacgtcgtcgacgcgctcgcgccgcacttgccgcccatctacaccgtcggcccgctcgcaagcgtcgtcaaagcgtccttgcccgctccgcgcggcgccggcgacgacaccagcgtccccgccgccggctcggtgaggagcagcgccatgcttggcgtgttacaggaagacagggagtgcatggcgtggctcgacgacggcaaggcggcgcgctccgtcgtgtacttgagcttcggcagccacgccagcatgagcgacgcgcggctcaaggagatcgcgtccgggctagcacgctgtggctctccctacctctgggtcctcaggccagaaatggccgccgcggtcgaggtcggcgagaacggcctcgtcgtgccgtggtgcgcgcaggaggcggtgctgagccacccggccgtggggctgttcgtcacccactgtgggtggaactccattctggagagcgtcgtcgccggcgtgccggtgcttggatgccccgtgctgtctgagcagaccacgaactgccgccaggtgtgcaccgcgtggggcatcggcgccgagctgccgcaggaagctggcagcgacgaggttgcggcgctcgtgagggagatgatgaccgggaggaaggggaaggacgcaagggagaagacgctgcagtggaagaggctggctcaagtcagtgcacaaccaggggggctatcttacaataatattggtcggatggtggagaatatcctactcaaacacatctgacttcaaatcatggtcatgtttttgtcatagcgactgaggggagaaagatcgtcaataaccaacagctcaaccgtatctccctgatcctatagcactattaaattaaattctgtacctagcattaaaatatctcataccatatagtccaatataaataaatcagttcatattcc

SEQ ID NO: 18913 - protein, 490 aa, Zea mays subsp. mays
  misc_feature (1)..(490): Ceres Seq. ID no. 12367810
MPSTTAQQKPHVVLVPFPAHGHIAPHVQLARALRARGVHATLVHTELYHRRLLRTKQQQATGGDDALDPDEGFSVEVIPDGLSLEDPPRTLRAYHEAMERNCLEPFKALLRDLLLPPTGVPPVSCVVADTPMPFAAVAAREVGVPDVQFFTASACGLMGYLQFQELLAREVIPLRPTYETDGSLDAPLDWVPGMKAVRLRDLPTFCHTTDADDWLVHFHVHQMKTAAASKAVVLNTLYDMEKDVVDALAPHLPPIYTVGPLASVVKASLPAPRGAGDDTSVPAAGSVRSSAMLGVLQEDRECMAWLDDGKAARSVVYLSFGSHASMSDARLKEIASGLARCGSPYLWVLRPEMAAAVEVGENGLVVPWCAQEAVLSHPAVGLFVTHCGWNSILESVVAGVPVLGCPVLSEQTTNCRQVCTAWGIGAELPQEAGSDEVAALVREMMTGRKGKDAREKTLQWKRLAQVSAQPGGLSYNNIGRMVENILLKHI

SEQ ID NO: 18914 - protein, 393 aa, Zea mays subsp. mays
  misc_feature (1)..(393): Ceres Seq. ID no. 12367811
MERNCLEPFKALLRDLLLPPTGVPPVSCVVADTPMPFAAVAAREVGVPDVQFFTASACGLMGYLQFQELLAREVIPLRPTYETDGSLDAPLDWVPGMKAVRLRDLPTFCHTTDADDWLVHFHVHQMKTAAASKAVVLNTLYDMEKDVVDALAPHLPPIYTVGPLASVVKASLPAPRGAGDDTSVPAAGSVRSSAMLGVLQEDRECMAWLDDGKAARSVVYLSFGSHASMSDARLKEIASGLARCGSPYLWVLRPEMAAAVEVGENGLVVPWCAQEAVLSHPAVGLFVTHCGWNSILESVVAGVPVLGCPVLSEQTTNCRQVCTAWGIGAELPQEAGSDEVAALVREMMTGRKGKDAREKTLQWKRLAQVSAQPGGLSYNNIGRMVENILLKHI

SEQ ID NO: 18915 - protein, 359 aa, Zea mays subsp. mays
  misc_feature (1)..(359): Ceres Seq. ID no. 12367812
MPFAAVAAREVGVPDVQFFTASACGLMGYLQFQELLAREVIPLRPTYETDGSLDAPLDWVPGMKAVRLRDLPTFCHTTDADDWLVHFHVHQMKTAAASKAVVLNTLYDMEKDVVDALAPHLPPIYTVGPLASVVKASLPAPRGAGDDTSVPAAGSVRSSAMLGVLQEDRECMAWLDDGKAARSVVYLSFGSHASMSDARLKEIASGLARCGSPYLWVLRPEMAAAVEVGENGLVVPWCAQEAVLSHPAVGLFVTHCGWNSILESVVAGVPVLGCPVLSEQTTNCRQVCTAWGIGAELPQEAGSDEVAALVREMMTGRKGKDAREKTLQWKRLAQVSAQPGGLSYNNIGRMVENILLKHI

SEQ ID NO: 18916 - DNA, 1692 bp, Zea mays subsp. mays
  misc_feature (1)..(1692): Ceres Seq. ID no. 12367838
agcactcactcacgcccggccctgcactgcacgcgcgcggcgggagatcgagaagagactttgctcggttttggtaggcatccgcgcggagcgtgaccagacggtgtagagactacatagatcggaagggggtcggaaggggatctagacatagagactagagagcgaggaggatgaccggcgttgttgcaggcgccggagggggcaacaaggcggcgcccgccacgctgcggctgcaccactaccttgtgatggccggggtggcggcggcggtcgtcctcgcctgcctccggtacgcgccggaccccgcggggtacggcttcctggccgtggcgccgcggccggtggaggccgatgctggtgcccggcgggacaccactcctccaccgcgcccgtcgtcgtcgtcggtggtcatcttcaacttcggtgactccaactccgacacgggcggcatggcggcggtcaacgggatgaacattaacctgcccgagggacgcaccttcttccgccgccccaccggaaggctctccgacggccgcctcgtcatcgacttcatctgtgagagcctgcacacgcctttcctgagcccatacctcaaggcgctgggcgcggatttcagcaacggcgtgaacttcgccatcggcgggtccacggcgacgccggggggctctcccttctcgctggacgtgcagctccatcagtggctctacttcagggccaggtccatggagatgatcaacctaggacagaggcctcccatcgatcgcgaaggattccgaaaggccatctacaccatcgacatcgggcaaaacgacgtgtctgcttacatgcacctgccctacgaccaagtgcttgccaagatccccggatttgttgctcagatcaagtacaccatcgagacgctgtactcgcacggggcccgcaagttctggatccacggcacgggcgcgctgggctgcctgccgcagaagctggccatcccgcgggacgccgacgacggcgaccagctggacgcccacggctgcctcaagacctacaacaacgccgccaagcgcttcaacgcgctgctcggcgacgcctgcgcccagctccggcgccggatggtggacgcggcgctcgtcttcgtcgacatgtacgccgtcaagtacgacctggtggccaaccacacgacgcacgggatcgagaaacctctcatggcgtgctgcggctacggcgggccgccgtacaactacaaccacttcaaggcgtgcatgtcggcggagatgcagctgtgcgacgtgggcacgcgcttcatcagctgggacggcgtgcacttcaccgaggccgccaacgccatcgtcgccgccaaggtgctcaccggcgactactccacgcccagggtcaccatcgccaaactcgtcaactccacgctgcccaacgacgactagctggctggccgatcgatcgatcgtcgcgtcgtcattctgataaacatactgcaggcaggcttcatcgatccatatccaattgtccgtagaaatctacgactagctcattgtagatccgtaatgtgggctaagagatgcatcatgcatggcgatcgactagctgcccaactcgtcaagagctggttcaccgctctcgtcatgatcgagctagtttggacgagcaaattccatggcaccgagtaacacaattgatatcctcattggc

SEQ ID NO: 18917 - protein, 417 aa, Zea mays subsp. mays
  misc_feature (1)..(417): Ceres Seq. ID no. 12367839
MTGVVAGAGGGNKAAPATLRLHHYLVMAGVAAAVVLACLRYAPDPAGYGFLAVAPRPVEADAGARRDTTPPPRPSSSSVVIFNFGDSNSDTGGMAAVNGMNINLPEGRTFFRRPTGRLSDGRLVIDFICESLHTPFLSPYLKALGADFSNGVNFAIGGSTATPGGSPFSLDVQLHQWLYFRARSMEMINLGQRPPIDREGFRKAIYTIDIGQNDVSAYMHLPYDQVLAKIPGFVAQIKYTIETLYSHGARKFWIHGTGALGCLPQKLAIPRDADDGDQLDAHGCLKTYNNAAKRFNALLGDACAQLRRRMVDAALVFVDMYAVKYDLVANHTTHGIEKPLMACCGYGGPPYNYNHFKACMSAEMQLCDVGTRFISWDGVHFTEAANAIVAAKVLTGDYSTPRVTIAKLVNSTLPNDD

SEQ ID NO: 18918 - protein, 391 aa, Zea mays subsp. mays
  misc_feature (1)..(391): Ceres Seq. ID no. 12367840
MAGVAAAVVLACLRYAPDPAGYGFLAVAPRPVEADAGARRDTTPPPRPSSSSVVIFNFGDSNSDTGGMAAVNGMNINLPEGRTFFRRPTGRLSDGRLVIDFICESLHTPFLSPYLKALGADFSNGVNFAIGGSTATPGGSPFSLDVQLHQWLYFRARSMEMINLGQRPPIDREGFRKAIYTIDIGQNDVSAYMHLPYDQVLAKIPGFVAQIKYTIETLYSHGARKFWIHGTGALGCLPQKLAIPRDADDGDQLDAHGCLKTYNNAAKRFNALLGDACAQLRRRMVDAALVFVDMYAVKYDLVANHTTHGIEKPLMACCGYGGPPYNYNHFKACMSAEMQLCDVGTRFISWDGVHFTEAANAIVAAKVLTGDYSTPRVTIAKLVNSTLPNDD

SEQ ID NO: 18919 - protein, 324 aa, Zea mays subsp. mays
  misc_feature (1)..(324): Ceres Seq. ID no. 12367841
MAAVNGMNINLPEGRTFFRRPTGRLSDGRLVIDFICESLHTPFLSPYLKALGADFSNGVNFAIGGSTATPGGSPFSLDVQLHQWLYFRARSMEMINLGQRPPIDREGFRKAIYTIDIGQNDVSAYMHLPYDQVLAKIPGFVAQIKYTIETLYSHGARKFWIHGTGALGCLPQKLAIPRDADDGDQLDAHGCLKTYNNAAKRFNALLGDACAQLRRRMVDAALVFVDMYAVKYDLVANHTTHGIEKPLMACCGYGGPPYNYNHFKACMSAEMQLCDVGTRFISWDGVHFTEAANAIVAAKVLTGDYSTPRVTIAKLVNSTLPNDD

SEQ ID NO: 18920 - DNA, 1055 bp, Zea mays subsp. mays
  misc_feature (1)..(1055): Ceres Seq. ID no. 12367864
accgtcgtcctcttcttcctcctcgccctcgtcgcggagcggagtggaggcgcgcgttccgggacggcacgggacaggagcggaggaagctcatctgggtgttggcctcatcccctgcacaagctgaggaatggggcaaaaggactccaagccttcaaatggatatggctactcttctgattacgggggtacttcatcgggatataacttgagaaatactggaagtacgtcctccagttatggcgcgaggtatgtgccttcttcagagaacaatgtacagccagaaacacatgccaggttgcagaggaagtattccaggattggtgatgactatcgttctctgagtcaggtgactgaagctttggcgcaagcaggccttgaatcttcaaatcttatcgtaggcattgattttacaaagagcaatgaatggacaggtaaaatttcatttaatcgccgctgcctacatgatattggaaacactccgaacccatatgagcaagctatatctattattggaaggacactttcagtatttgatgaagataacttgattccctgctttggatttggtgacgcatcaactcatgatcaggaggtattcagcttttacccagagaaccgcccatgcaacggatttgaagaggcactagacagatacagagaaatcgttccaactcttcgattagcaggacctacatctttcgctccgatgatcgagacagcaattggaattgttgacagcactggtggtcaatatcatgttcttctgataatcgcagatggacaggttacccgaagtgtcgatacacaatctggacaattgagtccacaggagcgggatactatagatgcaatagtaagagcaagccagttccccctgtcaattgttcttgttggggttggtgatggaccatgggacatgatgcaccagtttgatgacaatatacctgctcggtcatttgacaatttccagtttgtgaacttcacggagattatgtcaaagagcatagcagctgacagaaaggaggcagaatttgcattgtcagcgctgatgg

SEQ ID NO: 18921 - protein, 308 aa, Zea mays subsp. mays
  misc_feature (1)..(308): Ceres Seq. ID no. 12367865
MGQKDSKPSNGYGYSSDYGGTSSGYNLRNTGSTSSSYGARYVPSSENNVQPETHARLQRKYSRIGDDYRSLSQVTEALAQAGLESSNLIVGIDFTKSNEWTGKISFNRRCLHDIGNTPNPYEQAISIIGRTLSVFDEDNLIPCFGFGDASTHDQEVFSFYPENRPCNGFEEALDRYREIVPTLRLAGPTSFAPMIETAIGIVDSTGGQYHVLLIIADGQVTRSVDTQSGQLSPQERDTIDAIVRASQFPLSIVLVGVGDGPWDMMHQFDDNIPARSFDNFQFVNFTEIMSKSIAADRKEAEFALSALM

SEQ ID NO: 18922 - DNA, 938 bp, Zea mays subsp. mays
  misc_feature (1)..(938): Ceres Seq. ID no. 12367866
tcctgtatcaacatattcgctcatttgcgctagtcagctggccttcaatgctgtcttctcatatgtcctaaatgctcaaaagttcaccccattcattttcaactcagtaatcctccttacgttttccgctgcgcttcttggagtcgacgaagattctcagggtaccaatggtttatcgcgtgggaagtacatattgggtttcgcattgaccctaggagcctcggccacatactcactaattctctctctaatcaagtcgcattcgagaaggttattaagaaggaaactttctcagtcgtgttgaatatgcagatatatacagcactagtggcaacagtagcttctcttatcggtttatttgcaagcggcgagtggaagactttagagggagagatgcatgccttcagctcagggagagtgtcctatgtgatgacacttctatggactgctgtatcttggcagatagcttccgtaggagtggtgggtttgatctttgttgtgtcatcactcttttcaaatgtgataagcacactggctctacccatcattccgatttttgctgtgattttcttccacgacaagatggatggagtgaagattattgctatgttgatggccatctggggattcgtttcatatggatatcaattatatgtcagtgacaagaaggctaggaagacttcagtcagtgtggaggagaattcctaagcgcttgttggcctgttacattggtctttgtggctcctataccactttaagttgctggtattgaggaggtactagttattgacttattgtatccaaaaggagctcagttgagaatctcaggtttacacaattcataggtatatacttctgttagtattgtcatatcatcatatgtaccgatgtatggttgtgttgtcctttaaaataaaaagattagcatttccagaggc

SEQ ID NO: 18923 - protein, 133 aa, Zea mays subsp. mays
  misc_feature (1)..(133): Ceres Seq. ID no. 12367867
MQIYTALVATVASLIGLFASGEWKTLEGEMHAFSSGRVSYVMTLLWTAVSWQIASVGVVGLIFVVSSLFSNVISTLALPIIPIFAVIFFHDKMDGVKIIAMLMAIWGFVSYGYQLYVSDKKARKTSVSVEENS

SEQ ID NO: 18924 - protein, 104 aa, Zea mays subsp. mays
  misc_feature (1)..(104): Ceres Seq. ID no. 12367868
MHAFSSGRVSYVMTLLWTAVSWQIASVGVVGLIFVVSSLFSNVISTLALPIIPIFAVIFFHDKMDGVKIIAMLMAIWGFVSYGYQLYVSDKKARKTSVSVEENS

SEQ ID NO: 18925 - protein, 100 aa, Zea mays subsp. mays
  misc_feature (1)..(100): Ceres Seq. ID no. 12367869
PVSTYSLICASQLAFNAVFSYVLNAQKFTPFIFNSVILLTFSAALLGVDEDSQGTNGLSRGKYILGFALTLGASATYSLILSLIKSHSRRLLRRKLSQSC

SEQ ID NO: 18926 - DNA, 1431 bp, Zea mays subsp. mays
  misc_feature (1)..(1431): Ceres Seq. ID no. 12367901
atttccattttccagcgcgcacggacgactgttacctcccccgcccttcgccactccgctccctcctccacctgtcatctcccgcgcgggagacctgcccgctccatggcgccgtcgcgaccgctcatgcgggggatccgcccgccgcgcgtcttcccgacccgcggcggccgcgcctcgccgtacaccgtcgcgctcaccgcgctacttctcgtctccgccgccctcctcgcgctcatagccttcggcgtcttctcgctccccgtgtccgcgccaaatgctgccgccaccaccggcactgcagccggaggggagaccgagtcggccgacgtccgcccccgcgcccgccgcgacctgggggaggggctgggagagcgcggtgcgcagtggaccgaggtcatctcgtgggagcccagggcatttgtctaccacaacttcctctctaaggatgagtgtgaatacctaattggattggccaagcctcacatggtaaaatcaacagttgtcgacagcactaccggcaaaagcaaggacagcagggtccggacaagttcaggcatgtttcttcaaagaggaagagacaaggttattcgagcaattgaaaagaggatagcagactataccttcatacccgtagatcatggtgagggactccaagtgctgcattatgaagtcgggcagaagtatgagcctcactttgattattttcttgatgagtttaacacaaagaatggtggtcagaggatagctactcttctgatgtatctatcagatgttgaagaagggggcgagactattttccctgatgcaaatgtgaacgccagttctttaccatggtacaatgagcttttcagattgtgccaaaagaggcctttctgtcaaaccaaagatgggagatgcgcttcttttctggagcatgaaaccagatgccactttggacccattaagcttgcatgggggttgtcctgtgattaaaggaaataaatggtcatcaaccaagtggatgcacatccatgagtacaaagcttgaggcttggcgaatcaaatatatgctgttgaattgggtttgtaagatggatctttatgcatgtgacttagggatttctacgggattgacactcatgtatgctttacagacccactggagctgtattctttgcttctttgttggaggggagataatagggataagcaggggccttgctcgtccttgcagtttttttttttttttggctgatccttgctgacttggctttttttcacttttctttttcttccttgcagtaccccaactatagaggagttgtgtagtgcctatagagtttgagattttgtttttgtgtcatgcccctaatattagtacatgaatgttgtgttactatgatacttgtaagctttggtactaatgaatagtgaggtctagagctcaac

SEQ ID NO: 18927 - protein, 324 aa, Zea mays subsp. mays
  misc_feature (1)..(324): Ceres Seq. ID no. 12367902
ISIFQRARTTVTSPALRHSAPSSTCHLPRGRPARSMAPSRPLMRGIRPPRVFPTRGGRASPYTVALTALLLVSAALLALIAFGVFSLPVSAPNAAATTGTAAGGETESADVRPRARRDLGEGLGERGAQWTEVISWEPRAFVYHNFLSKDECEYLIGLAKPHMVKSTVVDSTTGKSKDSRVRTSSGMFLQRGRDKVIRAIEKRIADYTFIPVDHGEGLQVLHYEVGQKYEPHFDYFLDEFNTKNGGQRIATLLMYLSDVEEGGETIFPDANVNASSLPWYNELFRLCQKRPFCQTKDGRCASFLEHETRCHFGPIKLAWGLSCD

SEQ ID NO: 18928 - protein, 289 aa, Zea mays subsp. mays
  misc_feature (1)..(289): Ceres Seq. ID no. 12367903
MAPSRPLMRGIRPPRVFPTRGGRASPYTVALTALLLVSAALLALIAFGVFSLPVSAPNAAATTGTAAGGETESADVRPRARRDLGEGLGERGAQWTEVISWEPRAFVYHNFLSKDECEYLIGLAKPHMVKSTVVDSTTGKSKDSRVRTSSGMFLQRGRDKVIRAIEKRIADYTFIPVDHGEGLQVLHYEVGQKYEPHFDYFLDEFNTKNGGQRIATLLMYLSDVEEGGETIFPDANVNASSLPWYNELFRLCQKRPFCQTKDGRCASFLEHETRCHFGPIKLAWGLSCD

SEQ ID NO: 18929 - protein, 282 aa, Zea mays subsp. mays
  misc_feature (1)..(282): Ceres Seq. ID no. 12367904
MRGIRPPRVFPTRGGRASPYTVALTALLLVSAALLALIAFGVFSLPVSAPNAAATTGTAAGGETESADVRPRARRDLGEGLGERGAQWTEVISWEPRAFVYHNFLSKDECEYLIGLAKPHMVKSTVVDSTTGKSKDSRVRTSSGMFLQRGRDKVIRAIEKRIADYTFIPVDHGEGLQVLHYEVGQKYEPHFDYFLDEFNTKNGGQRIATLLMYLSDVEEGGETIFPDANVNASSLPWYNELFRLCQKRPFCQTKDGRCASFLEHETRCHFGPIKLAWGLSCD

SEQ ID NO: 18930 - DNA, 1654 bp, Zea mays subsp. mays
  misc_feature (1)..(1654): Ceres Seq. ID no. 12367905
aaaccacgcgaacaagaacaaccaagatgacgcgctctcctctggctctcgccctactgctcctctgcgccgccggcgccgcggcggccgtgccgcggtaccgcgaggcgccgcacttcaccaactcggcggcggcgcagtgcccgccgccgctgcagccgtcggacgcggacgcggcgtgctcgccgcacgcggcggtgcacgtcgccatgacgctggacgcgtcgtacctgcgcggcaccatggcggccgtgctctccgtgctgcgccacgcgtcgtgcccggagtccatccacttccacttcatcgcctccgcctcctccgggtccagtgcgacggcggaggcgctcagggccacggtgcgcgcgtcgttcccgtcgctggcgttccgggtgtacccgttcgccgacgaggcccgcgtggcggggctcatctccacctccatccggggcgcgctggaccgcccgctcaactacgcgcgctcctacctcgcgtccacgctgcccgcctgcgtgcgccgcgtcgtgtacctcgactccgacgtcgtgctcaccgacgacatcgccgccctcgccgccaccccgctcccgggggaggagggcacggccgtggcggcgccccagtactgcggcgccaacttcaccgcctacttcacgccgggcttctgggcgtcccccgcgctctcctccgccttcgccggccgccgcgcctgctacttcaacacgggcgtcatggtgctcgacctcgcgcgctggcgccgcgcgggatacacggcgcagatcgaggagtggatggagctgcagaagcgggtgcgcatctacgagctgggctcgctgccgcccttcctgctcgtcttcgccggcaggatcgcgtccgtcgaccaccgatggaaccagcacggcctcggcggggacaactaccgcggcctctgccgcggcctgcacgccggcgccgtcagcctgctgcactggagcggcaaggggaagccctgggaccgcctggacgccggaaggccgtgcccgctcgacgccgtctgggccaagtacgacctgctccggccggccgccgacatcgagacctcgtgaacacaacgacggcgttcgatcgaccgctcgtttcactttttgttcggtttagaagcacgtgctcttcgttgttttgttgatctaggctagatattggtagatcgatcatcagggtgttcatgtgaactgtacatattgttgctaactttctcggaaaagtttagaccgcttgcacaaattctagattcagaaaaaaaatagtactactcaaaagttggccaaatggtattgctccaagaaatctagatataacaaattggtggatctaaggtcagaatcaaggtgaagctctcaagtggcgcttcgctagcacaaaattagtggacttggtgaaaattgtacgaagaaaaaagatggtcaagaatagaagagactattagcaccaaaattgtcctccactagatctaaacaaaaaacatagtcattgcctcattggtagaagggactattagccaaaaagttttttttcccattgaatcttagatccggtagtgcatctgttctaaacaagctcttgagttttcagtttcgctctattaccttcgataagaaattcagaagcatcgttt

SEQ ID NO: 18931 - protein, 387 aa, Zea mays subsp. mays
  misc_feature (1)..(387): Ceres Seq. ID no. 12367906
NHANKNNQDDALSSGSRPTAPLRRRRRGGRAAVPRGAALHQLGGGAVPAAAAAVGRGRGVLAARGGARRHDAGRVVPARHHGGRALRAAPRVVPGVHPLPLHRLRLLRVQCDGGGAQGHGARVVPVAGVPGVPVRRRGPRGGAHLHLHPGRAGPPAQLRALLPRVHAARLRAPRRVPRLRRRAHRRHRRPRRHPAPGGGGHGRGGAPVLRRQLHRLLHAGLLGVPRALLRLRRPPRLLLQHGRHGARPRALAPRGIHGADRGVDGAAEAGAHLRAGLAAALPARLRRQDRVRRPPMEPARPRRGQLPRPLPRPARRRRQPAALERQGEALGPPGRRKAVPARRRLGQVRPAPAGRRHRDLVNTTTAFDRPLVSLFVRFRSTCSSLFC

SEQ ID NO: 18932 - protein, 360 aa, Zea mays subsp. mays
  misc_feature (1)..(360): Ceres Seq. ID no. 12367907
TTRTRTTKMTRSPLALALLLLCAAGAAAAVPRYREAPHFTNSAAAQCPPPLQPSDADAACSPHAAVHVAMTLDASYLRGTMAAVLSVLRHASCPESIHFHFIASASSGSSATAEALRATVRASFPSLAFRVYPFADEARVAGLISTSIRGALDRPLNYARSYLASTLPACVRRVVYLDSDVVLTDDIAALAATPLPGEEGTAVAAPQYCGANFTAYFTPGFWASPALSSAFAGRRACYFNTGVMVLDLARWRRAGYTAQIEEWMELQKRVRIYELGSLPPFLLVFAGRIASVDHRWNQHGLGGDNYRGLCRGLHAGAVSLLHWSGKGKPWDRLDAGRPCPLDAVWAKYDLLRPAADIETS

SEQ ID NO: 18933 - protein, 352 aa, Zea mays subsp. mays
  misc_feature (1)..(352): Ceres Seq. ID no. 12367908
MTRSPLALALLLLCAAGAAAAVPRYREAPHFTNSAAAQCPPPLQPSDADAACSPHAAVHVAMTLDASYLRGTMAAVLSVLRHASCPESIHFHFIASASSGSSATAEALRATVRASFPSLAFRVYPFADEARVAGLISTSIRGALDRPLNYARSYLASTLPACVRRVVYLDSDVVLTDDIAALAATPLPGEEGTAVAAPQYCGANFTAYFTPGFWASPALSSAFAGRRACYFNTGVMVLDLARWRRAGYTAQIEEWMELQKRVRIYELGSLPPFLLVFAGRIASVDHRWNQHGLGGDNYRGLCRGLHAGAVSLLHWSGKGKPWDRLDAGRPCPLDAVWAKYDLLRPAADIETS

SEQ ID NO: 18934 - DNA, 1825 bp, Zea mays subsp. mays
  misc_feature (1)..(1825): Ceres Seq. ID no. 12367918
accacacacgcgcgcagctgtggcgcagggggggcgcggcaatggacgccaacactctcctcctgccctgctccgacggcgccgtcgccggcgcggtggacttccgcgggcgccccgcgtcccggtccggcaccggccgatggtccgccgcgatgttcgtcctcggggtggagatagcggagaggttcgcgtaccacggggtgtcggcgaacctgatcagctacctgacggggccgctcggggaatccaccgcgggcgcggcggctgcgatcaacgcgtggagcggggtgtcgaccatgctgccgctgctgatggcgtgtgtggccgacgcctggctcgggcggtaccgcaccatcgtcctcgcctccctcctcttcgtcgtgagcatgggcatgctgaccgtctccgcgctcccggcgttccaccacgacggctgcagcagctacgcctccgcctccagaccgctggcctgctccccgccccccgtgcaagtgggcgtcttctacgtctccctgtacctggtggcgctcgcggaggccgggcacaagccctgcgcgcaggcgttcggcgcggaccagttcgaccagaacgaccccaaggagtccgcgtccaggagctccttcttcaactggtggtacttcggcatgtgctccggcaccgccgtcaccaccctggtgtccagctacatccaggacaacgtcggctggggcctcggcttcggcgtcccctgcctcgtcatgctcttcgcgctcctcatgttcttgctcggtaccaggaattaccgctactacacgtctactgaatcgagcccatttgctcgcctcgccacagctttcgttgcgctcatcaaaggctccaaatcgagacaacatgacggcactcttgcgagcgacgacgccgggcaccgtgaagaagtgaaaggcgtgctgcgcctgttccccatctgggcgacgtgcatcatctacgccgtcatcttctcgcagtcgtccacgttcttcacgaagcaggccgcgacgctggaccggcgggtcggctcgactctgcgcgtgccgccggcggcgctgcagacgttcatcagtgtgaccatcatggccttcatcccggtctacgaccgcgcgttcgtgccccttgcgcggcggcttacgcgcctctcgtccggtatcaccatgctgcagcggatcggcacggggctcgtcctggccctggttgccatggtcgtggcggcgctggtggagatgcggcggctcgccgtggcgagggacgccggtctcgtggaccagcccaaggcggcgctgccgatgagcctgtggtggatggtcccgcagtacgtgctgttcgggctctccgacgtgttcgccatgatcggcctgcaggagttcttctacgaccaggtccccgacgcgctgcgcagcctcgggctggccttctttctcagcatctttcggcgtaggacacttgttcagcagcttcatcatctccgccatcgacggtgccaccaagaagagcggagcgagctggttctccaacaacctcaatcgcgcgcacctcgactacttctactggctgctcgccgggctctgcgccgtggagttggctgctttcatcatcgtctcgcgcgtttacgtgtacaagaagaggatgtctcacgacaataatgctgctgccatgtagatcagtagacgtgacttttaccgtgctgtgaatggcgatacaatatgattgaggtgtagagaaagagaacgaaaaaaccttttgtacgctaaacctggacactaaactgacttttacggacggtcggcaatcggcataatagtgccggtttgtt

SEQ ID NO: 18935 - protein, 550 aa, Zea mays subsp. mays
  misc_feature (1)..(550): Ceres Seq. ID no. 12367919
HTRAQLWRRGGAAMDANTLLLPCSDGAVAGAVDFRGRPASRSGTGRWSAAMFVLGVEIAERFAYHGVSANLISYLTGPLGESTAGAAAAINAWSGVSTMLPLLMACVADAWLGRYRTIVLASLLFVVSMGMLTVSALPAFHHDGCSSYASASRPLACSPPPVQVGVFYVSLYLVALAEAGHKPCAQAFGADQFDQNDPKESASRSSFFNWWYFGMCSGTAVTTLVSSYIQDNVGWGLGFGVPCLVMLFALLMFLLGTRNYRYYTSTESSPFARLATAFVALIKGSKSRQHDGTLASDDAGHREEVKGVLRLFPIWATCIIYAVIFSQSSTFFTKQAATLDRRVGSTLRVPPAALQTFISVTIMAFIPVYDRAFVPLARRLTRLSSGITMLQRIGTGLVLALVAMVVAALVEMRRLAVARDAGLVDQPKAALPMSLWWMVPQYVLFGLSDVFAMIGLQEFFYDQVPDALRSLGLAFFLSIFRRRTLVQQLHHLRHRRCHQEERSELVLQQPQSRAPRLLLLAARRALRRGVGCFHHRLARLRVQEEDVSRQ

SEQ ID NO: 18936 - protein, 537 aa, Zea mays subsp. mays
  misc_feature (1)..(537): Ceres Seq. ID no. 12367920
MDANTLLLPCSDGAVAGAVDFRGRPASRSGTGRWSAAMFVLGVEIAERFAYHGVSANLISYLTGPLGESTAGAAAAINAWSGVSTMLPLLMACVADAWLGRYRTIVLASLLFVVSMGMLTVSALPAFHHDGCSSYASASRPLACSPPPVQVGVFYVSLYLVALAEAGHKPCAQAFGADQFDQNDPKESASRSSFFNWWYFGMCSGTAVTTLVSSYIQDNVGWGLGFGVPCLVMLFALLMFLLGTRNYRYYTSTESSPFARLATAFVALIKGSKSRQHDGTLASDDAGHREEVKGVLRLFPIWATCIIYAVIFSQSSTFFTKQAATLDRRVGSTLRVPPAALQTFISVTIMAFIPVYDRAFVPLARRLTRLSSGITMLQRIGTGLVLALVAMVVAALVEMRRLAVARDAGLVDQPKAALPMSLWWMVPQYVLFGLSDVFAMIGLQEFFYDQVPDALRSLGLAFFLSIFRRRTLVQQLHHLRHRRCHQEERSELVLQQPQSRAPRLLLLAARRALRRGVGCFHHRLARLRVQEEDVSRQ

SEQ ID NO: 18937 - protein, 500 aa, Zea mays subsp. mays
  misc_feature (1)..(500): Ceres Seq. ID no. 12367921
MFVLGVEIAERFAYHGVSANLISYLTGPLGESTAGAAAAINAWSGVSTMLPLLMACVADAWLGRYRTIVLASLLFVVSMGMLTVSALPAFHHDGCSSYASASRPLACSPPPVQVGVFYVSLYLVALAEAGHKPCAQAFGADQFDQNDPKESASRSSFFNWWYFGMCSGTAVTTLVSSYIQDNVGWGLGFGVPCLVMLFALLMFLLGTRNYRYYTSTESSPFARLATAFVALIKGSKSRQHDGTLASDDAGHREEVKGVLRLFPIWATCIIYAVIFSQSSTFFTKQAATLDRRVGSTLRVPPAALQTFISVTIMAFIPVYDRAFVPLARRLTRLSSGITMLQRIGTGLVLALVAMVVAALVEMRRLAVARDAGLVDQPKAALPMSLWWMVPQYVLFGLSDVFAMIGLQEFFYDQVPDALRSLGLAFFLSIFRRRTLVQQLHHLRHRRCHQEERSELVLQQPQSRAPRLLLLAARRALRRGVGCFHHRLARLRVQEEDVSRQ

SEQ ID NO: 18938 - DNA, 1564 bp, Zea mays subsp. mays
  misc_feature (1)..(1564): Ceres Seq. ID no. 12367922
actgtattattgtgtggctcagctcaacaagctcgccgcaccgtcgccatggacgccgccaccggcaactgttcctcctctccgctgcgcatcgtgatctgcccgtggctcgcgttcggccacatgctcccgtgcctggagctcgcggagcgtctggcttcgcggggccaccgcgtgtccttcgtctccacgccgcgcaacctggcgcgcctcccgccgcggcgccacgacgtgcacctcgtgcccctgcccctcccacgcgtggagggcctccccgacggcgtcgagtccaccaacgacgtgccccccgacaagagagacctccactggaaggccttcgacggcctcgccgtccccttcgctgagttcctggccgccgcgtgcgccgacgaggctaccaggccggactgggtcctcgccgacacattctcccattgggcggccgccgtcgccctcgagcacaaggtgccaagcgcgatgcttctcccgagcgccgccatgatcgcctcgtgctggcaccggccgccgtcgcacgccgagcagccgagaagcgcagtgtttgaggagccggcggaacggccggcgggtgtgctcccttacgagtgggataaaagagcgcacttctttgggccccaaagagcgtcgggcatgtccaccgcgcagcgctgcttcctgacactgcagaggtgcaggctgctggccatgcggagctgccccgagtgggagccggagaatttcacggtggcggcggcactcctcggcaagccgctcgtgccgctcggcctcctaccgccgtcgcccaacggtggacgacgacgagaggaggacggcggcagtacggcgcgctgctggctggacgcgcagccgccgagctcggtcgtgtacgtggcgttgggcagcgaagtcccgctgacggtggcgctggtgcacgagctcgcccttgggctggagctcgccggcgcacgcttcctttgggctctccggaagcccagcggcgtcgcggacgacgccgacgtgctcccgccgggattccgggagcgcacctgcggccgcgggctcgtcgccatgggctgggtccctcagatgagcatactggcgcacggcgccgtgggcgggttcctgacgcactgcggccggaactcgctcgtcgaagggctcctgttcggccaccctctcgtcatgctgcccgtcgtcggggaccagggccccaacgcgcgcgccatggagcggaccaaggttgggctgcaggtggcgaggaacggcaaggacgggtcgttcgaccgccacggcgtcgccgccgccgtccgggaagtcatgctggtggaagaagccaggaaggtcttcgtggcgaatgccctggaaatgcagcgtgttgtggccgacaaggaacgccatgagagatacatcgacgagttcatacgccagctgagatcttactccactccgccggcagcgagttaaaaaggcgtacttggtggcttggtgcctcgcactgtatgtctgtatggggtctaggatgtcaacggttacgtacccgtccagtaatattattccatacttacct

SEQ ID NO: 18939 - protein, 486 aa, Zea mays subsp. mays
  misc_feature (1)..(486): Ceres Seq. ID no. 12367923
TVLLCGSAQQARRTVAMDAATGNCSSSPLRIVICPWLAFGHMLPCLELAERLASRGHRVSFVSTPRNLARLPPRRHDVHLVPLPLPRVEGLPDGVESTNDVPPDKRDLHWKAFDGLAVPFAEFLAAACADEATRPDWVLADTFSHWAAAVALEHKVPSAMLLPSAAMIASCWHRPPSHAEQPRSAVFEEPAERPAGVLPYEWDKRAHFFGPQRASGMSTAQRCFLTLQRCRLLAMRSCPEWEPENFTVAAALLGKPLVPLGLLPPSPNGGRRREEDGGSTARCWLDAQPPSSVVYVALGSEVPLTVALVHELALGLELAGARFLWALRKPSGVADDADVLPPGFRERTCGRGLVAMGWVPQMSILAHGAVGGFLTHCGRNSLVEGLLFGHPLVMLPVVGDQGPNARAMERTKVGLQVARNGKDGSFDRHGVAAAVREVMLVEEARKVFVANALEMQRVVADKERHERYIDEFIRQLRSYSTPPAAS

SEQ ID NO: 18940 - protein, 470 aa, Zea mays subsp. mays
  misc_feature (1)..(470): Ceres Seq. ID no. 12367924
MDAATGNCSSSPLRIVICPWLAFGHMLPCLELAERLASRGHRVSFVSTPRNLARLPPRRHDVHLVPLPLPRVEGLPDGVESTNDVPPDKRDLHWKAFDGLAVPFAEFLAAACADEATRPDWVLADTFSHWAAAVALEHKVPSAMLLPSAAMIASCWHRPPSHAEQPRSAVFEEPAERPAGVLPYEWDKRAHFFGPQRASGMSTAQRCFLTLQRCRLLAMRSCPEWEPENFTVAAALLGKPLVPLGLLPPSPNGGRRREEDGGSTARCWLDAQPPSSVVYVALGSEVPLTVALVHELALGLELAGARFLWALRKPSGVADDADVLPPGFRERTCGRGLVAMGWVPQMSILAHGAVGGFLTHCGRNSLVEGLLFGHPLVMLPVVGDQGPNARAMERTKVGLQVARNGKDGSFDRHGVAAAVREVMLVEEARKVFVANALEMQRVVADKERHERYIDEFIRQLRSYSTPPAAS

SEQ ID NO: 18941 - protein, 445 aa, Zea mays subsp. mays
  misc_feature (1)..(445): Ceres Seq. ID no. 12367925
MLPCLELAERLASRGHRVSFVSTPRNLARLPPRRHDVHLVPLPLPRVEGLPDGVESTNDVPPDKRDLHWKAFDGLAVPFAEFLAAACADEATRPDWVLADTFSHWAAAVALEHKVPSAMLLPSAAMIASCWHRPPSHAEQPRSAVFEEPAERPAGVLPYEWDKRAHFFGPQRASGMSTAQRCFLTLQRCRLLAMRSCPEWEPENFTVAAALLGKPLVPLGLLPPSPNGGRRREEDGGSTARCWLDAQPPSSVVYVALGSEVPLTVALVHELALGLELAGARFLWALRKPSGVADDADVLPPGFRERTCGRGLVAMGWVPQMSILAHGAVGGFLTHCGRNSLVEGLLFGHPLVMLPVVGDQGPNARAMERTKVGLQVARNGKDGSFDRHGVAAAVREVMLVEEARKVFVANALEMQRVVADKERHERYIDEFIRQLRSYSTPPAAS

SEQ ID NO: 18942 - DNA, 1843 bp, Zea mays subsp. mays
  misc_feature (1)..(1843): Ceres Seq. ID no. 12367930
aactcggcaactccgcctcccaagtcacacccccactccctcgctcaccagaggaactagcggaccaggcaaagccgagccgcaaccgcgaagatcttgcgtggcctccttttcccagatcgtcactgtgccgctcgtgccctccactcccggtccgcccaaccaataatccatccatccatccaccaccaccaccccgctgcggcgatgtgcggcggcgccatcctctcgggtttcatcccgccgtccggggtggcggcggcggcggcggcggccaagaagaagcagcagcagcggtgccgtgtgactgcggacctgctatggccggggcccggcagtaaggaagctccccaggaccaggaggaggacttcgaggccgacttccgcgagttcgagcgcggcctcggcgaggatgacgtggacagcgccggcgaaggcggcgaccccgaggtccaggagcttcctccgccggagccgacgaggtttgccttcgccaccgcggccaaggcagcagttgatggcgtgatgacgacgactccaaaggatgtcaaaggagatagaccagtaaagcgcggccggaagaaccagtacaggggaatccggcagcgcccttggggcaaatgggcagctgagatcagggaccctaacaagggcgtccgcgtctggctcggaacctacaacaccgccgaggaggcagctagggcatacgacgccgaagctcgcaagatccgcggcaagaaagcgaaggtgaatttccccgatgacgacgcgccaggcactggtcacaggccagcgaacgcagcgcctaggctagtagctccacccccaccccccaaggcctgcgccgatgagatctttaacaacctgaagaacgacgacgacgacaacaacaacaacaacgatgatctgtttgcgatgtttgcgttcggtgacaataagaagaaggttcctgcagcgaagccagccgccgccgagggtggcagtggcagtggcagcttcctcgtccctgcgcctgcggtggcggtggtgcccggtaataagaggaggtcgtccgcgaccaacactatgctctccgtctccgacgaccagcgcagcaactcctacggctccggctcctccgacttggtggggtcgtggtcgtgggacgacgacgcggcggccgccgccatgacctcggactacacctcctcggtcttcgctcccgataacgccgtgctgccggcggcgtcttacacgcaaggcggagcgccgaagagaatgaggagcagctacggcggcgcgccgcccagcctcgcacatgacgcggccatgcctggctttggccttgataaagtgagctaccaccactaccaggcgttgcctccttattacgtcgggagcagcaacgcgtcggtgggcaacctcggtcttctgcagcaggctgatgatgctccagctccacaggatggggcgagcgccggggatatctggagcctcgacgagctgctcatgctggcagcagctggtgcttattgagaaccgcaagaaaaaaaaatgtgttgggcgctgctagctggagacgagacgagggcgagaggcagttgcatcatccgccatccgctatcgttttgtctctcctatatctagtatatatatgcttctggcagtcgaactctatggcaatgcgtgtgtatagtgtgttgctgccgtctatgattggaagcgagctcgagactggttcaataattcacctttgcctaccgtcgtaccgccggcctgctggactgtagtgtgcgtactgcatatatatgccataattatgtatgcactcctcctatataaactatattattatgatgtgctt

SEQ ID NO: 18943 - protein, 435 aa, Zea mays subsp. mays
  misc_feature (1)..(435): Ceres Seq. ID no. 12367931
MCGGAILSGFIPPSGVAAAAAAAKKKQQQRCRVTADLLWPGPGSKEAPQDQEEDFEADFREFERGLGEDDVDSAGEGGDPEVQELPPPEPTRFAFATAAKAAVDGVMTTTPKDVKGDRPVKRGRKNQYRGIRQRPWGKWAAEIRDPNKGVRVWLGTYNTAEEAARAYDAEARKIRGKKAKVNFPDDDAPGTGHRPANAAPRLVAPPPPPKACADEIFNNLKNDDDDNNNNNDDLFAMFAFGDNKKKVPAAKPAAAEGGSGSGSFLVPAPAVAVVPGNKRRSSATNTMLSVSDDQRSNSYGSGSSDLVGSWSWDDDAAAAAMTSDYTSSVFAPDNAVLPAASYTQGGAPKRMRSSYGGAPPSLAHDAAMPGFGLDKVSYHHYQALPPYYVGSSNASVGNLGLLQQADDAPAPQDGASAGDIWSLDELLMLAAAGAY

SEQ ID NO: 18944 - protein, 329 aa, Zea mays subsp. mays
  misc_feature (1)..(329): Ceres Seq. ID no. 12367932
MTTTPKDVKGDRPVKRGRKNQYRGIRQRPWGKWAAEIRDPNKGVRVWLGTYNTAEEAARAYDAEARKIRGKKAKVNFPDDDAPGTGHRPANAAPRLVAPPPPPKACADEIFNNLKNDDDDNNNNNDDLFAMFAFGDNKKKVPAAKPAAAEGGSGSGSFLVPAPAVAVVPGNKRRSSATNTMLSVSDDQRSNSYGSGSSDLVGSWSWDDDAAAAAMTSDYTSSVFAPDNAVLPAASYTQGGAPKRMRSSYGGAPPSLAHDAAMPGFGLDKVSYHHYQALPPYYVGSSNASVGNLGLLQQADDAPAPQDGASAGDIWSLDELLMLAAAGAY

SEQ ID NO: 18945 - DNA, 1026 bp, Zea mays subsp. mays
  misc_feature (1)..(1026): Ceres Seq. ID no. 12367960
ttatcttcctcacggcgcttgagacaaccaaagcagcctctctcaagcttgttgagcccttcaagctgtcagagccggtgcaggccgcctttgccaatggccttgccggtctgtcggcatccacatgttcgcaggctatttttgtcccaattgatgtgatcagccagaaattgatggttcaagggtattctggtaatgtcagatacaaaggtggagtagatgttgctcgcaaggtcataaaggctgatggcattaaggggctctacagaggatttggactgtctgttatgacctatgcaccatcgagtgctgtgtggtgggcgagttatggttctagccagcgcataatttggagtgcccttggccatttgcataacaaagaagaggctcctagccaattgaaaatagttggtgttcaagcatcaggggggatttttgctggtgctgtgacctcttttgttacgactcccatagatacaatcaagaccaggctgcaggttatggataatgaaaataagccaaaagctggggaagttgttaaaagattgatcgctgaagatggatggaaaggtttgtacagagggttgggtccaagatttttcagctcatcagcttggggtacctcaatgatagtatgctacgagtacctgaagcgcttgtgtgctaaagttgaagaggtctgacttctgttcttactattctggaagttttgtattagaagaagtgaaataatgctgtatgtctacaacattgacaccaccggaagcttcagttcttgctgacgtaggtgaaagcattcaacatggatgtttgatggtgtacttcatttggtgctagacaatagtctttacaaactttgcttctctgggctatatctcaaaaaatgtaggggcctatatttttttgctcatatgatgaatatgggtttggcggattattttaggtgagtataaacgatatcagatgtacacacttctcattcttttatacatgaaggctattttagcgaggctgtatgactgaagg

SEQ ID NO: 18946 - protein, 226 aa, Zea mays subsp. mays
  misc_feature (1)..(226): Ceres Seq. ID no. 12367961
IFLTALETTKAASLKLVEPFKLSEPVQAAFANGLAGLSASTCSQAIFVPIDVISQKLMVQGYSGNVRYKGGVDVARKVIKADGIKGLYRGFGLSVMTYAPSSAVWWASYGSSQRIIWSALGHLHNKEEAPSQLKIVGVQASGGIFAGAVTSFVTTPIDTIKTRLQVMDNENKPKAGEVVKRLIAEDGWKGLYRGLGPRFFSSSAWGTSMIVCYEYLKRLCAKVEEV

SEQ ID NO: 18947 - protein, 169 aa, Zea mays subsp. mays
  misc_feature (1)..(169): Ceres Seq. ID no. 12367962
MVQGYSGNVRYKGGVDVARKVIKADGIKGLYRGFGLSVMTYAPSSAVWWASYGSSQRIIWSALGHLHNKEEAPSQLKIVGVQASGGIFAGAVTSFVTTPIDTIKTRLQVMDNENKPKAGEVVKRLIAEDGWKGLYRGLGPRFFSSSAWGTSMIVCYEYLKRLCAKVEEV

SEQ ID NO: 18948 - protein, 131 aa, Zea mays subsp. mays
  misc_feature (1)..(131): Ceres Seq. ID no. 12367963
MTYAPSSAVWWASYGSSQRIIWSALGHLHNKEEAPSQLKIVGVQASGGIFAGAVTSFVTTPIDTIKTRLQVMDNENKPKAGEVVKRLIAEDGWKGLYRGLGPRFFSSSAWGTSMIVCYEYLKRLCAKVEEV

SEQ ID NO: 18949 - DNA, 1487 bp, Zea mays subsp. mays
  misc_feature (1)..(1487): Ceres Seq. ID no. 12367964
gcacgagaccattacctagaacatcctaatcgaaaaatcacacaaagccgccaagagtcccagcatcgatcgaacagctagctagctagctatatagcgagagggctccatccatatccatccatctgctactgctagcagctgctggctgttgctgcttgcattgagatgtggatgatcagcgcagggcgcatggagcagtgggcgccgacggcggcaatggtggccaccaacgtcgtgatcgccgtcatgacggcgctgatcaagcaggcactgagcctgggcatgaacaggctggtcctcatcactttccgccagatggtggccaccctgttccttggacccatcgcctacttcaaggaaaggaggatgagaccgaagttcacttccgagatcttcgtgtacatgtttctcagtggaattcttgggccggtgctgcttcagttacacactgtttgtcggattggattacacgacggcaacgttcgctgcaacgttcggaaatatgcttccagtggttactttcctgatatcacttgctttcaggttcgaagcactggaggtgaagagcaagtcggggagcgccaagatctcagggacgctcatctccctcggcggcgcaatgatgctcaccttctacaagggttcagcactgacacaaaccaccaccgccgccacgtcgtctccagcatccagcggcggcggccacatcaggcaacaagccggagagcacggcacggtccggtgggtgctgggctccgtctccatgctggccaacgtcgtcggcttcgcgctgtggctgctcctgcagcggaagttcacccgcaagtacccggccgtgtactcggccacggcgttcatgtcgctattcagcttcgtccaggccggggcgctggccctgtcgatccagaggaccagccttgccgttgggccctcagggggaccgtggagatcgccacggtggtgtactgtggtgtagtggcgtctggcattgggtacctgctgctcacctactgcgtggagaagagaggccccgtgttcactgccgccttcagcccgctcgcccagatcttcgtcgccggcatcgatctcttcatcctccacgagcctctctacctcggaagcgtgctgggatcagtgctggttattcttgggctctaccttgtactgtggggcaagagagaggaagctgctgctgctgctgcttcggcaaagccagtgcaggccgaggtagaacagcaagagaaagtgtgattttttccctttattgttcatcacagtacagcgtgccagagcagagggacgaacataattaactagaagcggaagcctgtgtgagtatgtgacagagagtgcatatgatcttcgagccctaaatctatgtatactactgaccaatataacgcaagaaaatgtatgctgatcgatcgatcgatcgaaatgctgtgaaattctctctcaagtacgtgctgagaaagaggttgggc

SEQ ID NO: 18950 - protein, 361 aa, Zea mays subsp. mays
  misc_feature (1)..(361): Ceres Seq. ID no. 12367965
MWMISAGRMEQWAPTAAMVATNVVIAVMTALIKQALSLGMNRLVLITFRQMVATLFLGPIAYFKERRMRPKFTSEIFVYMFLSGILGPVLLQLHTVCRIGLHDGNVRCNVRKYASSGYFPDITCFQVRSTGGEEQVGERQDLRDAHLPRRRNDAHLLQGFSTDTNHHRRHVVSSIQRRRPHQATSRRARHGPVGAGLRLHAGQRRRLRAVAAPAAEVHPQVPGRVLGHGVHVAIQLRPGRGAGPVDPEDQPCRWALRGTVEIATVVYCGVVASGIGYLLLTYCVEKRGPVFTAAFSPLAQIFVAGIDLFILHEPLYLGSVLGSVLVILGLYLVLWGKREEAAAAAASAKPVQAEVEQQEKV

SEQ ID NO: 18951 - protein, 359 aa, Zea mays subsp. mays
  misc_feature (1)..(359): Ceres Seq. ID no. 12367966
MISAGRMEQWAPTAAMVATNVVIAVMTALIKQALSLGMNRLVLITFRQMVATLFLGPIAYFKERRMRPKFTSEIFVYMFLSGILGPVLLQLHTVCRIGLHDGNVRCNVRKYASSGYFPDITCFQVRSTGGEEQVGERQDLRDAHLPRRRNDAHLLQGFSTDTNHHRRHVVSSIQRRRPHQATSRRARHGPVGAGLRLHAGQRRRLRAVAAPAAEVHPQVPGRVLGHGVHVAIQLRPGRGAGPVDPEDQPCRWALRGTVEIATVVYCGVVASGIGYLLLTYCVEKRGPVFTAAFSPLAQIFVAGIDLFILHEPLYLGSVLGSVLVILGLYLVLWGKREEAAAAAASAKPVQAEVEQQEKV

SEQ ID NO: 18952 - protein, 353 aa, Zea mays subsp. mays
  misc_feature (1)..(353): Ceres Seq. ID no. 12367967
MEQWAPTAAMVATNVVIAVMTALIKQALSLGMNRLVLITFRQMVATLFLGPIAYFKERRMRPKFTSEIFVYMFLSGILGPVLLQLHTVCRIGLHDGNVRCNVRKYASSGYFPDITCFQVRSTGGEEQVGERQDLRDAHLPRRRNDAHLLQGFSTDTNHHRRHVVSSIQRRRPHQATSRRARHGPVGAGLRLHAGQRRRLRAVAAPAAEVHPQVPGRVLGHGVHVAIQLRPGRGAGPVDPEDQPCRWALRGTVEIATVVYCGVVASGIGYLLLTYCVEKRGPVFTAAFSPLAQIFVAGIDLFILHEPLYLGSVLGSVLVILGLYLVLWGKREEAAAAAASAKPVQAEVEQQEKV

SEQ ID NO: 18953 - DNA, 1521 bp, Zea mays subsp. mays
  misc_feature (1)..(1521): Ceres Seq. ID no. 12367968
gcacgagaccattacctagaacatcctaatcgaaaaagtagtcagaccatagctaagctgagagcaaagatgtcttggcggcgaaaccagctacgtgcgtttctcgttctcgccgtcatcctcctcatcaccgcagctacctaccgagccaatgcgcagccggcgcctccagcagacccaacgccagccgctgacacctgcgccgaccccagcgtggaaggggcgtgccgcaacgtcccgaaggcgctgcgcctgaagctgatcgccatcccgacgatcctcgtctccagcgtgatcggcgtgtgcctgccgctcttgtcccgctctgtgcccgcgctccgccccgaccgcaacctcttcgtcatcgtcaaggccttcgcctcaggcgtcatcctcgcgacgggctacatgcacgtgctcccggactccttcagcaacctcacctcgccgtgcctgccgcggaagccgtgggccgatttctccttcaccaccttcgtcgccatgctcgccgccctgttcacgctcatggtggactcgctcatgctcagcttctacaaccggaggaagggtggcaacacctccggccgacgcactagcggcgcggtcgccgaccacgagagcccggcgcatgagcaccactggcacagccacggccatggacatggacatggacatgctgggggcatcgtggtggctgacaagcccgaggacgatgaggccagccaggtgcagctccgccggaaccgcgttgtcgttcaggtcctggagatgggcatcgtcgtgcactcggtggtgatcgggctgggcatgggagcgtcgcagaacgtgtgcaccatccggccgctggtgacggcgatgtgcttccaccagctcttcgagggcatgggactcggcggctgcatcctgcaggcggagtacggcgcgaagatgaaggcggggctggtgttcttcttctccacgacgacgccgttcgggatcgcgctggggctggcgctcaccaaggtgtacagggagaacagccccacggcgctcatcgtggtgggcctgctcaacgcggcctcggcggggctgctccactacatggcgctcgtggagctcctggccgccgacttcatggggcccaagctgcagagcagcgtcaggctccagctcctctgcttcctcgccgtcctcctcggcgccggcggcatgtccatcatggccaagtgggcgtgatcgtattcgtatctgagacgacatgacacagtactgttacaccaacactgcctgcagtctagctatctgcaagactgcatcgctgcatgcatgttcctcctatagctggctgttgtatcatttcgcgtgcttcgttgctccgtgcgcttccgtgtcgccatcaggaagctaggtatatattagacgcagatagcgttgttgtcatgactattcaacgtccacggtacaatacaaaagtagtactctatctatgtattaactatgttcttaaatatttgtcgtggtaaataaaaaaacaatataaat

SEQ ID NO: 18954 - protein, 404 aa, Zea mays subsp. mays
  misc_feature (1)..(404): Ceres Seq. ID no. 12367969
ARDHYLEHPNRKSSQTIAKLRAKMSWRRNQLRAFLVLAVILLITAATYRANAQPAPPADPTPAADTCADPSVEGACRNVPKALRLKLIAIPTILVSSVIGVCLPLLSRSVPALRPDRNLFVIVKAFASGVILATGYMHVLPDSFSNLTSPCLPRKPWADFSFTTFVAMLAALFTLMVDSLMLSFYNRRKGGNTSGRRTSGAVADHESPAHEHHWHSHGHGHGHGHAGGIVVADKPEDDEASQVQLRRNRVVVQVLEMGIVVHSVVIGLGMGASQNVCTIRPLVTAMCFHQLFEGMGLGGCILQAEYGAKMKAGLVFFFSTTTPFGIALGLALTKVYRENSPTALIVVGLLNAASAGLLHYMALVELLAADFMGPKLQSSVRLQLLCFLAVLLGAGGMSIMAKWA

SEQ ID NO: 18955 - protein, 381 aa, Zea mays subsp. mays
  misc_feature (1)..(381): Ceres Seq. ID no. 12367970
MSWRRNQLRAFLVLAVILLITAATYRANAQPAPPADPTPAADTCADPSVEGACRNVPKALRLKLIAIPTILVSSVIGVCLPLLSRSVPALRPDRNLFVIVKAFASGVILATGYMHVLPDSFSNLTSPCLPRKPWADFSFTTFVAMLAALFTLMVDSLMLSFYNRRKGGNTSGRRTSGAVADHESPAHEHHWHSHGHGHGHGHAGGIVVADKPEDDEASQVQLRRNRVVVQVLEMGIVVHSVVIGLGMGASQNVCTIRPLVTAMCFHQLFEGMGLGGCILQAEYGAKMKAGLVFFFSTTTPFGIALGLALTKVYRENSPTALIVVGLLNAASAGLLHYMALVELLAADFMGPKLQSSVRLQLLCFLAVLLGAGGMSIMAKWA

SEQ ID NO: 18956 - protein, 268 aa, Zea mays subsp. mays
  misc_feature (1)..(268): Ceres Seq. ID no. 12367971
MHVLPDSFSNLTSPCLPRKPWADFSFTTFVAMLAALFTLMVDSLMLSFYNRRKGGNTSGRRTSGAVADHESPAHEHHWHSHGHGHGHGHAGGIVVADKPEDDEASQVQLRRNRVVVQVLEMGIVVHSVVIGLGMGASQNVCTIRPLVTAMCFHQLFEGMGLGGCILQAEYGAKMKAGLVFFFSTTTPFGIALGLALTKVYRENSPTALIVVGLLNAASAGLLHYMALVELLAADFMGPKLQSSVRLQLLCFLAVLLGAGGMSIMAKWA

SEQ ID NO: 18957 - DNA, 1361 bp, Zea mays subsp. mays
  misc_feature (1)..(1361): Ceres Seq. ID no. 12367972
agcctcactctcgcgccggctcaaggtacattgcgtgtcctagccaagacacgcagctcatctcagcctcacacgcacagcaagagcgaggcgtgattcgccatgggcggcctcactatggaccaggctttcgtgcaggcccccgagcaccgccccaagcccctcgtcaccgaggccaccggcatccctctcatcgacctctcgcctctgtccgccagcggcggcgccgtggacgcgctggccgccgaggtgggcgcggcgagccgggactggggcttcttcgtggtcgtgggccacggcgtgcccgcagagaccatggcgcgcgcgacggaggcgcagcgcgcgttcttcgcgctgccggcagagcggaaggccgccgtgcggaggaacgaggcggagccgctcgggtactacgagtcggagcacaccaagaacgtgagggactggaaggaggtgtacgacctcgtgccgcgcgagccgccgccgccggctgccgtggccgacggcgagctcgtgttcgagaacaagtggccccaggatctgccgggcttcagagaggcgctggaggagtacgccaaagcgatggaagagctggcgttcaagctgctggagctgatcgctcggagcctgaagctgaggcccgaccggctgcacggcttcttcaaggaccagacgaccttcatccggctgaaccactaccctccttgcccgagccccgacctggccctcggcgtggggcggcacaaggacgccggcgccctgaccatcctgtaccaggacgacgtcggggggctcgacgtccggcggcgctccgacggcgagtgggtccgcgtcaggcccgtgcccgactcgttcatcatcaacgtcggcgacctcatccaggtgtggagcaacgacaggtacgagagcgcggagcaccggggtgtcggtgaactcggcgagggagaggttctccatgccctacttcttcaacccggcgacctacaccatggtggagccggtggaggagctggtgagcaaggacgatccgcccaggtacgacgcctacaactggggcgacttcttcagcaccaggaagaacagcaacttcaagaagctcaacgtggagaacattcagatcgcgcatttcaagaagagcctcgtcctcgcctaactactgctactgctaggatccatgccattgccatgtcgtcttcagattcagagcacgccatgtcgtcgctagcttcgtggtagaacaaataatgatgtgcgtgctgtgtgtaagcatggatatggatgtgaatatgtaatatgatgagcactcctactttggtatgtttgggaataacagacttgtgttggtctggttcattatttgc

SEQ ID NO: 18958 - protein, 377 aa, Zea mays subsp. mays
  misc_feature (1)..(377): Ceres Seq. ID no. 12367973
MGGLTMDQAFVQAPEHRPKPLVTEATGIPLIDLSPLSASGGAVDALAAEVGAASRDWGFFVVVGHGVPAETMARATEAQRAFFALPAERKAAVRRNEAEPLGYYESEHTKNVRDWKEVYDLVPREPPPPAAVADGELVFENKWPQDLPGFREALEEYAKAMEELAFKLLELIARSLKLRPDRLHGFFKDQTTFIRLNHYPPCPSPDLALGVGRHKDAGALTILYQDDVGGLDVRRRSDGEWVRVRPVPDSFIINVGDLIQVWSNDRYESAEHRGVGELGEGEVLHALLLQPGDLHHGGAGGGAGEQGRSAQVRRLQLGRLLQHQEEQQLQEAQRGEHSDRAFQEEPRPRLTTATARIHAIAMSSSDSEHAMSSLASW

SEQ ID NO: 18959 - protein, 372 aa, Zea mays subsp. mays
  misc_feature (1)..(372): Ceres Seq. ID no. 12367974
MDQAFVQAPEHRPKPLVTEATGIPLIDLSPLSASGGAVDALAAEVGAASRDWGFFVVVGHGVPAETMARATEAQRAFFALPAERKAAVRRNEAEPLGYYESEHTKNVRDWKEVYDLVPREPPPPAAVADGELVFENKWPQDLPGFREALEEYAKAMEELAFKLLELIARSLKLRPDRLHGFFKDQTTFIRLNHYPPCPSPDLALGVGRHKDAGALTILYQDDVGGLDVRRRSDGEWVRVRPVPDSFIINVGDLIQVWSNDRYESAEHRGVGELGEGEVLHALLLQPGDLHHGGAGGGAGEQGRSAQVRRLQLGRLLQHQEEQQLQEAQRGEHSDRAFQEEPRPRLTTATARIHAIAMSSSDSEHAMSSLASW

SEQ ID NO: 18960 - protein, 309 aa, Zea mays subsp. mays
  misc_feature (1)..(309): Ceres Seq. ID no. 12367975
PHSRAGSRYIACPSQDTQLISASHAQQERGVIRHGRPHYGPGFRAGPRAPPQAPRHRGHRHPSHRPLASVRQRRRRGRAGRRGGRGEPGLGLLRGRGPRRARRDHGARDGGAARVLRAAGRAEGRRAEERGGAARVLRVGAHQEREGLEGGVRPRAARAAAAGCRGRRRARVREQVAPGSAGLQRGAGGVRQSDGRAGVQAAGADRSEPEAEARPAARLLQGPDDLHPAEPLPSLPEPRPGPRRGAAQGRRRPDHPVPGRRRGARRPAALRRRVGPRQARARLVHHQRRRPHPGVEQRQVRERGAPGCR

SEQ ID NO: 18961 - DNA, 1480 bp, Zea mays subsp. mays
  misc_feature (1)..(1480): Ceres Seq. ID no. 12368002
tgggccttgcagtttttggttgtgtatcggggaaatggcaatcgacgacgaatcgccgatcagagtcaacagcagaggcggcggcggcatggtaacctggatagcacaccttcttttgtactctcttcttgccttgttttttttcccctttcgatgccctgtttctttgctctctgttgggctttctttgctctctgttgggctggcgctaacatggcggcgccgcgccggatcgaatgcggcagggaggaggggagcgcgacggggcggagaaccagcggtggccgccgtggctcaagccgctgctggggacgagcttcttcggccaatgcaagctgcacgcggacgcgcacaagagcgagtgcaacatgtactgcctcgcctgcatgaacggcgcgctctgctcccagtgcctcgcctaccaccgcgaccaccacgccatccagatacggaggtcctcctaccacgacgtgatccgggtgtcggagatccagaaggtgctggacatctccggcgtgcagacgtacatcatcaacagcgcgcgcgtggtgttcctgaacgagcgcccgcagccgaggcccggcaagggcgtcaccaacacctgcgaggtctgccagcgcagcctcctcgacaccttccgcttctgctccctcgggtgcaagatcgtggggacctccggtgacttgcgcgtccggaagaagcaggccgtcgtcaagaagaacaagaagaagaagcaggcgcagcagcagcagcagcacaggggcgccgcgttggactcggaggacgactcttcgtccaccagcaccagccgcggcagcgacaggagcagcgtggtgcagagcttcaccccgtcgaccccgccggcgacgcccaacagcttccgaaccgggaagcggcgcaagggcgtgccgcaccggtcgccgttcggcagcctcgtgctggagttctagaaagcagcggttctataccatctataggtgttgccggatcggcctcggccggtctacatagttcatagccacccaagaaaaaaaaaacggagctagtagtagcaactatagcaagcaataaccaaggccccactgcacgcccgcgcttctggacgacgaggccggtgcaatgtggcacgtacgtcgtacggtacggttacctctacttccattccatagtactgtactactactgtagtttacatgcagtcgcagagctgtgctggtagtgacaacggtttgggttttggtgcctgtaaaaggaaacgaggtagttgtagcagttacccttgtcgtcaccactcatcagcagccagccactactgaattacatagtatataggtgtttcctagttttaccagcgcttgatatagatgtggatgtacatatatacatatactgtcacagatggggaacggtaggagtgttgttgttggtactggtgtttgcgtttgttgcctgtaataataaagaggataagaatgctgcg

SEQ ID NO: 18962 - protein, 237 aa, Zea mays subsp. mays
  misc_feature (1)..(237): Ceres Seq. ID no. 12368003
MRQGGGERDGAENQRWPPWLKPLLGTSFFGQCKLHADAHKSECNMYCLACMNGALCSQCLAYHRDHHAIQIRRSSYHDVIRVSEIQKVLDISGVQTYIINSARVVFLNERPQPRPGKGVTNTCEVCQRSLLDTFRFCSLGCKIVGTSGDLRVRKKQAVVKKNKKKKQAQQQQQHRGAALDSEDDSSSTSTSRGSDRSSVVQSFTPSTPPATPNSFRTGKRRKGVPHRSPFGSLVLEF

SEQ ID NO: 18963 - protein, 226 aa, Zea mays subsp. mays
  misc_feature (1)..(226): Ceres Seq. ID no. 12368004
GPCSFWLCIGEMAIDDESPIRVNSRGGGGMVTWIAHLLLYSLLALFFFPFRCPVSLLSVGLSLLSVGLALTWRRRAGSNAAGRRGARRGGEPAVAAVAQAAAGDELLRPMQAARGRAQERVQHVLPRLHERRALLPVPRLPPRPPRHPDTEVLLPRRDPGVGDPEGAGHLRRADVHHQQRARGVPERAPAAEARQGRHQHLRGLPAQPPRHLPLLLPRVQDRGDLR

SEQ ID NO: 18964 - protein, 215 aa, Zea mays subsp. mays
  misc_feature (1)..(215): Ceres Seq. ID no. 12368005
MAIDDESPIRVNSRGGGGMVTWIAHLLLYSLLALFFFPFRCPVSLLSVGLSLLSVGLALTWRRRAGSNAAGRRGARRGGEPAVAAVAQAAAGDELLRPMQAARGRAQERVQHVLPRLHERRALLPVPRLPPRPPRHPDTEVLLPRRDPGVGDPEGAGHLRRADVHHQQRARGVPERAPAAEARQGRHQHLRGLPAQPPRHLPLLLPRVQDRGDLR

SEQ ID NO: 18965 - DNA, 2195 bp, Zea mays subsp. mays
  misc_feature (1)..(2195): Ceres Seq. ID no. 12368028
taatcgaaaagcacacgcacggacggccccgagggtttagagcccaacttctctcttcacatcgccgcgaagccagctccccgatgcgatctggccgagggaagatggcgactccgccgccgccaatccgccccgccgccgcgctcctcctcctcgtcctcgctggcgtcctcgcctccgccgcgagcgccgatctcgtcatctccaaggcagatcggagggttgatctgacctcgcatatcgttcgcgtcctcgcttccctcaaggctgaaaatgttggaccagaccctgtctctcaagttttactgccttttcccaatattcaagccaagaacttggcagctattagagcattcggcagtgaagggaaagtgaagggtcaaagtactgttctgccaattgaagttgttcaaccttctggagctcccccggagctgacattcttttcagcattgttgcccaaacctttggaaaaaggaaagactctgtacttggatgttctgactgtgttcacacactctcttcaaccattcccagaagaaatcactcaagccgaagcacaacttgttgtctatcaggatagtgctcactatctgtcaccttaccctgttaaggctcagacacttgctatcagattgcctggtggaagggttgaatcatacacaaggcatccaaacgcaaaacttgtggattcagaactgaaatatggaccatttcatgaccttcccccgttctcctacttacctgtgattgtgcattttgagaacaacaatccttttgcagttgcaaaggaagttataagggagattgagatatctcactggggaaatgtacagattacggaacactacaacattgctcatggtggtgccagactcaagggtgaattttccaggattgattatcaatctagaccttacgtaaggggtgtttcatcttttagacatcttattgcaaaactgcctccaagggcacactctatttattaccgagatgagattggtaatatttccacatcacatttgtggagtgattctatgaagacccaactggaaatagaaccaaggtttccattgtttggtgggtggcaaacaaccttcactgttggttatggtttaccacttgaagactttgttttctattctgatggaaagagatttctcaatatcacatttggttctccattggaggaaattctcattgaaaagcttatcgtaaaggttgttctacctgaagggtcaaaggatatcgaagtttcagctccctttccaacacagcagcagcaagaggttaagtattcacaccttgacattgtcggaagaccagttgttgtcttggagaaacctgatgttattccagagcataatttgtatttccaggtttactacagattcaacaacatatccttgctcagagagccgttgatgctgattactggtttcttcctcctgtttgtggcctgtattgtttacatgcgtactgatatgtcaatatccaagagctctccttcctacttggccaagctgcaatgggatgaggtgcaagcaactgttcagaaaatccagggtatctttgagcaatgcttagcagttcatgataaactggaggcctcattgcgggatttgtctaggacaggagacattcagtcttgcaaggcagctcgtaaagctgctgacacgcagtttaaggagctatcgaaagatctgaagccactgttggcgactctacagtcatctccccagtcttatcagatattgccaaaggtagaggacttgatcgtaaaggagagagagatgcaggagaagctcatgacaaggcattccaccgttgtcgacagctttgagaagaagctgcgcgggcaagatgtagagaacaggattgctttgcagcagcagaaaattgctgccctgaggcaggaggttgaatctcttttagagtacattagtgagatttgagcaaatgagtgctgctgtggcgtgatacatctttagcgattagactgcctttgtttggtttagggtttaccccaatattgaaatctactactctgagattgtgtcggtaaccatctagtttcccagttgagagacctggaagttgcaatgaccttgtaacatgataatcagtgtaattctggagctgactaaatttttgcatttaatatcaatatcacaggaaccgtcatcttttggacc

SEQ ID NO: 18966 - protein, 650 aa, Zea mays subsp. mays
  misc_feature (1)..(650): Ceres Seq. ID no. 12368029
IEKHTHGRPRGFRAQLLSSHRREASSPMRSGRGKMATPPPPIRPAAALLLLVLAGVLASAASADLVISKADRRVDLTSHIVRVLASLKAENVGPDPVSQVLLPFPNIQAKNLAAIRAFGSEGKVKGQSTVLPIEVVQPSGAPPELTFFSALLPKPLEKGKTLYLDVLTVFTHSLQPFPEEITQAEAQLVVYQDSAHYLSPYPVKAQTLAIRLPGGRVESYTRHPNAKLVDSELKYGPFHDLPPFSYLPVIVHFENNNPFAVAKEVIREIEISHWGNVQITEHYNIAHGGARLKGEFSRIDYQSRPYVRGVSSFRHLIAKLPPRAHSIYYRDEIGNISTSHLWSDSMKTQLEIEPRFPLFGGWQTTFTVGYGLPLEDFVFYSDGKRFLNITFGSPLEEILIEKLIVKVVLPEGSKDIEVSAPFPTQQQQEVKYSHLDIVGRPVVVLEKPDVIPEHNLYFQVYYRFNNISLLREPLMLITGFFLLFVACIVYMRTDMSISKSSPSYLAKLQWDEVQATVQKIQGIFEQCLAVHDKLEASLRDLSRTGDIQSCKAARKAADTQFKELSKDLKPLLATLQSSPQSYQILPKVEDLIVKEREMQEKLMTRHSTVVDSFEKKLRGQDVENRIALQQQKIAALRQEVESLLEYISEI

SEQ ID NO: 18967 - protein, 623 aa, Zea mays subsp. mays
  misc_feature (1)..(623): Ceres Seq. ID no. 12368030
MRSGRGKMATPPPPIRPAAALLLLVLAGVLASAASADLVISKADRRVDLTSHIVRVLASLKAENVGPDPVSQVLLPFPNIQAKNLAAIRAFGSEGKVKGQSTVLPIEVVQPSGAPPELTFFSALLPKPLEKGKTLYLDVLTVFTHSLQPFPEEITQAEAQLVVYQDSAHYLSPYPVKAQTLAIRLPGGRVESYTRHPNAKLVDSELKYGPFHDLPPFSYLPVIVHFENNNPFAVAKEVIREIEISHWGNVQITEHYNIAHGGARLKGEFSRIDYQSRPYVRGVSSFRHLIAKLPPRAHSIYYRDEIGNISTSHLWSDSMKTQLEIEPRFPLFGGWQTTFTVGYGLPLEDFVFYSDGKRFLNITFGSPLEEILIEKLIVKVVLPEGSKDIEVSAPFPTQQQQEVKYSHLDIVGRPVVVLEKPDVIPEHNLYFQVYYRFNNISLLREPLMLITGFFLLFVACIVYMRTDMSISKSSPSYLAKLQWDEVQATVQKIQGIFEQCLAVHDKLEASLRDLSRTGDIQSCKAARKAADTQFKELSKDLKPLLATLQSSPQSYQILPKVEDLIVKEREMQEKLMTRHSTVVDSFEKKLRGQDVENRIALQQQKIAALRQEVESLLEYISEI

SEQ ID NO: 18968 - protein, 616 aa, Zea mays subsp. mays
  misc_feature (1)..(616): Ceres Seq. ID no. 12368031
MATPPPPIRPAAALLLLVLAGVLASAASADLVISKADRRVDLTSHIVRVLASLKAENVGPDPVSQVLLPFPNIQAKNLAAIRAFGSEGKVKGQSTVLPIEVVQPSGAPPELTFFSALLPKPLEKGKTLYLDVLTVFTHSLQPFPEEITQAEAQLVVYQDSAHYLSPYPVKAQTLAIRLPGGRVESYTRHPNAKLVDSELKYGPFHDLPPFSYLPVIVHFENNNPFAVAKEVIREIEISHWGNVQITEHYNIAHGGARLKGEFSRIDYQSRPYVRGVSSFRHLIAKLPPRAHSIYYRDEIGNISTSHLWSDSMKTQLEIEPRFPLFGGWQTTFTVGYGLPLEDFVFYSDGKRFLNITFGSPLEEILIEKLIVKVVLPEGSKDIEVSAPFPTQQQQEVKYSHLDIVGRPVVVLEKPDVIPEHNLYFQVYYRFNNISLLREPLMLITGFFLLFVACIVYMRTDMSISKSSPSYLAKLQWDEVQATVQKIQGIFEQCLAVHDKLEASLRDLSRTGDIQSCKAARKAADTQFKELSKDLKPLLATLQSSPQSYQILPKVEDLIVKEREMQEKLMTRHSTVVDSFEKKLRGQDVENRIALQQQKIAALRQEVESLLEYISEI

SEQ ID NO: 18969 - DNA, 1791 bp, Zea mays subsp. mays
  misc_feature (1)..(1791): Ceres Seq. ID no. 12368040
agatatatgcaagaaaagaaaagagaagagcctctgtggatagtggtgggtgctggatcactgggcggagcagcttctcatatcggatcgatcgattaattaatatatactataaacatacaatcaattacatacatatacgccaagagaagaggaacgccggcccgtttcacttgtctccttcctccgatccctcccggcggccggccgggctcgggcgtttttccccttttgtttcccatggaggacgccaagatggggaacggcgccaccatccgcgcggtgctcgccatcctccagtggtggggattcaacgtcaccgtcatcatcatcaacaagtggatcttccaggtcccgtccctcgcgcttgctcttgtttaaatcctggtcttctttttttgtttcaattcaatttccagagatggccatgtatgtagttatatatatattcattcaaggggatttaggggtggatccgtcaggacaaccaagagatttcgtctctttttagttcttgccttcatccaatcgttcgataggtgcagattaatcgcccccatgatgttgtcgtctttttcttcagtgatttggtaggaacataaaggaatcatccttttttttttgtccgactgaaaagaaaattacttacttgaaccggtggtggttcgtagattggatttccagatttaattgtaatcatggtaagaagagcctgttcttatcctgtgacgctgactctgtgtggggttgtcagaaactggagttcaagttcccccctgacggtgtcgtgcgtccacttcatatgttcctccatcggagcctacatcgcgatcaaagtcctgagaacgaagccgctgatcgaggtggcctcggaggaccggtggaggaggatattccccatgtcgttggtgttctgcgtcaacatcgtgctggggaacgtgagcctgaggtacataccagtgtcattcatgcagacgatcaagtcgttcactccggcaacgacagtggttcttcagtggctggtttggaggaaatactttgagtggcgcatctgggcgtccttggtgcccatcgttggaggaatccttgtcacctccgtgacggagctgagcttcaacacggctggcttctgcgccgcgctggtggggtgcctggccacgtccaccaagaccatcctggcagagtcgctgctccacggctacaagttcgacagcatcaacacggtgtactacatggctccgctggccacgctgatcctgtcggtgccggccgtggcgctggagggcggcgccgtgctggggtggctgcggacgcacgagtccgtgggaccggcgctggcggtcgtcgtcacctccggggtgctggccttctgcctcaacttctccatcttctacgtcatccactccacgacggcagtcaccttcaacgtggccggcaacctcaaggtggccgtggcggtgctggcgtcctggatggtgttccggaaccccatctccgccatgaacgcactcggctgcggcgtcacgctcgtcggatgcaccttctacggctacgtcaggcaccgactctcgcagaaccaggcgcccagagcccgcttggagatgctgccgctcaccgccgtcgacaagcaaggcgacaagatataaaaagtcttttcgaataaaccatctgattctttctgatccacctagcctaaccgccgatcgagaatgcatccaccatcagagatgacaggaaattattttttgttggcagccagattttgataatgagtcagttcagttgttgctt

SEQ ID NO: 18970 - protein, 315 aa, Zea mays subsp. mays
  misc_feature (1)..(315): Ceres Seq. ID no. 12368041
MVRRACSYPVTLTLCGVVRNWSSSSPLTVSCVHFICSSIGAYIAIKVLRTKPLIEVASEDRWRRIFPMSLVFCVNIVLGNVSLRYIPVSFMQTIKSFTPATTVVLQWLVWRKYFEWRIWASLVPIVGGILVTSVTELSFNTAGFCAALVGCLATSTKTILAESLLHGYKFDSINTVYYMAPLATLILSVPAVALEGGAVLGWLRTHESVGPALAVVVTSGVLAFCLNFSIFYVIHSTTAVTFNVAGNLKVAVAVLASWMVFRNPISAMNALGCGVTLVGCTFYGYVRHRLSQNQAPRARLEMLPLTAVDKQGDKI

SEQ ID NO: 18971 - protein, 248 aa, Zea mays subsp. mays
  misc_feature (1)..(248): Ceres Seq. ID no. 12368042
MSLVFCVNIVLGNVSLRYIPVSFMQTIKSFTPATTVVLQWLVWRKYFEWRIWASLVPIVGGILVTSVTELSFNTAGFCAALVGCLATSTKTILAESLLHGYKFDSINTVYYMAPLATLILSVPAVALEGGAVLGWLRTHESVGPALAVVVTSGVLAFCLNFSIFYVIHSTTAVTFNVAGNLKVAVAVLASWMVFRNPISAMNALGCGVTLVGCTFYGYVRHRLSQNQAPRARLEMLPLTAVDKQGDKI

SEQ ID NO: 18972 - protein, 225 aa, Zea mays subsp. mays
  misc_feature (1)..(225): Ceres Seq. ID no. 12368043
MQTIKSFTPATTVVLQWLVWRKYFEWRIWASLVPIVGGILVTSVTELSFNTAGFCAALVGCLATSTKTILAESLLHGYKFDSINTVYYMAPLATLILSVPAVALEGGAVLGWLRTHESVGPALAVVVTSGVLAFCLNFSIFYVIHSTTAVTFNVAGNLKVAVAVLASWMVFRNPISAMNALGCGVTLVGCTFYGYVRHRLSQNQAPRARLEMLPLTAVDKQGDKI

SEQ ID NO: 18973 - DNA, 1854 bp, Zea mays subsp. mays
  misc_feature (1)..(1854): Ceres Seq. ID no. 12368044
  misc_feature (1845)..(1845): n is a, c, t, g, unknown, or other
ccattacctagaacatcctaatcgaaaacatcctaatcgaaaactaacctcgcgccggagtcgtcgcccacgatggcctaccgatccgcagtgctcttgcccgccctcctactggccgtcgccgtcgtcgtggcctccgccgccgccggggacgggaggtggcgggaggagcaggcgcgggaccgggtgccgcgggtgccggggcaggccttcaacaccagcttcgcgcagtacgccgggtacgtgaccgtcagcgagcagcgcggcgctgcgctcttctactggttctttgaggccgagaaggacccggggtccaagcccctcgtgctctggctcaacggagggcctggatgctcgtccattgcttttggacttggagaagaagtaggacctttccatgttaacgcagatgggaagggggtccatgtcaatccttattcttggaacaaagttgcaaatttactgttccttgattcacctgttggtgttggttactcatattcaaacacctctgatgatgctttaaaaaatggggatgcaagaactgccacggattcattggcattcttactgaagtggcttgaacgctttcctcaatacaaggaacgcgaattttatttgacaggggagagttatgctggtcactatgttcctcaactggctcaagccataaaaaggcaccatgaggctactggtgacaaatcaattaatctaaagggctatatggtagggaatgctctcactgatgatttccatgaccactatggaatatttcaattcatgtggactactggcctgatctctgatcaaacatacaagctgctgaatgttttctgtgactacgagtccttcgtgcattcgtctccacagtgtgataagattatggatattgctagcactgaagctggaaacattgattcatatagcatctttcacacctacatgtcatgcatcttttgcctcttcaaagaacaaagtgatgaaaaggctacattctgctggaaaaatgggagaacagtatgatccatgcactgagaagcattcaactgtatacttcaatctagctgaggttcagaaggcacttcatgttaatacagtcattggaaaatcaaaatgggagacttgcagtgaagctgttaatactcattggggggattgcgaaagatctgtgctgcatatctatcatgaacttatacagtatggcctccgtatatgggtgttcagtggagatacagatgcagtgattccagtgacttcaactagatacagcatcgatgctctcaagcttccaacaataactccatggcatgcttggtacgacgatgacggtgaggtcggtggatggacccaagggtacaggggactcaattttgtgaccgtgaggggagcaggtcacgaagtccctcttcatcgacccaaacaggccctcacgctaatcaaatcgttcttgactgggagcccaatgcctgtgcaatccagcacacacagcaacatgtaatccgtgttgttgcaactgattcacgagatgaatgaacatcccgaagcacccaagtcagccagttgtccaacccggcttgttctgcaacttgctgtagttgtttatgtatcagagctaccggtgccggttaccgcagcagccgtgcttttgtcggccctgttggtgcttgttgcagtaccagttatcccctaaggcaggggacagaaactgcggaatagtttttgtttgcattgacgtgacagcactgtaatcttaaacatcgtaccatagtcctttctatgacaaaggtgtggtttctgatgtctgcaataaatgatctggacttggggggtaaaaatgaaatactnctgtgttgc

SEQ ID NO: 18974 - protein, 316 aa, Zea mays subsp. mays
  misc_feature (1)..(316): Ceres Seq. ID no. 12368045
MAYRSAVLLPALLLAVAVVVASAAAGDGRWREEQARDRVPRVPGQAFNTSFAQYAGYVTVSEQRGAALFYWFFEAEKDPGSKPLVLWLNGGPGCSSIAFGLGEEVGPFHVNADGKGVHVNPYSWNKVANLLFLDSPVGVGYSYSNTSDDALKNGDARTATDSLAFLLKWLERFPQYKEREFYLTGESYAGHYVPQLAQAIKRHHEATGDKSINLKGYMVGNALTDDFHDHYGIFQFMWTTGLISDQTYKLLNVFCDYESFVHSSPQCDKIMDIASTEAGNIDSYSIFHTYMSCIFCLFKEQSDEKATFCWKNGRTV

SEQ ID NO: 18975 - protein, 223 aa, Zea mays subsp. mays
  misc_feature (1)..(223): Ceres Seq. ID no. 12368046
MFSVTTSPSCIRLHSVIRLWILLALKLETLIHIASFTPTCHASFASSKNKVMKRLHSAGKMGEQYDPCTEKHSTVYFNLAEVQKALHVNTVIGKSKWETCSEAVNTHWGDCERSVLHIYHELIQYGLRIWVFSGDTDAVIPVTSTRYSIDALKLPTITPWHAWYDDDGEVGGWTQGYRGLNFVTVRGAGHEVPLHRPKQALTLIKSFLTGSPMPVQSSTHSNM

SEQ ID NO: 18976 - protein, 172 aa, Zea mays subsp. mays
  misc_feature (1)..(172): Ceres Seq. ID no. 12368047
MKRLHSAGKMGEQYDPCTEKHSTVYFNLAEVQKALHVNTVIGKSKWETCSEAVNTHWGDCERSVLHIYHELIQYGLRIWVFSGDTDAVIPVTSTRYSIDALKLPTITPWHAWYDDDGEVGGWTQGYRGLNFVTVRGAGHEVPLHRPKQALTLIKSFLTGSPMPVQSSTHSNM

SEQ ID NO: 18977 - DNA, 1621 bp, Zea mays subsp. mays
  misc_feature (1)..(1621): Ceres Seq. ID no. 12368052
gtttttcttttattcccctccactgctttgcgcttgcgcctacgcatcgccgccccgcctctagttctctctgtcctcgtcttcctactgtaaaccacctcgtccctatccgcggcaaccgttcaccgcgccgcgaggcctgctgatccgaccgacctccaccgtcatggctcccctgcgccgcgcgtctcgcctccttcgatcagccgtctgccggctgaggtctccagcgccggctcgggccttctccagcgccgcggcgaccgagacgggtgccgtgatcgccgctgctgccgtggcggtggccagctccgggctcgggctgtggctgaaaccgccgtcgcttgccgactccggcgaggcgcccggcgaccagatctcggtcgcctgcgccggcgccacggaggcgcgggaggagaaggggtggttcctgttcgcagactcatttcgtagaagggtcttcttcaactacgagaagaggatacggcttctcagtcctcctgagaagatttttgagtactttgcgtctgtgaggaatcgagaagggaaagtttacatgttgcctgctgacttgatgagagcagtagtccctgtttttcctccatcagagtccacggtagttcgtgaaggaagattaaggggggagcggagccctggagaattgcactgtgctccatcagagttctttatgcagttcgacacaaataatgatggcctcatctcctttgctgagtacattttttttgtgacattgctcagcattcatgagtcaaatttcactgtggccttcaaaatgttcgacatcgaccacagtggttaatttatctcgccaagaaaaaagacctgctcgttatgagcatgttcaatcatctgacttgtttgttgatggtaaaagaaggggtgatagacagagaagagtttaagaaaataatggcactgatgcggtcctttaacagacaagggtcgactcataaggatggtttacgtattggacttaaagttggcaagcctgtggaaaatggtggggtggtcgagtacttctttgggagtgatgggaatgaacctctacactttgacaagttttctaaaattttgaaggaattgcatgatgagattattcaactggagttcagtcattatgatgtcaagtcgtctaaaacaataccagcaaaggattttgcattgtccatggttgcttctgctgacatgaaccatatcaacaaactgcttgatagagttgatagtttggtcaaggagccagatctgaaggacatacgcatcacctttgaggagtttaaggcatttgctgatttgcgacgaagattggagccactgtcgatggctatctttgcttacggtaaattgaatgggttattgacgaaggaggatctaaaacgtgcagcgcaacatgcgcagaaggtaatcaccaagcagtgcattgctgatcgttacaacggacttcactgtatgtcgtcttggtggccgaagcttgactagcagtaacagctgtaattgtaaatcgtgtcctctgtagccctaggactgagtgatatacattgttattctcacgtgtaaattaaaccccatatggccatatggcttcaatatatgaaacattgcc

SEQ ID NO: 18978 - protein, 217 aa, Zea mays subsp. mays
  misc_feature (1)..(217): Ceres Seq. ID no. 12368053
MAPLRRASRLLRSAVCRLRSPAPARAFSSAAATETGAVIAAAAVAVASSGLGLWLKPPSLADSGEAPGDQISVACAGATEAREEKGWFLFADSFRRRVFFNYEKRIRLLSPPEKIFEYFASVRNREGKVYMLPADLMRAVVPVFPPSESTVVREGRLRGERSPGELHCAPSEFFMQFDTNNDGLISFAEYIFFVTLLSIHESNFTVAFKMFDIDHSG

SEQ ID NO: 18979 - protein, 214 aa, Zea mays subsp. mays
  misc_feature (1)..(214): Ceres Seq. ID no. 12368054
MSMFNHLTCLLMVKEGVIDREEFKKIMALMRSFNRQGSTHKDGLRIGLKVGKPVENGGVVEYFFGSDGNEPLHFDKFSKILKELHDEIIQLEFSHYDVKSSKTIPAKDFALSMVASADMNHINKLLDRVDSLVKEPDLKDIRITFEEFKAFADLRRRLEPLSMAIFAYGKLNGLLTKEDLKRAAQHAQKVITKQCIADRYNGLHCMSSWWPKLD

SEQ ID NO: 18980 - protein, 212 aa, Zea mays subsp. mays
  misc_feature (1)..(212): Ceres Seq. ID no. 12368055
MFNHLTCLLMVKEGVIDREEFKKIMALMRSFNRQGSTHKDGLRIGLKVGKPVENGGVVEYFFGSDGNEPLHFDKFSKILKELHDEIIQLEFSHYDVKSSKTIPAKDFALSMVASADMNHINKLLDRVDSLVKEPDLKDIRITFEEFKAFADLRRRLEPLSMAIFAYGKLNGLLTKEDLKRAAQHAQKVITKQCIADRYNGLHCMSSWWPKLD

SEQ ID NO: 18981 - DNA, 1718 bp, Zea mays subsp. mays
  misc_feature (1)..(1718): Ceres Seq. ID no. 12368120
gaggaagccttggcctgccgaccaaaccatgcttgcgcgccgactcgcggcccccgacggcggtaggctgttctctgcggcgtcctccgcctccgcccgaggcggtcacgcgggtggcgacacactagggaagcgcctgctgaagctcatctacccgaagcggagcgcggtggtggtgctgcagcggtgggcggacgaaggccgcaccgtgcagaagtaccagctcaaccgcgtcgtcagggagcttcggaagtacggtcgcttcaagcacgccctggagatatgcgagtggatgcggacccagccggagatgcggctgcttccgggggatcacgcggtgcaccttgacctcgtcgccaaggtcaggggactcgccagtgccaccaagttcttcgaggacatgccggagcgcgccaaggggccgtccacctgcaacgcgctgctgcacgcgtacgtacagaatggcgcaagagagaaggccgaggccatgctggcggagatggcccgtgttgggtacctcacctgtgccctgcccttcaaccacatgatgtcgctctacatggcgactggtgagctcgagcgggtgccagaaatgatcaaggagctaaggaggtacacactccccgacctcgttacctacaacatatggctgacatactgctccaaaaaggacagcgtgaagagtgccgaaaaggtctttggtctgatgaaggatgactgcgtggttcctgattggatgaccttcagcttgctcggtagcatttacatcaacgccggactccatgtggaaggtcggaacgcgttggtggagatggagaagagggcctccaggaaggagcgagctgcttactcatcgctcctcaccctgtatgcaagcttgtcagatagaggtaacttggacagagtatggaataagatgagaggaaccttcaggaagttcagtgacacagagtacaagtgcatgctcacttccctcttgaggtttgacgacatagcagcagcagaaagcatttttagtgagtgggaatcaacatctggaacacgtgattcaaggatcccaaacacgatcctttcatattacatcaagaatggcatgataaaaaaggcagagagctttcttgaccacattgtggagaaaggagtcaagcccagctatagcacatgggaggcattcgtctggggttatctcggtgacaagacggacaaagtccttgagtgcatgaagaaagccctgtcatgcttggagaaatgggagccgaaccatgagctcgctaccgcgatcttttctcagatcgagaagacaggtgacattgaagctgcagagaagctcctggtcatattccgggatgcagagtatgttaccactgagatgtacaactcagtcttgcgcacttatgcagaggccaagctcatgcctctgatagttgacgaacgcatggagcaggataaggtggccatggatgtggaaaccaagagattgttgaggttgaccagcaaatatccaatcggtgaggtttcagtatcgatgtcttgaggtgtgccaacaatagaagggtgtttcaggatgcaatgtgtactagcccttacgttttcatgcactttagttctgaagtacaatgcaatgcaaataacaaacatttagttttgaagtgcaatacagatggttgtgattttttttgcatacttatctaacttgttggactgtattgtctctatct

SEQ ID NO: 18982 - protein, 510 aa, Zea mays subsp. mays
  misc_feature (1)..(510): Ceres Seq. ID no. 12368121
RKPWPADQTMLARRLAAPDGGRLFSAASSASARGGHAGGDTLGKRLLKLIYPKRSAVVVLQRWADEGRTVQKYQLNRVVRELRKYGRFKHALEICEWMRTQPEMRLLPGDHAVHLDLVAKVRGLASATKFFEDMPERAKGPSTCNALLHAYVQNGAREKAEAMLAEMARVGYLTCALPFNHMMSLYMATGELERVPEMIKELRRYTLPDLVTYNIWLTYCSKKDSVKSAEKVFGLMKDDCVVPDWMTFSLLGSIYINAGLHVEGRNALVEMEKRASRKERAAYSSLLTLYASLSDRGNLDRVWNKMRGTFRKFSDTEYKCMLTSLLRFDDIAAAESIFSEWESTSGTRDSRIPNTILSYYIKNGMIKKAESFLDHIVEKGVKPSYSTWEAFVWGYLGDKTDKVLECMKKALSCLEKWEPNHELATAIFSQIEKTGDIEAAEKLLVIFRDAEYVTTEMYNSVLRTYAEAKLMPLIVDERMEQDKVAMDVETKRLLRLTSKYPIGEVSVSMS

SEQ ID NO: 18983 - protein, 501 aa, Zea mays subsp. mays
  misc_feature (1)..(501): Ceres Seq. ID no. 12368122
MLARRLAAPDGGRLFSAASSASARGGHAGGDTLGKRLLKLIYPKRSAVVVLQRWADEGRTVQKYQLNRVVRELRKYGRFKHALEICEWMRTQPEMRLLPGDHAVHLDLVAKVRGLASATKFFEDMPERAKGPSTCNALLHAYVQNGAREKAEAMLAEMARVGYLTCALPFNHMMSLYMATGELERVPEMIKELRRYTLPDLVTYNIWLTYCSKKDSVKSAEKVFGLMKDDCVVPDWMTFSLLGSIYINAGLHVEGRNALVEMEKRASRKERAAYSSLLTLYASLSDRGNLDRVWNKMRGTFRKFSDTEYKCMLTSLLRFDDIAAAESIFSEWESTSGTRDSRIPNTILSYYIKNGMIKKAESFLDHIVEKGVKPSYSTWEAFVWGYLGDKTDKVLECMKKALSCLEKWEPNHELATAIFSQIEKTGDIEAAEKLLVIFRDAEYVTTEMYNSVLRTYAEAKLMPLIVDERMEQDKVAMDVETKRLLRLTSKYPIGEVSVSMS

SEQ ID NO: 18984 - protein, 413 aa, Zea mays subsp. mays
  misc_feature (1)..(413): Ceres Seq. ID no. 12368123
MRTQPEMRLLPGDHAVHLDLVAKVRGLASATKFFEDMPERAKGPSTCNALLHAYVQNGAREKAEAMLAEMARVGYLTCALPFNHMMSLYMATGELERVPEMIKELRRYTLPDLVTYNIWLTYCSKKDSVKSAEKVFGLMKDDCVVPDWMTFSLLGSIYINAGLHVEGRNALVEMEKRASRKERAAYSSLLTLYASLSDRGNLDRVWNKMRGTFRKFSDTEYKCMLTSLLRFDDIAAAESIFSEWESTSGTRDSRIPNTILSYYIKNGMIKKAESFLDHIVEKGVKPSYSTWEAFVWGYLGDKTDKVLECMKKALSCLEKWEPNHELATAIFSQIEKTGDIEAAEKLLVIFRDAEYVTTEMYNSVLRTYAEAKLMPLIVDERMEQDKVAMDVETKRLLRLTSKYPIGEVSVSMS

SEQ ID NO: 18985 - DNA, 1260 bp, Zea mays subsp. mays
  misc_feature (1)..(1260): Ceres Seq. ID no. 12368126
agtcaaacaaattgtttactagcctaagtgtaagagcagcacgatggtgcatcaggctcagggacagatggtgcaggaggtggccgccgccggcctccccgcgctgccgagccggtacgtgctgagggaggaggaccgcccaactggtgacgtcgcggcacccgagttggccttccccaccgtggacgtcaatgtcttgccgaccccggtgacgtggaggaggccagcaagctccggtcggcgctcgaatcctggggcctcttcaaggtgaccggccacggcatgccggtatccctgctggacggcatccgggacgccgggctggagttcttccacctgccagcggcggagaagctgaagcacgccaaccgggacgacgccggcgagttccagcccgagggttacggcatcgaccgcgtggacaccgacggtcaggtgctggactggtgcgaccggctgtacctgacggtgcagccggaggaggagcggcggatgcagttctggcccgcgcggccggcgtcgctcgtggggctcctgcacgagtacgccctgggcagcgagcaggtggccaggcgcgtgctccgggccatggcgcgggtgctggggttcggcgaggggttcttcctcgggcacgtgggcgagaagggcggcacgtacgcgcggttcacctactaccctccctgcccgcgcccggacctcgtgtacgggctgaagccccacacggacaactccgtcgtcaccgtgctcctcctcgaccgcgacgtcggcggcctccaggtgctgctcagggggcctggccccggcccggtgggtggacgtgcccgtgctcgcccgcgacgagctgctcgtcgtcgtcggcgaggagatggagatcatgagcaacgcggtgttcagggcgcccacgcaccgcgtggtcaccagcggcagggagaggatgtcgctcgtgctcttctaccagccggagccgcacaaggacctgcagcccgcggaggagctggtgagcgaggaccggcccgcgatttacaggaggctcaaggccaagaccttcggcgacgggttctgggatgcgttcgcgctcggcgagcgcaccatcgacttcctcaacatcaaggtcgacgacaaggagcatggaggcggattagtaacctcagcgccagcttgacgccatgcatgtgaacgaactactgtacacgatgtatcactggtagtgtaatgtaataagagacatggagcggttttccatgcaatataatctagttt

SEQ ID NO: 18986 - protein, 297 aa, Zea mays subsp. mays
  misc_feature (1)..(297): Ceres Seq. ID no. 12368127
MPVSLLDGIRDAGLEFFHLPAAEKLKHANRDDAGEFQPEGYGIDRVDTDGQVLDWCDRLYLTVQPEEERRMQFWPARPASLVGLLHEYALGSEQVARRVLRAMARVLGFGEGFFLGHVGEKGGTYARFTYYPPCPRPDLVYGLKPHTDNSVVTVLLLDRDVGGLQVLLRGPGPGPVGGRARARPRRAARRRRRGDGDHEQRGVQGAHAPRGHQRQGEDVARALLPAGAAQGPAARGGAGERGPARDLQEAQGQDLRRRVLGCVRARRAHHRLPQHQGRRQGAWRRISNLSASLTPCM

SEQ ID NO: 18987 - protein, 227 aa, Zea mays subsp. mays
  misc_feature (1)..(227): Ceres Seq. ID no. 12368128
MQFWPARPASLVGLLHEYALGSEQVARRVLRAMARVLGFGEGFFLGHVGEKGGTYARFTYYPPCPRPDLVYGLKPHTDNSVVTVLLLDRDVGGLQVLLRGPGPGPVGGRARARPRRAARRRRRGDGDHEQRGVQGAHAPRGHQRQGEDVARALLPAGAAQGPAARGGAGERGPARDLQEAQGQDLRRRVLGCVRARRAHHRLPQHQGRRQGAWRRISNLSASLTPCM

SEQ ID NO: 18988 - protein, 195 aa, Zea mays subsp. mays
  misc_feature (1)..(195): Ceres Seq. ID no. 12368129
MARVLGFGEGFFLGHVGEKGGTYARFTYYPPCPRPDLVYGLKPHTDNSVVTVLLLDRDVGGLQVLLRGPGPGPVGGRARARPRRAARRRRRGDGDHEQRGVQGAHAPRGHQRQGEDVARALLPAGAAQGPAARGGAGERGPARDLQEAQGQDLRRRVLGCVRARRAHHRLPQHQGRRQGAWRRISNLSASLTPCM

SEQ ID NO: 18989 - DNA, 1572 bp, Zea mays subsp. mays
  misc_feature (1)..(1572): Ceres Seq. ID no. 12368130
aaaaaccaagaaacagctgaggcggagaggtagctacctgagccaatcggtgtcgcaatggctgcagcgggtatcaccagggcgccgccgatcgggcagaatccgaggctcgcgtgctacgccccgaggaggggcggagggcgtggtgaggtgctcgttgcagggcgcggtcgtcggcggccgggcggagtggcagagcagctgcgccgtgctgtccagcaaggtggccgcgctcggtacgcactccgtcaacggccacgtcgcgccggcgccgactcagaacggggcggtgctggatttggtccccgtgagtagtagtagtatcaatggcgccatcaccaagaacctgccgcagccgcttcgcatcgcggacctgtccccggcaccgatgcacgggtcgcagctgcgcgtggcctaccagggcgtgcccggcgcgtacagcgagaaggcggccgggaaggcgtacccgggctgcgacgccatcccctgcgaccagttcgaggtggcgttccaggccgtggagctgtggatcgcggaccgcgccgtgctccccgtggagaactcgctgggcggcagcatccaccgcaactacgacctgctgctccggcaccggctccacatcgtcggggaggtgcagctccccgtgcaccactgcctgctggcgctgcccggggtgcgcaaggagtgcctgacccgcgtgatcagccacccgcaggcgctggcgcagtgcgagcacacgctcacggccatgggcctcaacgtcgtccgcgaggccttcgacgacacggccggcgccgccgagtacgtggccgccaacggcctccgcgacacggccgccatcgcgtcctcccgcgccgccgagctgtacgggatggaggtgctcgcggacggcatccaggacgactccggcaacgtcacccgcttcgtgatgctggcccgggagcccgtcgtgccgcgcaccgaccgccccttcaagaccagcatcgtgttcgcgcacgacagggagggcacctccgtgctcttcaaggtgctctccgccttcgccttccgcgacatctcgctcaccaagatcgagagcaggccgcaccgccaccgccccatccgcctcgtcgacgacgccaacgtcggcaccgccaagcacttcgagtacatgttctacgtcgacttccaggcgtccctcgcagagccccgcgcgcagaacgcgctggccgaggtccaggagtacacgtccttcctccgggtgctcgggagctaccccatggacatgacccccatgaccgccggctcctcctccaccgttgtttcctcgtccgatgatccctcgtcgtcttgattgccgttggaggctggagctagctccgaggagaagtcgtcgagtagggacgttggttttctgctcatgtcgtcctactcgatcgcccctcgctgcagccggagtagttaattttgagtttcctttaatctttcatggtaatagtattatgtacgtgtaattgttcaaaatcatccgcggtgaatatatctgtgaaacagtactacatgacattcataatttcatattaatcagttttc

SEQ ID NO: 18990 - protein, 443 aa, Zea mays subsp. mays
  misc_feature (1)..(443): Ceres Seq. ID no. 12368131
KTKKQLRRRGSYLSQSVSQWLQRVSPGRRRSGRIRGSRATPRGGAEGVVRCSLQGAVVGGRAEWQSSCAVLSSKVAALGTHSVNGHVAPAPTQNGAVLDLVPVSSSSINGAITKNLPQPLRIADLSPAPMHGSQLRVAYQGVPGAYSEKAAGKAYPGCDAIPCDQFEVAFQAVELWIADRAVLPVENSLGGSIHRNYDLLLRHRLHIVGEVQLPVHHCLLALPGVRKECLTRVISHPQALAQCEHTLTAMGLNVVREAFDDTAGAAEYVAANGLRDTAAIASSRAAELYGMEVLADGIQDDSGNVTRFVMLAREPVVPRTDRPFKTSIVFAHDREGTSVLFKVLSAFAFRDISLTKIESRPHRHRPIRLVDDANVGTAKHFEYMFYVDFQASLAEPRAQNALAEVQEYTSFLRVLGSYPMDMTPMTAGSSSTVVSSSDDPSSS

SEQ ID NO: 18991 - protein, 314 aa, Zea mays subsp. mays
  misc_feature (1)..(314): Ceres Seq. ID no. 12368132
MHGSQLRVAYQGVPGAYSEKAAGKAYPGCDAIPCDQFEVAFQAVELWIADRAVLPVENSLGGSIHRNYDLLLRHRLHIVGEVQLPVHHCLLALPGVRKECLTRVISHPQALAQCEHTLTAMGLNVVREAFDDTAGAAEYVAANGLRDTAAIASSRAAELYGMEVLADGIQDDSGNVTRFVMLAREPVVPRTDRPFKTSIVFAHDREGTSVLFKVLSAFAFRDISLTKIESRPHRHRPIRLVDDANVGTAKHFEYMFYVDFQASLAEPRAQNALAEVQEYTSFLRVLGSYPMDMTPMTAGSSSTVVSSSDDPSSS

SEQ ID NO: 18992 - DNA, 1375 bp, Zea mays subsp. mays
  misc_feature (1)..(1375): Ceres Seq. ID no. 12368133
gcacgagaccattacctagaacatcctaatcgaaaaggatctgcatgctgctccctgcggcgcttaacgtttgtgtgagaagatgaggtttctgtctagctctcttctgcctgcctgcctttctttgtatcccccttgtcagcttcgaaacttctctgctcatgagctatggccagtcctgctgccactgtagatttttttaagtgcggaggaaatctcttccccccccccctccctccctggttattgtgcatacatagctatcctgctgaacgaagcacaaataaatacaaaccaagaaacgccagtgctttctcgatcacgtactggcacgagctagcgagcagactcactcgaacacacactgaccaaccgctcctctctccttccgttccgtcattccgtgtgcagcagacgcggcgttctgcgtgtgcaagacgggcgtgcccgaccaggcgatgcaggcggcgatcgactacgcctgcgccaagggggccgactgcgcctccgcctccaagggcgcgccctgctacggcaacggcaacaaggtggccgtctgctcctacatctgcaacagctactaccagagccgcagcgccacgggcgccacctgcgacttcaacggcgtcgccacgctcaccggcaccgaccccagctccggcacctgcaagttcgcctccggccccagcgcaggcaccggcggtggcatgggcgctggcgcgggtaccggcggtggcatgggcgctggcgctggcaccggcgccgggacaggcgttggcaccggagcaggcacgggcatgggcaccgggacggggaccagcaccggcaccggcgccggcgcaggggtcgcgacccccgggagcgccctgagcccaccgttcggcggcactggcgcgtacggcccgtcaggggcaggcagcacggactacaacgacgccgtcgccccgcgcgccgccgggctgcacgtggtggctgccctcgctctcgccgtcgccgtcgccgcacctctccaccgctaggggcggtgccatggcaactgggagctggcgggcacgacactcgcagacgggatcccgcctcggcggcccgccagcgcgggctctggtcgatgtccggcgttagtgcgtgcgcgtacctgatgaagtgatgatgggttttgatcgaccagccgtcagcgtagtgcggtcacggggtttacagtgttattcgaactgacctctctgcttcctcgtgctagtagtggtggctgccatgtgtgtgtgctgctggtagagaactagggattctttttttttcttctgtcgcttccttgcttatatgtcccgtcgtgttaggctgtgtttactatgcagtgtttttggtggtggccgctttc

SEQ ID NO: 18993 - protein, 233 aa, Zea mays subsp. mays
  misc_feature (1)..(233): Ceres Seq. ID no. 12368134
MASPAATVDFFKCGGNLFPPPLPPWLLCIHSYPAERSTNKYKPRNASAFSITYWHELASRLTRTHTDQPLLSPSVPSFRVQQTRRSACARRACPTRRCRRRSTTPAPRGPTAPPPPRARPATATATRWPSAPTSATATTRAAAPRAPPATSTASPRSPAPTPAPAPASSPPAPAQAPAVAWALARVPAVAWALALAPAPGQALAPEQARAWAPGRGPAPAPAPAQGSRPPGAP

SEQ ID NO: 18994 - protein, 186 aa, Zea mays subsp. mays
  misc_feature (1)..(186): Ceres Seq. ID no. 12368135
MQAAIDYACAKGADCASASKGAPCYGNGNKVAVCSYICNSYYQSRSATGATCDFNGVATLTGTDPSSGTCKFASGPSAGTGGGMGAGAGTGGGMGAGAGTGAGTGVGTGAGTGMGTGTGTSTGTGAGAGVATPGSALSPPFGGTGAYGPSGAGSTDYNDAVAPRAAGLHVVAALALAVAVAAPLHR

SEQ ID NO: 18995 - DNA, 1364 bp, Zea mays subsp. mays
  misc_feature (1)..(1364): Ceres Seq. ID no. 12368136
atcctttgggaattaatagtaagtgtttgggacttgggagagggagaggcgtcatgtacctgaacccaagaatcgtaggctctggggagaggacactggttctctcccatggctatggaggcagccaggctatctgggacaaggtgctgccgcacctctcacggacgaacaaggtactactcttcgactgggacttctcgagtaccgccgccggagaggaggaggaggacgcggagcacagctgctacacgttctcgaggttcgccgaagagctggtggcgctcatggacaagatgaagctgagcggcgccgtgtacgtggggcactccatggccggcatggtcggctgcattgcgtccatcacgcgccccgacctcttcacccacctcgtcctcgtcggcgcatccccgaggtacatgaactcggaggactacgagggcgggttcgacgagcccgacatcaaggcgatgctgtcgaggatctcgtcggacttccgcggctgggccgagggcttcgtgccgctcgccatcggcggcagcgcggacgaccaaccctcggcggtggagctgctggcgcggagcttcttcgccatggacccgcgcgtggcgcacggcctggcgcgcatgatcttcctgggcgaccagcgcgagctgctgggtgacgtggccgtgccgtgcacgctggtgcacgtctccggcgacttcgcggcgcccccctgcgtcgggcgctacatgcaggcccgcatgcgcaccgcctccatgtataccatcgactcggtgggacacttcccgcagctcgtcacgcccgacgagatgctcaggatactcgaccgcattctcgtcggctccgctgcttcccaagaggaggagactaccgcggcggcggcggctgccgccaagaccgagacgacgagtagcgaggtcgtatcctctggtggtgttgccgatgcgctggagtccaagggccgtatcgacgtggcgacatagtgctcctgctgctctggtgcaacatccctctcgaagtctcgatctatcagccttggctggctcttgtgctggtctcagttgatttgcttcggtccacactccacacgtttaacttacattattgcgcttttggattttctaatgcgtagaaacattaccatggttcgttcggaatttttagccatcacgtcacccaaactgcgtgtattattggtttgatcatggattgaattaaatgaaacactgagtgttaaagcattgtaaatgacatgcatggtttgcagccttgcaggattctagcttcctagaattatttatttttttggaaaatatttcatggattgaattaaatgaaacacttgagtgttaaagcattgt

SEQ ID NO: 18996 - protein, 327 aa, Zea mays subsp. mays
  misc_feature (1)..(327): Ceres Seq. ID no. 12368137
PLGINSKCLGLGRGRGVMYLNPRIVGSGERTLVLSHGYGGSQAIWDKVLPHLSRTNKVLLFDWDFSSTAAGEEEEDAEHSCYTFSRFAEELVALMDKMKLSGAVYVGHSMAGMVGCIASITRPDLFTHLVLVGASPRYMNSEDYEGGFDEPDIKAMLSRISSDFRGWAEGFVPLAIGGSADDQPSAVELLARSFFAMDPRVAHGLARMIFLGDQRELLGDVAVPCTLVHVSGDFAAPPCVGRYMQARMRTASMYTIDSVGHFPQLVTPDEMLRILDRILVGSAASQEEETTAAAAAAAKTETTSSEVVSSGGVADALESKGRIDVAT

SEQ ID NO: 18997 - protein, 310 aa, Zea mays subsp. mays
  misc_feature (1)..(310): Ceres Seq. ID no. 12368138
MYLNPRIVGSGERTLVLSHGYGGSQAIWDKVLPHLSRTNKVLLFDWDFSSTAAGEEEEDAEHSCYTFSRFAEELVALMDKMKLSGAVYVGHSMAGMVGCIASITRPDLFTHLVLVGASPRYMNSEDYEGGFDEPDIKAMLSRISSDFRGWAEGFVPLAIGGSADDQPSAVELLARSFFAMDPRVAHGLARMIFLGDQRELLGDVAVPCTLVHVSGDFAAPPCVGRYMQARMRTASMYTIDSVGHFPQLVTPDEMLRILDRILVGSAASQEEETTAAAAAAAKTETTSSEVVSSGGVADALESKGRIDVAT

SEQ ID NO: 18998 - protein, 233 aa, Zea mays subsp. mays
  misc_feature (1)..(233): Ceres Seq. ID no. 12368139
MDKMKLSGAVYVGHSMAGMVGCIASITRPDLFTHLVLVGASPRYMNSEDYEGGFDEPDIKAMLSRISSDFRGWAEGFVPLAIGGSADDQPSAVELLARSFFAMDPRVAHGLARMIFLGDQRELLGDVAVPCTLVHVSGDFAAPPCVGRYMQARMRTASMYTIDSVGHFPQLVTPDEMLRILDRILVGSAASQEEETTAAAAAAAKTETTSSEVVSSGGVADALESKGRIDVAT

SEQ ID NO: 18999 - DNA, 1429 bp, Zea mays subsp. mays
  misc_feature (1)..(1429): Ceres Seq. ID no. 12368140
acaaggagtcgctggagttaggaggtgcagttatagcagacgcagagcaatggaggccgccgaggctcctaactatgacagtattgtcaacagggatgagatcaccgacgctgcagctgcagcgttcgccaacccggagcaggtcccggagaagtacgtccggacggaggaggtccttgacggcgtcgtcgtcggcgcggacgagagctacgagctgccggtcgtcgacatggccaggctcctcgacccggagctggcgccgtcggaggtcgccaagctcggcgacgcctgccgaaactggggtttctttcaggtcgtcccgtggcccgcccggattccttcagttctaaacttctagtagccagctgctagtatctgtttagaatcgattaattaatcacatttgtcccgtctgcatgcatgtctacagctgacaaaccatggagtggacgaagcggtggtgcagcggatgaaagacgccacggtgcagttcttcagctccccgctggacagcaaggccaaggtggcggtccgagggaacggcttcgaaggattcgggcaccactacagcagagcgtccagcggcaagctggactgggcagagagcatgattctcatcacgcagccagtcaaggacaggaacatggagatgtggcctacaaatccacccacgttcaggtctgcagtacgcatatcctggcctctctctgtctctactagtcaatcatctgacacgtacgtacgtctcccatgcacgcacgcacgcacggactctgtttgttaatcagggacgcgctcgacgtctactcggtagagatgatcggcctcgcaatgcggctcctggggttcatggcggccgacctcggggtggagccggaggcgctgcaggacgccttcacggggaagcggcagagcatggcggtccaccactacccgccctgccgccagcgggagaaggtgatgggcatcacgccgcacacggacgggctgggcctcacgctgctgctgcacgtggacgacacgcccggcctgcagatccgcaggggcggcaggtggttccccgtgcgcccgctgccgggcgccttcgtcgtcaacgtcgccgacatcctggacgtgctcaccaacggcgcctacgccagcgtcgagcaccgagtgctcccggacgccgagagggctcggaccaccgtcgtcgtgttccaggaggcgtccgtcgggggcctggtggcgccgctgccggggctcctcgaccagcagggcgcgcgcgcgcgctacaggtccattgagatcgaggagtacatcaagggcaacttcaacgcgctggagcaagggacacggttcatccagagcctcaggatatagctatctagttgctccttccatcaaaaaataattacccaacatatcgataaatcaatcaatctcaatcttc

SEQ ID NO: 19000 - protein, 202 aa, Zea mays subsp. mays
  misc_feature (1)..(202): Ceres Seq. ID no. 12368141
MHARTHGLCLLIRDALDVYSVEMIGLAMRLLGFMAADLGVEPEALQDAFTGKRQSMAVHHYPPCRQREKVMGITPHTDGLGLTLLLHVDDTPGLQIRRGGRWFPVRPLPGAFVVNVADILDVLTNGAYASVEHRVLPDAERARTTVVVFQEASVGGLVAPLPGLLDQQGARARYRSIEIEEYIKGNFNALEQGTRFIQSLRI

SEQ ID NO: 19001 - protein, 180 aa, Zea mays subsp. mays
  misc_feature (1)..(180): Ceres Seq. ID no. 12368142
MIGLAMRLLGFMAADLGVEPEALQDAFTGKRQSMAVHHYPPCRQREKVMGITPHTDGLGLTLLLHVDDTPGLQIRRGGRWFPVRPLPGAFVVNVADILDVLTNGAYASVEHRVLPDAERARTTVVVFQEASVGGLVAPLPGLLDQQGARARYRSIEIEEYIKGNFNALEQGTRFIQSLRI

SEQ ID NO: 19002 - protein, 175 aa, Zea mays subsp. mays
  misc_feature (1)..(175): Ceres Seq. ID no. 12368143
MRLLGFMAADLGVEPEALQDAFTGKRQSMAVHHYPPCRQREKVMGITPHTDGLGLTLLLHVDDTPGLQIRRGGRWFPVRPLPGAFVVNVADILDVLTNGAYASVEHRVLPDAERARTTVVVFQEASVGGLVAPLPGLLDQQGARARYRSIEIEEYIKGNFNALEQGTRFIQSLRI

SEQ ID NO: 19003 - DNA, 1292 bp, Zea mays subsp. mays
  misc_feature (1)..(1292): Ceres Seq. ID no. 12368161
acccgataagtagcaggggcagggagaacgaagacgacgacgacgtacgccggccgtaagtgagccgagagcccccgatataccagctagctagataaccagccagcgcgagcatggaggcggcggcggcggcggtccggcaccggacggtggaggcgaacggcatctcgatgcacgtggcggagtccggccccgacggcggcgacggcgcgcccgcggtggtgttcctgcacggcttcccggagctctggtactcgtggcgccaccagatggcgcacctggccgcgcggggctaccgctgcgtggcgccggacctccgcggctacggcggcaccgccgcgccgcccgacgtcgcgtcctactccgccttccacgtcgtcggcgacgtcgtcgccctgctcgacgcgatcggcatccacaacaaggtgttcgtggtgggtcacgactggggcgccatcatcgcgtggtacctctgcctgttccggccggaccgggtggcggcgcttgtcaacaccagcgtcgccttcatgcgccacatcttcgtccgcgccgccgccgccgccgtcacgcccatcgactacttccaccgcacctacgggcccacctactacatctgccgcttccaggagcctggtgtcgcagagaaggagttctcgccggccaacgccgggtacctgatgaagcggatcctgtgcaaccgcttcacctcctcggcggccggcgacgacaagccgccggcggcggacgccgccgaggaggagccgctgccgccgtggctgacggaggaggacgtgagccacttcgcgtcggagttcgagcggacaggcttcacggggcccatcaactactaccgcaacatggaccgcaactgggagctggcggcgccgtgggcggacgccaaggtgcgggtgcccaccaggttcatcgtcggcgacggcgacctcacctaccactacccgggcatccaggactacatccacaagggcgggttcgaggccgacgtcccggggctcgagagcgtcgtcgtcatccccggcgccggccacttcgtccagcaggagaaggccgacgaggtcagccagcacatctacgacttcatctccaagttctgatacatgtgcagcttgcttgcttacctgctaaaacctgtaatctcaacctcgatatccgtgctgccaacttgttttgtttgacgaactaagagtaataagtgttcgcatatatatatgtttggtttaatttgtgacttggacatggtatgttcgatgtgaaatggataaaccgtgcgtttc

SEQ ID NO: 19004 - protein, 332 aa, Zea mays subsp. mays
  misc_feature (1)..(332): Ceres Seq. ID no. 12368162
MEAAAAAVRHRTVEANGISMHVAESGPDGGDGAPAVVFLHGFPELWYSWRHQMAHLAARGYRCVAPDLRGYGGTAAPPDVASYSAFHVVGDVVALLDAIGIHNKVFVVGHDWGAIIAWYLCLFRPDRVAALVNTSVAFMRHIFVRAAAAAVTPIDYFHRTYGPTYYICRFQEPGVAEKEFSPANAGYLMKRILCNRFTSSAAGDDKPPAADAAEEEPLPPWLTEEDVSHFASEFERTGFTGPINYYRNMDRNWELAAPWADAKVRVPTRFIVGDGDLTYHYPGIQDYIHKGGFEADVPGLESVVVIPGAGHFVQQEKADEVSQHIYDFISKF

SEQ ID NO: 19005 - protein, 313 aa, Zea mays subsp. mays
  misc_feature (1)..(313): Ceres Seq. ID no. 12368163
MHVAESGPDGGDGAPAVVFLHGFPELWYSWRHQMAHLAARGYRCVAPDLRGYGGTAAPPDVASYSAFHVVGDVVALLDAIGIHNKVFVVGHDWGAIIAWYLCLFRPDRVAALVNTSVAFMRHIFVRAAAAAVTPIDYFHRTYGPTYYICRFQEPGVAEKEFSPANAGYLMKRILCNRFTSSAAGDDKPPAADAAEEEPLPPWLTEEDVSHFASEFERTGFTGPINYYRNMDRNWELAAPWADAKVRVPTRFIVGDGDLTYHYPGIQDYIHKGGFEADVPGLESVVVIPGAGHFVQQEKADEVSQHIYDFISKF

SEQ ID NO: 19006 - protein, 280 aa, Zea mays subsp. mays
  misc_feature (1)..(280): Ceres Seq. ID no. 12368164
MAHLAARGYRCVAPDLRGYGGTAAPPDVASYSAFHVVGDVVALLDAIGIHNKVFVVGHDWGAIIAWYLCLFRPDRVAALVNTSVAFMRHIFVRAAAAAVTPIDYFHRTYGPTYYICRFQEPGVAEKEFSPANAGYLMKRILCNRFTSSAAGDDKPPAADAAEEEPLPPWLTEEDVSHFASEFERTGFTGPINYYRNMDRNWELAAPWADAKVRVPTRFIVGDGDLTYHYPGIQDYIHKGGFEADVPGLESVVVIPGAGHFVQQEKADEVSQHIYDFISKF

SEQ ID NO: 19007 - DNA, 1384 bp, Zea mays subsp. mays
  misc_feature (1)..(1384): Ceres Seq. ID no. 12368172
attacatccgagggcactccatctcttgcgtcccttaacccctccaccaatccaatccaatcccttaaccccgcaccgaatccagccttcgaagcttcctcttcctcccggccccggtcccggtcccggtcccggagccctgttcttggtacttaggacaagacgctccgagaccctcgagattgagagctcgctcgctcgctcggtgtcttcgccagctgcccaccctccttcctgctcgtccccccgctcgcgcctcctcttcctcggactgatgggcgaccatctcgcgttgatcgtggaccggctgctgacagagtcgacgctggaggcggcgatcggcggtgggaagcacatggtcgatctgcgtcaggagacggtggacgtcgagtactgccatcgcgggctaggcggcggctcggcgacgaaggtggtggagtgcaggatttgccaggaggaggactgggacacctgcatggaggccccctgcgcctgttgtggcagcctcaagtatgcgcatcggaaatgcattcagcgctggtgcaatgagaaaggcgacactatgtgtgaaatatgcctgcagcaattcaggccaggttatacttctccacaacagctgtttcactatggaagtataccaatgaatttcagagggaactgggagattgccaggcaagatctcaatgattcccagataataacaatgatgcccacggagcgtgattttatggacaattacgatgactactttcctatcaggacaagaagcagcaccttgtgttgccggacaattgccataattttcatgtcactcctggtccttcgccacactcttcctcttgtgattggtgacaatggggagtactcattggccttattctcgcttctggtgctgagaactgcgggaatcctctttccaatcctggtgatggtgagagcattggcaagcttccatcatcgacggcggcagcaggaaagccaggaagcatatatatcttcatcagagagcgaggaggaagaggaagagtatacagttgccaattctgcacaaacaaactactcgcaaccgcgcttcataccagtctactgacatggccaagaacaagccttccaacctcacatctgacagggaattccagcgcctgagtttagctgacagatgcaaggatgaatggatgatcacaaggggggaaattacaaaattgtgaatgtggtgacatagtaagatagcctgaagccactcgcttctatgcccatagagaagaatgtagtggccctgctacttgtacataggagagagtacagcagcagagtgctgacaaacccggatactgtgactcgagtctctactgcagtaacccttgtgcactgctctccccgtccc

SEQ ID NO: 19008 - protein, 362 aa, Zea mays subsp. mays
  misc_feature (1)..(362): Ceres Seq. ID no. 12368173
LHPRALHLLRPLTPPPIQSNPLTPHRIQPSKLPLPPGPGPGPGPGALFLVLRTRRSETLEIESSLARSVSSPAAHPPSCSSPRSRLLFLGLMGDHLALIVDRLLTESTLEAAIGGGKHMVDLRQETVDVEYCHRGLGGGSATKVVECRICQEEDWDTCMEAPCACCGSLKYAHRKCIQRWCNEKGDTMCEICLQQFRPGYTSPQQLFHYGSIPMNFRGNWEIARQDLNDSQIITMMPTERDFMDNYDDYFPIRTRSSTLCCRTIAIIFMSLLVLRHTLPLVIGDNGEYSLALFSLLVLRTAGILFPILVMVRALASFHHRRRQQESQEAYISSSESEEEEEEYTVANSAQTNYSQPRFIPVY

SEQ ID NO: 19009 - protein, 271 aa, Zea mays subsp. mays
  misc_feature (1)..(271): Ceres Seq. ID no. 12368174
MGDHLALIVDRLLTESTLEAAIGGGKHMVDLRQETVDVEYCHRGLGGGSATKVVECRICQEEDWDTCMEAPCACCGSLKYAHRKCIQRWCNEKGDTMCEICLQQFRPGYTSPQQLFHYGSIPMNFRGNWEIARQDLNDSQIITMMPTERDFMDNYDDYFPIRTRSSTLCCRTIAIIFMSLLVLRHTLPLVIGDNGEYSLALFSLLVLRTAGILFPILVMVRALASFHHRRRQQESQEAYISSSESEEEEEEYTVANSAQTNYSQPRFIPVY

SEQ ID NO: 19010 - protein, 244 aa, Zea mays subsp. mays
  misc_feature (1)..(244): Ceres Seq. ID no. 12368175
MVDLRQETVDVEYCHRGLGGGSATKVVECRICQEEDWDTCMEAPCACCGSLKYAHRKCIQRWCNEKGDTMCEICLQQFRPGYTSPQQLFHYGSIPMNFRGNWEIARQDLNDSQIITMMPTERDFMDNYDDYFPIRTRSSTLCCRTIAIIFMSLLVLRHTLPLVIGDNGEYSLALFSLLVLRTAGILFPILVMVRALASFHHRRRQQESQEAYISSSESEEEEEEYTVANSAQTNYSQPRFIPVY

SEQ ID NO: 19011 - DNA, 1125 bp, Zea mays subsp. mays
  misc_feature (1)..(1125): Ceres Seq. ID no. 12368184
cacatagaccaccacgacacccttccccacaccagcagtcgagctgagcacgacacaaagccggctggggccgcctcgccatggcgatccggatgagcaacaacgtgatcggcgcgctgaacctggtgacactcctgctctcggtccccatcctcgtctcgggaatctggctgcggtcgcgcgccgacggcaccgagtgcgaccacctcctgtccaccccggccatcgcgctgggcgcggtgctcatggccgtcgctgtcgcgggtctcgccggcgcctgcttccgcgccacctggctgctatggctctacctcctcgccatgctcgtgttcatcgtcgcgctgctctgcttcaccgtcttcgccttcgccgtcaccaacaggggcgccggggaggccgtgtcgggggtaggctacagggagtaccgcctcggggactactccacctggctgcggcgccacgtcgaaagccgcaaggactgggcccggatccggagctgcctcgccgacgcgcacgtctgcaggcgcctggaggagagggagagggagagcaaggacgcggcgggtctggttcggctcggcctgtccccggtcgagtccgggtgctgcaanccgcccacgagntgcaacttcacgtacaccgncggcacggagtggaccaggacagcggcgggctccgcgcccgccggccgggactgcagcgcgtggggcaacgacgaggacgacctctgctacgggtgccagtcgtgcaaggccggcgtggtggacgcgctcaagcgggactggaagcgggccgccatcgtcaacgtcgtcatcctctccttcatcgtcgtcgtttactccgtcggctgctgcgccttcaagaacagccgccgggacaactacgcctaccacagcggccgcggatggaaacgaggcggtgacgcttaaatgcttaatcaaacttttccttatcatctgcgttagtgcaatttaccattatcttgtatattagcctgagttcgtgatctgctttagttcagtttaccattagcttgtatattattagcctcagtttgtatcacttagttgtttggcagcatattagcagaatttcgggcagtatatgagcagaatttcgctgccc

SEQ ID NO: 19012 - protein, 282 aa, Zea mays subsp. mays
  misc_feature (1)..(282): Ceres Seq. ID no. 12368185
  misc_feature (177)..(177): Xaa is any aa, unknown or other
  misc_feature (181)..(181): Xaa is any aa, unknown or other
  misc_feature (188)..(188): Xaa is any aa, unknown or other
MAIRMSNNVIGALNLVTLLLSVPILVSGIWLRSRADGTECDHLLSTPAIALGAVLMAVAVAGLAGACFRATWLLWLYLLAMLVFIVALLCFTVFAFAVTNRGAGEAVSGVGYREYRLGDYSTWLRRHVESRKDWARIRSCLADAHVCRRLEERERESKDAAGLVRLGLSPVESGCCXPPTXCNFTYTXGTEWTRTAAGSAPAGRDCSAWGNDEDDLCYGCQSCKAGVVDALKRDWKRAAIVNVVILSFIVVVYSVGCCAFKNSRRDNYAYHSGRGWKRGGDA

SEQ ID NO: 19013 - protein, 278 aa, Zea mays subsp. mays
  misc_feature (1)..(278): Ceres Seq. ID no. 12368186
  misc_feature (173)..(173): Xaa is any aa, unknown or other
  misc_feature (177)..(177): Xaa is any aa, unknown or other
  misc_feature (184)..(184): Xaa is any aa, unknown or other
MSNNVIGALNLVTLLLSVPILVSGIWLRSRADGTECDHLLSTPAIALGAVLMAVAVAGLAGACFRATWLLWLYLLAMLVFIVALLCFTVFAFAVTNRGAGEAVSGVGYREYRLGDYSTWLRRHVESRKDWARIRSCLADAHVCRRLEERERESKDAAGLVRLGLSPVESGCCXPPTXCNFTYTXGTEWTRTAAGSAPAGRDCSAWGNDEDDLCYGCQSCKAGVVDALKRDWKRAAIVNVVILSFIVVVYSVGCCAFKNSRRDNYAYHSGRGWKRGGDA

SEQ ID NO: 19014 - protein, 227 aa, Zea mays subsp. mays
  misc_feature (1)..(227): Ceres Seq. ID no. 12368187
  misc_feature (122)..(122): Xaa is any aa, unknown or other
  misc_feature (126)..(126): Xaa is any aa, unknown or other
  misc_feature (133)..(133): Xaa is any aa, unknown or other
MAVAVAGLAGACFRATWLLWLYLLAMLVFIVALLCFTVFAFAVTNRGAGEAVSGVGYREYRLGDYSTWLRRHVESRKDWARIRSCLADAHVCRRLEERERESKDAAGLVRLGLSPVESGCCXPPTXCNFTYTXGTEWTRTAAGSAPAGRDCSAWGNDEDDLCYGCQSCKAGVVDALKRDWKRAAIVNVVILSFIVVVYSVGCCAFKNSRRDNYAYHSGRGWKRGGDA

SEQ ID NO: 19015 - DNA, 1753 bp, Zea mays subsp. mays
  misc_feature (1)..(1753): Ceres Seq. ID no. 12368205
gacaacctaaaagcagaaagtataactgtataagtaatgccatcagctccgtacttgacgtagaattccaatggaaatggaactagaccctttcctgggcgtcgtgctcgccaccgccgtcctcctcgtcgccgtcctccgccggaagcgcggctccagccgcaagtacaagatgccatccgggcctaggccgtggccggtgatcggcaacctcaacctgatcggcgcgctcccgcaccgctccatccacgcgctctccgcgcggcacggcgcgttcatgtcgctccgcttcggctccgtccccgtcgtcgtcggctcctccgtggaagcggccaggttcttcctcaggaccagcgacacgtcgttcatcgaccgccccaggatggcggccgggaagtacaccgcctacgactactccgacatcgtctggtcgccctgcggggcgtactggcgccaggcgcgcaagctctggaaggcccatctgttcagcgacaggcagctcaggtcgcaggagcacgtccgcagcgaggagctgcgcgtcctgctgcgcgccctgtcgtcgtcgtcctccgcgggcgcggccgggcgcggccggcgggccgtcgcgctcaaggagcacctgctcatgtacagcctcaacgtgatctcgcgcatggcgctgggcgggaagtacgtcggcgagggcggcaccgcgggctcgccgatctcgccggccgagttcagctggatggtcgacgagctcttcctcctcaacggcgtgttctgcgtcggggacttcatcccgtggctcggctggctggacctccagggctacgtcgggaggatgaagaggctgggcaagatgttcgatcgcttcctggagcacgtggtggacgagcacgaccagcggcggcggcgggagggcggcgggttcgtccccgcggacatggtggacctgctgctggagctcgccgacgaccccaaactcgaggtccccatcgaacgggatggcgtcaagggattcgcgctggacctgatcgctggcggcacggactccacggcggtgaccatcgagtgggccatgtcggagctcctgcggaagcccgaggtcctcgccaaggtcaccgaggagctggacggcgtcatcggccacggccgcctggtcaccgagcaggacatcccggacctgccgtacctggaggccgtcgtgaaggagaccctccgcctgcacccggtgacgccgctgctggcgccgcggctgtgccgcgaggacgcgtccacgggcagctacgacatcccgcggggcacgctcgtgttcgtcaacgtctgggccatcggccgcgaccccgccgtgtggggccacgacgcggaggagttccgcccggagaggttcgtcggcagcgccgtggacgtgaagggccacgacctggagctgctcccgttcgggtccggccgccggatgtgcccgggctacgtcctcgggctcaagatggtgcaggtcaccctggccaacctgctgcacgccttctcgtggaggctgcctgatagcgtggcgccggagaagctgaacatgcaggagaagttcgggctcgccgtgccgcgcttggtcccgctcgaggccgtcgccgtgcccaggctgccaccacacctgtatgccgggccatgatgcatgtctatgtttgtttttgtaggcgcatacaactgtctcgtaataaaagatacatatcttttctctgtacatatacacctaataaagagacaaacaatatcgtcg

SEQ ID NO: 19016 - protein, 524 aa, Zea mays subsp. mays
  misc_feature (1)..(524): Ceres Seq. ID no. 12368206
MEMELDPFLGVVLATAVLLVAVLRRKRGSSRKYKMPSGPRPWPVIGNLNLIGALPHRSIHALSARHGAFMSLRFGSVPVVVGSSVEAARFFLRTSDTSFIDRPRMAAGKYTAYDYSDIVWSPCGAYWRQARKLWKAHLFSDRQLRSQEHVRSEELRVLLRALSSSSSAGAAGRGRRAVALKEHLLMYSLNVISRMALGGKYVGEGGTAGSPISPAEFSWMVDELFLLNGVFCVGDFIPWLGWLDLQGYVGRMKRLGKMFDRFLEHVVDEHDQRRRREGGGFVPADMVDLLLELADDPKLEVPIERDGVKGFALDLIAGGTDSTAVTIEWAMSELLRKPEVLAKVTEELDGVIGHGRLVTEQDIPDLPYLEAVVKETLRLHPVTPLLAPRLCREDASTGSYDIPRGTLVFVNVWAIGRDPAVWGHDAEEFRPERFVGSAVDVKGHDLELLPFGSGRRMCPGYVLGLKMVQVTLANLLHAFSWRLPDSVAPEKLNMQEKFGLAVPRLVPLEAVAVPRLPPHLYAGP

SEQ ID NO: 19017 - protein, 522 aa, Zea mays subsp. mays
  misc_feature (1)..(522): Ceres Seq. ID no. 12368207
MELDPFLGVVLATAVLLVAVLRRKRGSSRKYKMPSGPRPWPVIGNLNLIGALPHRSIHALSARHGAFMSLRFGSVPVVVGSSVEAARFFLRTSDTSFIDRPRMAAGKYTAYDYSDIVWSPCGAYWRQARKLWKAHLFSDRQLRSQEHVRSEELRVLLRALSSSSSAGAAGRGRRAVALKEHLLMYSLNVISRMALGGKYVGEGGTAGSPISPAEFSWMVDELFLLNGVFCVGDFIPWLGWLDLQGYVGRMKRLGKMFDRFLEHVVDEHDQRRRREGGGFVPADMVDLLLELADDPKLEVPIERDGVKGFALDLIAGGTDSTAVTIEWAMSELLRKPEVLAKVTEELDGVIGHGRLVTEQDIPDLPYLEAVVKETLRLHPVTPLLAPRLCREDASTGSYDIPRGTLVFVNVWAIGRDPAVWGHDAEEFRPERFVGSAVDVKGHDLELLPFGSGRRMCPGYVLGLKMVQVTLANLLHAFSWRLPDSVAPEKLNMQEKFGLAVPRLVPLEAVAVPRLPPHLYAGP

SEQ ID NO: 19018 - protein, 490 aa, Zea mays subsp. mays
  misc_feature (1)..(490): Ceres Seq. ID no. 12368208
MPSGPRPWPVIGNLNLIGALPHRSIHALSARHGAFMSLRFGSVPVVVGSSVEAARFFLRTSDTSFIDRPRMAAGKYTAYDYSDIVWSPCGAYWRQARKLWKAHLFSDRQLRSQEHVRSEELRVLLRALSSSSSAGAAGRGRRAVALKEHLLMYSLNVISRMALGGKYVGEGGTAGSPISPAEFSWMVDELFLLNGVFCVGDFIPWLGWLDLQGYVGRMKRLGKMFDRFLEHVVDEHDQRRRREGGGFVPADMVDLLLELADDPKLEVPIERDGVKGFALDLIAGGTDSTAVTIEWAMSELLRKPEVLAKVTEELDGVIGHGRLVTEQDIPDLPYLEAVVKETLRLHPVTPLLAPRLCREDASTGSYDIPRGTLVFVNVWAIGRDPAVWGHDAEEFRPERFVGSAVDVKGHDLELLPFGSGRRMCPGYVLGLKMVQVTLANLLHAFSWRLPDSVAPEKLNMQEKFGLAVPRLVPLEAVAVPRLPPHLYAGP

SEQ ID NO: 19019 - DNA, 2036 bp, Zea mays subsp. mays
  misc_feature (1)..(2036): Ceres Seq. ID no. 12368221
gcacgagaccattacctagaacatcctaatcgaaaaaattatgatccttcttttcgtttgttcttatgccattgtttggccacaagcggtggggtatcgatctgaaatagttggacggcatccctgattccaccctgatcgatcccatggatgcccaagacgacgatgagaggccgctgatcatccatcgcctgccactactccaggatgaaagtacttccggattcactagcgacgggacggttgatcttcgcaatcagcctgcccggaagcagagaactgggaactggagagcatgcttcttcatcttaggtgccgagttcgctgaatgtgtggccttcttcgcgatctcaaagaacctggtgacgtacctcacgggcgttctgcacgagagcaacgttgacgccgcgacgactgtgtccacctggatcgggacctcgttcttcacggccgctcgtcggcgcgttcttggccgacacattctgggggcgatactggacgatactggccttcctctccgtgtacgtcacggggatgacggtcctgactgcttcagctcttctcccgctgctcatgggcgcgtcctacagccgtagcgcccaccgcctctccgcgtacctgggcctctacctcgccgctctcggcaccggcggaatcaagccgtgcgtctgcgcgctcggtgccgaccagttcgacgcgtctgaccccgtggagcggcgggccaagggctccttcttcaactggtactacttctccatcaacatcggctccctgctgtccgcgacggtggtcgtctgggtgcaggacaacgttgggtggggagtcgggttcgcgatcccgaccctgctcatgctgtcgggactcgtgctgttcgtcgccggtaggaaggtttacaggtaccagagagtgggagggagccctctgacaagagcctcgcaggtggtggttgctgctgtcaggaactaccgtttggtgctgcctgagcctgacgacagctcggcggccctgctgcatcaggcgcctcccggaaccacggaaggaaattattccacgatgcagcatacgagtcaattcaggttccttgacaaggctgccattgtagcggcatcctccggcgagaaaggagcgacggcaagcccatggcggctctgcacggtctcccaggtcgaggagctgaagacggtgctgcggatgttccccgtgtgggtgtcgatggtgctcttcttcgcggccaccgcgcagatgtcgtccaccttcatcgagcaaggcgagaccatagacaaccgcgtggggccgttcaccgtgccgccggcgtccctctccaccttcgacgtcatcagcgtcatggtctgcatacccatctacgacaaagcgctggtgccgctggcccggcgcgccacgggcaaggaacggggcctgtcgcagctgcagcggctgggcgtcggcctcgcgctgtccgtggccggcatggtgtacgcggcgctgctcgaggccaggcggctgtcgctcgcccgcgcagcggcgggcgggcggccgccgatgtccatcatgtggcaggcgccggcgttcgcggtgctcggcgcgggggaggtgttcgcgaccatcggcatcctcgagttcttctacgaccagtcgcccgacggcatgaagagcctcggcacggcccttgcgcagctcgccgtcgcggcaggcaactacttcaactctgccgtgctcgccgccgtcgccgccgtcaccacgcgcaacggggaggcaggatggatccccgacgacctggacaagggccacctcgactatttcttctggttcatggctgttctcggcgtggtgaacctgctgcacttcctgcattgctccgtcaggtacagaggcagcagcaacaacagcacatactcttcttgagtcttcacacgatctgtgccaagtatatgacaaaatgtcaacaaagagagatgtgcatcgaatttgttcacgaggcacagcaggatgcccgcattctccatttggcgtctccacaataataatgtgtccctgtg

SEQ ID NO: 19020 - protein, 455 aa, Zea mays subsp. mays
  misc_feature (1)..(455): Ceres Seq. ID no. 12368222
MTVLTASALLPLLMGASYSRSAHRLSAYLGLYLAALGTGGIKPCVCALGADQFDASDPVERRAKGSFFNWYYFSINIGSLLSATVVVWVQDNVGWGVGFAIPTLLMLSGLVLFVAGRKVYRYQRVGGSPLTRASQVVVAAVRNYRLVLPEPDDSSAALLHQAPPGTTEGNYSTMQHTSQFRFLDKAAIVAASSGEKGATASPWRLCTVSQVEELKTVLRMFPVWVSMVLFFAATAQMSSTFIEQGETIDNRVGPFTVPPASLSTFDVISVMVCIPIYDKALVPLARRATGKERGLSQLQRLGVGLALSVAGMVYAALLEARRLSLARAAAGGRPPMSIMWQAPAFAVLGAGEVFATIGILEFFYDQSPDGMKSLGTALAQLAVAAGNYFNSAVLAAVAAVTTRNGEAGWIPDDLDKGHLDYFFWFMAVLGVVNLLHFLHCSVRYRGSSNNSTYSS

SEQ ID NO: 19021 - protein, 442 aa, Zea mays subsp. mays
  misc_feature (1)..(442): Ceres Seq. ID no. 12368223
MGASYSRSAHRLSAYLGLYLAALGTGGIKPCVCALGADQFDASDPVERRAKGSFFNWYYFSINIGSLLSATVVVWVQDNVGWGVGFAIPTLLMLSGLVLFVAGRKVYRYQRVGGSPLTRASQVVVAAVRNYRLVLPEPDDSSAALLHQAPPGTTEGNYSTMQHTSQFRFLDKAAIVAASSGEKGATASPWRLCTVSQVEELKTVLRMFPVWVSMVLFFAATAQMSSTFIEQGETIDNRVGPFTVPPASLSTFDVISVMVCIPIYDKALVPLARRATGKERGLSQLQRLGVGLALSVAGMVYAALLEARRLSLARAAAGGRPPMSIMWQAPAFAVLGAGEVFATIGILEFFYDQSPDGMKSLGTALAQLAVAAGNYFNSAVLAAVAAVTTRNGEAGWIPDDLDKGHLDYFFWFMAVLGVVNLLHFLHCSVRYRGSSNNSTYSS

SEQ ID NO: 19022 - protein, 350 aa, Zea mays subsp. mays
  misc_feature (1)..(350): Ceres Seq. ID no. 12368224
MLSGLVLFVAGRKVYRYQRVGGSPLTRASQVVVAAVRNYRLVLPEPDDSSAALLHQAPPGTTEGNYSTMQHTSQFRFLDKAAIVAASSGEKGATASPWRLCTVSQVEELKTVLRMFPVWVSMVLFFAATAQMSSTFIEQGETIDNRVGPFTVPPASLSTFDVISVMVCIPIYDKALVPLARRATGKERGLSQLQRLGVGLALSVAGMVYAALLEARRLSLARAAAGGRPPMSIMWQAPAFAVLGAGEVFATIGILEFFYDQSPDGMKSLGTALAQLAVAAGNYFNSAVLAAVAAVTTRNGEAGWIPDDLDKGHLDYFFWFMAVLGVVNLLHFLHCSVRYRGSSNNSTYSS

SEQ ID NO: 19023 - DNA, 1362 bp, Zea mays subsp. mays
  misc_feature (1)..(1362): Ceres Seq. ID no. 12368239
gcacgagaccattacctagaacatcctaatcgaaaacccagaacccagagctccaaacctaggccggagccgcggtgcaagcagctacgtggattggacttggacgtctggctctggaggtcccaagttcccaacgcttgctggagttgagatctggtgggcttccggaggagacgccgacggtttgcgaggtttgctggctccgtggcgtcgcggaaggtcatggagcaccgcgccttcgactgcagcgggagtgatgatgatctccctccaacatatcaaattagagtaccgagaatgcatttcagtgggaacagaaggccattagcaggcgcattttctcagccaagaccacacaacaagttggatagcgatatacatcagattgagcaacaggcatatactggtgttcttagagcattcaaaatgcaatcggatgccctgacatgggaaaaagaaagtctaattactgaactaagaagagagttgaaagtctctgatgtggaacacaggatgctattaaacatggtcaatgaagaggaggctatccatacaataaggcagtcaaggcagggatgtggaatgcaatctagcttgccttataatagcgtagttgatcacaaccttggacctatcaagcggcagaagaaatcacatcccatctattcactccctgtggatccccattcacccagcatgcctttgaaagcattggtgggcaacaagacatatacactggcacctgaaaacataagacggggatctgcctatcaaacccttccacatcaggttggttggctgggcatctgatggtgctacgaaaggtatggatgggagaagcggaaggtatcacacgaacgagtattatgcttcacataatgacatggggcttttgaacttcaatcgtactgacatacctgatactgaaactcttgtgaaaaaggtggagagggtattatcccggccagatgtgtatgcaattgaaagggcaaaggaactgcttataggccaagagcagtcattgcttgatgcaattgccaaacttgatgaagcatctgaccatgaaagcgatgatatgctagttgggagccggatacacgccaccattgggtgacgcgggcagcacgcctctgacacggggcgatgctttggagttcagacctctggcagcaggcggagaggcaacgatatgtgaaatagtgctgtgtattgtaaaacgctacctgttttagtccggtagtagcctagtaggttaggttcttttggcagcctggcaaatctgtgcatgcgccatgcagtgtgatgggaatatatgtcttgagcaccatcacatgtgatgtgatgctgtctcgtttcatctcc

SEQ ID NO: 19024 - protein, 195 aa, Zea mays subsp. mays
  misc_feature (1)..(195): Ceres Seq. ID no. 12368240
MEHRAFDCSGSDDDLPPTYQIRVPRMHFSGNRRPLAGAFSQPRPHNKLDSDIHQIEQQAYTGVLRAFKMQSDALTWEKESLITELRRELKVSDVEHRMLLNMVNEEEAIHTIRQSRQGCGMQSSLPYNSVVDHNLGPIKRQKKSHPIYSLPVDPHSPSMPLKALVGNKTYTLAPENIRRGSAYQTLPHQVGWLGI

SEQ ID NO: 19025 - protein, 170 aa, Zea mays subsp. mays
  misc_feature (1)..(170): Ceres Seq. ID no. 12368241
MHFSGNRRPLAGAFSQPRPHNKLDSDIHQIEQQAYTGVLRAFKMQSDALTWEKESLITELRRELKVSDVEHRMLLNMVNEEEAIHTIRQSRQGCGMQSSLPYNSVVDHNLGPIKRQKKSHPIYSLPVDPHSPSMPLKALVGNKTYTLAPENIRRGSAYQTLPHQVGWLGI

SEQ ID NO: 19026 - protein, 127 aa, Zea mays subsp. mays
  misc_feature (1)..(127): Ceres Seq. ID no. 12368242
MQSDALTWEKESLITELRRELKVSDVEHRMLLNMVNEEEAIHTIRQSRQGCGMQSSLPYNSVVDHNLGPIKRQKKSHPIYSLPVDPHSPSMPLKALVGNKTYTLAPENIRRGSAYQTLPHQVGWLGI

SEQ ID NO: 19027 - DNA, 1467 bp, Zea mays subsp. mays
  misc_feature (1)..(1467): Ceres Seq. ID no. 12368243
gcacgagaccattacctagaacatcctaatcgaaaaagaggaaacgccctgcacagcacgactcctccccatctaccgctacctttctacctacccatctagcacccctcgctcgccaagccaaggtctgagccgttcgaggagaaggacggagttaagctgccgagctacaggggcgacaacgtcaacggcgacgacttcaccgagaagagccgcgtgccggacccgcagaggatgatccgcgcctacgcacagtcggtggcgacactcaacctgctccgcgcgttcgccaccggagggtacgctgccatgcagcgcgtcactcagtggaacctcgatttcatggatcacaacgagcaaggtgataggtaccgtgaattggcccatagggtggatgatgctcttgggttcatgactgcatcggggcttacagtcgaccacccgataatgacgactactgacttctggacctcgcacgagtgccttctcttaccctacgagcaggctcttacccgtgaggattccaccagtggccttttctatgattgttcggcccacatgttgtgggttggtgagcgcactcgacaactcgatggagctcatgttgaattcctccgtggtgttgccaaccctctgggcataaaggtgagcgacaaaatgaaccccagtgagttggtgaagctgattgatattctgaacccttcaaacaaacctggaaggatcaccataattacaaggatgggggcagagaacatgagggtgaagttgcctcatctcatccgtgctgttcgcaatgctggactgattgtcacatggattactgatcctatgcatggaaacaccatcaaggccccttgtggcctgaagactcgtccatttgactccattctggctgaagtgcgtgcttcttcgatgtgcatgaccaagaaggaagccaccctgggggcgtccaccttgaaatgactgggcagaacgtgaccgagtatcggtggatcacggaccgtgaccttcgacgatctgagcgaccgctaccacacccactgcgacccaaggctgaatgcctcccagtccctggagctcgcctttatcatcgcagagaggctgaggaagaggaggatgcgatcggggctcaacagcagcctgccactgccgccactggcttctgagtagccggagccaaacacaaaggagggtaggaatagctgtggtgactcggaagagaaagagacagtcgacgccttgttttgttgatgcttagtgtggtgacctggtggtggtggtggtgggtgttcttggcacaagttacatgctggggatagctataggaggtacctgttgaggtgtgtaagacagtagctagcaaccgtatgccttggtttcctgtttgggtgcgtgacttgccgactttctagctgcttctggggttttgacctcggtaaggaaagaataaaaagataatcggagtgc

SEQ ID NO: 19028 - protein, 242 aa, Zea mays subsp. mays
  misc_feature (1)..(242): Ceres Seq. ID no. 12368244
MIRAYAQSVATLNLLRAFATGGYAAMQRVTQWNLDFMDHNEQGDRYRELAHRVDDALGFMTASGLTVDHPIMTTTDFWTSHECLLLPYEQALTREDSTSGLFYDCSAHMLWVGERTRQLDGAHVEFLRGVANPLGIKVSDKMNPSELVKLIDILNPSNKPGRITIITRMGAENMRVKLPHLIRAVRNAGLIVTWITDPMHGNTIKAPCGLKTRPFDSILAEVRASSMCMTKKEATLGASTLK

SEQ ID NO: 19029 - protein, 217 aa, Zea mays subsp. mays
  misc_feature (1)..(217): Ceres Seq. ID no. 12368245
MQRVTQWNLDFMDHNEQGDRYRELAHRVDDALGFMTASGLTVDHPIMTTTDFWTSHECLLLPYEQALTREDSTSGLFYDCSAHMLWVGERTRQLDGAHVEFLRGVANPLGIKVSDKMNPSELVKLIDILNPSNKPGRITIITRMGAENMRVKLPHLIRAVRNAGLIVTWITDPMHGNTIKAPCGLKTRPFDSILAEVRASSMCMTKKEATLGASTLK

SEQ ID NO: 19030 - protein, 206 aa, Zea mays subsp. mays
  misc_feature (1)..(206): Ceres Seq. ID no. 12368246
MDHNEQGDRYRELAHRVDDALGFMTASGLTVDHPIMTTTDFWTSHECLLLPYEQALTREDSTSGLFYDCSAHMLWVGERTRQLDGAHVEFLRGVANPLGIKVSDKMNPSELVKLIDILNPSNKPGRITIITRMGAENMRVKLPHLIRAVRNAGLIVTWITDPMHGNTIKAPCGLKTRPFDSILAEVRASSMCMTKKEATLGASTLK

SEQ ID NO: 19031 - DNA, 1825 bp, Zea mays subsp. mays
  misc_feature (1)..(1825): Ceres Seq. ID no. 12368369
gcacgagaccattacctagaacatcctaatcgaaaagtgggctggtcctcagtcctcttccgttcttcctcctcgctcccgccccctcgcgcccctcgcctttcagttttggatgccacggaggcctgccagtggtgggccaccgccgtacgcgcgcgacgatgccggtgaagcgttcggcgtccgcgctggcgctcccgccggtcggccgccgcgcgcgggcccgcctctgcatccgcctcgccgcgccgctctccttcctgctcctcttcgtggcgctgttccacgcccagccgctcctgggcgttccgcccgctgcgcagccgccctccgcggggcccggtaaggtcgccttccttttcctcgtccgcgcgggggtgccgctcgacttcctctgggacgccttcttccgcaacggcgaggaggggaagttctcggtgtacgtgcactccgcgccggggttccagctcgaccgcaccaccacgggatccccatacttctatgggcggcaacttgcgaggagcgtcaaggtggtgtggggcgaggccaccatggtggaggcagagaggatgttgtttgccgccgcgcttcaggatcccgcgaaccagcgctttgttttgctctctgatagctgtgtcccactctacaatttcagctccatatatacttacctgatggcttcacctaaaagttttgtagacagctttgttgataagacggagaagcgttataatcaaaacatgtctcctgccattccaaaggataaatggaggaaaggatctcagtgggtagtattaatcagaaaacatgctgaagttgttgttggtgacaaaaacgtattaaaagtattcagaagacattgcaagatggtagtaaccaagagcttgtttagacgaaggccaaatgctagacaactggggttcacctttcggagaaagcagatactgaaaggagtagctcaacaggagcatgattgtattccggatgaacattatgtgcagacattattttctatcaaaggacttgaagatgaactggagagaagaactttgacctatacctcgtggaaccaatcatcaaatccgaaagacaaaatgacttggcatcctatgaaatttgagtatgatacatctagccctgagcatatcaatgctatcaagagaattgatcatgtcaactatcaaatggagcacaggacagagtggtgccaatgcaatggtacctcggccccatgttttttatttgccaggaagttctcctatagtgcggccatgcatcttttggaacaaggagccattggcacaccgaaatctgctcagctgatgattaacttttaacaaaattgtttacacaagtctgcgctcacttttttgatgggtcattataccgttcacaatttcaccagcctcaatgggagctgtacattagcagcggtagctacagagacatggagtatcagagtattgacagcgaccagaatgcgcttagacagctaaggacttgaagagagttgatgcacaaactacagagcctcggttttgaagtttgtcagctctatcagtatgcgatttccaggggacagatggtagtgaaggacagagtacacacaacccttaccctaacaggacaggaaagttataacaatagcttgattttccttataaatattcttccccttgtatgattaaagaatagatagttttttttacttgcatacaggttatcagacatagcgaatagggaaacatgcaagaagatacatgtgtccataggacctactgtttagaacattggtcacattggcaagaagataagctgccttttc

SEQ ID NO: 19032 - protein, 391 aa, Zea mays subsp. mays
  misc_feature (1)..(391): Ceres Seq. ID no. 12368370
MPVKRSASALALPPVGRRARARLCIRLAAPLSFLLLFVALFHAQPLLGVPPAAQPPSAGPGKVAFLFLVRAGVPLDFLWDAFFRNGEEGKFSVYVHSAPGFQLDRTTTGSPYFYGRQLARSVKVVWGEATMVEAERMLFAAALQDPANQRFVLLSDSCVPLYNFSSIYTYLMASPKSFVDSFVDKTEKRYNQNMSPAIPKDKWRKGSQWVVLIRKHAEVVVGDKNVLKVFRRHCKMVVTKSLFRRRPNARQLGFTFRRKQILKGVAQQEHDCIPDEHYVQTLFSIKGLEDELERRTLTYTSWNQSSNPKDKMTWHPMKFEYDTSSPEHINAIKRIDHVNYQMEHRTEWCQCNGTSAPCFLFARKFSYSAAMHLLEQGAIGTPKSAQLMINF

SEQ ID NO: 19033 - protein, 261 aa, Zea mays subsp. mays
  misc_feature (1)..(261): Ceres Seq. ID no. 12368371
MVEAERMLFAAALQDPANQRFVLLSDSCVPLYNFSSIYTYLMASPKSFVDSFVDKTEKRYNQNMSPAIPKDKWRKGSQWVVLIRKHAEVVVGDKNVLKVFRRHCKMVVTKSLFRRRPNARQLGFTFRRKQILKGVAQQEHDCIPDEHYVQTLFSIKGLEDELERRTLTYTSWNQSSNPKDKMTWHPMKFEYDTSSPEHINAIKRIDHVNYQMEHRTEWCQCNGTSAPCFLFARKFSYSAAMHLLEQGAIGTPKSAQLMINF

SEQ ID NO: 19034 - protein, 255 aa, Zea mays subsp. mays
  misc_feature (1)..(255): Ceres Seq. ID no. 12368372
MLFAAALQDPANQRFVLLSDSCVPLYNFSSIYTYLMASPKSFVDSFVDKTEKRYNQNMSPAIPKDKWRKGSQWVVLIRKHAEVVVGDKNVLKVFRRHCKMVVTKSLFRRRPNARQLGFTFRRKQILKGVAQQEHDCIPDEHYVQTLFSIKGLEDELERRTLTYTSWNQSSNPKDKMTWHPMKFEYDTSSPEHINAIKRIDHVNYQMEHRTEWCQCNGTSAPCFLFARKFSYSAAMHLLEQGAIGTPKSAQLMINF

SEQ ID NO: 19035 - DNA, 2079 bp, Zea mays subsp. mays
  misc_feature (1)..(2079): Ceres Seq. ID no. 12368440
gcacgagaccattacctagaacatcctaatcgaaaagtgttctgtgcgtgtctgcgtgagcagcgacgtgccgacagccgaagcgcccgagccatcccatcctcccctccccccaaaggccaaacccattcgattcctccgccccgccggccgaaaccaagtttctccgcggccgcccggatccccgacccccggccccgagcgttccatgggctcgccttccgcatcgaggcattagcaagcctcgcgccgcactgccgagcccccaacgcctgcctttgcctcactggttttggaaggaatccaagatgggtgtaatcagcacagtgctgggtttctctggttttggctttgggttctcggctggcattgttattggttacttcctcttcatctacgtccagccaactgatgtcaaggatgtcaaggttcgcccgcttgtagaatatgattcaaaatccttggagggcatccttcctgaaattcctttatgggtcaagaatcctgactatgatagaattgattggctgaataggttcttggagttgatgtggccttatcttaacaaggctatctgcagaactgcacaggatatcgcgaagccaattattgctgagaacactgcaaagtataagatagactctgttgagtttgaatcacttactttgggtagcttaccacccacctttcaagggatgaaagtctatgtcacagaggagcaagagctgataatggaaccatctcttaaatgggctgcaaacccaaatattactgttgctgtaaaagcctatggtttgaaagctactatccagattgtggatctacaagtctttgcatcacctcgcattactctgaagccattggtgcctacatttccttgctttgcaaaaatccttgtctcactcatggagaagccacatgttgactttgggctaaaacttcttggagcagatgtaatggctattcctggtctttacagatttgttcaggagaccatcaagaaacaagtagcaagcatgtatttgtggccgaagacactagaagtacctataatggatccctcaaaagcatcaaaaaggcctgttggaattctacttgtgaaggttgtgagagcccaaaatctgcggaagaaggatctgctgggtaaatctgacccatacgtgaaacttaagatgtcagatgataaacttccatccaagaagacaactgtaaagcgcagcaatctcaatccagagtggggtgaagacttcaagtttgttgtgacagatccagaaaaccaggctcttgaagttaatgtcttcgactgggaacaggttgggaaacatgaaaagatgggaatgaacatgatcccacttagagaactcctaccagaggggactaaagttactaccctcaacttgcttaagaccatggacccaaacgatgtacaaaatgagaagtctcgtggtgagcttactctagagctcacatacaagcctttcaaggaagaagatatagagaaagaagatacacagggtgctgatgtgatagagaaagctccagatggcactccagctggtggtggcttgctttatgttgttgttcatgaagcccaagatcttgaggggaagcaccatacaaacccatatgcaaaaataattttcaaaggcgaggagaagaaaactaaggtcatcaagaagaatagggatccaagatgggaggatgagtttgagttcgtgtgtgaggagcctcctgtgaatgataaactgcatgttgaagtcataagtaaagccccgaaggcagggcttatacatggcaaggaaactttgggctatattgatattagccttgcagacgtgatcagcaacaagcggattaatgaaaagtaccatctcatagactcgaaaaatggtcagatccagatcgagttgcagtggagaacttcctagacaggaaggagccagaatgccttgatgttcctctattcagtttgcgtatatctgtgattgagattgaggtcatgtagatatttcttttttttatagacatctgttgttcggatcttctcttaatcgatcaagtttccgacaagaactatgc

SEQ ID NO: 19036 - protein, 539 aa, Zea mays subsp. mays; identical to SEQ ID NO: 17856
  misc_feature (1)..(539): Ceres Seq. ID no. 12368441

SEQ ID NO: 19037 - protein, 459 aa, Zea mays subsp. mays; identical to SEQ ID NO: 17857
  misc_feature (1)..(459): Ceres Seq. ID no. 12368442

SEQ ID NO: 19038 - protein, 410 aa, Zea mays subsp. mays
  misc_feature (1)..(410): Ceres Seq. ID no. 12368443
MKVYVTEEQELIMEPSLKWAANPNITVAVKAYGLKATIQIVDLQVFASPRITLKPLVPTFPCFAKILVSLMEKPHVDFGLKLLGADVMAIPGLYRFVQETIKKQVASMYLWPKTLEVPIMDPSKASKRPVGILLVKVVRAQNLRKKDLLGKSDPYVKLKMSDDKLPSKKTTVKRSNLNPEWGEDFKFVVTDPENQALEVNVFDWEQVGKHEKMGMNMIPLRELLPEGTKVTTLNLLKTMDPNDVQNEKSRGELTLELTYKPFKEEDIEKEDTQGADVIEKAPDGTPAGGGLLYVVVHEAQDLEGKHHTNPYAKIIFKGEEKKTKVIKKNRDPRWEDEFEFVCEEPPVNDKLHVEVISKAPKAGLIHGKETLGYIDISLADVISNKRINEKYHLIDSKNGQIQIELQWRTS

SEQ ID NO: 19039 - DNA, 1643 bp, Zea mays subsp. mays
  misc_feature (1)..(1643): Ceres Seq. ID no. 12368456
gcacgagaccattacctagaacatcctaatcgaaaagcttgcttcaggcacttgagagttgagactcactcagtcactagcaagtgcctcgtcacatggcagcggcagcgctagcggcgtggtggtggtctctgtcgctcctggctaccatcgtcggcggaggcagcgcctcaccgtcaccggtgcccggctgctacacgcgcatcttcagcttcggcgactcgctgaccgacacgggcaactacgtccacctgacggcgagcagccacagcccctacggcgcgccgccgtacgggaggacgttcttcggcaaacctaccggccgcgccagcgacggacgcctcgtcatcgacttcatcgcggaagagttcgggctggcgaaggtgacggcgatccaggcgggcacggcgccaggggacttccagaacggcgccaacttcgccatcatctcggccaccgccaacaacggctccttcttcgcgggcaacggcatggacatcaggcccttctcgctggacacgcagatgctgtggttcaggacccacctccgcgagctcgtgcaggcggcggcggcggcacagcagaacggcagcgtgggcgcgctgctgagcggcgcgctggtggcgctgggcgagatcggagggaacgactacaacttcgccttctcgcggggcgtgccgcgggacgcggtgcgcaggttcgtgccggccgtggtggacaagctggcgggcgccatggaggagctcatcgccatgggggcgcgcgccttcgtggtgcccgggaacctacccttcggctgcacgccgctgtacctgcagcggttccgcgccaacggcgggtggtgggactacgacccggccacgggctgcctcgcctggttcaaccgcttcgcccagtaccacaaccgggtgctcgcggcgcgcctcgacaggctccggcgcctgcacccggacgtgaccatcgtctacgccgactggtacgaggccacgatgagcatcttccaggaccccgggaagctagggttcacaaacgctctgcggacttgctgcgggaaccagaccgtgccgtgtggcaggcccgggtgctccgtctgcaaggacccgtccacgtacgggtcctgggacgggacgcacccgacggaggcggtgtacaaggtgatcgccgacggggtgctgcacgggccgcacgcgtcccctgttcctctcgccgacacctgtcctccgacatgacccttagaagatttataattggcagctttaagagcggtggtaacatctgaatcgtacttgcgtgattttaaggatggcacgataatagctttgtttaagaatacaggtgaggttggcatatttcgatagcataagcatacacacgaagctctgaagtgataattgagtttgtataaacatcatcattgatttagggggtgtttggttagagggactaaagattagtctctagtttttagtctcttttagtctcttttttaccaaacattaggactaaaatatgaactaaaatgatttagtctgtagtccttcacatatgtgctaaaagggactaaaccatattaattccacatttaccctttatttagttcaattgtactaatagtaggagaatgttaaaggctattttagtct

SEQ ID NO: 19040 - protein, 377 aa, Zea mays subsp. mays
  misc_feature (1)..(377): Ceres Seq. ID no. 12368457
MAAAALAAWWWSLSLLATIVGGGSASPSPVPGCYTRIFSFGDSLTDTGNYVHLTASSHSPYGAPPYGRTFFGKPTGRASDGRLVIDFIAEEFGLAKVTAIQAGTAPGDFQNGANFAIISATANNGSFFAGNGMDIRPFSLDTQMLWFRTHLRELVQAAAAAQQNGSVGALLSGALVALGEIGGNDYNFAFSRGVPRDAVRRFVPAVVDKLAGAMEELIAMGARAFVVPGNLPFGCTPLYLQRFRANGGWWDYDPATGCLAWFNRFAQYHNRVLAARLDRLRRLHPDVTIVYADWYEATMSIFQDPGKLGFTNALRTCCGNQTVPCGRPGCSVCKDPSTYGSWDGTHPTEAVYKVIADGVLHGPHASPVPLADTCPPT

SEQ ID NO: 19041 - protein, 245 aa, Zea mays subsp. mays
  misc_feature (1)..(245): Ceres Seq. ID no. 12368458
MDIRPFSLDTQMLWFRTHLRELVQAAAAAQQNGSVGALLSGALVALGEIGGNDYNFAFSRGVPRDAVRRFVPAVVDKLAGAMEELIAMGARAFVVPGNLPFGCTPLYLQRFRANGGWWDYDPATGCLAWFNRFAQYHNRVLAARLDRLRRLHPDVTIVYADWYEATMSIFQDPGKLGFTNALRTCCGNQTVPCGRPGCSVCKDPSTYGSWDGTHPTEAVYKVIADGVLHGPHASPVPLADTCPPT

SEQ ID NO: 19042 - protein, 234 aa, Zea mays subsp. mays
  misc_feature (1)..(234): Ceres Seq. ID no. 12368459
MLWFRTHLRELVQAAAAAQQNGSVGALLSGALVALGEIGGNDYNFAFSRGVPRDAVRRFVPAVVDKLAGAMEELIAMGARAFVVPGNLPFGCTPLYLQRFRANGGWWDYDPATGCLAWFNRFAQYHNRVLAARLDRLRRLHPDVTIVYADWYEATMSIFQDPGKLGFTNALRTCCGNQTVPCGRPGCSVCKDPSTYGSWDGTHPTEAVYKVIADGVLHGPHASPVPLADTCPPT

SEQ ID NO: 19043 - DNA, 1146 bp, Zea mays subsp. mays
  misc_feature (1)..(1146): Ceres Seq. ID no. 12368495
gcacgagaccattacctagaacatcctaatcgaaaagaaacaaaaaacattcggggacgcgcctgcttgcttctttccccaaaccccaaaccgcaggtaggaagcaaaccgcacgccccgctccagaacggatcctcatctctcacgttgtcaccacagtctgaatccagaatccaactagtagctccataaaagcggcaatgatccagctgctgttcgtcgtgctggtggcggaggcgtccctgacggcggcgctgctcttcaagacgccgctgcggaagctcgccgtgctagtgatcgaccggctcaagcgcggccgccacgcgcccgtcgtcgtcaagacggtcgcgggcgtcatccttgccctgctcgcttcaacgctctacagcatgacacagatcgccggcagcacgagcgactccgactctggcggcgggcccacccccaccgaccaggtgctcttctcgcgtcacctcctggaggcgtgcctcatggggtactccttatttcttgctctagtgattgaccggctccaccaatacatcagagatttgcgccggtttaaaaaggacttagaggctgtacgtaagcataataaaatgttggaggaggcaaaacatggaaactcggaggaggcaaagaaataccaggaagagattgccactctgaacaaggagatgaagaaactgaagctacaagtccaagaaaagacagaagaggtccatgtttcagaggacaaggcacttgctatccaaaaacaatccgaaggcttgctgactgaatatgaccgcctgctggaggataatcagcatcttcggacacagctgctgtcaattgaccgcaggctttccaactcttcttgaacgaagagtctatttaggggatgctgaagaatttctgtggaagatcatgttaccacccaaagtgtatggcagctacctgcttcctcacttgttagtcttagcatcttcaattaactagctattgcattatattgttggcaaaactagtgcaagcattatatggtctagaactttggagtttctcttgtgtgtttcttgtaatgcctactttttatgtgtgcttatagtgattactgttttgaacagaattttatgattattgcagacgggcattcacatgttg

SEQ ID NO: 19044 - protein, 220 aa, Zea mays subsp. mays
  misc_feature (1)..(220): Ceres Seq. ID no. 12368496
MIQLLFVVLVAEASLTAALLFKTPLRKLAVLVIDRLKRGRHAPVVVKTVAGVILALLASTLYSMTQIAGSTSDSDSGGGPTPTDQVLFSRHLLEACLMGYSLFLALVIDRLHQYIRDLRRFKKDLEAVRKHNKMLEEAKHGNSEEAKKYQEEIATLNKEMKKLKLQVQEKTEEVHVSEDKALAIQKQSEGLLTEYDRLLEDNQHLRTQLLSIDRRLSNSS

SEQ ID NO: 19045 - protein, 157 aa, Zea mays subsp. mays
  misc_feature (1)..(157): Ceres Seq. ID no. 12368497
MTQIAGSTSDSDSGGGPTPTDQVLFSRHLLEACLMGYSLFLALVIDRLHQYIRDLRRFKKDLEAVRKHNKMLEEAKHGNSEEAKKYQEEIATLNKEMKKLKLQVQEKTEEVHVSEDKALAIQKQSEGLLTEYDRLLEDNQHLRTQLLSIDRRLSNSS

SEQ ID NO: 19046 - protein, 123 aa, Zea mays subsp. mays
  misc_feature (1)..(123): Ceres Seq. ID no. 12368498
MGYSLFLALVIDRLHQYIRDLRRFKKDLEAVRKHNKMLEEAKHGNSEEAKKYQEEIATLNKEMKKLKLQVQEKTEEVHVSEDKALAIQKQSEGLLTEYDRLLEDNQHLRTQLLSIDRRLSNSS

SEQ ID NO: 19047 - DNA, 1370 bp, Zea mays subsp. mays
  misc_feature (1)..(1370): Ceres Seq. ID no. 12368499
aaattcaaaatcaacccccctcgtcgcaaggccacaaccactccactcctccccatccctagctagccactagggtttgccagcctttgcagcgtcgcgctcgcgcctcatcccctcgcccatcgacggtagacgagagcgagcggtctgtgttcgtggagcaggggccggcgccatggagatcaacatcgtggaacaagtacgagaagctggagaaggtcggggagggcacctacggcaaggtgtacaaggcgcaggacaaggcgacggggcagctggtggcgctgaagaagacccgcctcgagatggacgaggagggcatcccgcccacggcgctccgcgagatctccctcctcaacctcctctcccactccatctacatcgtccgcctcctcgccgtcgagcaggccgctaagaacggcaagcccgtcctctacctcgtcttcgagttcctcgacaccgatctcaagaagtacctcgacgtctaccgcagggggcccagcgccaggccgctccccgcgacactcatcaagaatttcctgtatcagttatgcaaaggagttgcacactgccatagccatggtgtccttcaccgggatttaaagccacaaaacctgctggtggacaaggagaagggtatactgaagattgctgatctgggactcggtagggctttcactgtgcccatgaaaagctacacccatgagattgtgaccctttggtacagagctcctgaagttttgcttggagcaacacattactcaactggcgttgatatgtggtctgttggatgcatctttgctgaaatggcccgacggcaggctctctttcctggtgactcggagttgcaacagttgcttcacatcttcaggttgctgggaacacctactgaggaacagtggcctggagtgagtgatttaagggactggcatgagtttccacagtggaagccccagggtttggcacgtgtcgtcccaacactggaacctgaaggagttgaccttctatcgaaaatgcttcagcttgatccttcaaacaggatatcagctttagctgcgatggagcatccctactttaacagccttgacaagtcccagttctagccgttgtactatgtggttcagaaggcgctaccctcgtacagagagatttccaatggtgttatgaatctcaattgccatctaggcaactggttcatgattttaccaatctgttagtgagtgaaaatcgtgcgagggtcatatgtgttccccttgtcttaaaaatctggtgtggtgtagaacaagagttacctgtgggaggcctgtgataatgccctttatgtctcaacatccattttcgtgcattccatgttcttcaatacggactcg

SEQ ID NO: 19048 - protein, 265 aa, Zea mays subsp. mays
  misc_feature (1)..(265): Ceres Seq. ID no. 12368500
MDEEGIPPTALREISLLNLLSHSIYIVRLLAVEQAAKNGKPVLYLVFEFLDTDLKKYLDVYRRGPSARPLPATLIKNFLYQLCKGVAHCHSHGVLHRDLKPQNLLVDKEKGILKIADLGLGRAFTVPMKSYTHEIVTLWYRAPEVLLGATHYSTGVDMWSVGCIFAEMARRQALFPGDSELQQLLHIFRLLGTPTEEQWPGVSDLRDWHEFPQWKPQGLARVVPTLEPEGVDLLSKMLQLDPSNRISALAAMEHPYFNSLDKSQF

SEQ ID NO: 19049 - protein, 138 aa, Zea mays subsp. mays
  misc_feature (1)..(138): Ceres Seq. ID no. 12368501
MKSYTHEIVTLWYRAPEVLLGATHYSTGVDMWSVGCIFAEMARRQALFPGDSELQQLLHIFRLLGTPTEEQWPGVSDLRDWHEFPQWKPQGLARVVPTLEPEGVDLLSKMLQLDPSNRISALAAMEHPYFNSLDKSQF

SEQ ID NO: 19050 - DNA, 1330 bp, Zea mays subsp. mays
  misc_feature (1)..(1330): Ceres Seq. ID no. 12368522
ctccccctccgcctcttgctctctctcgcctctggttggcagagctctcttgaagcctcgagactcgtctcgccgctgctccctcagctctgccgctgcgtgcctgcgttagctgttgcattgcagcgcagccccgcgagccttgagctgctagctcgcccttcaccacagtccccagacatggagttcgaagaccgctgccacaaggtccaggagcccaagttcgactgcctgctcttcgacctcgacgacaccctgtacccgctgagcgccgggatcgcaggccatgtcaagaagaacattgaagattacatggttgagaagctgggtattgacgagaccaagatcgagaacctgggcaatctgctgtacaagaactacggcaccacgatggctggcctcagggccatcggctacagcttcgattacgatgagtaccacgccttcgtccatggaaggctgccgtacgacaacatcaagcctgaccccattctcaagcacattctcaagaacctgcgcatccgcaaactcatattcaccaacggtgacatggtccacgccgtgagagccctcaagaggctgggcctggaggactgcttcgaggggatcatctgcttcgagaccctgaacccgccctgcccgccgcagggagaccaggagcccgagatcttcgacatcgccgaccacttcgcccgctccggcaccgccgacgagctgcccaagacccccgtgctgtgcaagcccaacgtggacgccatggaggaggcgctcaggatcgccaacgtcaacccgcacaaggcgatcttcttcgacgacagcgtacgcaacatccaggccgggaagcagattggcctccacacggtgctggtgggcaaatcgcagcgggtgaaaggcgcggaccacgcgctggagagcatccacaacatcagggaagcgctgccggagctgtgggaggaggccgagaaggcggaggacgtgctctaccccgaacgcgttgcgatggagacctcggtcaccgcgtaaaacccctgaatgcctccggtgcaccgtcagccgaactttctcgacatctccaggaccgcatcaacgatcacatgtcactcgctccccgagccagggccggtgatgatctcgcgctggaactgaatccaccagcaatgggcgggccgaggatcgatttccgacagcaggaggggtgcagcatgtaaagggggaacagatgagatcatgtttgggttggtcccccgttgtatatgtagttatgtatcagccagtcctttgtttgtaaattaccagtatttagaagtaataagaaaatgggggtttacgt

SEQ ID NO: 19051 - protein, 340 aa, Zea mays subsp. mays
  misc_feature (1)..(340): Ceres Seq. ID no. 12368523
LPLRLLLSLASGWQSSLEASRLVSPLLPQLCRCVPALAVALQRSPASLELLARPSPQSPDMEFEDRCHKVQEPKFDCLLFDLDDTLYPLSAGIAGHVKKNIEDYMVEKLGIDETKIENLGNLLYKNYGTTMAGLRAIGYSFDYDEYHAFVHGRLPYDNIKPDPILKHILKNLRIRKLIFTNGDMVHAVRALKRLGLEDCFEGIICFETLNPPCPPQGDQEPEIFDIADHFARSGTADELPKTPVLCKPNVDAMEEALRIANVNPHKAIFFDDSVRNIQAGKQIGLHTVLVGKSQRVKGADHALESIHNIREALPELWEEAEKAEDVLYPERVAMETSVTA

SEQ ID NO: 19052 - protein, 280 aa, Zea mays subsp. mays
  misc_feature (1)..(280): Ceres Seq. ID no. 12368524
MEFEDRCHKVQEPKFDCLLFDLDDTLYPLSAGIAGHVKKNIEDYMVEKLGIDETKIENLGNLLYKNYGTTMAGLRAIGYSFDYDEYHAFVHGRLPYDNIKPDPILKHILKNLRIRKLIFTNGDMVHAVRALKRLGLEDCFEGIICFETLNPPCPPQGDQEPEIFDIADHFARSGTADELPKTPVLCKPNVDAMEEALRIANVNPHKAIFFDDSVRNIQAGKQIGLHTVLVGKSQRVKGADHALESIHNIREALPELWEEAEKAEDVLYPERVAMETSVTA

SEQ ID NO: 19053 - protein, 236 aa, Zea mays subsp. mays
  misc_feature (1)..(236): Ceres Seq. ID no. 12368525
MVEKLGIDETKIENLGNLLYKNYGTTMAGLRAIGYSFDYDEYHAFVHGRLPYDNIKPDPILKHILKNLRIRKLIFTNGDMVHAVRALKRLGLEDCFEGIICFETLNPPCPPQGDQEPEIFDIADHFARSGTADELPKTPVLCKPNVDAMEEALRIANVNPHKAIFFDDSVRNIQAGKQIGLHTVLVGKSQRVKGADHALESIHNIREALPELWEEAEKAEDVLYPERVAMETSVTA

SEQ ID NO: 19054 - DNA, 986 bp, Zea mays subsp. mays
  misc_feature (1)..(986): Ceres Seq. ID no. 12368544
acagaccacgccacgttcgcaattacagagatctagagagagagagagagagagggcagatctacgctagagcgacagagccacaactaaccgagagggacagtccagtatggtggtggcgctcgggcccggccggttctacggcagcggcctgccgaggccgcgcttcttcccgggcgaccgcgtggacccgccggcgtccgtcaccgacccgctgctcgagtgggcgcgcgaagcgcactggtccatgggcggcatcagcgtgaagcgcctccgcctgcagggccgcatcgagggctccgtcgacaagctccgccgccgcgcgcaccgcgatgccagggtcaaggccaaggccaaggcccgcgccgctggccacatgccggcttcgctcgccgcgcttgggtccgacgacgacgcctccagcggcgactccgaggacgagcaggaggtggcggcgcgggagcgggccctgaagcgtgagcttgtcgacgacgacgaggactccgacgggtccggcgagtcggaggaggacgagcccctcgcggccatcgtcaccgccgccaagaagaggcgcgcgaggaagctcagcgacgagttcgaccgcatcgccgcggagcagcagcagcagctggtgttggagagcaagcagaagccgggtgccgcgacgccggcgacgacgtcaacaaagaggaaggctaccgtgccgagggcttcgccaaagaggaaggcttctgtacccgctgctggggcgccggcgaggttgtcgccaaagaggaaggctgctgcaacagccgcggcgcccttgtcggcggctgggtcaaggaggacctcgccgaggaataagcactgagtggtggtcgccgtatgtgctgctctagttcctgatctgtttcttggcgatcgtggagtcctgaaaatgtattgtgtggttgggtgtctactgctggattgaaacgatgatgaaatggaatcgaattgatggttat

SEQ ID NO: 19055 - protein, 246 aa, Zea mays subsp. mays
  misc_feature (1)..(246): Ceres Seq. ID no. 12368545
MVVALGPGRFYGSGLPRPRFFPGDRVDPPASVTDPLLEWAREAHWSMGGISVKRLRLQGRIEGSVDKLRRRAHRDARVKAKAKARAAGHMPASLAALGSDDDASSGDSEDEQEVAARERALKRELVDDDEDSDGSGESEEDEPLAAIVTAAKKRRARKLSDEFDRIAAEQQQQLVLESKQKPGAATPATTSTKRKATVPRASPKRKASVPAAGAPARLSPKRKAAATAAAPLSAAGSRRTSPRNKH

SEQ ID NO: 19056 - protein, 200 aa, Zea mays subsp. mays
  misc_feature (1)..(200): Ceres Seq. ID no. 12368546
MGGISVKRLRLQGRIEGSVDKLRRRAHRDARVKAKAKARAAGHMPASLAALGSDDDASSGDSEDEQEVAARERALKRELVDDDEDSDGSGESEEDEPLAAIVTAAKKRRARKLSDEFDRIAAEQQQQLVLESKQKPGAATPATTSTKRKATVPRASPKRKASVPAAGAPARLSPKRKAAATAAAPLSAAGSRRTSPRNKH

SEQ ID NO: 19057 - protein, 157 aa, Zea mays subsp. mays
  misc_feature (1)..(157): Ceres Seq. ID no. 12368547
MPASLAALGSDDDASSGDSEDEQEVAARERALKRELVDDDEDSDGSGESEEDEPLAAIVTAAKKRRARKLSDEFDRIAAEQQQQLVLESKQKPGAATPATTSTKRKATVPRASPKRKASVPAAGAPARLSPKRKAAATAAAPLSAAGSRRTSPRNKH

SEQ ID NO: 19058 - DNA, 1199 bp, Zea mays subsp. mays
  misc_feature (1)..(1199): Ceres Seq. ID no. 12368694
gcacgagaccattacctagaacatcctaaaaaaaaaaaaaaagatggcccctaaattagtctttttcttcctgttgtgctcctcgccttggcgctgcaggcgatcctccggccaccgccgccaaagctctgtggctccccaggtggccctcctctgacatctcccaggatcaagctcagggacggaaggtaccttgcgtacaaagaggatggagtacagagagacaaggccaggtacaagatcatcacagtgcacgcatttgatagcaccaaggacttcccctcgcctgtttctaaggagctcgtggaaggactgggaatttacctccttgcttatgacagagctggatatggggaaagtgaccccaatcccaaccggcatgtcaagagcgaggcgctagatatcgaggagcttgccgaccagctgggccttggccacaagttctatgtgctaggggcctcaatgggaggatactcggtttggggatgcctccagtatatacctcacaggcttgcaggagctgcgctggttgtgccaattatcaactactggtggccttcgttcccagctgaattatccaagcaggccttcaacagactgattgtgccagagcagagaactctttggattgcacacaacataccttccttgctttacctgtggatgacccagaggtggttcccttcttctgcagcagccatgcaccaccctgaaatatttagcaagcatgacatggaggttcttcagaagatgatggcaatgccaagaaccattgagaacaaatcaaggcagcaaggcatttatgaatcgatccaccgtgatttacttgtcgcttttggaacttgggagttcgatccaatgaatgtcaccaatccatttcctcaaaatgagggctctgtgcacatctggcaaggacgcgaagataggttggtgcttgttgagctgcagaggtacattgccaagaagcttccgtggatcaagtatcatgaagtcccagaaggtggacacatgttcgtgatggtagatggatggacagaccgaattctcaaggcactcttgttaggagaagagcccctagatgtgtgacagtagttccattttcaaaatgtcaaaaactgcagctgccagctgttattttacttaattttattcccaatttgtacacttgtattcctacaacaccaagactagtctaattc

SEQ ID NO: 19059 - protein, 207 aa, Zea mays subsp. mays
  misc_feature (1)..(207): Ceres Seq. ID no. 12368695
MGGYSVWGCLQYIPHRLAGAALVVPIINYWWPSFPAELSKQAFNRLIVPEQRTLWIAHNIPSLLYLWMTQRWFPSSAAAMHHPEIFSKHDMEVLQKMMAMPRTIENKSRQQGIYESIHRDLLVAFGTWEFDPMNVTNPFPQNEGSVHIWQGREDRLVLVELQRYIAKKLPWIKYHEVPEGGHMFVMVDGWTDRILKALLLGEEPLDV

SEQ ID NO: 19060 - protein, 140 aa, Zea mays subsp. mays
  misc_feature (1)..(140): Ceres Seq. ID no. 12368696
MTQRWFPSSAAAMHHPEIFSKHDMEVLQKMMAMPRTIENKSRQQGIYESIHRDLLVAFGTWEFDPMNVTNPFPQNEGSVHIWQGREDRLVLVELQRYIAKKLPWIKYHEVPEGGHMFVMVDGWTDRILKALLLGEEPLDV

SEQ ID NO: 19061 - protein, 128 aa, Zea mays subsp. mays
  misc_feature (1)..(128): Ceres Seq. ID no. 12368697
MHHPEIFSKHDMEVLQKMMAMPRTIENKSRQQGIYESIHRDLLVAFGTWEFDPMNVTNPFPQNEGSVHIWQGREDRLVLVELQRYIAKKLPWIKYHEVPEGGHMFVMVDGWTDRILKALLLGEEPLDV

SEQ ID NO: 19062 - DNA, 1229 bp, Zea mays subsp. mays
  misc_feature (1)..(1229): Ceres Seq. ID no. 12368710
gcacgagaccattacctagaacatcctaatcaaaaaatcaagctgcccattccctcgtgacagcagctgcctgcctgctccgaggcgccacccagctcttcctcgccccagcagccgcttcccgagatccttttcactttcaccaccagggtacatagaccgcatctgcggtgctctgcgctcctcggactcgatttgttggttcatccatccagctgccgccggacgtcgatcagctacctatcttgaaaccacaggaccgagcgtggaaactcccggaccggacattccattttccattccgaagggggggtgagaaggcggggaatgagtacaaccaaggtgaagagacgtgtgggcaagtatgagctcggccggaccataggcgagggcaccttcgcgaaggtcaggttcgcgagggacacggtcaccggcgaggccgtggccattaagatcctggacaaggagaaggtcctcaggcacaagatggttgagcagatcaagcgggagatctcgacgatgaagctgatcaagcaccctaacgtcgtccgcatatacgaggtgatgggaagtaaaacaaagatctacattgtgttagaattcgctaccggtggcgagctctttgatacaattgttaaccatggtcgaatgagggaagacgaggcaaggaggtacttccaacagttaatcaatgcagttgattattgtcatagcaggggtgtgtaccaccgggatttaaaacctgaaaatttgctgcttgattcatatggtaacctgaaggtctctgactttgggctcagcgcgctatctcagcaaatcaaggatgatggactgctgcacacaacttgtgggactccaaactatgttgcaccagaggtccttgaagatcaaggctacgatggagcaatggctgatctgtggtcatgtggagttatcctgtttgttctgctagcagggtatttgccgtttgaggattctaatctcatgactttgtataagaaaatatcaaatgcagaatttacatttccaccatggacatcttttcctgccaagaggttgttaacaagaatccttgatccaaatccaatgacgagaataacaatcccagaaatattagaggatgagtggttcaaaaagggctacaagcgcccagaatttgatgaacaatatgacaccacattggatgatgtggatgccgtcttcaatgattcagaagagcaccatgtggc

SEQ ID NO: 19063 - protein, 300 aa, Zea mays subsp. mays
  misc_feature (1)..(300): Ceres Seq. ID no. 12368711
MSTTKVKRRVGKYELGRTIGEGTFAKVRFARDTVTGEAVAIKILDKEKVLRHKMVEQIKREISTMKLIKHPNVVRIYEVMGSKTKIYIVLEFATGGELFDTIVNHGRMREDEARRYFQQLINAVDYCHSRGVYHRDLKPENLLLDSYGNLKVSDFGLSALSQQIKDDGLLHTTCGTPNYVAPEVLEDQGYDGAMADLWSCGVILFVLLAGYLPFEDSNLMTLYKKISNAEFTFPPWTSFPAKRLLTRILDPNPMTRITIPEILEDEWFKKGYKRPEFDEQYDTTLDDVDAVFNDSEEHHV

SEQ ID NO: 19064 - protein, 247 aa, Zea mays subsp. mays
  misc_feature (1)..(247): Ceres Seq. ID no. 12368712
MVEQIKREISTMKLIKHPNVVRIYEVMGSKTKIYIVLEFATGGELFDTIVNHGRMREDEARRYFQQLINAVDYCHSRGVYHRDLKPENLLLDSYGNLKVSDFGLSALSQQIKDDGLLHTTCGTPNYVAPEVLEDQGYDGAMADLWSCGVILFVLLAGYLPFEDSNLMTLYKKISNAEFTFPPWTSFPAKRLLTRILDPNPMTRITIPEILEDEWFKKGYKRPEFDEQYDTTLDDVDAVFNDSEEHHV

SEQ ID NO: 19065 - protein, 236 aa, Zea mays subsp. mays
  misc_feature (1)..(236): Ceres Seq. ID no. 12368713
MKLIKHPNVVRIYEVMGSKTKIYIVLEFATGGELFDTIVNHGRMREDEARRYFQQLINAVDYCHSRGVYHRDLKPENLLLDSYGNLKVSDFGLSALSQQIKDDGLLHTTCGTPNYVAPEVLEDQGYDGAMADLWSCGVILFVLLAGYLPFEDSNLMTLYKKISNAEFTFPPWTSFPAKRLLTRILDPNPMTRITIPEILEDEWFKKGYKRPEFDEQYDTTLDDVDAVFNDSEEHHV

SEQ ID NO: 19066 - DNA, 1103 bp, Zea mays subsp. mays
  misc_feature (1)..(1103): Ceres Seq. ID no. 12368722
gcacgagaccattacctagaacatcctaatcgaaaaagagcgaagtgtaatttgaatggcaggcacaagacagagaagcaggtgggaagtcgacgcagttgtttgttgtggatgagttgcgtgtgttgctgctgccgcgcgtgcgtgtcccccgacggccccggaccacgactccctcctcccgccgccgccttctccttcgtcggggaccgaatgcagcgggtcgtcgtcatgcgccacggcgatcgcctcgaccattccgagcccatgtggcccgccaacaagccgcgcccctgggatccgcctctcgacgacgccggcctcctccgcgcctggaccgtcggcaagtgcatcagggccgccgccgccaagcagggatgggccctccaccgggtcctcgtctccccgttcctgcgatgccgacagaccgccgcgcgcgccgtcgccgcgctatgtgccgtccccgacgacgacgcgctgctcgcggtcggcgacccggccaatgtgcccctcgacacctcacgcgtcaaggtgtctatcgagtatggattgtctgagatgatgaacacccaagcaatgggcattactgttagcaagctggctcccaacgtcagcaagtggtttcctgacttgccagagcttgaagccgacttcccggctggaaccatcgaccattctgcagaaccaatctacccggagctaccaaagtgggaggaatccatcatggaggcaagaagcagatacgcaagcataatcaaagctcttgctgacaaatatcctcatgaaaacctgctattagtaacacacggtgagggcgttggtgcatccatttcctactttgagatgggactagagatctacgacgtggagtactgtgcgtactctgttctggagaggcaggtgactgcagagcctggtgatgagcatgggggctttacctttaccgcggatagcttcaaggtcatgaccaagagtggtagcacaggcatacgatacgccccggtgtgagagggctggtttcttggttgagcaatatttttttaaaagcatgaatacctggactgtctttttaatactttcaacttttttatgacgatcttttg

SEQ ID NO: 19067 - protein, 335 aa, Zea mays subsp. mays
  misc_feature (1)..(335): Ceres Seq. ID no. 12368723
ARDHYLEHPNRKRAKCNLNGRHKTEKQVGSRRSCLLWMSCVCCCCRACVSPDGPGPRLPPPAAAFSFVGDRMQRVVVMRHGDRLDHSEPMWPANKPRPWDPPLDDAGLLRAWTVGKCIRAAAAKQGWALHRVLVSPFLRCRQTAARAVAALCAVPDDDALLAVGDPANVPLDTSRVKVSIEYGLSEMMNTQAMGITVSKLAPNVSKWFPDLPELEADFPAGTIDHSAEPIYPELPKWEESIMEARSRYASIIKALADKYPHENLLLVTHGEGVGASISYFEMGLEIYDVEYCAYSVLERQVTAEPGDEHGGFTFTADSFKVMTKSGSTGIRYAPV

SEQ ID NO: 19068 - protein, 298 aa, Zea mays subsp. mays
  misc_feature (1)..(298): Ceres Seq. ID no. 12368724
MSCVCCCCRACVSPDGPGPRLPPPAAAFSFVGDRMQRVVVMRHGDRLDHSEPMWPANKPRPWDPPLDDAGLLRAWTVGKCIRAAAAKQGWALHRVLVSPFLRCRQTAARAVAALCAVPDDDALLAVGDPANVPLDTSRVKVSIEYGLSEMMNTQAMGITVSKLAPNVSKWFPDLPELEADFPAGTIDHSAEPIYPELPKWEESIMEARSRYASIIKALADKYPHENLLLVTHGEGVGASISYFEMGLEIYDVEYCAYSVLERQVTAEPGDEHGGFTFTADSFKVMTKSGSTGIRYAPV

SEQ ID NO: 19069 - protein, 264 aa, Zea mays subsp. mays
  misc_feature (1)..(264): Ceres Seq. ID no. 12368725
MQRVVVMRHGDRLDHSEPMWPANKPRPWDPPLDDAGLLRAWTVGKCIRAAAAKQGWALHRVLVSPFLRCRQTAARAVAALCAVPDDDALLAVGDPANVPLDTSRVKVSIEYGLSEMMNTQAMGITVSKLAPNVSKWFPDLPELEADFPAGTIDHSAEPIYPELPKWEESIMEARSRYASIIKALADKYPHENLLLVTHGEGVGASISYFEMGLEIYDVEYCAYSVLERQVTAEPGDEHGGFTFTADSFKVMTKSGSTGIRYAPV

SEQ ID NO: 19070 - DNA, 1073 bp, Zea mays subsp. mays
  misc_feature (1)..(1073): Ceres Seq. ID no. 12368746
agttggagtcggagaattttggggtaacaggtgggttggcttcttggctgttagaaggaagggcgcctttgtgctgttctcctaatccaaaagtcgcgtgctgtgctctgctctcgcctcgcacggactcgtggtaaaggatggagaccatgtcggctctcgcgaggacggcgccgccccttgctgggaccattcgccggccgtcctgcgcgctgcggccgacggcgtccctctccttcgccgccgcttcaacgacgccccgcggccggctcgggctggggctgagcacggcgccggcggggagcgggagggcggccagggctcgcgccgtcccgcagcgcatcgtcgcctcctcggaggttgagcgaagctacattatgatcaaaccagatggtgttcagcgtggtctggttggagagattatttctcgctttgagaagaaagggtttttgttgaaaggcttaaaacttttccagtgccccaaggacttggcgcaggagcattacaaggatttgaaggataaacctttctttcctaagctgatcgattacataacttctggccctgttgtctgcatggcctgggagggtgctggtgttgttgcatcagctcgcaaattaataggagctactaacccccttcaagctgaaccagggactataaggggtgatcttgcagttcaaactggaaggaacgttgtccatggaagtgatagtcctgataatggcaagcgtgaaattgaactgtggttcaaagaaggcgagctctgccaatgggaatcagttcaagcaccgtggcttatagaataactcttgctaatcatttccagagttgtattcaatgtttttttttgtgttcgtcttgattcaaggagccatgcaagagtgtatgagtttagttcggctaagtaattagctcatgagggcttgaattatcggttctttttgaggattgaggatttttgcaactgaaacctttgatcagttgctcatgttgagaagctaatttcttgtcatatttacatgtaataaagtccctctactacagtaataaattagtatttcctatggtcc

SEQ ID NO: 19071 - protein, 222 aa, Zea mays subsp. mays
  misc_feature (1)..(222): Ceres Seq. ID no. 12368747
METMSALARTAPPLAGTIRRPSCALRPTASLSFAAASTTPRGRLGLGLSTAPAGSGRAARARAVPQRIVASSEVERSYIMIKPDGVQRGLVGEIISRFEKKGFLLKGLKLFQCPKDLAQEHYKDLKDKPFFPKLIDYITSGPVVCMAWEGAGVVASARKLIGATNPLQAEPGTIRGDLAVQTGRNVVHGSDSPDNGKREIELWFKEGELCQWESVQAPWLIE

SEQ ID NO: 19072 - protein, 219 aa, Zea mays subsp. mays
  misc_feature (1)..(219): Ceres Seq. ID no. 12368748
MSALARTAPPLAGTIRRPSCALRPTASLSFAAASTTPRGRLGLGLSTAPAGSGRAARARAVPQRIVASSEVERSYIMIKPDGVQRGLVGEIISRFEKKGFLLKGLKLFQCPKDLAQEHYKDLKDKPFFPKLIDYITSGPVVCMAWEGAGVVASARKLIGATNPLQAEPGTIRGDLAVQTGRNVVHGSDSPDNGKREIELWFKEGELCQWESVQAPWLIE

SEQ ID NO: 19073 - protein, 143 aa, Zea mays subsp. mays
  misc_feature (1)..(143): Ceres Seq. ID no. 12368749
MIKPDGVQRGLVGEIISRFEKKGFLLKGLKLFQCPKDLAQEHYKDLKDKPFFPKLIDYITSGPVVCMAWEGAGVVASARKLIGATNPLQAEPGTIRGDLAVQTGRNVVHGSDSPDNGKREIELWFKEGELCQWESVQAPWLIE

SEQ ID NO: 19074 - DNA, 1614 bp, Zea mays subsp. mays
  misc_feature (1)..(1614): Ceres Seq. ID no. 12368767
acggatggttcccaggctcccagcacagaatccacctccgccgtcaccaccgagcaacgcgcgccggcgcccttctatttcttccagcccctgctccgccgccgccgctctcctccccgcacccccgccctgtttcgccatcggcccatcgcggcacctgcccgtgccacctgaggctgggaactccaaagaggaacagcgtccatggaggctggaggcgcaggaagtggtttgaatggggcggtgcaggcaaaggggactggggctgatggtggctctgccaaaccgctgccgccttgctgcgtcaaggccagagccgccgcgccggagtccgaggccaggtgccacgccaccgtcgtttcaggatggttcactgaaccgcgatcgcgctgtggcaaagccagcaaagttcagtattacaataacccgatgtggccaggagaggccaattctttgaaagtggagaagatcttgtaccaggggaaatcgccataccaagaagtcttagtcttcgagtcgtcgacctatggtaaagtccttgtgcttgatggtattgttcagttgactgacaaggatgaatgtgcataccaggaaatgattactcacctgccactttgctcaattccatcccctaaaaaagttttggttattggtggtggtgatggaggtgtacttcgagaggtatccaggcatagttcagtggagtccattgacatatgtgagattgatcagctggttattgatgtgtgcaaagatttcttcccacacttgtctgttggatttcaagatcctcgtgttcaacttcatgtcggcgatgctgtggagttcttgagaaatgctcctgaggggacatatgatgctatcattgttgattcgtcagatccaatagggcctgctcaggaacttgtagagaagcctttttttgatacgattgctagagctttgaggcctggaggcgttctttgtaatcaagctgagagtatgtggttacatacacatttggttcaggatatgctttcaatttgccgtgaaactttcaagggttctgtacgctatgcatggacaagtgtcccaacatacccgagtggggtgattggatttttactatgtgccaaagaaggtccattggtgaactttctgactcctataaatccaattgaaaagctggaaggagctacaaaagctggaagggagatcagattttataactcagagatgcatagggcagcatttgttctcccgacctttgcaaggagagagctagaagcatattgcgtttccactgaaacagagcaagcggaggaaacaccggcggcaccactgaagttgactcttgcatccaggagtgaaattttcgctacatcctagctagaccaggactcgcgatgtaccacaagatatcaagaaaccattccttccttcctggtgccgtacctccagtatcgccattggttcatagtcttactatcacatgctatgagacgcataatgaggcatcatgtcagtaattcagtatccaaacaatgagatgagattggcatgctaagaaaggacgagctgatattacaatgtactcccttcaccatgtcagtaatttattgtccaaacaattag

SEQ ID NO: 19075 - protein, 387 aa, Zea mays subsp. mays
  misc_feature (1)..(387): Ceres Seq. ID no. 12368768
MEAGGAGSGLNGAVQAKGTGADGGSAKPLPPCCVKARAAAPESEARCHATVVSGWFTEPRSRCGKASKVQYYNNPMWPGEANSLKVEKILYQGKSPYQEVLVFESSTYGKVLVLDGIVQLTDKDECAYQEMITHLPLCSIPSPKKVLVIGGGDGGVLREVSRHSSVESIDICEIDQLVIDVCKDFFPHLSVGFQDPRVQLHVGDAVEFLRNAPEGTYDAIIVDSSDPIGPAQELVEKPFFDTIARALRPGGVLCNQAESMWLHTHLVQDMLSICRETFKGSVRYAWTSVPTYPSGVIGFLLCAKEGPLVNFLTPINPIEKLEGATKAGREIRFYNSEMHRAAFVLPTFARRELEAYCVSTETEQAEETPAAPLKLTLASRSEIFATS

SEQ ID NO: 19076 - protein, 312 aa, Zea mays subsp. mays
  misc_feature (1)..(312): Ceres Seq. ID no. 12368769
MWPGEANSLKVEKILYQGKSPYQEVLVFESSTYGKVLVLDGIVQLTDKDECAYQEMITHLPLCSIPSPKKVLVIGGGDGGVLREVSRHSSVESIDICEIDQLVIDVCKDFFPHLSVGFQDPRVQLHVGDAVEFLRNAPEGTYDAIIVDSSDPIGPAQELVEKPFFDTIARALRPGGVLCNQAESMWLHTHLVQDMLSICRETFKGSVRYAWTSVPTYPSGVIGFLLCAKEGPLVNFLTPINPIEKLEGATKAGREIRFYNSEMHRAAFVLPTFARRELEAYCVSTETEQAEETPAAPLKLTLASRSEIFATS

SEQ ID NO: 19077 - protein, 257 aa, Zea mays subsp. mays
  misc_feature (1)..(257): Ceres Seq. ID no. 12368770
MITHLPLCSIPSPKKVLVIGGGDGGVLREVSRHSSVESIDICEIDQLVIDVCKDFFPHLSVGFQDPRVQLHVGDAVEFLRNAPEGTYDAIIVDSSDPIGPAQELVEKPFFDTIARALRPGGVLCNQAESMWLHTHLVQDMLSICRETFKGSVRYAWTSVPTYPSGVIGFLLCAKEGPLVNFLTPINPIEKLEGATKAGREIRFYNSEMHRAAFVLPTFARRELEAYCVSTETEQAEETPAAPLKLTLASRSEIFATS

SEQ ID NO: 19078 - DNA, 839 bp, Zea mays subsp. mays
  misc_feature (1)..(839): Ceres Seq. ID no. 12368805
accacacgtacgcccacaccagataatacactacagcacagcaccgacaacacctctcaagtaacccagcaggcaccatggccgccgccgtgcccctcctcctcctcctgctactgccaacgaccctgatggccgcgtcggcggcgtccggcggcgagaagagcacgcacatcaagctgtactggcacgacgtggtgagcgggccgagcccgacggcggtgccggtggcgcaggcggcggtgaccaacacctccaagaccgccttcggcatggtggtggtgatcgacgacccgctgaccgagggccccgacctcaagtcctccaagccgctcggccgcgcgcagggcacctacgtcggcgcgggcaaggacgagctctccctgatgatgaacatgaatttcgtgttccaggccggcgagtacaacggcagcaccgtcgccatcatgggccggaacgccgtgttcgacgccgtccgcgagatggccgtcgtgggcggcaccggcgcgttcaggatggcgcgcgggtacgcgcaggcccgcacgcacaccttcgacctcaacaccggcgacgccaccgtcgagtacaacctctacatcaagcactagctagctagcccatcggctttgtgtttctgattgttggtgctcatatatgaacacgatcgaactccataattgtcttgtgagctcaatttgtgccactggcttttgcagttttggtgaaaaagaagagggtaattaaaggacgatagcttcggtcgttgtaagctgacttcgatttaacttgcacaatgattgaggacttaaagaataaagatagtaatagactttgtttatctg

SEQ ID NO: 19079 - protein, 175 aa, Zea mays subsp. mays
  misc_feature (1)..(175): Ceres Seq. ID no. 12368806
MAAAVPLLLLLLLPTTLMAASAASGGEKSTHIKLYWHDVVSGPSPTAVPVAQAAVTNTSKTAFGMVVVIDDPLTEGPDLKSSKPLGRAQGTYVGAGKDELSLMMNMNFVFQAGEYNGSTVAIMGRNAVFDAVREMAVVGGTGAFRMARGYAQARTHTFDLNTGDATVEYNLYIKH

SEQ ID NO: 19080 - protein, 158 aa, Zea mays subsp. mays
  misc_feature (1)..(158): Ceres Seq. ID no. 12368807
MAASAASGGEKSTHIKLYWHDVVSGPSPTAVPVAQAAVTNTSKTAFGMVVVIDDPLTEGPDLKSSKPLGRAQGTYVGAGKDELSLMMNMNFVFQAGEYNGSTVAIMGRNAVFDAVREMAVVGGTGAFRMARGYAQARTHTFDLNTGDATVEYNLYIKH

SEQ ID NO: 19081 - protein, 111 aa, Zea mays subsp. mays
  misc_feature (1)..(111): Ceres Seq. ID no. 12368808
MVVVIDDPLTEGPDLKSSKPLGRAQGTYVGAGKDELSLMMNMNFVFQAGEYNGSTVAIMGRNAVFDAVREMAVVGGTGAFRMARGYAQARTHTFDLNTGDATVEYNLYIKH

SEQ ID NO: 19082 - DNA, 1552 bp, Zea mays subsp. mays
  misc_feature (1)..(1552): Ceres Seq. ID no. 12368823
ttttttttcgcctccgaattccgatcaccaaaaaaaggcctttcttttcttttcgtcgccctctcggtgctctggcttcgctgcgtcgcccgcccgtctctaaaagccttgtgtggatcgtggacgccgacgcggccgcagcagcagccacgggacgggagtagaggcgcagagagagagagagaaagagcgagagaaaggttgtgctcgctgcctgccgccgagagacggatgaagaagtgcccatcggagctggagctggaggccttcctccgcggccgggaggacgccacggcggcggcgggcggcgggcggcggtggccgagcagaagcctgcgcacgacgtcgctgcgctggcgccgttcggcgccggtggcgtgttcccctccagcgatctgtccgccttcagcttcgctgactcgaacaccctcaatggaactggaaacatccataatcacctttggtcccataaccagaacgtcaggcatcccgcagtctccacgacgatcgagtcgcagtcgtcgatctgtgcagctgcagcagcaagtccaacatcggctaccaacctgtacctgaaagagagccaggctctgggcggcacgagtggttccgactccgacagcgattcgctgctggacatcgagggtggcccgtgcgagcagagcacgaacccacaggacgtgaagaggatgcgacggatggtgtcgaaccgtgagtctgctcgacggtccaggaagaggaagcaagcccacctagctgaccttgagacacaggtcgaccagctgcgaggcgagaacgcgtcgctcttcaagcagctgacggacgccaaccagcagttcacgaccgcggtcacggacaacaggatcctcaagtcggacgtggaggccctcagagtcaaggtgaagctggcggaggacatggtggcgcgcggcgcgctgtcgtgcgggctgggcagcctggggctgtcgccagcgctgaacccgcggcaggcgtgccgcggccccgacgtgctgtccgtgtccggcctggacttccccggcgccgacgacgcctgcttcacggggctgtccccggcggagcagctgcagctccagagctcccccctgcagagcatcgccgccagcctcgagagcctggacaaccggatggccagcgaggtcaccagctgcggggggcccggcgtcgacgtctggccgtgggaccaccactccaacggcggcctgtccaagtgaagccggagacgccgggtgggagtggggtgagactcgcgccgctcgccgacggcacctatcctgtcctagtgtatgcgtatatcgatatgcatggcgggcgctagctatgaccatgagccgccgttatttctgtgttcgctggagtggtgaaagtgaacggacttgagtttttcagagtccctcgtctccgtcggtacatttactagttctgtaatagaactgactagcttaagctcgtgctactacatatatatatgtatgctgagagactgaactcgaagcataatcatgctaccatattatgtcatcattacattccg

SEQ ID NO: 19083 - protein, 191 aa, Zea mays subsp. mays
  misc_feature (1)..(191): Ceres Seq. ID no. 12368824
FFFASEFRSPKKGLSFLFVALSVLWLRCVARPSLKALCGSWTPTRPQQQPRDGSRGAERERERARERLCSLPAAERRMKKCPSELELEAFLRGREDATAAAGGGRRWPSRSLRTTSLRWRRSAPVACSPPAICPPSASLTRTPSMELETSIITFGPITRTSGIPQSPRRSSRSRRSVQLQQQVQHRLPTCT

SEQ ID NO: 19084 - protein, 180 aa, Zea mays subsp. mays
  misc_feature (1)..(180): Ceres Seq. ID no. 12368825
MRRMVSNRESARRSRKRKQAHLADLETQVDQLRGENASLFKQLTDANQQFTTAVTDNRILKSDVEALRVKVKLAEDMVARGALSCGLGSLGLSPALNPRQACRGPDVLSVSGLDFPGADDACFTGLSPAEQLQLQSSPLQSIAASLESLDNRMASEVTSCGGPGVDVWPWDHHSNGGLSK

SEQ ID NO: 19085 - protein, 177 aa, Zea mays subsp. mays
  misc_feature (1)..(177): Ceres Seq. ID no. 12368826
MVSNRESARRSRKRKQAHLADLETQVDQLRGENASLFKQLTDANQQFTTAVTDNRILKSDVEALRVKVKLAEDMVARGALSCGLGSLGLSPALNPRQACRGPDVLSVSGLDFPGADDACFTGLSPAEQLQLQSSPLQSIAASLESLDNRMASEVTSCGGPGVDVWPWDHHSNGGLSK

SEQ ID NO: 19086 - DNA, 1132 bp, Zea mays subsp. mays
  misc_feature (1)..(1132): Ceres Seq. ID no. 12368827
agctcaccgccacctccacgctcgaagctcctcccgaaccggccgcatcgtcgccatggcagccgccgcttctgcaagctccgtgaaggaagtgctgccgtctcccctgacctccgcctccgagccccctccccttttcgatggcaccaccaggttgtacgtggcctatctttgcccgttcgcgcagcgcgcttggattgctagaaactacaagggtctgcaggacaagattaagatagttgccatcgatctcgctgacaggccagcgtggtacaaggagaaggtttatccagaaaacaaggtgccttctctagagcacgacaaccaggtgaaaggagagagcttggatttggttaagtacatcgacaacaacttcgaaggtccatcgttgctccccgaggatcatgcaaagcagcagttcgctgaggagctgctcggatacactgacgcattcaacaaagcattttactcatgtttagtcgacagggaagatgtgtctgaggaagccgttgctgccttggacaaaatagaagacgccctggggaaattcaacgacggcccgttcttccttggccagttcagtctggtggacgttgcgtatgtaccgttcatcgagaggtttcagatactctattccaatataaagaactatgacatcacaaagggcagacccagccttcagaaattcatcgaggaagtgaacaagatcgatgcgtacacacagactaaactggacccgcagtttttgcttgagcaaacaaagaagcggcttgggattgcttaaagcctgtgaccaaggacgagactttcgccagaagcaccagcgtagtagatcggagctcgttttagtaggttgtgtgcttggatattacgtctggtcttcaataaggcatggccttctttaatggctgtgcttctgaaaataaataaactagttgtccaggtattatcgttgctttggtgacgtgtcgatgtcactgtatatatatgaatgggtgggaaagaatgatgatgtgcagtgtgttctgtgcaaatattgccgagatgaaggatcagtatccatgtagacattcatatattgctcatattgtgacacggcgcatgaaagacatggtttcggcccctaccacgc

SEQ ID NO: 19087 - protein, 260 aa, Zea mays subsp. mays
  misc_feature (1)..(260): Ceres Seq. ID no. 12368828
AHRHLHARSSSRTGRIVAMAAAASASSVKEVLPSPLTSASEPPPLFDGTTRLYVAYLCPFAQRAWIARNYKGLQDKIKIVAIDLADRPAWYKEKVYPENKVPSLEHDNQVKGESLDLVKYIDNNFEGPSLLPEDHAKQQFAEELLGYTDAFNKAFYSCLVDREDVSEEAVAALDKIEDALGKFNDGPFFLGQFSLVDVAYVPFIERFQILYSNIKNYDITKGRPSLQKFIEEVNKIDAYTQTKLDPQFLLEQTKKRLGIA

SEQ ID NO: 19088 - protein, 242 aa, Zea mays subsp. mays
  misc_feature (1)..(242): Ceres Seq. ID no. 12368829
MAAAASASSVKEVLPSPLTSASEPPPLFDGTTRLYVAYLCPFAQRAWIARNYKGLQDKIKIVAIDLADRPAWYKEKVYPENKVPSLEHDNQVKGESLDLVKYIDNNFEGPSLLPEDHAKQQFAEELLGYTDAFNKAFYSCLVDREDVSEEAVAALDKIEDALGKFNDGPFFLGQFSLVDVAYVPFIERFQILYSNIKNYDITKGRPSLQKFIEEVNKIDAYTQTKLDPQFLLEQTKKRLGIA

SEQ ID NO: 19089 - DNA, 984 bp, Zea mays subsp. mays
  misc_feature (1)..(984): Ceres Seq. ID no. 12368845
gcacgagaccattacctagaacatcctaatcgaaaaatgatcggtgcaaggcgagacgttggcgacataggaacaggaggcgaagaggcgacggtgcatagctccaatggtgaccctccccgtcgccttctcactatacttctggttgccccttcggtgagggttgccattttatccattactttcttagtggctaccaggccgtttaaaaatgaccaacctcctggaagtatgatgatggatgggtcacctacacccgtcgtgaagactcgcttgtgcaacaagtacaacactgcaaagggatgcaaatgggggacaaatgctactttgcacatggtgaaagggagcttggcaagtctatgatggacaactatatgccaccccaatcgaaccaagacccactggttattttgcgcctccacctatggcctaccctggcttggccactctaactagatttggcgcttctgccacaaccaagatcggtgttgatacgtcctttgcaggtagcatcattgggagggggtggagctaacacaaagcaaatatctttcgtcataggagccaagctggccatctgagaccatgaatcatacaccagcttgaaaacattgaacttgagggcacctttgatcagatcaggaacgctagcgctatggtcagtgagttgattgtcagtgttagtggcattgctcccccacaggtcaagaacccaactgatagaactcatcatggtggaggcataggaagcaacttcaagaccaaaatgtgtgagaacttgtcggtaaatgccactttgcacacagtgagagtgagctgcgcatgcctactgctgcttgagatccatgccttgtttcatacctcgtagtcattagtcaatgtaactctaaacttggccaccgatgatggatttgctggcttctttaggcctacgctactgaattggtgtcttcagtcctactattgaatttactgacttctttc

SEQ ID NO: 19090 - protein, 120 aa, Zea mays subsp. mays
  misc_feature (1)..(120): Ceres Seq. ID no. 12368846
ARDHYLEHPNRKMIGARRDVGDIGTGGEEATVHSSNGDPPRRLLTILLVAPSVRVAILSITFLVATRPFKNDQPPGSMMMDGSPTPVVKTRLCNKYNTAKGCKWGTNATLHMVKGSLASL

SEQ ID NO: 19091 - protein, 108 aa, Zea mays subsp. mays
  misc_feature (1)..(108): Ceres Seq. ID no. 12368847
MIGARRDVGDIGTGGEEATVHSSNGDPPRRLLTILLVAPSVRVAILSITFLVATRPFKNDQPPGSMMMDGSPTPVVKTRLCNKYNTAKGCKWGTNATLHMVKGSLASL

SEQ ID NO: 19092 - protein, 70 aa, Zea mays subsp. mays
  misc_feature (1)..(70): Ceres Seq. ID no. 12368848
MVSELIVSVSGIAPPQVKNPTDRTHHGGGIGSNFKTKMCENLSVNATLHTVRVSCACLLLLEIHALFHTS

SEQ ID NO: 19093 - DNA, 968 bp, Zea mays subsp. mays
  misc_feature (1)..(968): Ceres Seq. ID no. 12368885
acataacccgccattcccactcccctcgccgcctgcgtccacctccgccccccgccctccccgcgtcccccctctcctacgcagatcgtccaggtaagatgtcgtccgaggcggtgaaggtggcggtgccggagtcggtactccgcaagcggaagcgcgaggagcagtgggccgccgagaagaaggagaagtccctggccgagaggaagaagtccatcgagaaccggaagctcatcttcacccgcgccaagcagtacgccgaggagtacgatgcccaggagaaggaactggtacagcttaagcgtgaggcccgtttgaagggtggtttctatgtcagtcctgaggcaaagctgctatttgtgatccgcatccgtggtatcaatgccatgcatcctaagaccaggaagatattgcagcttctgcgtttgaggcagatattcaatggcgtgttcctgaaagtcaacaaggctaccattaacatgcttcgcagggttgagccttatgttgcatatgggtacccgaacttgaagagtgtcagggagttgatctacaagaggggctacggaaaactgaacaagcagaggatccctctgtctaacaaccaagtcatcgaggagggcttgggcaagcacaacatcatttgcattgaggatcttgttcatgagatcatgactgtcggcccacacttcaaggaggcgaacaacttcctttggccatttaagctgaaggcaccgctgggaggtctgaagaagaagaggaaccactatgtggagggtggtgatgccggtaaccgtgagaattacatcaacgagctcatcaaaaggatgaattaggttcacgatcaagctctattgtgttctaagaaactttctgtgctctcccaattttacattattaggaagcggatgaatatgcatgcagttttgttgtttggaactagatgtgtatggaagaaacatgatcttttc

SEQ ID NO: 19094 - protein, 276 aa, Zea mays subsp. mays
  misc_feature (1)..(276): Ceres Seq. ID no. 12368886
ITRHSHSPRRLRPPPPPALPASPLSYADRPGKMSSEAVKVAVPESVLRKRKREEQWAAEKKEKSLAERKKSIENRKLIFTRAKQYAEEYDAQEKELVQLKREARLKGGFYVSPEAKLLFVIRIRGINAMHPKTRKILQLLRLRQIFNGVFLKVNKATINMLRRVEPYVAYGYPNLKSVRELIYKRGYGKLNKQRIPLSNNQVIEEGLGKHNIICIEDLVHEIMTVGPHFKEANNFLWPFKLKAPLGGLKKKRNHYVEGGDAGNRENYINELIKRMN

SEQ ID NO: 19095 - protein, 244 aa, Zea mays subsp. mays
  misc_feature (1)..(244): Ceres Seq. ID no. 12368887
MSSEAVKVAVPESVLRKRKREEQWAAEKKEKSLAERKKSIENRKLIFTRAKQYAEEYDAQEKELVQLKREARLKGGFYVSPEAKLLFVIRIRGINAMHPKTRKILQLLRLRQIFNGVFLKVNKATINMLRRVEPYVAYGYPNLKSVRELIYKRGYGKLNKQRIPLSNNQVIEEGLGKHNIICIEDLVHEIMTVGPHFKEANNFLWPFKLKAPLGGLKKKRNHYVEGGDAGNRENYINELIKRMN

SEQ ID NO: 19096 - protein, 148 aa, Zea mays subsp. mays
  misc_feature (1)..(148): Ceres Seq. ID no. 12368888
MHPKTRKILQLLRLRQIFNGVFLKVNKATINMLRRVEPYVAYGYPNLKSVRELIYKRGYGKLNKQRIPLSNNQVIEEGLGKHNIICIEDLVHEIMTVGPHFKEANNFLWPFKLKAPLGGLKKKRNHYVEGGDAGNRENYINELIKRMN

SEQ ID NO: 19097 - DNA, 910 bp, Zea mays subsp. mays
  misc_feature (1)..(910): Ceres Seq. ID no. 12368950
aacacgctaccgtctcacagccgtaaacgcccctcccggatcccgctagttcgccaccgccgcccgcccgcccgccgttcgcctcatcatggccgcctcgtcgaccgccacctccgtccacgacttcatcgtcaaggatgcgagcggcaaagacgttgacctcagcacctacaaggggaaggttcttctcattgttaacgtcgcatcccagtgtggcttaaccaactccaactacactgagctggcccagctctatgagaagtacaaggaccaaggctttgaaatcctggctttcccatgcaaccagtttggtgggcaggagcctggtaccaatgaggagattgtccagtttgcctgcacacgcttcaaggctgagtaccccatcttcgacaaggttgatgtcaacggtagcaatgctgcgcccatctacaagttcttgaaatctagcaaaggtggccttttcggcgacagcatcaagtggaacttttccaagttcttggttgacaaggagggacgtgttgtggatcgctatgctccaaccacttcacccctgagcattgagaaggatatcaagaagctgcttgggagctcttaatcagtatctgggtgcaaagctgtagaaaaacatgtatcaacaatgccctgagcgataaaatatatgataagttgtattaataaagtattgtcgtacttgagaggttgcagtatctgctctatttcccttgcatacactccgtacttgtatatccccttcggagctgatttggtgacccgggatcccaggaggatcggaggggattgagaaggaaattagttgatttcccccttaatccccttcaatcctcccgggatccccttgtcaccaaatcagccctcgaatgaattccaatgctgtatcagtttgctaccc

SEQ ID NO: 19098 - protein, 168 aa, Zea mays subsp. mays
  misc_feature (1)..(168): Ceres Seq. ID no. 12368951
MAASSTATSVHDFIVKDASGKDVDLSTYKGKVLLIVNVASQCGLTNSNYTELAQLYEKYKDQGFEILAFPCNQFGGQEPGTNEEIVQFACTRFKAEYPIFDKVDVNGSNAAPIYKFLKSSKGGLFGDSIKWNFSKFLVDKEGRVVDRYAPTTSPLSIEKDIKKLLGSS

SEQ ID NO: 19099 - DNA, 1446 bp, Zea mays subsp. mays
  misc_feature (1)..(1446): Ceres Seq. ID no. 12368983
accttgtgttcttgcgctttctagctaggaagctctccttccttccgcgtagcctagacgaccactgtgcctgatcctgtcagctcagaacgtccgctctgccctccacgagtaagcgtggcgtcgccgtcgccgtcggggcggcgcttcccgtcggacaccacggcgatcgcgagctggcttccgtcgcccgccggcgccggccggggggacgacctctcgctgggtttcaatgccggcgccgcctccgcctcgtctggcgcctcgctggcggcagggctctggggctccgcggcgtcgcgccaggccgcggctgctgccgctgccgccgccgccgccgcggcgctcggctacggggcgataggccccaccggcgacgtcgggatgctcgtcgtcgcgcctccgggctcgttccaccaccagcgggcagccgacgacgacgactccgtgctcccgctcgtcaccgcggcgcagcgcaccctcgtcaacgcagacgccgcctccggcggccacggcaatccgcccgtgtcgtccgctggtgccatccagttttggcaccaggagccggccccggatgggcatgggtcccacggcgagaaggccgtcgccatgctggatcacgccagcggcgggcccgggtccggcggggcgacgtgccaggactgcggcaaccaggcgaagaaaggctgcgcgcacagccgctgccgcacgtgctgcaacagccgtggcttcgagtgtgacacccatgtcaggagcacctgggtgcccgccgcgcgccgccgagagcgcctgcagctcgcgggtggcggtggcgccggcgccggagcctcccctcctccccccacgcccgccacgaccaagaaaccccgcctggcgtgcccgatccccacgacgacggcggccaactctcgcgcctccacctccaacgccaccacgcctcgcagcttcgacgcctcctccggccaccaagacgcgtctttcaaggacagcctgccgcggcatgtgcgcgggccggcggtgttccggtgcgtgcgggtgacgtccgtggacgacggcggcggcggcggcggcaccaacggcgaggtcgcgtaccaggcggcggtgaccatcaacgggcacctgttcaggggcctcctctacgaccacggcgccgaagccgtgatgcccaccgcgtccgacctcaacctcggcagcgccgcccccaacctgtacagcggcgccagcgccccgctcatcctgggtggcctgggcagctgggctacggtaacacacacaccgtgaagttctgatcggtgagaagcaacaccgatcgagcaagggtggagtggagtagttccgttgtttgtccgctcgctttctttgtttcagctcattgtgactgctagcagcagtatagcagtgcagtggctcagcttcatgttactgaaagtgttgccatgtcgtgtc

SEQ ID NO: 19100 - protein, 298 aa, Zea mays subsp. mays
  misc_feature (1)..(298): Ceres Seq. ID no. 12368984
MLVVAPPGSFHHQRAADDDDSVLPLVTAAQRTLVNADAASGGHGNPPVSSAGAIQFWHQEPAPDGHGSHGEKAVAMLDHASGGPGSGGATCQDCGNQAKKGCAHSRCRTCCNSRGFECDTHVRSTWVPAARRRERLQLAGGGGAGAGASPPPPTPATTKKPRLACPIPTTTAANSRASTSNATTPRSFDASSGHQDASFKDSLPRHVRGPAVFRCVRVTSVDDGGGGGGTNGEVAYQAAVTINGHLFRGLLYDHGAEAVMPTASDLNLGSAAPNLYSGASAPLILGGLGSWATVTHTP

SEQ ID NO: 19101 - protein, 223 aa, Zea mays subsp. mays
  misc_feature (1)..(223): Ceres Seq. ID no. 12368985
MLDHASGGPGSGGATCQDCGNQAKKGCAHSRCRTCCNSRGFECDTHVRSTWVPAARRRERLQLAGGGGAGAGASPPPPTPATTKKPRLACPIPTTTAANSRASTSNATTPRSFDASSGHQDASFKDSLPRHVRGPAVFRCVRVTSVDDGGGGGGTNGEVAYQAAVTINGHLFRGLLYDHGAEAVMPTASDLNLGSAAPNLYSGASAPLILGGLGSWATVTHTP

SEQ ID NO: 19102 - protein, 154 aa, Zea mays subsp. mays
  misc_feature (1)..(154): Ceres Seq. ID no. 12368986
MGMGPTARRPSPCWITPAAGPGPAGRRARTAATRRRKAARTAAAARAATAVASSVTPMSGAPGCPPRAAESACSSRVAVAPAPEPPLLPPRPPRPRNPAWRARSPRRRRPTLAPPPPTPPRLAASTPPPATKTRLSRTACRGMCAGRRCSGACG

SEQ ID NO: 19103 - DNA, 1218 bp, Zea mays subsp. mays
  misc_feature (1)..(1218): Ceres Seq. ID no. 12368991
acgtttctttaccctaaacttttcactgcttcgtcgagggcagagccgccgccgtttctcaatctcctcgcagcgccggcgctccatcttcgctcccttccttactcgctctcggcacgcaggcggcggcgctgggctctcggcacgcaggcggcggcgctggggctctcgggcacgcaggcggcgacgctgggctctcggcgaccgcgtcagcggcttcccctccggcctctcgccagtcaccgcgcgccctcgcccctggtcctctgcacaccggccggtggccctgcgtgcttgcccttctctctcccctcccgcctccggtggatcgtcaacggcgcccggccccggcggcagcgcggcgcgcgatctcgagggcagcgggagccagcagccgctgctccaccaaggcggaagcaaagcgttacccttcctcttagcgcttcagcgcgctgacgcgtgcgcttagttccgccttttggaaccctgaaccctgagctttaagaagacactactgctgcaaccatgagcaccatgaagttttgtcgcgagtgcaacaacatcctgtaccccaaggaggacagggacaggcgcaccctgttctttgcatgtcgcaactgcgagcatcaggaggtctctgacaataactgtgtctatcggaacgaggtgcaccacactgctggggagcgaacccaggtcttgcaggatgtagcttctgatccaactcttcccagaaccaagactgtccgctgcaatctctgtgggcatggagaggctgttttcttccaggccgcagcaagaggggaggaggggatgaccctgttctttgtgtgctgcagccctgattgtggtcatcggtggagggaatgatgcgatgaaatcttcgctctaatagttgtttcatcagagcatgaaacttaacttgttttgtagttttcttggaactatgtatttcgaatctgtcctaagattaatgagagaatgtctttccaatattttatttaattctacgtatatatgatatgtagctgcaaccacatagtacgtagtctcatatgcttgttctgccccagaactcagagagttaggaggagcaaataaggtattcttaatgagttaggaggtgtttagttggctctgcctagagttttggagactcacatacttgctctcctaaatgggggactcttcgctttatgtacattttttccctcttct

SEQ ID NO: 19104 - protein, 155 aa, Zea mays subsp. mays
  misc_feature (1)..(155): Ceres Seq. ID no. 12368992
RFFTLNFSLLRRGQSRRRFSISSQRRRSIFAPFLTRSRHAGGGAGLSARRRRRWGSRARRRRRWALGDRVSGFPSGLSPVTARPRPWSSAHRPVALRACPSLSPPASGGSSTAPGPGGSAARDLEGSGSQQPLLHQGGSKALPFLLALQRADACA

SEQ ID NO: 19105 - protein, 151 aa, Zea mays subsp. mays
  misc_feature (1)..(151): Ceres Seq. ID no. 12368993
TFLYPKLFTASSRAEPPPFLNLLAAPALHLRSLPYSLSARRRRRWALGTQAAALGLSGTQAATLGSRRPRQRLPLRPLASHRAPSPLVLCTPAGGPACLPFSLPSRLRWIVNGARPRRQRGARSRGQREPAAAAPPRRKQSVTLPLSASAR

SEQ ID NO: 19106 - protein, 114 aa, Zea mays subsp. mays
  misc_feature (1)..(114): Ceres Seq. ID no. 12368994
MSTMKFCRECNNILYPKEDRDRRTLFFACRNCEHQEVSDNNCVYRNEVHHTAGERTQVLQDVASDPTLPRTKTVRCNLCGHGEAVFFQAAARGEEGMTLFFVCCSPDCGHRWRE

SEQ ID NO: 19107 - DNA, 1006 bp, Zea mays subsp. mays
  misc_feature (1)..(1006): Ceres Seq. ID no. 12368995
aaaaaactgagtaaaaaaacacaagaacataaccgcagcaataacaatatacacaaagacgggagagagaagagagatggcggaagcgacgccgtacgaggagcagcggcggaggcaggtggaggcgaacaaacggaagctggaggagctgcagctccaccacctctctgctgccatcagagaggccgccgccgccgccaagccctcgctggtcaagaagcggaaggcgcgggtgcctctcgacgtcgccgacgccgtgatggagccagtacggcggtccggccggctcgccaacctcccggataagcccgtgtaccgcgagaaggttcccgattttgggatgaagattaggaggacgtacggatcggtgagaagagatctgaccaaccgggtgtacgcgaccgacgatgcgaggagctacgccatctctaaggcggaggatctggagcaagagctggactccagcttccccatcttcatcaagcccatgacccagtcccatgtcaccgggggcttctggctgggccttccgattcatttctgccggaagtatctgcccaagcgtgacgagatgatcaccctggtggatgaggatgatgacgagtccgacacgctgtacctcgcaatgaagcgggggctcagtgctggatggagagggtttgccgtccagcagaagctggtggatggagattgcctggtcttccagctgattgagcaaacaaagttcaaggtctacataactagagcaagttcctactacgaaagcgaggactgatgaaactagtagcttgtaatctggtgattggagctcagttatggaggtggctgcgttggacaagcttgcatctgggaatcgctggggtgtcttgaaactttttggtggcagaaagttagctgatgtatgaaacccagtatctcctaccaattgttgctgatttgtgtacttcttgggcttaccacttgcacggttcagaaacctgcactatgtaagggggttgttggtggc

SEQ ID NO: 19108 - protein, 232 aa, Zea mays subsp. mays
  misc_feature (1)..(232): Ceres Seq. ID no. 12368996
MAEATPYEEQRRRQVEANKRKLEELQLHHLSAAIREAAAAAKPSLVKKRKARVPLDVADAVMEPVRRSGRLANLPDKPVYREKVPDFGMKIRRTYGSVRRDLTNRVYATDDARSYAISKAEDLEQELDSSFPIFIKPMTQSHVTGGFWLGLPIHFCRKYLPKRDEMITLVDEDDDESDTLYLAMKRGLSAGWRGFAVQQKLVDGDCLVFQLIEQTKFKVYITRASSYYESED

SEQ ID NO: 19109 - protein, 171 aa, Zea mays subsp. mays
  misc_feature (1)..(171): Ceres Seq. ID no. 12368997
MEPVRRSGRLANLPDKPVYREKVPDFGMKIRRTYGSVRRDLTNRVYATDDARSYAISKAEDLEQELDSSFPIFIKPMTQSHVTGGFWLGLPIHFCRKYLPKRDEMITLVDEDDDESDTLYLAMKRGLSAGWRGFAVQQKLVDGDCLVFQLIEQTKFKVYITRASSYYESED

SEQ ID NO: 19110 - protein, 144 aa, Zea mays subsp. mays
  misc_feature (1)..(144): Ceres Seq. ID no. 12368998
MKIRRTYGSVRRDLTNRVYATDDARSYAISKAEDLEQELDSSFPIFIKPMTQSHVTGGFWLGLPIHFCRKYLPKRDEMITLVDEDDDESDTLYLAMKRGLSAGWRGFAVQQKLVDGDCLVFQLIEQTKFKVYITRASSYYESED

SEQ ID NO: 19111 - DNA, 1493 bp, Zea mays subsp. mays
  misc_feature (1)..(1493): Ceres Seq. ID no. 12369010
gagatggtctaacgtgatgtcatagggtgattgtcttctgttctgtctggcagttttttttttttgagaatccgatgcgatcaaggctagaattgtttatcgctcgcgggcgggaagtgtggtgacgcgtctcgatccgcgcaccgcttgggcttctcgtaggagtagtggagtactgctcagcctgtcaccgtcagcgtatgttcttgttccagttcctatttttactccaagtccactagggatcctatccagattcgtggggacactctcttcgagttccaggcttccaaggtccaagggccgtagcatttgtctggttggattgggttgttccgcttgggtagccgggtgggatcggaatctgtgtggcacccatggcggcggtcgaggggacgaagaagaaggtaatcatcgacaccgaccccggaattgatgacgcgatggccatcttcttggcgctgcggtcgccggagctggaggtgctgggcctcaccactaccttcggcaacgtccacaccgccctcgccacgcgcaacgcgctccacctgctggaggctgttggcaggactgacatccccgtggcagagggatcccatctaacgatcaagaaagccaccaaattgaggatcgcaagcttcgtccacggttcagacggcctgggaaatcaggacttccctccaccagctaccaagcctgtaaatcagtctgctgctgccttcctggttgagcaggcaaatctgtaccctggtcaagttaccgttgtcgccctcggcccacttaccaaccttgctctggcagtcgagcttgatcctgcgttcccggagaagatagggcagattattattcttggcggtgcgtattcagttaatggaaacgtgaaccctgcagctgaggcgaacatcttcggggatcctgacgcggcagatatcgtgttcacctgcggtgctgatattttggccgtgggactaaatgtaacccaccaagtcgttctaaccgatgctgaccgggagaagcttgagcagtgtgacagcaaatacgcccgctacttgtgcaagctaatgggcgtttattttgattaccacagggacgcctacttcataaaaggagcgtatcttcacgatccaacgacggttattgctgcggtgaacccatcgctgctgacttacacagaaggcgttgtgagggtacagacggtcgggatcaccaagggccttactgttttcgacaacaccaagaaaaggtacggagagatcacggcctggagtggcatgcccaccgtgaaggtcgctgtcaccgtcgatgcccctgccgtggtagagctgatagtgcagaggctgatgaccgatgactagcaacaacgccaccagctgatccggttgggatcatcatgtggttatgtgcgtgcttggtgtttacgtacagtttatatatgcttgacacgtttgctgatgcttctgagagaacgtgattaaattaaattaaacttgatt

SEQ ID NO: 19112 - protein, 325 aa, Zea mays subsp. mays
  misc_feature (1)..(325): Ceres Seq. ID no. 12369011
MAAVEGTKKKVIIDTDPGIDDAMAIFLALRSPELEVLGLTTTFGNVHTALATRNALHLLEAVGRTDIPVAEGSHLTIKKATKLRIASFVHGSDGLGNQDFPPPATKPVNQSAAAFLVEQANLYPGQVTVVALGPLTNLALAVELDPAFPEKIGQIIILGGAYSVNGNVNPAAEANIFGDPDAADIVFTCGADILAVGLNVTHQVVLTDADREKLEQCDSKYARYLCKLMGVYFDYHRDAYFIKGAYLHDPTTVIAAVNPSLLTYTEGVVRVQTVGITKGLTVFDNTKKRYGEITAWSGMPTVKVAVTVDAPAVVELIVQRLMTDD

SEQ ID NO: 19113 - protein, 303 aa, Zea mays subsp. mays
  misc_feature (1)..(303): Ceres Seq. ID no. 12369012
MAIFLALRSPELEVLGLTTTFGNVHTALATRNALHLLEAVGRTDIPVAEGSHLTIKKATKLRIASFVHGSDGLGNQDFPPPATKPVNQSAAAFLVEQANLYPGQVTVVALGPLTNLALAVELDPAFPEKIGQIIILGGAYSVNGNVNPAAEANIFGDPDAADIVFTCGADILAVGLNVTHQVVLTDADREKLEQCDSKYARYLCKLMGVYFDYHRDAYFIKGAYLHDPTTVIAAVNPSLLTYTEGVVRVQTVGITKGLTVFDNTKKRYGEITAWSGMPTVKVAVTVDAPAVVELIVQRLMTDD

SEQ ID NO: 19114 - DNA, 2463 bp, Zea mays subsp. mays
  misc_feature (1)..(2463): Ceres Seq. ID no. 12369025
ctggtcttctgcgagaagcacacgaagcaaccggggcacctccgcctgcgcctcccctctcagctactctgtttgtacgcggccgcatccatttcgtctgcccaggaatggaggaagaatatctgcagtgagggactgaggggatcccaggttccagacaaaactcaccgaggaaaaccattctccgacatggtgaggatgagaaggaggttggtgctgctgctgctcctcctcggcctcacggtgctttccccgctcgcgctctacactagccgcctctccgtggcgcttaactctataccgcgggttttccctggagaaatcacgaatcagggccgtggcgtcgaggcagataagctgaatgcgcttcctctggaaacagtgagctccttgaaagaacctgtcgacattgtcttctcagaggagctgactgaatctaagagccaagaattgcgattgccaaaggtaggtgcgcacaagagccgtgtgctctctgaagtcacggttgctgatgatggtacatcatcgaaagataatgaagtgattgagcaagtaattacgctggaagcacaggatggtggcttggtgaagggagcaggtgtttcagatgagcaggagaaaaacattggatctctgcagcaatcttcttctgaggaaagttcacaggacactatgcctaaacagacacctgcaaaggttgttgcggagaactcccaatcagctagaacagacggtaaaactaaaaccgctgttctacctgatatgcggatccgaaatatcaaggatcagttaatcaaggcgaaggtataccttggtcttggatccattagagcgagttctcaatatcttaaagacctacggcagaggatacgggaagttcaaaaggtgcttggtgatgcatccaaggactctgatctaccaaagaatgcacatgaaaaggttaaagcactggagcagatgctgattaagggaaaacagatgcaggatgattgttctattattgtaaaaaagcttcgagctatgcttcattcagcagaggagcagctgcatgcacacaaaaaacagactgtttttctgacacaacttgcagctaaaacccttcctaaaggtcttcactgcctccccctgagactagctaacgaatacttttcattggatcctgttcggcagcagttcccaaaccaacaaaatctcattaacccaaaactgtatcattatgcgttgttctcggataacatactagcaacagcggttgttgttaactcaacagtgttaaatgctaagcatccttctgatcatgttatccacatagtaactgacaaactgaattatgctccaatgagaatgtggttcctctctaatcctccggggaaagcaacaattgaagtacagaatattgaggagtttacatggctaaatgacagctacagtccagtactcaaacatcttgggtcccaatccatgattgattactactttggaacgaatcgtgcaaactcagattcaaacctaaaatatcgaaacccaaagtacctgtcaatccttaatcatctccgcttttacctacctgagatttatccaaagcttgacaagatggtctttcttgatgatgacatcgtagtaaagaaggatctggctggcctttggtcaatcaacatgaaggggaaggtaaacggtgctgttgagacttgtggagagagtttccatcgctatgatcgatacctgaatttttcaaatcctgttatcaccaagagttttgacccacatgcttgtgtttgggcttttggaatgaatgtgtttgacctggctgaatggaggcggcagaacataactgaaatttatcactcgtggcagaagcttaatgaagatagatcactctggaaacttggtactctccctccgggtttggtcacattctggaacaagacatttcccctcagccggtcatggcatgttcttggtctaggttacaatccccatgttaacagcagagacattgagcatgctgcagtcatacattacaatggcaacatgaagccctggttggagattggtctacccaagttccggagctactggtccaagtatctggattatgaccaatctttccttcgggaatgcaacatcaatccatgaaggaacctggtgcttttagtcccttctgacataaccaatagcctgttttctgtcgatgtgcactttagtgtagtcagcatagtactctcttgctttagatatcagttgttaacaagatttcttattgcctgtgcttcttgtcagaccctttgcataattgcaggaatatctgttatgtttttagagtacatgctttagagcagggcaaactttagatagtgcaatgctcttatgcgatatcgcctttatgtactgaacgtttgctgcaatcatgtaatttggaagcaaactttcccaacaatttaataggtattcaattgggtatcg

SEQ ID NO: 19115 - protein, 711 aa, Zea mays subsp. mays
  misc_feature (1)..(711): Ceres Seq. ID no. 12369026
LVFCEKHTKQPGHLRLRLPSQLLCLYAAASISSAQEWRKNICSEGLRGSQVPDKTHRGKPFSDMVRMRRRLVLLLLLLGLTVLSPLALYTSRLSVALNSIPRVFPGEITNQGRGVEADKLNALPLETVSSLKEPVDIVFSEELTESKSQELRLPKVGAHKSRVLSEVTVADDGTSSKDNEVIEQVITLEAQDGGLVKGAGVSDEQEKNIGSLQQSSSEESSQDTMPKQTPAKVVAENSQSARTDGKTKTAVLPDMRIRNIKDQLIKAKVYLGLGSIRASSQYLKDLRQRIREVQKVLGDASKDSDLPKNAHEKVKALEQMLIKGKQMQDDCSIIVKKLRAMLHSAEEQLHAHKKQTVFLTQLAAKTLPKGLHCLPLRLANEYFSLDPVRQQFPNQQNLINPKLYHYALFSDNILATAVVVNSTVLNAKHPSDHVIHIVTDKLNYAPMRMWFLSNPPGKATIEVQNIEEFTWLNDSYSPVLKHLGSQSMIDYYFGTNRANSDSNLKYRNPKYLSILNHLRFYLPEIYPKLDKMVFLDDDIVVKKDLAGLWSINMKGKVNGAVETCGESFHRYDRYLNFSNPVITKSFDPHACVWAFGMNVFDLAEWRRQNITEIYHSWQKLNEDRSLWKLGTLPPGLVTFWNKTFPLSRSWHVLGLGYNPHVNSRDIEHAAVIHYNGNMKPWLEIGLPKFRSYWSKYLDYDQSFLRECNINP

SEQ ID NO: 19116 - protein, 648 aa, Zea mays subsp. mays
  misc_feature (1)..(648): Ceres Seq. ID no. 12369027
MVRMRRRLVLLLLLLGLTVLSPLALYTSRLSVALNSIPRVFPGEITNQGRGVEADKLNALPLETVSSLKEPVDIVFSEELTESKSQELRLPKVGAHKSRVLSEVTVADDGTSSKDNEVIEQVITLEAQDGGLVKGAGVSDEQEKNIGSLQQSSSEESSQDTMPKQTPAKVVAENSQSARTDGKTKTAVLPDMRIRNIKDQLIKAKVYLGLGSIRASSQYLKDLRQRIREVQKVLGDASKDSDLPKNAHEKVKALEQMLIKGKQMQDDCSIIVKKLRAMLHSAEEQLHAHKKQTVFLTQLAAKTLPKGLHCLPLRLANEYFSLDPVRQQFPNQQNLINPKLYHYALFSDNILATAVVVNSTVLNAKHPSDHVIHIVTDKLNYAPMRMWFLSNPPGKATIEVQNIEEFTWLNDSYSPVLKHLGSQSMIDYYFGTNRANSDSNLKYRNPKYLSILNHLRFYLPEIYPKLDKMVFLDDDIVVKKDLAGLWSINMKGKVNGAVETCGESFHRYDRYLNFSNPVITKSFDPHACVWAFGMNVFDLAEWRRQNITEIYHSWQKLNEDRSLWKLGTLPPGLVTFWNKTFPLSRSWHVLGLGYNPHVNSRDIEHAAVIHYNGNMKPWLEIGLPKFRSYWSKYLDYDQSFLRECNINP

SEQ ID NO: 19117 - protein, 645 aa, Zea mays subsp. mays
  misc_feature (1)..(645): Ceres Seq. ID no. 12369028
MRRRLVLLLLLLGLTVLSPLALYTSRLSVALNSIPRVFPGEITNQGRGVEADKLNALPLETVSSLKEPVDIVFSEELTESKSQELRLPKVGAHKSRVLSEVTVADDGTSSKDNEVIEQVITLEAQDGGLVKGAGVSDEQEKNIGSLQQSSSEESSQDTMPKQTPAKVVAENSQSARTDGKTKTAVLPDMRIRNIKDQLIKAKVYLGLGSIRASSQYLKDLRQRIREVQKVLGDASKDSDLPKNAHEKVKALEQMLIKGKQMQDDCSIIVKKLRAMLHSAEEQLHAHKKQTVFLTQLAAKTLPKGLHCLPLRLANEYFSLDPVRQQFPNQQNLINPKLYHYALFSDNILATAVVVNSTVLNAKHPSDHVIHIVTDKLNYAPMRMWFLSNPPGKATIEVQNIEEFTWLNDSYSPVLKHLGSQSMIDYYFGTNRANSDSNLKYRNPKYLSILNHLRFYLPEIYPKLDKMVFLDDDIVVKKDLAGLWSINMKGKVNGAVETCGESFHRYDRYLNFSNPVITKSFDPHACVWAFGMNVFDLAEWRRQNITEIYHSWQKLNEDRSLWKLGTLPPGLVTFWNKTFPLSRSWHVLGLGYNPHVNSRDIEHAAVIHYNGNMKPWLEIGLPKFRSYWSKYLDYDQSFLRECNINP

SEQ ID NO: 19118 - DNA, 1323 bp, Zea mays subsp. mays
  misc_feature (1)..(1323): Ceres Seq. ID no. 12369036
attcattgggggcatttgctacaccaccacacccacaccccatcccagcacacaacaagcagcctggtttacggtagctgctagcaaaacaatggagaaccctgctccgagcatcgtagtggccatcgccgcacccgtggcggctgagttcgtgaaactcaccttccgtgccctgtatatgcgccgggctggtcctggcagcagggagatgactgtgccgggaaggccatccgaccagctgggcaggagagtcgtcactgacagccccgtgtacgacggccgtggcgccgacgcccgcctcgtggctcgcatacagggagtcacggtcctggtcggtaacgcagacgccttgttcaccatggtgttcgaaaccgacaggctaaagggctccacgctcgtcatcaacggaatggtcacggatgggtcagacgaatgggcgatctacggcggaaccggggtgttcgccatggccaccggtgtcatgaagagaagaaaccttgccggcggtagcaacgacgggaactctgacgagcttgccctggaagttttctgcccggtgtttggcgcatcacagcaaccaattagcaagcagcaggagtccatctcctccgtcaccaagatcggactatggggcggacagggagggtcggcacaggacatcacggcagagcagccaccacggcgtctgcacagcatcaccgtccgcgctggcgttgccgtcgactccatcgagttcacctacaccgacgacgctgggcagaggcgcactgctgggcggtggggtggacttggcggcaatgttcgaacgatcgaccttggcgacgcagaggatgtcagggaagtctcgggaacatacggcgcatttgaaggtgccattacgctgacctcgctcaggctcgtcaccagcagcagaacctggggcccctggggggtcgagaacgggacgcgtttctccatcacggcgcccaacggcagcagcatcgcgggattctatgcgcgggcgggaaccaggctcgtcgacgctatcggtgtttacatacgtccagtggtgccaggcaggcctcggtgaacaagcgagccgagctcgctcgtattacgagctgtaggattatggttcggcttgacttgatgtaggctacctgctacatcatgctcgattcactatcctttaattcggtcatcgtcgtcgtcttgtctcgtgtcaaataaagctctcttgtgcctatatacggctctcatggttgtgccgtgtctctatatgttagtgtttatgtatatgtggagatcaaataatggccttgcaataatgatcaaagactcgct

SEQ ID NO: 19119 - protein, 355 aa, Zea mays subsp. mays
  misc_feature (1)..(355): Ceres Seq. ID no. 12369037
FIGGICYTTTPTPHPSTQQAAWFTVAASKTMENPAPSIVVAIAAPVAAEFVKLTFRALYMRRAGPGSREMTVPGRPSDQLGRRVVTDSPVYDGRGADARLVARIQGVTVLVGNADALFTMVFETDRLKGSTLVINGMVTDGSDEWAIYGGTGVFAMATGVMKRRNLAGGSNDGNSDELALEVFCPVFGASQQPISKQQESISSVTKIGLWGGQGGSAQDITAEQPPRRLHSITVRAGVAVDSIEFTYTDDAGQRRTAGRWGGLGGNVRTIDLGDAEDVREVSGTYGAFEGAITLTSLRLVTSSRTWGPWGVENGTRFSITAPNGSSIAGFYARAGTRLVDAIGVYIRPVVPGRPR

SEQ ID NO: 19120 - protein, 325 aa, Zea mays subsp. mays
  misc_feature (1)..(325): Ceres Seq. ID no. 12369038
MENPAPSIVVAIAAPVAAEFVKLTFRALYMRRAGPGSREMTVPGRPSDQLGRRVVTDSPVYDGRGADARLVARIQGVTVLVGNADALFTMVFETDRLKGSTLVINGMVTDGSDEWAIYGGTGVFAMATGVMKRRNLAGGSNDGNSDELALEVFCPVFGASQQPISKQQESISSVTKIGLWGGQGGSAQDITAEQPPRRLHSITVRAGVAVDSIEFTYTDDAGQRRTAGRWGGLGGNVRTIDLGDAEDVREVSGTYGAFEGAITLTSLRLVTSSRTWGPWGVENGTRFSITAPNGSSIAGFYARAGTRLVDAIGVYIRPVVPGRPR

SEQ ID NO: 19121 - protein, 296 aa, Zea mays subsp. mays
  misc_feature (1)..(296): Ceres Seq. ID no. 12369039
MRRAGPGSREMTVPGRPSDQLGRRVVTDSPVYDGRGADARLVARIQGVTVLVGNADALFTMVFETDRLKGSTLVINGMVTDGSDEWAIYGGTGVFAMATGVMKRRNLAGGSNDGNSDELALEVFCPVFGASQQPISKQQESISSVTKIGLWGGQGGSAQDITAEQPPRRLHSITVRAGVAVDSIEFTYTDDAGQRRTAGRWGGLGGNVRTIDLGDAEDVREVSGTYGAFEGAITLTSLRLVTSSRTWGPWGVENGTRFSITAPNGSSIAGFYARAGTRLVDAIGVYIRPVVPGRPR

SEQ ID NO: 19122 - DNA, 1886 bp, Zea mays subsp. mays
  misc_feature (1)..(1886): Ceres Seq. ID no. 12369040
gcacgagaccattacctagaacatcctaatcgaaaaaaaccgatcgagcctcgacgagcgagcagaggactcatcctaggtagctaagctgtccgacagcacagcagaccgatacgatacgacgatgatgagtagcaccggcggcgagagcaagctggagagcccgctgctgggcctgcccgcgccgggctcgtcggccggcagcgggcacagccacggcgaggcggtgagcgggcagctggagagcatcctcagcgacgcctccctgccgtggaggcagcggatgctgtcagcgtccatggttgagatgcggctgctcgtgcgcctggccgcgcccgccgtgctcgtctacatgatcaactacctcatgtccatgtccacgcagatcttctcgggacacctcggcacgctcgagctcgccgccgcgtcgctcggcaacaccggcatccaggtcttcgcctatggcctcatgctgggcatggggagcgcggtggagacgctgtgcgggcaggcgtacggcgcgcacaagtacgacatgctgggcatctacttgcagcgctccaccatcctgctgatggccacgggggtgcctctgaccgtgctctacgccttctcccgccccatcctggtcctcctcggggagtcccccgagatcgcctccgccgccgccgtcttcgtgtacggcctcatcccgcagatcttcgcgtacgccgccaacttccccatccagaagttcatgcaggcgcagagcatcatggcccccagtgcgtacatctccgccgccacgctggccgtgcacctcgccctcagctacctcgtcgtgtaccagttcgggctgggcctcctcggcgcgtcgctcatgctcagcgtcagctggtgggtcatcgtcgccgcgcagttcgcctacatcgccaccagccagcggtgccgcctcacctggacgggcttctcgtgggaggccttctcggggctccccggcttcctcaagctgtccctcgcctccgccgtcatgctctgcctcgagacctggtacttccagatactcgtgctcatcgcgggactcctcaaggaccccgagcttgccttggcctcactctctgtctgcatgtcaattacagggtgggtgttcatgatatcagttgggttcaatgcagcagccagcgtaagagtgagcaacgagcttggcgccggcaacccaaagtccgcggcgttctctgtggtggtagtgacgctgctctccttcgtcctgtcggtcataatctccgtcgtcatcctgctgtgccgggactacatcagctacatcttcaccgagggcgacgacgtgtcgcgggcggtcgcccagctcagcccgctgctggcggtcaccctcatcctcaacggcatccagcccgtcctctctggggtagctgtggggtgtggatggcaagcgttggtcgcatacgtcaatgtcggctgctactacatcgtcggcatcccccttgggtgcctcctgggattctacttcgacctaggagcagcgggtatctggagcggtatgatcgggggcaccctgatgcagaccatgatcctggtgtgggttacattcaggacgaactggaacaaggaggttgaagaagcgcagaaaagactgaacaaatgggaagacagtaaagcgcctgtccagtgagcccaagaactaaataaggcttctctgttgccaaaccaagaacgagagacgtgggaaattgatgcaattcaccctgatgcagattcggaaattgatgcaaggttgcaattcagtgtcctgaaatgtctacgaggagaggagaggagaggagatgagatggctggaattttaaatactactcttgcatcacgcaattcaattctgtgttccgttattatat

SEQ ID NO: 19123 - protein, 513 aa, Zea mays subsp. mays
  misc_feature (1)..(513): Ceres Seq. ID no. 12369041
MMSSTGGESKLESPLLGLPAPGSSAGSGHSHGEAVSGQLESILSDASLPWRQRMLSASMVEMRLLVRLAAPAVLVYMINYLMSMSTQIFSGHLGTLELAAASLGNTGIQVFAYGLMLGMGSAVETLCGQAYGAHKYDMLGIYLQRSTILLMATGVPLTVLYAFSRPILVLLGESPEIASAAAVFVYGLIPQIFAYAANFPIQKFMQAQSIMAPSAYISAATLAVHLALSYLVVYQFGLGLLGASLMLSVSWWVIVAAQFAYIATSQRCRLTWTGFSWEAFSGLPGFLKLSLASAVMLCLETWYFQILVLIAGLLKDPELALASLSVCMSITGWVFMISVGFNAAASVRVSNELGAGNPKSAAFSVVVVTLLSFVLSVIISVVILLCRDYISYIFTEGDDVSRAVAQLSPLLAVTLILNGIQPVLSGVAVGCGWQALVAYVNVGCYYIVGIPLGCLLGFYFDLGAAGIWSGMIGGTLMQTMILVWVTFRTNWNKEVEEAQKRLNKWEDSKAPVQ

SEQ ID NO: 19124 - protein, 512 aa, Zea mays subsp. mays
  misc_feature (1)..(512): Ceres Seq. ID no. 12369042
MSSTGGESKLESPLLGLPAPGSSAGSGHSHGEAVSGQLESILSDASLPWRQRMLSASMVEMRLLVRLAAPAVLVYMINYLMSMSTQIFSGHLGTLELAAASLGNTGIQVFAYGLMLGMGSAVETLCGQAYGAHKYDMLGIYLQRSTILLMATGVPLTVLYAFSRPILVLLGESPEIASAAAVFVYGLIPQIFAYAANFPIQKFMQAQSIMAPSAYISAATLAVHLALSYLVVYQFGLGLLGASLMLSVSWWVIVAAQFAYIATSQRCRLTWTGFSWEAFSGLPGFLKLSLASAVMLCLETWYFQILVLIAGLLKDPELALASLSVCMSITGWVFMISVGFNAAASVRVSNELGAGNPKSAAFSVVVVTLLSFVLSVIISVVILLCRDYISYIFTEGDDVSRAVAQLSPLLAVTLILNGIQPVLSGVAVGCGWQALVAYVNVGCYYIVGIPLGCLLGFYFDLGAAGIWSGMIGGTLMQTMILVWVTFRTNWNKEVEEAQKRLNKWEDSKAPVQ

SEQ ID NO: 19125 - protein, 460 aa, Zea mays subsp. mays
  misc_feature (1)..(460): Ceres Seq. ID no. 12369043
MLSASMVEMRLLVRLAAPAVLVYMINYLMSMSTQIFSGHLGTLELAAASLGNTGIQVFAYGLMLGMGSAVETLCGQAYGAHKYDMLGIYLQRSTILLMATGVPLTVLYAFSRPILVLLGESPEIASAAAVFVYGLIPQIFAYAANFPIQKFMQAQSIMAPSAYISAATLAVHLALSYLVVYQFGLGLLGASLMLSVSWWVIVAAQFAYIATSQRCRLTWTGFSWEAFSGLPGFLKLSLASAVMLCLETWYFQILVLIAGLLKDPELALASLSVCMSITGWVFMISVGFNAAASVRVSNELGAGNPKSAAFSVVVVTLLSFVLSVIISVVILLCRDYISYIFTEGDDVSRAVAQLSPLLAVTLILNGIQPVLSGVAVGCGWQALVAYVNVGCYYIVGIPLGCLLGFYFDLGAAGIWSGMIGGTLMQTMILVWVTFRTNWNKEVEEAQKRLNKWEDSKAPVQ

SEQ ID NO: 19126 - DNA, 1309 bp, Zea mays subsp. mays
  misc_feature (1)..(1309): Ceres Seq. ID no. 12369060
aaactgctggaatatacttacaccgggaagaaggcgaaggccgtcgcgctctcggcggcggcggcggcggcggcagcggcgatgcttgcgttcgagcagcaggtgttggcggatctggtggaagatccgaacggaggtctggtggtgctctcctcgggtctccgctctcgcttccctagccgctaccctcctcctccatctccaccagacccccggcaacgcggctggaggaggatgtctcctcgtcctctccgccaccgataccctcaaggcccggatccggcgccgcctccaagacaagctgcaggttcacgacgtgccccctgacctcgccgcgcagcagcgcgccaccctttacgcctctggcgctgctctcttcctctctccccgcgccctcgccgccgacctcctcacctcccgcctcctcccctcccgcgtccaagccctactcctcctctccgcccaccgctccaccgatacctcctccgatgccttcatctgccgcctcctccgtcaacgcaatcttctccccgtttacgccttctccgattgcccccatgccatggtcgccggtttctccaaggccgagcgtaccatgaagagcctctacgtccgccgtctccacctctggccccgcttccacgttctcgccgcagccgacctggaacgcgccccgcctgacgtcgtagacgtgcgcgttcccatgacgccgcccatgaggggtatccaggctgctgtcctcgctaccatggacgcttgtctcaaggaacttaggcgcaccaacaaggtggatgttgaggacctcaccgtcgacaagggcctcttcaagtccttcgatgagatcgtccggaggcagctcgaccccatctggcacactcttgggaagaagacaaagcagcttgtggctgacctcaggacgctacgcaagctgcttgattacctcgtcaggatgaacctgatgagaaaaaagcaacaagagttggcgtgccatccgaggatggtatcgtggaggatgatgtgaggtctgaaaattacaacacatcagccattgagttcttaagaaggcttcctggggtgacggattctaactaccgagcaatcatggatggatgcaatagcttggccgagctggccctgcttccagtggaaaggttggcggagctaatgggtggtcagaaagctgcgcggacgctcaaggagtttctcgatgccaagtgcccaaccatgttgtagccagagtgacgctgtactgtttgtattgtgtcctgtgggatacaaatacttcagttgatgtgccttatatatatat

SEQ ID NO: 19127 - protein, 339 aa, Zea mays subsp. mays
  misc_feature (1)..(339): Ceres Seq. ID no. 12369061
NCWNILTPGRRRRPSRSRRRRRRRQRRCLRSSSRCWRIWWKIRTEVWWCSPRVSALASLAATLLLHLHQTPGNAAGGGCLLVLSATDTLKARIRRRLQDKLQVHDVPPDLAAQQRATLYASGAALFLSPRALAADLLTSRLLPSRVQALLLLSAHRSTDTSSDAFICRLLRQRNLLPVYAFSDCPHAMVAGFSKAERTMKSLYVRRLHLWPRFHVLAAADLERAPPDVVDVRVPMTPPMRGIQAAVLATMDACLKELRRTNKVDVEDLTVDKGLFKSFDEIVRRQLDPIWHTLGKKTKQLVADLRTLRKLLDYLVRMNLMRKKQQELACHPRMVSWRMM

SEQ ID NO: 19128 - DNA, 1482 bp, Zea mays subsp. mays
  misc_feature (1)..(1482): Ceres Seq. ID no. 12369082
gacattattgccccctcttcccttcccaacccaacccattgcatttgcaagcccttttacattgcagagcgccagagcctcgctcgctctcggaacagagctaggcagctaacagacgaagaagaagcaagccaagcagaattgagagagaggcgaggacgtggcgacgacggcagccgcgatggcgacgacgacggacctggggttcgaggcgacggagctccgcctgggcctgcccggcgggggaggtggaggggagccggcgctgggcggcgaggggaggagctcttcctccgcctccggcaagaggggcttcgccgagaccatcgacctgaagctgaagctggagccagcggccgtcgtggaggcggaggaggaggaggaggaccacggcgttgctgttgcccttgagaaggaggaggaggccgggaagatgaagcggtccccgagccagagcagcgtcgccgccgccgccgccgccgtgctggctgaccccgccgagaagccgcgcgccgccaaggctcaggtggtgggatggccaccggtccggtcgttccggaagaacatcatgtccgtgcagtccgacaagggcgccggcaaagacgccgccgccgccaacggcgacaagtcctcggcggcggcaggcggcggtgccgcgttcgtgaaggtgagcttggacggcgcgccctacctgcgcaaagtggacctcaagatgtacaggagctaccagcagctgtccaaggcgctcgagaacatgttcagctccttcaccatcggaagctgtgggtctcaagggatgaacggcatgaacgagagcaagctggtggatctgctcaacggctccgagtacgtgccgacctacgaggacaaggacggggactggatgctcgtcggcgacgtgccgtgggagatgttcgtcgaatcatgcaagcgccttcggatcatgaaaggatcagaagccattggcctggcgccaagggccatggagaaatgcaagaacagaagctgaggagaagacggacggacggaagcttgcatctcagcaccaccaggggtggatggatgcaagaagaacaaatctccatggcttttgcagctctgctcgtctctgtatcatactcgtcgtccctgcccttcaggcctctgtatctccctgatcaatgaagtcgttttggtgtgtcaactgttctctccgtgcccagcttgtcagtgaaagagtcagtcagtgtccatcaagtctcatcttgtcctatacagaagagagaagccatgcatgaacatgtacctgtcctataacaatgtctttttttgctacctgtttttttttctctctctctctttttttggcacaagatgcaaaggcaccctgctcctgatcaaagggccttttgcatcataagctgtttgattataattaccatggtgtgtcagtggaacaaataactgttgcaaggtgttaaaaaaaagttgtattgtaatatg

SEQ ID NO: 19129 - protein, 275 aa, Zea mays subsp. mays
  misc_feature (1)..(275): Ceres Seq. ID no. 12369083
MATTTDLGFEATELRLGLPGGGGGGEPALGGEGRSSSSASGKRGFAETIDLKLKLEPAAVVEAEEEEEDHGVAVALEKEEEAGKMKRSPSQSSVAAAAAAVLADPAEKPRAAKAQVVGWPPVRSFRKNIMSVQSDKGAGKDAAAANGDKSSAAAGGGAAFVKVSLDGAPYLRKVDLKMYRSYQQLSKALENMFSSFTIGSCGSQGMNGMNESKLVDLLNGSEYVPTYEDKDGDWMLVGDVPWEMFVESCKRLRIMKGSEAIGLAPRAMEKCKNRS

SEQ ID NO: 19130 - protein, 209 aa, Zea mays subsp. mays
  misc_feature (1)..(209): Ceres Seq. ID no. 12369084
MATGPVVPEEHHVRAVRQGRRQRRRRRQRRQVLGGGRRRCRVREGELGRRALPAQSGPQDVQELPAAVQGAREHVQLLHHRKLWVSRDERHEREQAGGSAQRLRVRADLRGQGRGLDARRRRAVGDVRRIMQAPSDHERIRSHWPGAKGHGEMQEQKLRRRRTDGSLHLSTTRGGWMQEEQISMAFAALLVSVSYSSSLPFRPLYLPDQ

SEQ ID NO: 19131 - protein, 191 aa, Zea mays subsp. mays
  misc_feature (1)..(191): Ceres Seq. ID no. 12369085
MKRSPSQSSVAAAAAAVLADPAEKPRAAKAQVVGWPPVRSFRKNIMSVQSDKGAGKDAAAANGDKSSAAAGGGAAFVKVSLDGAPYLRKVDLKMYRSYQQLSKALENMFSSFTIGSCGSQGMNGMNESKLVDLLNGSEYVPTYEDKDGDWMLVGDVPWEMFVESCKRLRIMKGSEAIGLAPRAMEKCKNRS

SEQ ID NO: 19132 - DNA, 1529 bp, Zea mays subsp. mays
  misc_feature (1)..(1529): Ceres Seq. ID no. 12369098
acccgagaatactcgcgctcgcgcactcgacattcctcgccccccacgccggttcaccctgcgcgcacgcgctcagcatctcgcaatcccccgggcggaggcgtatgtcctgcgccgtggcgatgccgatcgacttgctccacgctccagctccgtgggaggaggaggtgaaggcggttgaggaggacgaggaggaggtggagggagtaggatgcggcggaggggccgtggtggtggtcgcggcggacgcggaggcggagggtcacccctacgacttccacgtgtccgggccgcgcaacctgccgccgcccaactggaaggagataatcagatcgagctggaaggatccaaattacaaaaggatggtaatggcctgcttcattcaagcagtctacctgcttgaactggacagacaggacaagaaaggcgaagaggatggccttgctccaaaatggtggagacccttcaagtacaaggtcactcagacattggtggatgagagagatggttccatctatggcgccatgctggagtgggatcgttcttctgccttgtgtgactttatcctcatgagaccaagcggggcaccgagggctgtgttagctctcagaggaaccctcctgcagaagccaactatgaagagagatctgcaggatgaccttcgcttcttggtatgggagagcctcaaaggttcagtgagatttgttggtgctttagcagcgctaaaatcagcagttgagaagtttggcagcgccaatgtttgtgttgccgggcactccttgggagctggctttgcactccaagtctgcaaggagcttgccaaacatggagtttttgtggagtgtcatcttttcaatccaccttctgtttcactggccatgggtgtaaggaccatgagtgagaaggccagctacctgtggaagaaagtcaaaggaagtctgccattgaaggaagacacaacaccaccacttgagactgctaaggctgatgcaagtgacaagaagagattgcgcgccgagaagaaatgggtgccacatttatatgtcaacaacagtgattacatctgctgccactacaacgctccatcctgctcgtccacaacaacagatggtgcttccaacgaacagcagcaacaacaacgcaaggctagtgaaattgccggtgatgtggtcgcaaagctctttgtgacatcaaaagggccacagaaattccttgaggcgcatgggctacagcagtggtggtcagatggcatggagctgcagctggctctctatgacagcaagctcataaacaggcagctgaaatccatctacgcaacaacaacagaaatgccatctcctgccaagtcctagacacggcttaagccgctgttgcatcggtcattagaaatactctttctaaccagtgtgtgttcctttatcaactgagaatgttttattactccagtgatgccccaaaacagtcgaataatttgattaaagggatagtgtgtgaacagtttcgacaaaacaacattgtatttcaactct

SEQ ID NO: 19133 - protein, 449 aa, Zea mays subsp. mays
  misc_feature (1)..(449): Ceres Seq. ID no. 12369099
PRILALAHSTFLAPHAGSPCAHALSISQSPGRRRMSCAVAMPIDLLHAPAPWEEEVKAVEEDEEEVEGVGCGGGAVVVVAADAEAEGHPYDFHVSGPRNLPPPNWKEIIRSSWKDPNYKRMVMACFIQAVYLLELDRQDKKGEEDGLAPKWWRPFKYKVTQTLVDERDGSIYGAMLEWDRSSALCDFILMRPSGAPRAVLALRGTLLQKPTMKRDLQDDLRFLVWESLKGSVRFVGALAALKSAVEKFGSANVCVAGHSLGAGFALQVCKELAKHGVFVECHLFNPPSVSLAMGVRTMSEKASYLWKKVKGSLPLKEDTTPPLETAKADASDKKRLRAEKKWVPHLYVNNSDYICCHYNAPSCSSTTTDGASNEQQQQQRKASEIAGDVVAKLFVTSKGPQKFLEAHGLQQWWSDGMELQLALYDSKLINRQLKSIYATTTEMPSPAKS

SEQ ID NO: 19134 - protein, 415 aa, Zea mays subsp. mays
  misc_feature (1)..(415): Ceres Seq. ID no. 12369100
MSCAVAMPIDLLHAPAPWEEEVKAVEEDEEEVEGVGCGGGAVVVVAADAEAEGHPYDFHVSGPRNLPPPNWKEIIRSSWKDPNYKRMVMACFIQAVYLLELDRQDKKGEEDGLAPKWWRPFKYKVTQTLVDERDGSIYGAMLEWDRSSALCDFILMRPSGAPRAVLALRGTLLQKPTMKRDLQDDLRFLVWESLKGSVRFVGALAALKSAVEKFGSANVCVAGHSLGAGFALQVCKELAKHGVFVECHLFNPPSVSLAMGVRTMSEKASYLWKKVKGSLPLKEDTTPPLETAKADASDKKRLRAEKKWVPHLYVNNSDYICCHYNAPSCSSTTTDGASNEQQQQQRKASEIAGDVVAKLFVTSKGPQKFLEAHGLQQWWSDGMELQLALYDSKLINRQLKSIYATTTEMPSPAKS

SEQ ID NO: 19135 - protein, 409 aa, Zea mays subsp. mays
  misc_feature (1)..(409): Ceres Seq. ID no. 12369101
MPIDLLHAPAPWEEEVKAVEEDEEEVEGVGCGGGAVVVVAADAEAEGHPYDFHVSGPRNLPPPNWKEIIRSSWKDPNYKRMVMACFIQAVYLLELDRQDKKGEEDGLAPKWWRPFKYKVTQTLVDERDGSIYGAMLEWDRSSALCDFILMRPSGAPRAVLALRGTLLQKPTMKRDLQDDLRFLVWESLKGSVRFVGALAALKSAVEKFGSANVCVAGHSLGAGFALQVCKELAKHGVFVECHLFNPPSVSLAMGVRTMSEKASYLWKKVKGSLPLKEDTTPPLETAKADASDKKRLRAEKKWVPHLYVNNSDYICCHYNAPSCSSTTTDGASNEQQQQQRKASEIAGDVVAKLFVTSKGPQKFLEAHGLQQWWSDGMELQLALYDSKLINRQLKSIYATTTEMPSPAKS

SEQ ID NO: 19136 - DNA, 1399 bp, Zea mays subsp. mays
  misc_feature (1)..(1399): Ceres Seq. ID no. 12369116
aatcccttggagccagcaactccactcctgagtcctcacctcgtgctgcccgcgccatttccacctcccactgtcctttcgtccagtccccagccctgcagcccaaccgtggaggttctggaaggcggtgtatcccttctagaaccttctcgagatgcagagcgccgcggctttccggccgtgccccactcggctgctggtgagcagcccttgtcgccccctcctctcggcccgcccgcttcgtgtctccgccgctggcgccgtcgctaccagaagcagcgccgtgggccctcgcggtctggggctcgggctgctgccagcctcgcccgatcgggatggcaagtgccgccagcgacaggtgtcatgcagcgcggccggggatgctgtggcggccccgaaggcggaagaaggaggcgggctcatgaagacgctgtggctcggctcgctcttcggcctctggtacctgttcaacatctacttcaacatctataacaagcaggtactcaaggttttcccataccctataaacatcacagaagttcaatttgctgtcggaactgtagcagctctgttcatgtggatcactggtattattaagaggccaaagatttctggagcacagcttgtagccatcctacctctggctattgttcatactatgggcaatctcttcaccaacatgagccttgggaaagttgcagtgtcatttacgcacaccatcaaggctatggagcctttcttttctgttattctttctgcaattttccttggcgagttacctactatttgggtagtatcatctcttcttccaattgttggtggtgttgcattggcatctcttactgaggcatcctttaactgggctggcttttggagtgcaatggcttcaaatgttacctttcaatcccgaaatgtattgagcaagaagctcatggttaagaaagaggaatccttggacaaccttaatctcttctctatcattacagtgatgtcatttttccttttggcccctgttaccttctttacagaaggtgtcaaaattactcctacatttttgcaatctgctggtctgaatgtaaaccaagtccttacaaggtgtcttttcgctggactgtgtttccatgcataccaacaggtgtcttacatgattttggcgatggtgtctcctgtcactcattctgtgggcaactgtgttaaacgtgttgtggtcattgtaacatcagtgctgttcttcaggacacctgtttctcctatcaactctctcggtactgcgattgcacttgccggagttttcctgtactcacagctcaagcgacttaagcccaagccgaagacggcttaaatagggattgtattttccatctctttgtgttaatggagttaaacacttctatgttgc

SEQ ID NO: 19137 - protein, 395 aa, Zea mays subsp. mays
  misc_feature (1)..(395): Ceres Seq. ID no. 12369117
MQSAAAFRPCPTRLLVSSPCRPLLSARPLRVSAAGAVATRSSAVGPRGLGLGLLPASPDRDGKCRQRQVSCSAAGDAVAAPKAEEGGGLMKTLWLGSLFGLWYLFNIYFNIYNKQVLKVFPYPINITEVQFAVGTVAALFMWITGIIKRPKISGAQLVAILPLAIVHTMGNLFTNMSLGKVAVSFTHTIKAMEPFFSVILSAIFLGELPTIWVVSSLLPIVGGVALASLTEASFNWAGFWSAMASNVTFQSRNVLSKKLMVKKEESLDNLNLFSIITVMSFFLLAPVTFFTEGVKITPTFLQSAGLNVNQVLTRCLFAGLCFHAYQQVSYMILAMVSPVTHSVGNCVKRVVVIVTSVLFFRTPVSPINSLGTAIALAGVFLYSQLKRLKPKPKTA

SEQ ID NO: 19138 - protein, 306 aa, Zea mays subsp. mays
  misc_feature (1)..(306): Ceres Seq. ID no. 12369118
MKTLWLGSLFGLWYLFNIYFNIYNKQVLKVFPYPINITEVQFAVGTVAALFMWITGIIKRPKISGAQLVAILPLAIVHTMGNLFTNMSLGKVAVSFTHTIKAMEPFFSVILSAIFLGELPTIWVVSSLLPIVGGVALASLTEASFNWAGFWSAMASNVTFQSRNVLSKKLMVKKEESLDNLNLFSIITVMSFFLLAPVTFFTEGVKITPTFLQSAGLNVNQVLTRCLFAGLCFHAYQQVSYMILAMVSPVTHSVGNCVKRVVVIVTSVLFFRTPVSPINSLGTAIALAGVFLYSQLKRLKPKPKTA

SEQ ID NO: 19139 - protein, 255 aa, Zea mays subsp. mays
  misc_feature (1)..(255): Ceres Seq. ID no. 12369119
MWITGIIKRPKISGAQLVAILPLAIVHTMGNLFTNMSLGKVAVSFTHTIKAMEPFFSVILSAIFLGELPTIWVVSSLLPIVGGVALASLTEASFNWAGFWSAMASNVTFQSRNVLSKKLMVKKEESLDNLNLFSIITVMSFFLLAPVTFFTEGVKITPTFLQSAGLNVNQVLTRCLFAGLCFHAYQQVSYMILAMVSPVTHSVGNCVKRVVVIVTSVLFFRTPVSPINSLGTAIALAGVFLYSQLKRLKPKPKTA

SEQ ID NO: 19140 - DNA, 1572 bp, Zea mays subsp. mays
  misc_feature (1)..(1572): Ceres Seq. ID no. 12369120
atccagccatcgattctcctccagttcataggcacagcagcagaaagcgccaggagcttaagaacatggcgaacaggggcttgcatctggctctgttcctcgtccttctcgggctgtcgtccaatttggcagccgggcagatcctgttccagggcttcaactgggagtcgtggaagcagaacgggggatggtacaacttcctgatgggcaaggtggacgacatcgccgaggccggcatcacgcacgtctggctccctccggcgtcacactctctcgccgagcaaggctacctgccggggcgcctgtacgaccttgacgcgtccaagtacggcaacgaggcgcagctcaagtccctgatcgaggcgttccacagcaagggcgtgaaggtcatcgccgacatcgtcatcaaccaccgcacggcggagcaccaggacggccgcggcatctactgcatcttcgagggcggcacgccggactcccgcctcgactggggcccccacatgatctgcagcgacgacagggcgtactccgacggcacggggaaccccgacaccggcgccgacttcggcggcgcgccggacatcgaccacctgaacccgcgcgtccagcaggagctcaccggctggctcaactggctcaagacggacgtcggcttcgacgcgtggcgcctcgacttcgccaagggctactccgccgacgtcgccaaggtctacatcgacggcacccagccctgcttcgccgtcgccgagatatggacctcgctggcctacggcggcgacggcaagcccttctacgaccagaacgcgcaccggcaggagctggtgagctggctggaccgcgtcggcggcaaggccagcccggccaccacgttcgacttcaccaccaagggcatcctcaacgtggccgtcgacggcgagctgtggcggctgcgcggcgctgacggcaaggcacccggtttgatcgggtggtggccggccaaggccgtcaccttcgtcgacaaccacgacactggctccacgcagcacatgtggccgttccccgccgacaaggtcatgcagggctacgcctacatcctcacgcaccccgggaacccatccatcttctacgatcacttcttcgactggggcctcaagaacgagatcgcgcacctggtgtccatcagggaccgccacgggatccaggcggacagtgagctgcgcatcatcgaggccgacgccgacctctacctcgctgagatcgacggcaaggtcatcgtgaagattggatcaagatacgactgcgggcacctcatcccagaaggcttccaggtcgtggcgcacggagatggctatgccgtctgggagaaaaactgagccaaatctgtgcctgatccgtccgtccggtccggcacgacgagttttagcggatttgacctgcattttccttagcttattattactccaaatacgggatatatatagcgacaacctgtattcgagatacatgcgtgcccccagggacgcggaaaaagaaagagaagcacgcgtgtcaggacagccgaaagaagaacttgtgaagattattttttcccct

SEQ ID NO: 19141 - protein, 449 aa, Zea mays subsp. mays
  misc_feature (1)..(449): Ceres Seq. ID no. 12369121
PAIDSPPVHRHSSRKRQELKNMANRGLHLALFLVLLGLSSNLAAGQILFQGFNWESWKQNGGWYNFLMGKVDDIAEAGITHVWLPPASHSLAEQGYLPGRLYDLDASKYGNEAQLKSLIEAFHSKGVKVIADIVINHRTAEHQDGRGIYCIFEGGTPDSRLDWGPHMICSDDRAYSDGTGNPDTGADFGGAPDIDHLNPRVQQELTGWLNWLKTDVGFDAWRLDFAKGYSADVAKVYIDGTQPCFAVAEIWTSLAYGGDGKPFYDQNAHRQELVSWLDRVGGKASPATTFDFTTKGILNVAVDGELWRLRGADGKAPGLIGWWPAKAVTFVDNHDTGSTQHMWPFPADKVMQGYAYILTHPGNPSIFYDHFFDWGLKNEIAHLVSIRDRHGIQADSELRIIEADADLYLAEIDGKVIVKIGSRYDCGHLIPEGFQVVAHGDGYAVWEKN

SEQ ID NO: 19142 - protein, 428 aa, Zea mays subsp. mays
  misc_feature (1)..(428): Ceres Seq. ID no. 12369122
MANRGLHLALFLVLLGLSSNLAAGQILFQGFNWESWKQNGGWYNFLMGKVDDIAEAGITHVWLPPASHSLAEQGYLPGRLYDLDASKYGNEAQLKSLIEAFHSKGVKVIADIVINHRTAEHQDGRGIYCIFEGGTPDSRLDWGPHMICSDDRAYSDGTGNPDTGADFGGAPDIDHLNPRVQQELTGWLNWLKTDVGFDAWRLDFAKGYSADVAKVYIDGTQPCFAVAEIWTSLAYGGDGKPFYDQNAHRQELVSWLDRVGGKASPATTFDFTTKGILNVAVDGELWRLRGADGKAPGLIGWWPAKAVTFVDNHDTGSTQHMWPFPADKVMQGYAYILTHPGNPSIFYDHFFDWGLKNEIAHLVSIRDRHGIQADSELRIIEADADLYLAEIDGKVIVKIGSRYDCGHLIPEGFQVVAHGDGYAVWEKN

SEQ ID NO: 19143 - protein, 382 aa, Zea mays subsp. mays
  misc_feature (1)..(382): Ceres Seq. ID no. 12369123
MGKVDDIAEAGITHVWLPPASHSLAEQGYLPGRLYDLDASKYGNEAQLKSLIEAFHSKGVKVIADIVINHRTAEHQDGRGIYCIFEGGTPDSRLDWGPHMICSDDRAYSDGTGNPDTGADFGGAPDIDHLNPRVQQELTGWLNWLKTDVGFDAWRLDFAKGYSADVAKVYIDGTQPCFAVAEIWTSLAYGGDGKPFYDQNAHRQELVSWLDRVGGKASPATTFDFTTKGILNVAVDGELWRLRGADGKAPGLIGWWPAKAVTFVDNHDTGSTQHMWPFPADKVMQGYAYILTHPGNPSIFYDHFFDWGLKNEIAHLVSIRDRHGIQADSELRIIEADADLYLAEIDGKVIVKIGSRYDCGHLIPEGFQVVAHGDGYAVWEKN

SEQ ID NO: 19144 - DNA, 960 bp, Zea mays subsp. mays
  misc_feature (1)..(960): Ceres Seq. ID no. 12369133
gaacctgagaacctgacgcggcatcatgcaaacaaaaccgatcagagagatggcggccgtctcctccaccgccaccgcctcctcgcagccggagctgccgacctccaccgcccaccctaccgccaatgccgccgccatcagcaggctggcgcggcggccacggcggaacaacagcttcgtgatggtggaggaggcgtcctatgccagcggcggcggcgacggcggggtggccaggacgaagagcctcacggaggacgacctggaggagctcaagggctgcgtcgacctcggcttcggcttcgcgtacagcgagatacccgagctctgcgggacgctgcccgcgctcgagctctgctactccatgacccggaggttcctcgacgagcagagggcgccgggacaggatgaggaggaggaggagcctgcgtcgccgccgctcccaaattggaggatctttgcaccgggtgacgatccggaggaagtgaaggccaggttgaagtattgggctcaagcagtagcatgcactgtcaagctctgcagctgaaccagaggctggttttaactgctgtctgttctgttagcgtatgctgcgacgggccgaaccgagggcctgttggaggttgaacagtctggttgtatgtgttttgggattcgggggagcgaagaactctcttcataggtttcttctctggctgcttctgcaagaacttgggagggcggaggagggatcatgatccgggacagcgacagaccccgattgagatccatggtttgagggttctacgccgcaagcctttgcaaaatgcaggacctgctgtttcgttgttaataataataatgatgatgatgatcactaggtgttctaactgtcgtagtcctgtaataattaatgatgcactgaatggaagtttcgagttttggctactaatccaagggttgattagctccaatttttgatct

SEQ ID NO: 19145 - protein, 172 aa, Zea mays subsp. mays
  misc_feature (1)..(172): Ceres Seq. ID no. 12369134
MQTKPIREMAAVSSTATASSQPELPTSTAHPTANAAAISRLARRPRRNNSFVMVEEASYASGGGDGGVARTKSLTEDDLEELKGCVDLGFGFAYSEIPELCGTLPALELCYSMTRRFLDEQRAPGQDEEEEEPASPPLPNWRIFAPGDDPEEVKARLKYWAQAVACTVKLCS

SEQ ID NO: 19146 - protein, 164 aa, Zea mays subsp. mays
  misc_feature (1)..(164): Ceres Seq. ID no. 12369135
MAAVSSTATASSQPELPTSTAHPTANAAAISRLARRPRRNNSFVMVEEASYASGGGDGGVARTKSLTEDDLEELKGCVDLGFGFAYSEIPELCGTLPALELCYSMTRRFLDEQRAPGQDEEEEEPASPPLPNWRIFAPGDDPEEVKARLKYWAQAVACTVKLCS

SEQ ID NO: 19147 - protein, 135 aa, Zea mays subsp. mays
  misc_feature (1)..(135): Ceres Seq. ID no. 12369136
EPENLTRHHANKTDQRDGGRLLHRHRLLAAGAADLHRPPYRQCRRHQQAGAAATAEQQLRDGGGGVLCQRRRRRRGGQDEEPHGGRPGGAQGLRRPRLRLRVQRDTRALRDAARARALLLHDPEVPRRAEGAGTG

SEQ ID NO: 19148 - DNA, 1619 bp, Zea mays subsp. mays
  misc_feature (1)..(1619): Ceres Seq. ID no. 12369137
gtgcccgtttcgcctcgcgcctgcgttgctctgctatttccatttccattgcacccatttccggggtcgcctgcgttgcttcgcgtgggagcgtgattcgtttaggcctctcgccaatttcggagggcgacggcgacgtgctttcggcgggcgggcagagaaaatctagagtcttgggtttgccagacgcgcctttgtgggagacagacacttgctctcgcctccaatggccgagatctgctgcgaggaagccaagtcgacgccggcaaccgccgtggctgcggcttcagtctccgccacggccgcagcggccgcagccgtggcagtggcctcctcggcgttagagaggaggcgacgcaggctggagatgaggaggttccgcgtcgcgagcgatcccgaggagctggtcgcggatgacgtccgcgctgccaagcggcagaggctggcgcgcacgctgtccggctcctgccccgacgcgggctcggactccgacaggccggccctgcccaggtacggggtcacctccgtctgcggccgacggcgcgagatggaggacacggtctccatcaggccggacttcctgcccggcaccagcaagcacaacttcttcggcgtcttcgacggccacggctgctcccacgtagcgacgatgtgccaggacaacatgcacgaggttgtcgcggacgagcacacgaaggctgcctntggcgaggagacggcgtggaagggcgtgatggagaggagcttctcgcgattggatgagcaggccgccagctgggcgaccagccgcagccgcgacgagcctgcctgcaggtgcgagcagcagatgcccttgcgctgcgatcacgtggggtccaccgccgtggtcgccgtcgttagccccagccacgtagtcgtcgccaacgccggcgactcgcgcgccgtcctctcccgcggcggcgtccccgttccgctctccgtcgaccacaagcctgaccgacctgacgagctggctcgcatcgaggcggcgggtggccgcgtcatttactgggatggtgcccgtgttctcggcgtcctcgccatgtctcgagccataggggataggtacctaaagccgtttgtgtcgtcggagccggaggtaacggtgacggagcgcaccgacgacgacgagtgtctgatcctggccagcgacggcctgtgggacgtcgtgaccaacgagatggcgtgcgaggtcgtccgggcgtgcttccgtagcaacggtccgccggcgccggccgctcgcccgaacggcgtggccctcccggcagccggcgcgggcgccgaggacggatcggcggttgtcaagggtgtgggcaaggaggactccgacaaggcgtgctccgacgcggccatgctgctggcaaagctggcgctggcccggcggagcgccgacaatgttagcgtggtcgtcgtggatctccgccggggcatatgattctcggagcgaagcagagcagggcaaaatcatatgctccatgcttgaaactagctcttctgaaatccacgctaatttctcccccattttgaccatccttctattttgatgtagtattagtagtagatcctgatcagatgaatataatagacgcttttcttctctc

SEQ ID NO: 19149 - protein, 408 aa, Zea mays subsp. mays
  misc_feature (1)..(408): Ceres Seq. ID no. 12369138
  misc_feature (160)..(160): Xaa is any aa, unknown or other
MAEICCEEAKSTPATAVAAASVSATAAAAAAVAVASSALERRRRRLEMRRFRVASDPEELVADDVRAAKRQRLARTLSGSCPDAGSDSDRPALPRYGVTSVCGRRREMEDTVSIRPDFLPGTSKHNFFGVFDGHGCSHVATMCQDNMHEVVADEHTKAAXGEETAWKGVMERSFSRLDEQAASWATSRSRDEPACRCEQQMPLRCDHVGSTAVVAVVSPSHVVVANAGDSRAVLSRGGVPVPLSVDHKPDRPDELARIEAAGGRVIYWDGARVLGVLAMSRAIGDRYLKPFVSSEPEVTVTERTDDDECLILASDGLWDVVTNEMACEVVRACFRSNGPPAPAARPNGVALPAAGAGAEDGSAVVKGVGKEDSDKACSDAAMLLAKLALARRSADNVSVVVVDLRRGI

SEQ ID NO: 19150 - protein, 361 aa, Zea mays subsp. mays
  misc_feature (1)..(361): Ceres Seq. ID no. 12369139
  misc_feature (113)..(113): Xaa is any aa, unknown or other
MRRFRVASDPEELVADDVRAAKRQRLARTLSGSCPDAGSDSDRPALPRYGVTSVCGRRREMEDTVSIRPDFLPGTSKHNFFGVFDGHGCSHVATMCQDNMHEVVADEHTKAAXGEETAWKGVMERSFSRLDEQAASWATSRSRDEPACRCEQQMPLRCDHVGSTAVVAVVSPSHVVVANAGDSRAVLSRGGVPVPLSVDHKPDRPDELARIEAAGGRVIYWDGARVLGVLAMSRAIGDRYLKPFVSSEPEVTVTERTDDDECLILASDGLWDVVTNEMACEVVRACFRSNGPPAPAARPNGVALPAAGAGAEDGSAVVKGVGKEDSDKACSDAAMLLAKLALARRSADNVSVVVVDLRRGI

SEQ ID NO: 19151 - protein, 301 aa, Zea mays subsp. mays
  misc_feature (1)..(301): Ceres Seq. ID no. 12369140
  misc_feature (53)..(53): Xaa is any aa, unknown or other
MEDTVSIRPDFLPGTSKHNFFGVFDGHGCSHVATMCQDNMHEVVADEHTKAAXGEETAWKGVMERSFSRLDEQAASWATSRSRDEPACRCEQQMPLRCDHVGSTAVVAVVSPSHVVVANAGDSRAVLSRGGVPVPLSVDHKPDRPDELARIEAAGGRVIYWDGARVLGVLAMSRAIGDRYLKPFVSSEPEVTVTERTDDDECLILASDGLWDVVTNEMACEVVRACFRSNGPPAPAARPNGVALPAAGAGAEDGSAVVKGVGKEDSDKACSDAAMLLAKLALARRSADNVSVVVVDLRRGI

SEQ ID NO: 19152 - DNA, 1271 bp, Zea mays subsp. mays
  misc_feature (1)..(1271): Ceres Seq. ID no. 12369155
accgagttcgtcggtcgtcacctgatattttttccgacggacacacaagcatatatacatacacgccgacatagggatgatggcttcctctagtcctcagcgtgcagccggcgccgccgtcgccggcgtgctgctggtggcggctgccgccctgtgctcgtgcggcgccatggcgcagctgaccgcggactactacgactgcacatgccctgacgcctacaacatcgtgaagcaggtcctgatcgaggcgcacaagtccgacgtgcgcatctacgccagcctcacccgcctccacttccacgactgcttcgtccagggctgcgatggctcggtgctcctggacgccgttccgggggtggccaactccactgagaagctggcgccggccaacaacaactcggcgcgagggttcccggtggtggacaaagtgaaggcggcgctggaggacgcctgccccggcgtcgtctcctgcgccgacatcctcgccctcgccgcagagatctcggtcgaactgtccggaggaccaaagtgggcagtgcttcttgggaggctagacagcaagaaggccgacttcaagagcgcggagaacctgccgtcgccgttcgacaacctgacggtgctggagcagaagttcgcggccgtgggcctccacaccgtggacctggtggccctctcgggagctcacacgttcgggcgggtccagtgccagttcgtcacggggcggctgtacaacttcagcggcacgaaccggccggaccccacgctcaactccggctaccgggcgttcctggcccagaggtgcccccagaacggcagcccctcggccctcaacgacctggaccccacgacgccgaacctgttcgacaaccactactacaccaacctggaggtgaaccggggcttcctcggctcggaccaggagctcaagtcggcgccgcaggcgcagggcgtcaccgcgcccgtcgtcgaccagttcgccaccagccaggccgccttcttcagcagcttcgcgcagtccatgatcaacatgggcaacatccagccgctcaccgacccggccaagggagaggtccgctgcgactgccgggtggctaatgatgattaatccacgacgacgacgtgtgtagttagaaacggacgtgaatgcatgtgcatgtgcccggccgggtcgttagtacaccgacaagcaagagtgcactagcgctatggatcggactatatggtgcacaactgcacatgcatgcatataatatcagggcctcgtcgtttcg

SEQ ID NO: 19153 - protein, 342 aa, Zea mays subsp. mays
  misc_feature (1)..(342): Ceres Seq. ID no. 12369156
MMASSSPQRAAGAAVAGVLLVAAAALCSCGAMAQLTADYYDCTCPDAYNIVKQVLIEAHKSDVRIYASLTRLHFHDCFVQGCDGSVLLDAVPGVANSTEKLAPANNNSARGFPVVDKVKAALEDACPGVVSCADILALAAEISVELSGGPKWAVLLGRLDSKKADFKSAENLPSPFDNLTVLEQKFAAVGLHTVDLVALSGAHTFGRVQCQFVTGRLYNFSGTNRPDPTLNSGYRAFLAQRCPQNGSPSALNDLDPTTPNLFDNHYYTNLEVNRGFLGSDQELKSAPQAQGVTAPVVDQFATSQAAFFSSFAQSMINMGNIQPLTDPAKGEVRCDCRVANDD

SEQ ID NO: 19154 - protein, 341 aa, Zea mays subsp. mays
  misc_feature (1)..(341): Ceres Seq. ID no. 12369157
MASSSPQRAAGAAVAGVLLVAAAALCSCGAMAQLTADYYDCTCPDAYNIVKQVLIEAHKSDVRIYASLTRLHFHDCFVQGCDGSVLLDAVPGVANSTEKLAPANNNSARGFPVVDKVKAALEDACPGVVSCADILALAAEISVELSGGPKWAVLLGRLDSKKADFKSAENLPSPFDNLTVLEQKFAAVGLHTVDLVALSGAHTFGRVQCQFVTGRLYNFSGTNRPDPTLNSGYRAFLAQRCPQNGSPSALNDLDPTTPNLFDNHYYTNLEVNRGFLGSDQELKSAPQAQGVTAPVVDQFATSQAAFFSSFAQSMINMGNIQPLTDPAKGEVRCDCRVANDD

SEQ ID NO: 19155 - protein, 311 aa, Zea mays subsp. mays
  misc_feature (1)..(311): Ceres Seq. ID no. 12369158
MAQLTADYYDCTCPDAYNIVKQVLIEAHKSDVRIYASLTRLHFHDCFVQGCDGSVLLDAVPGVANSTEKLAPANNNSARGFPVVDKVKAALEDACPGVVSCADILALAAEISVELSGGPKWAVLLGRLDSKKADFKSAENLPSPFDNLTVLEQKFAAVGLHTVDLVALSGAHTFGRVQCQFVTGRLYNFSGTNRPDPTLNSGYRAFLAQRCPQNGSPSALNDLDPTTPNLFDNHYYTNLEVNRGFLGSDQELKSAPQAQGVTAPVVDQFATSQAAFFSSFAQSMINMGNIQPLTDPAKGEVRCDCRVANDD

SEQ ID NO: 19156 - DNA, 1270 bp, Zea mays subsp. mays
  misc_feature (1)..(1270): Ceres Seq. ID no. 12369175
agagcggcgctgccagcaaggcggctagtatgagcagcatggagtcgcggccgggccgaacgaacctggtggagcccatagggcacggcgccgcgctgccgtccggcggccaggcagtgcagccgtggtggacgagctccggggctgtgctcggtgcagtctcgccagccgtcgtggcggtggcgcccgggagcgggacggggattagcctgtcgagcagcccggcaggtggtagtggtggtggcggcgcggctaaaggagccgcgagtgacgagagcagcgaggattcacggagatctggggaaccaaaagatggaagcgctagtcaagaaaagaaccatgccacatcgcagatacccgctctggcgccagagtatttggcaccatactcgcagctggaactgaaccaatcaattgcttctgcagcatatcagtacccagatccttactatgcaggcatggttgctccctatggaagtcatgctgtggctcattttcagctacctggactaactcaatctcgaatgccattacctcttgaagtatccgaggagcctgtttatgtaaatgccaagcagtaccatggtatcttaagacgacggcagtcccgtgctaaggctgaacttgagaaaaaggtggtcaaagccagaaagccataccttcacgagtctcgtcatcagcacgcgatgaggagggcaagaggaaacgggggacgcttcctgaacacaaagaaaagtgacagtggtgctcccaatggaggcgaaaacgccgagcatctccatgtccctcccgacttactacagctacgacagaacgaggcttgaagtagcggtatggctctggcatccttgaacagcagttcctgtccacgggcgtaggcattcgagaccggattcatatagctctccacagcatacgcgcagccatctctgcggtaacgcacgttctcctgaacgagctttgtagcgagataggtatgcaagtgcaatctgggcgcaggaatccatcatcaagtgcccaatgcccatggggtaggtacgctgtttcaggcaattcattcttggctttcacgttccacccttgtgtaactggtgtgttgtaaatgtgtggaaaactaagcttgtgctctgtatcgggccgttcagcggaactgcaaaacgcctgtataattaagatcgaactttggattaactcggtaatgctttgtctggttttcttttagcttttcaactgtaacacggccacagctgattcatgtgatgtgcttgct

SEQ ID NO: 19157 - protein, 273 aa, Zea mays subsp. mays
  misc_feature (1)..(273): Ceres Seq. ID no. 12369176
SGAASKAASMSSMESRPGRTNLVEPIGHGAALPSGGQAVQPWWTSSGAVLGAVSPAVVAVAPGSGTGISLSSSPAGGSGGGGAAKGAASDESSEDSRRSGEPKDGSASQEKNHATSQIPALAPEYLAPYSQLELNQSIASAAYQYPDPYYAGMVAPYGSHAVAHFQLPGLTQSRMPLPLEVSEEPVYVNAKQYHGILRRRQSRAKAELEKKVVKARKPYLHESRHQHAMRRARGNGGRFLNTKKSDSGAPNGGENAEHLHVPPDLLQLRQNEA

SEQ ID NO: 19158 - protein, 264 aa, Zea mays subsp. mays; identical to SEQ ID NO: 15154
  misc_feature (1)..(264): Ceres Seq. ID no. 12369177

SEQ ID NO: 19159 - protein, 261 aa, Zea mays subsp. mays; identical to SEQ ID NO: 15155
  misc_feature (1)..(261): Ceres Seq. ID no. 12369178

SEQ ID NO: 19160 - DNA, 986 bp, Zea mays subsp. mays
  misc_feature (1)..(986): Ceres Seq. ID no. 12369222
attcgagaggaaaggaagaagaactggagaggaaaaaaagtgtaggatcgagggagatggagagcggccaagcgtggaccaacgactcctcttctccgatcctcccgcagctgcaggccgtagctagctctataaaaagctaagggagcctgcctgccatcgtcgtgcatcgtcatccaccacgatcgataaagctaattaagctgctactgctacgctagcctcgatcgatcaagcaagcagctcacagacccaccggcccacccacccacccacatggcggcgtcccgttccgctctgatcacgctgctcgtccttgtgagctccgtcgcggcggcctcggcgaccacgttcaccgtcggcgacagtagcggctggagtcgtagcgtcaactacgacaactgggccagtggcaagaccttcacggatggagatcagctagtgttcaacttcgccaccgggaaccacgacgtggtggaggtggacaagagcggatacgacggctgctccaccaccaacgccgccaacacaatccaaaacggcccggccaccgtcaacctcacctccggcacccactactacatctgcggcttcaccggccactgcagcgccgggatgaagctcgctgtcaccgtcggctccggctccggctccgggtcccccacccccggcggcggctcgcccagcacacccacaccaaccaccccgagcgcccccacccccgacactccggccagcgcgtccgtgcgcctcacggccggcccagcgctcgccgtggccgccaccgtgctcgtcgccctcttctgatctgatctgatctgatactgcatgcatgcaccgtgccaggaccaggatagaggcagtgcaggatcatagtattcttgtgtacgtacgtacatactttgttgttgagctagcgttttcattctgacgacggcggattattgtactctcgtacgtttttatttccacatgtactactgtct

SEQ ID NO: 19161 - protein, 176 aa, Zea mays subsp. mays
  misc_feature (1)..(176): Ceres Seq. ID no. 12369223
MAASRSALITLLVLVSSVAAASATTFTVGDSSGWSRSVNYDNWASGKTFTDGDQLVFNFATGNHDVVEVDKSGYDGCSTTNAANTIQNGPATVNLTSGTHYYICGFTGHCSAGMKLAVTVGSGSGSGSPTPGGGSPSTPTPTTPSAPTPDTPASASVRLTAGPALAVAATVLVALF

SEQ ID NO: 19162 - DNA, 1230 bp, Zea mays subsp. mays
  misc_feature (1)..(1230): Ceres Seq. ID no. 12369252
acgaacaagcaatggcgcgcaccatggcagccatcgcgatcttgctcgccgccttcttcgtcctcgctccggatctggccaccgcagcggcagcggcagcggcgcagagcgccatcccggccgtgttcgcgttcggggactccacgctggacccgggcaacaacaacggcctgggccacgctggtgcgcgccgaccacgcgccctacggccgcggcttcccgggcggcgcggccacgggccgcttctcggacggcaagctcatcaccgactacatcgtcgagtcgctcggcatcaaggacctcctgccggcgtaccgcggcagcggcctcaccgtggcggaggcgtccacgggggtcagcttcgcgtcgggcgggtccggcctcgacgacctgaccgcgcagaccgccatggtgtccacgttcggctcgcagatcaccgacttccaggccctgctcggcaggatcggcatgcccaaggtcgccgggatcgccaacaggtcgctctacgtggtctccgccggcaccaacgacgtcaccatgaactacttcgtcctgccggtccggaccatcagcttccccaccgtcgaccagtacagtgcctacctcatcggcaggctccagggatacatccagagcttgtacaagctgggagcccggaacttcatggtgtccggcctgccgccggtggggtgcctgccgatcacgaagagcctccacagtctcgggtcgggaggttgcgtcgccgaccagaacgcggccgcggagcggtacaacgcggcgctgcggcagatgctgaccagggctggaggccgcgtcccccggcgccgcgctcgcgtacgtcgacgtgtacaccccgttgatggacatggtcgcgcagccccagaaatacggtttcaccgagacgagccgaggctgctgcgggaacggtctgccggcgatgggggcgctctgcaccagcgcgctgccgcagtgccggtcgccggcgcagttcatgttcttcgactcggtgcacccgacgcaggccacctacaaggcgctcgccgaccacatcgtccagtcacaaaaacctaagacttagattagcattagattagcattagctgcaggaggaacggcattgcacatgaagctggctacctcggtgctttttgtagatccatttatttgcacatgcagagatggatgtttacatagcgaagtttttaatatacagagagtcgtttattttgc

SEQ ID NO: 19163 - protein, 356 aa, Zea mays subsp. mays
  misc_feature (1)..(356): Ceres Seq. ID no. 12369253
TNKQWRAPWQPSRSCSPPSSSSLRIWPPQRQRQRRRAPSRPCSRSGTPRWTRATTTAWATLVRADHAPYGRGFPGGAATGRFSDGKLITDYIVESLGIKDLLPAYRGSGLTVAEASTGVSFASGGSGLDDLTAQTAMVSTFGSQITDFQALLGRIGMPKVAGIANRSLYVVSAGTNDVTMNYFVLPVRTISFPTVDQYSAYLIGRLQGYIQSLYKLGARNFMVSGLPPVGCLPITKSLHSLGSGGCVADQNAAAERYNAALRQMLTRAGGRVPRRRARVRRRVHPVDGHGRAAPEIRFHRDEPRLLRERSAGDGGALHQRAAAVPVAGAVHVLRLGAPDAGHLQGARRPHRPVTKT

SEQ ID NO: 19164 - protein, 285 aa, Zea mays subsp. mays
  misc_feature (1)..(285): Ceres Seq. ID no. 12369254
EQAMARTMAAIAILLAAFFVLAPDLATAAAAAAAQSAIPAVFAFGDSTLDPGNNNGLGHAGARRPRALRPRLPGRRGHGPLLGRQAHHRLHRRVARHQGPPAGVPRQRPHRGGGVHGGQLRVGRVRPRRPDRADRHGVHVRLADHRLPGPARQDRHAQGRRDRQQVALRGLRRHQRRHHELLRPAGPDHQLPHRRPVQCLPHRQAPGIHPELVQAGSPELHGVRPAAGGVPADHEEPPQSRVGRLRRRPERGRGAVQRGAAADADQGWRPRPPAPRSRTSTCTPR

SEQ ID NO: 19165 - protein, 282 aa, Zea mays subsp. mays
  misc_feature (1)..(282): Ceres Seq. ID no. 12369255
MARTMAAIAILLAAFFVLAPDLATAAAAAAAQSAIPAVFAFGDSTLDPGNNNGLGHAGARRPRALRPRLPGRRGHGPLLGRQAHHRLHRRVARHQGPPAGVPRQRPHRGGGVHGGQLRVGRVRPRRPDRADRHGVHVRLADHRLPGPARQDRHAQGRRDRQQVALRGLRRHQRRHHELLRPAGPDHQLPHRRPVQCLPHRQAPGIHPELVQAGSPELHGVRPAAGGVPADHEEPPQSRVGRLRRRPERGRGAVQRGAAADADQGWRPRPPAPRSRTSTCTPR

SEQ ID NO: 19166 - DNA, 1019 bp, Zea mays subsp. mays
  misc_feature (1)..(1019): Ceres Seq. ID no. 12369259
atccgttgatcccatcggcttccccttcctcttccccgatccccttcctcccccgatcccatccaattccacttccacaccgcgggcctcgccgccgacgccgacgccgccggccatgtccaagtacggcaccattcccacctcctcctccgcgggcggagggcccgtgcccctcggcggcgcctccccgctcgatttcatctcccgcgccaaggctcggggcgcctcggcgctggcgacgcgccggccctggcgcgagctcgtggacgtccacgccgtcggcctgcccccgagcctcggcgacgcgtacctccgcgtgcgcgccaacctcgcccacttcgccatgaactatgccatcgtcgtcctcgtcgtcgtcttcctctccctcctctggcaccccgtctccctcatcgtattcctcgtctgcatgcttgcctggctcgtcctctacttcctccgcgacgagcccctcgtcctcttcggccgcgtcgtcgccgacggctacgtcctcgccgtgctcgccgtcgtcacgctcgtcctgctcctcctcaccgacgccaccgccaacatcctctcctcgctgctcatcggcctcgtgctcgtcctcgtccacgccgcgctgcacaaggcggaggacaacgccgccgacgaggctgaccgctggtacgcgccggtgtcacagcagccgtcgcactgaggatctgaatgtggccgttctgcgccttggctgtgattctattctgtactccctgtttccgagttcctccagctgcgcaagctgggccatccccatctcatctgcgatgaaaaacctgtccctgttggttgtgattcacctgctgccggttccatgggaagttttggatccagcgacgacgctgggctgttaaacttgttctccacgcccatttctgtgatacgtttaaagcgtctcgttcacgtgtatcaaatccggactgaagtctagtgtacattttgagttggagaaatgtgatgccagggacctgcgttcagatttc

SEQ ID NO: 19167 - protein, 231 aa, Zea mays subsp. mays
  misc_feature (1)..(231): Ceres Seq. ID no. 12369260
SVDPIGFPFLFPDPLPPPIPSNSTSTPRASPPTPTPPAMSKYGTIPTSSSAGGGPVPLGGASPLDFISRAKARGASALATRRPWRELVDVHAVGLPPSLGDAYLRVRANLAHFAMNYAIVVLVVVFLSLLWHPVSLIVFLVCMLAWLVLYFLRDEPLVLFGRVVADGYVLAVLAVVTLVLLLLTDATANILSSLLIGLVLVLVHAALHKAEDNAADEADRWYAPVSQQPSH

SEQ ID NO: 19168 - protein, 193 aa, Zea mays subsp. mays
  misc_feature (1)..(193): Ceres Seq. ID no. 12369261
MSKYGTIPTSSSAGGGPVPLGGASPLDFISRAKARGASALATRRPWRELVDVHAVGLPPSLGDAYLRVRANLAHFAMNYAIVVLVVVFLSLLWHPVSLIVFLVCMLAWLVLYFLRDEPLVLFGRVVADGYVLAVLAVVTLVLLLLTDATANILSSLLIGLVLVLVHAALHKAEDNAADEADRWYAPVSQQPSH

SEQ ID NO: 19169 - protein, 179 aa, Zea mays subsp. mays
  misc_feature (1)..(179): Ceres Seq. ID no. 12369262
MPSSSSSSSSSPSSGTPSPSSYSSSACLPGSSSTSSATSPSSSSAASSPTATSSPCSPSSRSSCSSSPTPPPTSSPRCSSASCSSSSTPRCTRRRTTPPTRLTAGTRRCHSSRRTEDLNVAVLRLGCDSILYSLFPSSSSCASWAIPISSAMKNLSLLVVIHLLPVPWEVLDPATTLGC

SEQ ID NO: 19170 - DNA, 1733 bp, Zea mays subsp. mays
  misc_feature (1)..(1733): Ceres Seq. ID no. 12369271
accgagaatctttcaccctcctgacctctctctctcctcttctccctcccgtgagtgagtgagctggagtcaagctagccgagcgagtgatggcatggggagcttgcactgctgcggcagctgctctccttctgctcctcctcctcctcgccgccgccgcagcaggtggtaacggcggcgtgcattgccttgaccttgaccttgaggaggggaggcggcaccacctgagcaggagagccttgcaagggaggcagaggcggcaccacctgaggtcaagggcggtgggtggcgccacggtgctcgagctgaggcaccacagcttcagccctgcaccggccaacagcagggaggaggaggcggacgctctcctgtccgccgacgccgcgcgcgtctcgtcgctgcaagggcgcatagagcactaccggctgacgacgaccagctcgtcggccgaggtggcggtgacggcgtccaaggcgcaggtgcccgtcagctcgggcgcgaggctccggacgctgaactacgtggccaccgtggggctgggcggcggcgaggcgacggtgatcgtggacacggccagcgagctgacgtgggtgcagtgcgcgccgtgcgagtcgtgccacgaccagcagggcccgctgttcgacccgtcctcgtcgccgtcctacgccgcggtgccgtgcgactccccctcctgcgacgcgctgcagcagcagctggccacgggcgcgggcgcgccgccgtgcgacgccgggcggccggcggcctgcagctacgcgctcagctaccgcgacggctcctactcccgcggcgtgctggcgcacgacaggctgagcctggccggggaggtcatcgacggcttcgtgttcgggtgcggcaccagcaaccagggcccgccgttcggcggcacgtcgggcctcatggggctcggccgcagccagctctcgctcgtgtcgcagaccgtggaccagttcggcggcgtgttctcctactgcctcccgctcagcagggagtccgacgcgtcgggctcgctggtgctgggcgacgacccgtcggcgtaccgcaactcgaccccggtcgtgtacacctcgatggtgtccaactccgacccgctgctccaggggcccttctacctggtgaacctgaccgggatcacggtcggcggccaggaggtggagtccacgggcttctcggccagggcgatcgtcgactcgggcaccgtgatcaccagcctcgtgccgtcggtctacaacgccgtcagggccgagttcatgagccagctcgcggagtacccgcaggcgccagggttctccatcctcgacacctgcttcaacatgaccgggctcaaggaagtccaggtgcccagcctgactctcgtgttcgacggcggcgcggaggtggaggtggactccggcggcgtgctctacttcgtcagcagcgactcctcacaggtgtgcctggccgtggcctccctgaaatccgaggacgagacctccatcatcggcaactaccagcagaagaacctgagggtcgtcttcgacacctcggcgtctcaggttggtttcgcgcaggagacgtgtggttatatttgactttgactcggattgggattgggattgggatgcagcgggcggccatgggctctatatatgtgaatacctttatacttacttgcagatttgtttcgagattacccctggtgattggcaaatggtaacaaggtgttcagttgttgg

SEQ ID NO: 19171 - protein, 499 aa, Zea mays subsp. mays
  misc_feature (1)..(499): Ceres Seq. ID no. 12369272
MAWGACTAAAAALLLLLLLLAAAAAGGNGGVHCLDLDLEEGRRHHLSRRALQGRQRRHHLRSRAVGGATVLELRHHSFSPAPANSREEEADALLSADAARVSSLQGRIEHYRLTTTSSSAEVAVTASKAQVPVSSGARLRTLNYVATVGLGGGEATVIVDTASELTWVQCAPCESCHDQQGPLFDPSSSPSYAAVPCDSPSCDALQQQLATGAGAPPCDAGRPAACSYALSYRDGSYSRGVLAHDRLSLAGEVIDGFVFGCGTSNQGPPFGGTSGLMGLGRSQLSLVSQTVDQFGGVFSYCLPLSRESDASGSLVLGDDPSAYRNSTPVVYTSMVSNSDPLLQGPFYLVNLTGITVGGQEVESTGFSARAIVDSGTVITSLVPSVYNAVRAEFMSQLAEYPQAPGFSILDTCFNMTGLKEVQVPSLTLVFDGGAEVEVDSGGVLYFVSSDSSQVCLAVASLKSEDETSIIGNYQQKNLRVVFDTSASQVGFAQETCGYI

SEQ ID NO: 19172 - DNA, 1564 bp, Zea mays subsp. mays
  misc_feature (1)..(1564): Ceres Seq. ID no. 12369286
cgcccactaccctctccggctctccgctaacaaaatctagaaccctctgaaccctccacattcctccagatcgaataataacctagctctgcacaccgcccagccaccagtggcagcaggagcaggggtcggaacaagatggtggtgacggcggccggcagcgcggaggaggctgtgcggcggtgggtggacgccgccggaggacgcctcgtcctcgacggcgggctggccacggagctcgaggccaacggcgccgacctcaacgacccgctctggagcgctaagtgcctcctctcctccccgcacctcatccgcaaggtccacatggactatctggaagctggcgcaaacattataatcacagcatcgtatcaggccactattcaagggtttgaatcaaagggtttttcaaaagaacagagtgaaaacttactaacaaagagtgtcgagattgcactggaagctcgtgagatgttcttgaaggaacatctggagaagtccactcctatacagcacccggttctggtcgcagcgtctttagggagttatggagcttatcttgccgatggctccgagtacagtggggattatggtgaagctggtacgaaagagttcctgaaagatttccatcggcggaggctccaggttcttgcggaagcaggccccgatttgattgctttcgaaacgattcccaacaaactggaagctgaggcgtatgtcgaacttctcgaggagtgcaacatcaatatccctgcatggttttccttcaactcaaaagatggagtgcatattgtgagcggtgactcgttaatcgaatgcactactattgctgacaagtgtgcaaaggttggtgcggtcgggataaactgcacacctccaagatttatccatggactgatactctccattcgaaaggtcacggacaagcccattctgatatatcccaacagtggcgaaagatacgatggtgaaaaaaaggagtgggtggaatccactggtgtgtcagatggtgattttgtttcttatgtgaacgagtggtgcaaagacggggctgtgcttatcggtggctgctgcaggacaactccaaacactatcagggccatacacagaactctgaacaaaagccccaacaagcagcagttacctgctgtagaataagagctgtgctctactctgatgcgcccgccttcctcctagcagtacctcgaggctataactccatgattccgtaaccgtacgtgttcgttctcttgcaaacgagatgtttgtaaataacgctgtatttctgggttctgagatatgcaacttggatggaggtacaaccggtgaaggggggtgaggaagcagcaacaatggtaagagttctactactgagtgggggaaaaacaacttgcggctgggttagtgaagcttagtagctaccactattcaagagttaaagggagttcgtatgacagttcctctggagatgttatcttcaaagtcttatatcactgctacttgtgagctgtgttaaaacctatatatataagttttgtttgacgtgactgcattaaagatagtg

SEQ ID NO: 19173 - protein, 339 aa, Zea mays subsp. mays
  misc_feature (1)..(339): Ceres Seq. ID no. 12369287
MVVTAAGSAEEAVRRWVDAAGGRLVLDGGLATELEANGADLNDPLWSAKCLLSSPHLIRKVHMDYLEAGANIIITASYQATIQGFESKGFSKEQSENLLTKSVEIALEAREMFLKEHLEKSTPIQHPVLVAASLGSYGAYLADGSEYSGDYGEAGTKEFLKDFHRRRLQVLAEAGPDLIAFETIPNKLEAEAYVELLEECNINIPAWFSFNSKDGVHIVSGDSLIECTTIADKCAKVGAVGINCTPPRFIHGLILSIRKVTDKPILIYPNSGERYDGEKKEWVESTGVSDGDFVSYVNEWCKDGAVLIGGCCRTTPNTIRAIHRTLNKSPNKQQLPAVE

SEQ ID NO: 19174 - protein, 277 aa, Zea mays subsp. mays
  misc_feature (1)..(277): Ceres Seq. ID no. 12369288
MDYLEAGANIIITASYQATIQGFESKGFSKEQSENLLTKSVEIALEAREMFLKEHLEKSTPIQHPVLVAASLGSYGAYLADGSEYSGDYGEAGTKEFLKDFHRRRLQVLAEAGPDLIAFETIPNKLEAEAYVELLEECNINIPAWFSFNSKDGVHIVSGDSLIECTTIADKCAKVGAVGINCTPPRFIHGLILSIRKVTDKPILIYPNSGERYDGEKKEWVESTGVSDGDFVSYVNEWCKDGAVLIGGCCRTTPNTIRAIHRTLNKSPNKQQLPAVE

SEQ ID NO: 19175 - protein, 228 aa, Zea mays subsp. mays
  misc_feature (1)..(228): Ceres Seq. ID no. 12369289
MFLKEHLEKSTPIQHPVLVAASLGSYGAYLADGSEYSGDYGEAGTKEFLKDFHRRRLQVLAEAGPDLIAFETIPNKLEAEAYVELLEECNINIPAWFSFNSKDGVHIVSGDSLIECTTIADKCAKVGAVGINCTPPRFIHGLILSIRKVTDKPILIYPNSGERYDGEKKEWVESTGVSDGDFVSYVNEWCKDGAVLIGGCCRTTPNTIRAIHRTLNKSPNKQQLPAVE

SEQ ID NO: 19176 - DNA, 1380 bp, Zea mays subsp. mays
  misc_feature (1)..(1380): Ceres Seq. ID no. 12369290
atagtcgccgttacatcggacaagggcatcttgcggtgaagcatctaatctgagcagtcagtcgtccccccgctcgcggccgggctactgctggtcgtcaagtactcaagttgtaggcgtgcagccggggcgccggccgctagctgctgtcagcacgcgcacacagcagcagggtggtcgcccgcgggccggtagccggcacgcggtcgcgacaagccgatagcaacagcaagcgaggcccaagttcagtccccagagagcggcaagctaggtctgtcatcttctctggagggttcagaaccaccgagaattagctgtctttgaggagtacaataggaatggatgatgctcaagggtatcaagaaggagatgatcatgacttagtgctgcagaaacaagaatggatcaaaacacaagacatgctcaagagtaaacttattcttgaagatgaatttgcctggagtttaccttcggtgggctcaggtttagatgaacctgagaggtgcaaactgaagtatattggtgggactgacatcagcttcttgaaggaagacccattcacagcatgtgccgcggtggtagtcctcaatgccgatactttagaagttgtccatgaagagttcaatgttgttcgactgcaagtgccatatattcctggttttcttgcattcagagaggctccagttcttcttggactcttggaaaaggtgaagatcaatgcacctcatttctgccctcaggttgcataaggggccataggaaacaaggcatatgctgttctttattatcacttgctcatggttgatggaaatggattgctccatccgcgaggttttggtttagcttgtcatctcggcgttcttgcagacattcctactattggagttggaaaaaatctacatcaagtagatggccttaaccaatcagaagttagaagactgctcggatcaaaagagaactgcaacagggaactggttttgttgactggacagtctgggacaaaatggggcatggcggtgcgctcctgccctggttcgtcgaaaccaatctacgtctcagttgggcatcgcgtctcacttgattcagccacggcgatagtgaagtcttgctgtagataccgtgttcctgagcctacaaggcaggcggatataagatcaaaggtcttcctgcagaagctccaaaagccacggcagtgacaggacttcctttttgtttttttttttcctcaagtatgttacaaactgggatcctgaccgtcttgcttgctgtagtcgagttttcagaaacaaatatgtaacatgatagaattgtcacttgcgaggttgccgcaccgtagtttgtaaaacagacccagaccgatgatttctttgaccgagacct

SEQ ID NO: 19177 - protein, 136 aa, Zea mays subsp. mays
  misc_feature (1)..(136): Ceres Seq. ID no. 12369291
MDDAQGYQEGDDHDLVLQKQEWIKTQDMLKSKLILEDEFAWSLPSVGSGLDEPERCKLKYIGGTDISFLKEDPFTACAAVVVLNADTLEVVHEEFNVVRLQVPYIPGFLAFREAPVLLGLLEKVKINAPHFCPQVA

SEQ ID NO: 19178 - protein, 132 aa, Zea mays subsp. mays
  misc_feature (1)..(132): Ceres Seq. ID no. 12369292
MVDGNGLLHPRGFGLACHLGVLADIPTIGVGKNLHQVDGLNQSEVRRLLGSKENCNRELVLLTGQSGTKWGMAVRSCPGSSKPIYVSVGHRVSLDSATAIVKSCCRYRVPEPTRQADIRSKVFLQKLQKPRQ

SEQ ID NO: 19179 - protein, 109 aa, Zea mays subsp. mays
  misc_feature (1)..(109): Ceres Seq. ID no. 12369293
MLKSKLILEDEFAWSLPSVGSGLDEPERCKLKYIGGTDISFLKEDPFTACAAVVVLNADTLEVVHEEFNVVRLQVPYIPGFLAFREAPVLLGLLEKVKINAPHFCPQVA

SEQ ID NO: 19180 - DNA, 1638 bp, Zea mays subsp. mays
  misc_feature (1)..(1638): Ceres Seq. ID no. 12369305
gggcgtccatgtcctgctgctgccgccgcgggacctgagaggagaaggacgaggacgaggtggtggttggcggcgtcgcgccgacggcggacatgggttggaggcggggaggaggcgcggatggcgtggccaggagatgggtgctgctgctatgcgtcgggagcttctgcctcggcctgctcttcaccgacaggatgtggagcttgccagaagcagatgaggtagcagtactcccaaatttaagaagagaggaagaggctgagcgcaagactggagactgtaatgtaggcaaagttcaaggaaaacacgattacaatgacatgttacgtgtctcagatgctcaccataattcacagactttggataaggcaatagcgaacttggagacagagctctctgcggcaagaactctacaagattctttcctcaatggatctccagtgcaagaagattacaaggcttcagagtctaccggtaggcgcaagtaccttatggtaataggtatcaacactgcttttagcagtcgcaagagaagggattctatccgcaacacctggatgcctacaggggaaataaggaaaaagctggaggaagaaagagggatcatagtttttgtaattggtcacagtgctatttcaggtggaattgtcgatagagcaattcaggcagaggataagaaacatggagacttcatgaggctggatcatgttgaaggataccttgagctgtcagggaaaaccaggacatactttgcaacagctgttgctttatgggatgctaacttctatgtgaaggttgacgacgatgtacatgttaatatagcaacacttggaaatatcttatccaaacatatttcaaagcccagggtatacattggatgcatgaagtctggccctgtcctctctgacaaggatgtgaggtactatgaaccagagcactggaaatttggggaagtgggtaataaatattttcggcatgccaccggtcaactgtacgctatttcaaaagatttggcagcctacatatcgctaaacaagcatgttttgcacaaatatatcaacgaggacgtgtctttgggagcttggttgatagggttagatgttgagcatattgatgaccgcagactatgctgcggcactccaccagattgcgaatggaaagctcaggctggtaacacctgcgctgcctcgttcgattggaaatgcagcggtatctgcaactctgtgcagaacatctggggggttcataagaagtgttcagaagatgaaaaggcgctgctgactgtttctttctaatcaaagtgcagtgctgtgtatctgtacattgtgcaaagaatgtgtccggttcataggtggctaaatggcttacaattagacaacaccactggagcaggccgcaattttactcagcgtccgctggtggcactctgaggatttaaggggtgtagagctgaccgattcttttagcaagttggccagttgggtggtcatacatgtattgacctgataaaacaaacactatccgacgagttcagccagggctgtctgagctaagacaggatgaataacggctggttgagctcatgcaagacatttatttggttgattgtacaaattaatgcagaccggtgtagatgct

SEQ ID NO: 19181 - protein, 400 aa, Zea mays subsp. mays
  misc_feature (1)..(400): Ceres Seq. ID no. 12369306
MGWRRGGGADGVARRWVLLLCVGSFCLGLLFTDRMWSLPEADEVAVLPNLRREEEAERKTGDCNVGKVQGKHDYNDMLRVSDAHHNSQTLDKAIANLETELSAARTLQDSFLNGSPVQEDYKASESTGRRKYLMVIGINTAFSSRKRRDSIRNTWMPTGEIRKKLEEERGIIVFVIGHSAISGGIVDRAIQAEDKKHGDFMRLDHVEGYLELSGKTRTYFATAVALWDANFYVKVDDDVHVNIATLGNILSKHISKPRVYIGCMKSGPVLSDKDVRYYEPEHWKFGEVGNKYFRHATGQLYAISKDLAAYISLNKHVLHKYINEDVSLGAWLIGLDVEHIDDRRLCCGTPPDCEWKAQAGNTCAASFDWKCSGICNSVQNIWGVHKKCSEDEKALLTVSF

SEQ ID NO: 19182 - protein, 366 aa, Zea mays subsp. mays
  misc_feature (1)..(366): Ceres Seq. ID no. 12369307
MWSLPEADEVAVLPNLRREEEAERKTGDCNVGKVQGKHDYNDMLRVSDAHHNSQTLDKAIANLETELSAARTLQDSFLNGSPVQEDYKASESTGRRKYLMVIGINTAFSSRKRRDSIRNTWMPTGEIRKKLEEERGIIVFVIGHSAISGGIVDRAIQAEDKKHGDFMRLDHVEGYLELSGKTRTYFATAVALWDANFYVKVDDDVHVNIATLGNILSKHISKPRVYIGCMKSGPVLSDKDVRYYEPEHWKFGEVGNKYFRHATGQLYAISKDLAAYISLNKHVLHKYINEDVSLGAWLIGLDVEHIDDRRLCCGTPPDCEWKAQAGNTCAASFDWKCSGICNSVQNIWGVHKKCSEDEKALLTVSF

SEQ ID NO: 19183 - protein, 324 aa, Zea mays subsp. mays
  misc_feature (1)..(324): Ceres Seq. ID no. 12369308
MLRVSDAHHNSQTLDKAIANLETELSAARTLQDSFLNGSPVQEDYKASESTGRRKYLMVIGINTAFSSRKRRDSIRNTWMPTGEIRKKLEEERGIIVFVIGHSAISGGIVDRAIQAEDKKHGDFMRLDHVEGYLELSGKTRTYFATAVALWDANFYVKVDDDVHVNIATLGNILSKHISKPRVYIGCMKSGPVLSDKDVRYYEPEHWKFGEVGNKYFRHATGQLYAISKDLAAYISLNKHVLHKYINEDVSLGAWLIGLDVEHIDDRRLCCGTPPDCEWKAQAGNTCAASFDWKCSGICNSVQNIWGVHKKCSEDEKALLTVSF

SEQ ID NO: 19184 - DNA, 738 bp, Zea mays subsp. mays
  misc_feature (1)..(738): Ceres Seq. ID no. 12369342
catggaagttgtcgattcctccgtcgccatctggcgctccgacgagtccgggatctggagcgtcctatacgtgctcgatgtcctctggagcctgctgaccggccgcctggtgcgagagaaggtggacccggccgtgcaaagcgccgtcgacagtcagatgaacgccgcggactcgcaggacatggcgccgacactggcggacatgttcgagacgggcgccgccgacgccaagggcatgccggccgccgccgtcgcggcgctccccatcatggccttcaccgagcacaccgtcgccgacggctccggggagcccatcggctgctccgtctgccttcaggacttcgaggcaggcgagacggcgcggagcttgccggagtgcgggcacacgttccacctgccgtgcatcgacgtctggctgctccggccacgcctcgtgcccactgtgtcgtcgcgcggtctaagccggttcgcacacttttcgttaggatgtctttgggcaaccgtgagccgatgcgcgtgcacacgtgtcccagaccaggagcacagtatagtagggtagtaggagtgcaggacacctggttctttcttgcataccttgattatttttttccttcttttttctacgtcttgagcacgcatgtacagatacagtacgtggctcacattgtctcacacacactgtggatgtaaatatgtatagggtaaatgttgtaaacaatgtaatatacttgtacattg

SEQ ID NO: 19185 - protein, 229 aa, Zea mays subsp. mays
  misc_feature (1)..(229): Ceres Seq. ID no. 12369343
HGSCRFLRRHLALRRVRDLERPIRARCPLEPADRPPGAREGGPGRAKRRRQSDERRGLAGHGADTGGHVRDGRRRRQGHAGRRRRGAPHHGLHRAHRRRRLRGAHRLLRLPSGLRGRRDGAELAGVRAHVPPAVHRRLAAPATPRAHCVVARSKPVRTLFVRMSLGNREPMRVHTCPRPGAQYSRVVGVQDTWFFLAYLDYFFPSFFYVLSTHVQIQYVAHIVSHTLWM

SEQ ID NO: 19186 - protein, 185 aa, Zea mays subsp. mays
  misc_feature (1)..(185): Ceres Seq. ID no. 12369344
MEVVDSSVAIWRSDESGIWSVLYVLDVLWSLLTGRLVREKVDPAVQSAVDSQMNAADSQDMAPTLADMFETGAADAKGMPAAAVAALPIMAFTEHTVADGSGEPIGCSVCLQDFEAGETARSLPECGHTFHLPCIDVWLLRPRLVPTVSSRGLSRFAHFSLGCLWATVSRCACTRVPDQEHSIVG

SEQ ID NO: 19187 - protein, 133 aa, Zea mays subsp. mays
  misc_feature (1)..(133): Ceres Seq. ID no. 12369345
MNAADSQDMAPTLADMFETGAADAKGMPAAAVAALPIMAFTEHTVADGSGEPIGCSVCLQDFEAGETARSLPECGHTFHLPCIDVWLLRPRLVPTVSSRGLSRFAHFSLGCLWATVSRCACTRVPDQEHSIVG

SEQ ID NO: 19188 - DNA, 892 bp, Zea mays subsp. mays
  misc_feature (1)..(892): Ceres Seq. ID no. 12369350
ttaactcgagaggaggtgaagcatcccggaatggagatcctgatgctttggcaacaatgaacgcaactgcagaagctcttgaagcaaaagaaaagcaaaagccatcgtttgaattgtctggaaagcttgctgaggagaccaacagagttgcaggtgtaaatctattatattcagaacccgccagaggctcgaaagtcagagattagatggaggctctatgtatttaaagatggtgaaccactgaatgaaccactgtatgttcatcggatgacctgctacctttttggaagagaaaggaaagttgcagatgtccccacagatcatccctcctgcagcaagcaacatgcagttcttcaatacagacttgtggagaaggagcaactagatggcataatgacaaagaaaataaggccttatctgatggatcttgatagtacaaatggaactttcatcaatggaaatcgcattgagcctcggcgatattatgagttatttgaaaaggacacaatcaagtttggcaatagtagccgggagtatgttttgctccacgaaaattcaacagaatgagttttgagaaaattcaacagaatgaggattgaaacaatcagccttttatgctgtagaagaaaaatacagcaaaaacatgaggttttgcatgttttaaaatttttagactggagattggccggcttgaacttctggtctgtgatttcttcacgtgttcaagtctataaggatattttgtgaaccaacatgtagtgctattgtaatgaaaagagctagctgcctgtagcagatagccctggggtattgtttgtattcaagcatgttttgcaccgctggcattcacatcattcggtatcggaggcagctgtttatggatcaatgctat

SEQ ID NO: 19189 - protein, 99 aa, Zea mays subsp. mays
  misc_feature (1)..(99): Ceres Seq. ID no. 12369351
MTCYLFGRERKVADVPTDHPSCSKQHAVLQYRLVEKEQLDGIMTKKIRPYLMDLDSTNGTFINGNRIEPRRYYELFEKDTIKFGNSSREYVLLHENSTE

SEQ ID NO: 19190 - protein, 67 aa, Zea mays subsp. mays
  misc_feature (1)..(67): Ceres Seq. ID no. 12369352
NSRGGEASRNGDPDALATMNATAEALEAKEKQKPSFELSGKLAEETNRVAGVNLLYSEPARGSKVRD

SEQ ID NO: 19191 - protein, 57 aa, Zea mays subsp. mays
  misc_feature (1)..(57): Ceres Seq. ID no. 12369353
MTKKIRPYLMDLDSTNGTFINGNRIEPRRYYELFEKDTIKFGNSSREYVLLHENSTE

SEQ ID NO: 19192 - DNA, 941 bp, Zea mays subsp. mays
  misc_feature (1)..(941): Ceres Seq. ID no. 12369394
gttaacacgcaaacgcaagctcccaagcagctaccaaccagccgggagagggagcgcacgcactgcgagaatggccacggccggcggaggggccgggcatctgaagctgctgggcgcgtggccgagccccttcgtgaaccgtgtacgcatggcgctgcacctcaaggggctggagtacgagaacgtggaggaggacctcaccaacaagagcgacctgctcctcgcctccaaccccgtccacaagctcgttcccgtcctcctccacggcgacaagcccatctccgagtcactcgtcatcgtggagtacctcgacgacgccttccccggcgctggccaggccgtcctccccgccgacccctatgaacgcgccgtcgctcgcttctgggccaaatacgtcgacggcaagttgcacggcatgatggtgaaggcgctcatgggggcaacggaggaggagagggcgacggcgacggtggacgcgctggccgctatggacacgctggagggcgcgttcgccgagtgctccggcgggaaaaagttcttcgccggcgacgcgcccgggtacctggacgtcgcgctgggaggcttcatcggctggctgcgcgcctgggacaaggtggggggcgtcaagctgctggacgccggccgggtcccgcgcctggccacgtgggcggagcgcttcgccgcgctcgacgtagccaaggaggtcatcccggaccccgaccacatcgccgagtttgccaaggtgctgcaggcacgctccgcggcagctgccaccagcaactgagctcgcaagtgaatgctgctgctctgccttcctgataaaatcatatcatggtacccggtttgttcgtttaatctggcgcggaaaaaacatggtttgttgtcgtaccaaactaagagtatgcatgcatgcttgttcttaattatatgtacattcgttc

SEQ ID NO: 19193 - protein, 260 aa, Zea mays subsp. mays
  misc_feature (1)..(260): Ceres Seq. ID no. 12369395
LTRKRKLPSSYQPAGRGSARTARMATAGGGAGHLKLLGAWPSPFVNRVRMALHLKGLEYENVEEDLTNKSDLLLASNPVHKLVPVLLHGDKPISESLVIVEYLDDAFPGAGQAVLPADPYERAVARFWAKYVDGKLHGMMVKALMGATEEERATATVDALAAMDTLEGAFAECSGGKKFFAGDAPGYLDVALGGFIGWLRAWDKVGGVKLLDAGRVPRLATWAERFAALDVAKEVIPDPDHIAEFAKVLQARSAAAATSN

SEQ ID NO: 19194 - protein, 237 aa, Zea mays subsp. mays
  misc_feature (1)..(237): Ceres Seq. ID no. 12369396
MATAGGGAGHLKLLGAWPSPFVNRVRMALHLKGLEYENVEEDLTNKSDLLLASNPVHKLVPVLLHGDKPISESLVIVEYLDDAFPGAGQAVLPADPYERAVARFWAKYVDGKLHGMMVKALMGATEEERATATVDALAAMDTLEGAFAECSGGKKFFAGDAPGYLDVALGGFIGWLRAWDKVGGVKLLDAGRVPRLATWAERFAALDVAKEVIPDPDHIAEFAKVLQARSAAAATSN

SEQ ID NO: 19195 - protein, 211 aa, Zea mays subsp. mays
  misc_feature (1)..(211): Ceres Seq. ID no. 12369397
MALHLKGLEYENVEEDLTNKSDLLLASNPVHKLVPVLLHGDKPISESLVIVEYLDDAFPGAGQAVLPADPYERAVARFWAKYVDGKLHGMMVKALMGATEEERATATVDALAAMDTLEGAFAECSGGKKFFAGDAPGYLDVALGGFIGWLRAWDKVGGVKLLDAGRVPRLATWAERFAALDVAKEVIPDPDHIAEFAKVLQARSAAAATSN

SEQ ID NO: 19196 - DNA, 1564 bp, Zea mays subsp. mays
  misc_feature (1)..(1564): Ceres Seq. ID no. 12369436
aaccttttgtttgttcttttgttgccttccttttctccgcactcatcgcttgttgcggttcgctctctacaaggaggcggcttgcgcggggggcatcgtgcaatggcgcggcggtgcccgtgcaggctgctgctagccgtggcggcggnggccgtgctcgtggccgcggcagcgcaggcgcaggagacgtgctcggggaccgtccccgcgccgccgcgccgcggggcgcgggtgtccgtggccagcttcggcggcgcgggcgacggacggacgctcaacacggcggcgttcgcgcgcgccgtcgccagcatcgagcgccgcgccgcgccgggcggggcggagctctacgtgccgcccggggtgtggctcacggggcccttcaacctcacctcgcgcatgacgctcttcctcgcgcgcggcgccgtcatccgcgccacgcaggacacatcaagctggcctctgattgaaccgctgccctcatacgggagaggacgtgagctgcccggcggaagatacataggtttaatccatggcaatgggcttcaggatgttgtcatcacaggcgagaatggaactattgatggtcaaggcagcgcgtggtgggatatgtggaagaacaggacactgctctacacaaggcctcaccttcttgagctgatgagctcttctgatatcattgtctccaatgtcgtctttcaggattcgccattctggaacatccatcctgtttattgcagcaatgttgtgatcagaaacgtgactatcctagctccacatgactcccccaacacggatggaattgatccagattccagcagcaacatctgcatcgaggattgctacatttcgactggtgacgattccatcgccatcaagagtggctgggatgagtatggaatcgcctatggccgccccagttctggaatcaccgtgcggcggatcacaggctcctccccgtttgctggcttcgcggtcggaagcgagacatcaggtggcgtggagaacgtccttgcagaacacttgaacttcttcaactcagggtttgggatccatgtcaagaccaacacaggcaggggaggcttcatcaggaacatcactgtctcggatgtgacgctggataacgtccggtacggcctgcggatcgttggcgatgtcggcaatcaccccgacaacagctacaaccagagtgcgctcccgatcgtcgacacccttatggtaaagaatgtccagggccagaacgtcagggaggctgggctgatcaagggcatcgccaactcggccttctcccggatctgcctgtcgaacgtcaagttcactggtggtgcgcctgtccggccgtggaagtgcgaggctgtcagcggtggcgctctcgacgtgcagccgtccccgtgcacagaactgacttccacgtctgggacgagcttctgtacaaattcgctttgatgctttgccagctagctgagcctgagctgctgctatgcttctgtatctacgagtatgtatactggtgctttaaagcttgggcacccaagtatttatcttcccgaaaattaatttggtttcc

SEQ ID NO: 19197 - protein, 480 aa, Zea mays subsp. mays
  misc_feature (1)..(480): Ceres Seq. ID no. 12369437
  misc_feature (50)..(50): Xaa is any aa, unknown or other
NLLFVLLLPSFSPHSSLVAVRSLQGGGLRGGHRAMARRCPCRLLLAVAAXAVLVAAAAQAQETCSGTVPAPPRRGARVSVASFGGAGDGRTLNTAAFARAVASIERRAAPGGAELYVPPGVWLTGPFNLTSRMTLFLARGAVIRATQDTSSWPLIEPLPSYGRGRELPGGRYIGLIHGNGLQDVVITGENGTIDGQGSAWWDMWKNRTLLYTRPHLLELMSSSDIIVSNVVFQDSPFWNIHPVYCSNVVIRNVTILAPHDSPNTDGIDPDSSSNICIEDCYISTGDDSIAIKSGWDEYGIAYGRPSSGITVRRITGSSPFAGFAVGSETSGGVENVLAEHLNFFNSGFGIHVKTNTGRGGFIRNITVSDVTLDNVRYGLRIVGDVGNHPDNSYNQSALPIVDTLMVKNVQGQNVREAGLIKGIANSAFSRICLSNVKFTGGAPVRPWKCEAVSGGALDVQPSPCTELTSTSGTSFCTNSL

SEQ ID NO: 19198 - protein, 446 aa, Zea mays subsp. mays
  misc_feature (1)..(446): Ceres Seq. ID no. 12369438
  misc_feature (16)..(16): Xaa is any aa, unknown or other
MARRCPCRLLLAVAAXAVLVAAAAQAQETCSGTVPAPPRRGARVSVASFGGAGDGRTLNTAAFARAVASIERRAAPGGAELYVPPGVWLTGPFNLTSRMTLFLARGAVIRATQDTSSWPLIEPLPSYGRGRELPGGRYIGLIHGNGLQDVVITGENGTIDGQGSAWWDMWKNRTLLYTRPHLLELMSSSDIIVSNVVFQDSPFWNIHPVYCSNVVIRNVTILAPHDSPNTDGIDPDSSSNICIEDCYISTGDDSIAIKSGWDEYGIAYGRPSSGITVRRITGSSPFAGFAVGSETSGGVENVLAEHLNFFNSGFGIHVKTNTGRGGFIRNITVSDVTLDNVRYGLRIVGDVGNHPDNSYNQSALPIVDTLMVKNVQGQNVREAGLIKGIANSAFSRICLSNVKFTGGAPVRPWKCEAVSGGALDVQPSPCTELTSTSGTSFCTNSL

SEQ ID NO: 19199 - protein, 348 aa, Zea mays subsp. mays
  misc_feature (1)..(348): Ceres Seq. ID no. 12369439
MTLFLARGAVIRATQDTSSWPLIEPLPSYGRGRELPGGRYIGLIHGNGLQDVVITGENGTIDGQGSAWWDMWKNRTLLYTRPHLLELMSSSDIIVSNVVFQDSPFWNIHPVYCSNVVIRNVTILAPHDSPNTDGIDPDSSSNICIEDCYISTGDDSIAIKSGWDEYGIAYGRPSSGITVRRITGSSPFAGFAVGSETSGGVENVLAEHLNFFNSGFGIHVKTNTGRGGFIRNITVSDVTLDNVRYGLRIVGDVGNHPDNSYNQSALPIVDTLMVKNVQGQNVREAGLIKGIANSAFSRICLSNVKFTGGAPVRPWKCEAVSGGALDVQPSPCTELTSTSGTSFCTNSL

SEQ ID NO: 19200 - DNA, 1522 bp, Zea mays subsp. mays
  misc_feature (1)..(1522): Ceres Seq. ID no. 12369443
gtcgcatcgcacgccatcagcagctagcgcgctcctcgagcccagcagagaaaggccggcctacccactctctctctctctctctccagtctccaccggcagcgctaatcgtaatagccatgggctccaccgccggcgacgtggccgcggtggtggacgaggaggcgtgcatgtacgcgatgcagctggcgtcgtcgtccatcctgcccatgacgctgaagaacgccatcgagctgggcctgctggaggtgctgcagaaggaggccggcggcggcaaggcggcgctggcgcccgaggaggtggtggcgcggatgcccgcggcgcccggcgaccccgccgccgcggcggccatggtggaccgcatgctccgcctgctcgcctcctacgacgtcgtccggtgccagatggaggaccgggacggccggtacgagcgccgctactccgccgcgcccgtctgcaagtggctcacccccaacgaggacggcgtgtccatggccgccctcgcgctcatgaaccaggacaaggtcctcatggagagctggtactatctcaaggacgcggtgctggacggcggcatcccgttcaacaaggcgtacgggatgacggcgttcgagtaccacggcacggactcgcgcttcaaccgcgtgttcaacgagggcatgaagaaccactcggtgatcatcaccaagaagctgctggacttctacacgggcttcgagggcgtgtcgacgctggtggacgtgggcggcggcgtgggcgccacgctgcacgccatcacgtcccgccacccgcacatctccggggtcaacttcgacctgccgcacgtcatctccgaggcgccgccgttccccggcgtgcgccacgtgggcggggacatgttcgcgtccgtgcccgccggcgacgccatcctcatgaagtggatcctccacgactggagcgacgcgcactgcgccacgctgctcaagaactgctacgacgcgctgccggaaaatggcaaggtcatcgtcgtcgagtgcgtgctgccggtcaacacggaggccacccccaaggcgcagggcgtcttccacgtcgacatgatcatgctcgcgcacaaccccggcggcaaggagcggtacgagcgcgagttccgcgagctcgcaaagggcgccggcttctccgggttcaaggccacctgcatctacgccaacgcctgggccatcgagttcatcaagtgaaccaccgtcgccgcgatgagatggcatggctgccacatgctttgcttgcttggtcctcgtatcgtacgtcgccgtcgtcgtcttcttctggttattgcgctgctacctcgctgctctcgcgtatgcatgtacttttgcttaattttctttcttcatatcatgcactctggctggcctagactgcccccgatccatggtggccggtacgtcttgtcgagctcttgcatgtcgtggattctaaattcttcttctgcgtcgaattgtctctgccatgtgcgagtaataacaatcaaggttatacttacggt

SEQ ID NO: 19201 - protein, 463 aa, Zea mays subsp. mays
  misc_feature (1)..(463): Ceres Seq. ID no. 12369444
SHRTPSAASALLEPSRERPAYPLSLSLSPVSTGSANRNSHGLHRRRRGRGGGRGGVHVRDAAGVVVHPAHDAEERHRAGPAGGAAEGGRRRQGGAGARGGGGADARGARRPRRRGGHGGPHAPPARLLRRRPVPDGGPGRPVRAPLLRRARLQVAHPQRGRRVHGRPRAHEPGQGPHGELVLSQGRGAGRRHPVQQGVRDDGVRVPRHGLALQPRVQRGHEEPLGDHHQEAAGLLHGLRGRVDAGGRGRRRGRHAARHHVPPPAHLRGQLRPAARHLRGAAVPRRAPRGRGHVRVRARRRRHPHEVDPPRLERRALRHAAQELLRRAAGKWQGHRRRVRAAGQHGGHPQGAGRLPRRHDHARAQPRRQGAVRARVPRARKGRRLLRVQGHLHLRQRLGHRVHQVNHRRRDEMAWLPHALLAWSSYRTSPSSSSSGYCAATSLLSRMHVLLLNFLSSYHALWLA

SEQ ID NO: 19202 - protein, 403 aa, Zea mays subsp. mays
  misc_feature (1)..(403): Ceres Seq. ID no. 12369445
RIARHQQLARSSSPAEKGRPTHSLSLSLQSPPAALIVIAMGSTAGDVAAVVDEEACMYAMQLASSSILPMTLKNAIELGLLEVLQKEAGGGKAALAPEEVVARMPAAPGDPAAAAAMVDRMLRLLASYDVVRCQMEDRDGRYERRYSAAPVCKWLTPNEDGVSMAALALMNQDKVLMESWYYLKDAVLDGGIPFNKAYGMTAFEYHGTDSRFNRVFNEGMKNHSVIITKKLLDFYTGFEGVSTLVDVGGGVGATLHAITSRHPHISGVNFDLPHVISEAPPFPGVRHVGGDMFASVPAGDAILMKWILHDWSDAHCATLLKNCYDALPENGKVIVVECVLPVNTEATPKAQGVFHVDMIMLAHNPGGKERYEREFRELAKGAGFSGFKATCIYANAWAIEFIK

SEQ ID NO: 19203 - protein, 364 aa, Zea mays subsp. mays
  misc_feature (1)..(364): Ceres Seq. ID no. 12369446
MGSTAGDVAAVVDEEACMYAMQLASSSILPMTLKNAIELGLLEVLQKEAGGGKAALAPEEVVARMPAAPGDPAAAAAMVDRMLRLLASYDVVRCQMEDRDGRYERRYSAAPVCKWLTPNEDGVSMAALALMNQDKVLMESWYYLKDAVLDGGIPFNKAYGMTAFEYHGTDSRFNRVFNEGMKNHSVIITKKLLDFYTGFEGVSTLVDVGGGVGATLHAITSRHPHISGVNFDLPHVISEAPPFPGVRHVGGDMFASVPAGDAILMKWILHDWSDAHCATLLKNCYDALPENGKVIVVECVLPVNTEATPKAQGVFHVDMIMLAHNPGGKERYEREFRELAKGAGFSGFKATCIYANAWAIEFIK

SEQ ID NO: 19204 - DNA, 1745 bp, Zea mays subsp. mays
  misc_feature (1)..(1745): Ceres Seq. ID no. 12369474
gcacgagaccattacctagaacatcctaatcgaaaaattccattccctgcgctagcccggcgcccgctcgccctgcctgccactcccgccgcgtgctgcctaccagcaggccaggccaggcacccctgccctgtccgccaccagcacaaccgcgtgcgccggtccggtcggtgcatgccaggatggagaccccttcgtcgacgtgcgacgagggctccgagctcgacgcgcgctcgcactccgactacgccgacttcgacgacctggacctcccgccgcggggccgccaccgccgggaaccgtcctccgacgcgtcctccgagtgcagcggggagcccgggagcccgtacgcctcctcgccgtacccgcgctggccggtgtgcacgcttcctgcgagggtgccgccgccggccgcgccgctgctcaagaggctcggcacgacgcggcgcggcgcccgtgtcggcgcgtgtgacgggaaggccggcgacggcgagctgcagctgatcaaggagaggttctccaagcttctcttgggcgaggacatgtcggggagcggcaagggggtctcgacctccgtggccatctccaacgccatcaccaacctctacgcgactgtctttgggagctgccacaggctgaagcccctgccgccggagaagaagtccatgtggcggcgggagatggactgcctcctctccgtctgcgactacatcgttgagttcttcccttccaaggagatcttgcccgacggcagcatacgagaggtgatggcgacccgaccgcgatccgacatctacgtcaacctccccgccctcgagaagctggacgacatgttgctcgagattctgtacagctttcagaagactgaattctggtacgtcaatgacaaagggcagaaagacgattccgtcgcgacgccgtgccgtccggtgagccaccgcggcgaggagaagtggtggctgcccgtgccgtgcgtcgccaagcccgggctgacggagacggcgcggcgagacctgcagcagaagcgcgactgcgcgagccagatccacaaggcggccatggccatcaacaatgccgttcttgcggagatacggatccccgacctgtacaaggaagcactacccaagtgcgggcgtgccagcgtgggggatctgatctatcggcacatgtcgttcccgggcaagttctcgccggagtacctgctggactgcctggagatctcgtcggagcacgaggccctggaggcggcggaccgcgtggaggccgcgatgcacgtgtggcggctgaaggcgagccagaggtcaccctggatcgcggtcaaggacctgatggagtccgacaagaacgtgatgctggcgagacgcgccgaggacgtgctgctctgcctcaagcagcggttccccggcctctcgcagaccacgctcgacgccagcaagatccagtacaacaaggatgttgggcaagcaatactagagagctattcgagggtgctggagagcctagcgtacaacatcgtaacatgtgtagatgacgttctcttcgcagatgaagccgccagaaagatagcatgagtgatcatttgttcatccttcctgcctgatccgggaaaccaaaaaataaggggtccatgtccatgatccatccacagaatgtacattatgccataacttgtagcagtagtaccatctaccaatggatgatagcacgagcagttaactcatctaggcagccatgtcttggttttc

SEQ ID NO: 19205 - protein, 462 aa, Zea mays subsp. mays
  misc_feature (1)..(462): Ceres Seq. ID no. 12369475
METPSSTCDEGSELDARSHSDYADFDDLDLPPRGRHRREPSSDASSECSGEPGSPYASSPYPRWPVCTLPARVPPPAAPLLKRLGTTRRGARVGACDGKAGDGELQLIKERFSKLLLGEDMSGSGKGVSTSVAISNAITNLYATVFGSCHRLKPLPPEKKSMWRREMDCLLSVCDYIVEFFPSKEILPDGSIREVMATRPRSDIYVNLPALEKLDDMLLEILYSFQKTEFWYVNDKGQKDDSVATPCRPVSHRGEEKWWLPVPCVAKPGLTETARRDLQQKRDCASQIHKAAMAINNAVLAEIRIPDLYKEALPKCGRASVGDLIYRHMSFPGKFSPEYLLDCLEISSEHEALEAADRVEAAMHVWRLKASQRSPWIAVKDLMESDKNVMLARRAEDVLLCLKQRFPGLSQTTLDASKIQYNKDVGQAILESYSRVLESLAYNIVTCVDDVLFADEAARKIA

SEQ ID NO: 19206 - protein, 342 aa, Zea mays subsp. mays
  misc_feature (1)..(342): Ceres Seq. ID no. 12369476
MSGSGKGVSTSVAISNAITNLYATVFGSCHRLKPLPPEKKSMWRREMDCLLSVCDYIVEFFPSKEILPDGSIREVMATRPRSDIYVNLPALEKLDDMLLEILYSFQKTEFWYVNDKGQKDDSVATPCRPVSHRGEEKWWLPVPCVAKPGLTETARRDLQQKRDCASQIHKAAMAINNAVLAEIRIPDLYKEALPKCGRASVGDLIYRHMSFPGKFSPEYLLDCLEISSEHEALEAADRVEAAMHVWRLKASQRSPWIAVKDLMESDKNVMLARRAEDVLLCLKQRFPGLSQTTLDASKIQYNKDVGQAILESYSRVLESLAYNIVTCVDDVLFADEAARKIA

SEQ ID NO: 19207 - protein, 301 aa, Zea mays subsp. mays
  misc_feature (1)..(301): Ceres Seq. ID no. 12369477
MWRREMDCLLSVCDYIVEFFPSKEILPDGSIREVMATRPRSDIYVNLPALEKLDDMLLEILYSFQKTEFWYVNDKGQKDDSVATPCRPVSHRGEEKWWLPVPCVAKPGLTETARRDLQQKRDCASQIHKAAMAINNAVLAEIRIPDLYKEALPKCGRASVGDLIYRHMSFPGKFSPEYLLDCLEISSEHEALEAADRVEAAMHVWRLKASQRSPWIAVKDLMESDKNVMLARRAEDVLLCLKQRFPGLSQTTLDASKIQYNKDVGQAILESYSRVLESLAYNIVTCVDDVLFADEAARKIA

SEQ ID NO: 19208 - DNA, 1409 bp, Zea mays subsp. mays
  misc_feature (1)..(1409): Ceres Seq. ID no. 12369478
atgcctttcgcgagagaaaggggtcgaatcggcggctgatttgacccggctcgctattagagctgcgaaagtgatccgagcagtcacggtttcggaagcggcgcgtcggccggaggagaaacgcaaccagctgtcgaggagctatgagcagcggtggcggaggcagagtgccggcggcggcggcggcgcagtcgcaggagctgcagctaccgccggggttccggttccacccgacggatgaggagctggtggtgcactacctctgccggcgctgcgccgggctgcccatctccgtgcccatcatcgccgaggtcgacctatacaagcacgatccctggcagctcccaaggatggcgctgtacggcgagaaggagtggtacttcttctccccgcgggaccgcaagtacccgaacgggtcgcggccgaaccgcgccgccggcgccgggtactggaaggccactggcgcagacaagccggtgggcacgccgaagccggtggccatcaagaaggctctcgtcttctacgccggcaaggcacccaagggcgacaagaccaactggatcatgcatgagtaccgcctcgccgacgtcgaccgcaccgcccgcaagaagaacaacagcctcaggttggatgattgggtgctgtgccgaatctacaacaagaaaggcgcgctggagaagccgaccggagccggcggcagggccgaggccagcagccagggcgcgctggggtccatgtccatgggctcgccgccggagcagaaaccgtccgtgctgccgtctgccacggcaacggccgcggccgcggccgggacggggtacgcgccgctgccgttctcggagctggcggcgtactacgaggtccggccgtccgactcgatgccccgggcgcacggcgcggactcgagctgctcgggccacgcgctggccgccacgtcgtcgtgcggcggnggcggctggcgagcggcctgaggtacagagccagcccaagatctccgagtgggagcgcactttcgccgccggcgccggcccgggaatcaacccggccggctcgatgctggggcttggcgggcatcagctcggcccctcggcggtgggggtagggctgcccgcgggcgacccgctgctccaggacatcctcacatactggggcaagccgtactgagaaagatgactggtccgagccgccggcgatgaggccatgtcggcttgtgaatgatcatggagctggactacaggattattgctgctacgagttgaattaaactgtttatatgcgattgatttggtactgggatttttgtatacttgaattagtactctctctatatagagagacatacacatactcgagtatatatgttttgcttatatagagtatggagtaataatatttatatctgctggtcc

SEQ ID NO: 19209 - protein, 308 aa, Zea mays subsp. mays
  misc_feature (1)..(308): Ceres Seq. ID no. 12369479
  misc_feature (238)..(238): Xaa is any aa, unknown or other
MRSWWCTTSAGAAPGCPSPCPSSPRSTYTSTIPGSSQGWRCTARRSGTSSPRGTASTRTGRGRTAPPAPGTGRPLAQTSRWARRSRWPSRRLSSSTPARHPRATRPTGSCMSTASPTSTAPPARRTTASGWMIGCCAESTTRKARWRSRPEPAAGPRPAARARWGPCPWARRRSRNRPCCRLPRQRPRPRPGRGTRRCRSRSWRRTTRSGRPTRCPGRTARTRAARATRWPPRRRAAXAAGERPEVQSQPKISEWERTFAAGAGPGINPAGSMLGLGGHQLGPSAVGVGLPAGDPLLQDILTYWGKPY

SEQ ID NO: 19210 - protein, 275 aa, Zea mays subsp. mays
  misc_feature (1)..(275): Ceres Seq. ID no. 12369480
  misc_feature (269)..(269): Xaa is any aa, unknown or other
MSSGGGGRVPAAAAAQSQELQLPPGFRFHPTDEELVVHYLCRRCAGLPISVPIIAEVDLYKHDPWQLPRMALYGEKEWYFFSPRDRKYPNGSRPNRAAGAGYWKATGADKPVGTPKPVAIKKALVFYAGKAPKGDKTNWIMHEYRLADVDRTARKKNNSLRLDDWVLCRIYNKKGALEKPTGAGGRAEASSQGALGSMSMGSPPEQKPSVLPSATATAAAAAGTGYAPLPFSELAAYYEVRPSDSMPRAHGADSSCSGHALAATSSCGXGGWRAA

SEQ ID NO: 19211 - protein, 206 aa, Zea mays subsp. mays
  misc_feature (1)..(206): Ceres Seq. ID no. 12369481
  misc_feature (200)..(200): Xaa is any aa, unknown or other
MALYGEKEWYFFSPRDRKYPNGSRPNRAAGAGYWKATGADKPVGTPKPVAIKKALVFYAGKAPKGDKTNWIMHEYRLADVDRTARKKNNSLRLDDWVLCRIYNKKGALEKPTGAGGRAEASSQGALGSMSMGSPPEQKPSVLPSATATAAAAAGTGYAPLPFSELAAYYEVRPSDSMPRAHGADSSCSGHALAATSSCGXGGWRAA

SEQ ID NO: 19212 - DNA, 1316 bp, Zea mays subsp. mays
  misc_feature (1)..(1316): Ceres Seq. ID no. 12369494
gcagatattctgtggctcaaacctttggaggcacgggcacgggcacggggcaccgaagtgttggtatacgcggcagccgggatagcgagcgtatggccacctacttcgtcctcaacaccggcgcgaagatcccgtcggtcgggctcggcacctggcaggccgacaacgggctcgtcggcgacgccgtctatgccgccgtgaaggcaggttacaggcacattgactgtgctcaagcatacaacaacgagaaagaggtcgggttggtctcaggagagtgctggacgagggcatagtcaagcgtgaagatctcttcatcacctccaagctttggaacattaaccatgcggcggaggacgtcccggttgcactgaacggcacactgaaggacttgcaaactgactacgtggatctctacctcatgcattggccggtgaggatgaagaaaggcgccggcttcggcccgcacgccgtcgtcccgtcagacatccccgcgacgtgggccgcgatggaggagctgtacgacgccgggaaggcgcgcgccatcggcgtcagcaacttctcgagcaagaagctggcggacctgctggccgtggcgcgcgtgcgccccgccgtcgaccaggtggagtgccacccggtgtggcggcagggcaggctccgcgcgttctgcgcctcccaagggatacacctctccgcctactcgccgctgggctcgccgggcacggcgacggtgaaggcgggcgcggtgctggagcacccggccgtcgtctcggcggcggagacgctggggaagacgccggcgcaggtggcgctgcgctggggcgtccagatggggcacagcgtgctcccgaagagcaccgacgaggggaggatcagggcgaatctcgacgtcttcggctggtccttgccggaggacctgctcgccaagttctctgagatcgagcaggaaaggctgattcgtgcgggcttctttgttgatcccgacagcgtgttcaaatccatcgaggagttttgggatggcgagatctgaacactgtgtcctgactgggaggagctgagtgacggaattttgccactggcaaggcgtactgtgcctgtggaagaataaatttatgcgtatgaactctgaaaggcagcgtagttttcaggtagtttgtgctcggcactccaataattcctcgacgctcaagtggtctatctatcctctaaaggccatgccgctcaagcggtcttttaagccaaaaaaaaaaaaaaaaaaaaaaaaaaaaaaaaaaaaaagaaaaaaaaaaaaaaaaaacggcacgagaagccggcacgag

SEQ ID NO: 19213 - protein, 202 aa, Zea mays subsp. mays
  misc_feature (1)..(202): Ceres Seq. ID no. 12369495
MHWPVRMKKGAGFGPHAVVPSDIPATWAAMEELYDAGKARAIGVSNFSSKKLADLLAVARVRPAVDQVECHPVWRQGRLRAFCASQGIHLSAYSPLGSPGTATVKAGAVLEHPAVVSAAETLGKTPAQVALRWGVQMGHSVLPKSTDEGRIRANLDVFGWSLPEDLLAKFSEIEQERLIRAGFFVDPDSVFKSIEEFWDGEI

SEQ ID NO: 19214 - protein, 196 aa, Zea mays subsp. mays
  misc_feature (1)..(196): Ceres Seq. ID no. 12369496
MKKGAGFGPHAVVPSDIPATWAAMEELYDAGKARAIGVSNFSSKKLADLLAVARVRPAVDQVECHPVWRQGRLRAFCASQGIHLSAYSPLGSPGTATVKAGAVLEHPAVVSAAETLGKTPAQVALRWGVQMGHSVLPKSTDEGRIRANLDVFGWSLPEDLLAKFSEIEQERLIRAGFFVDPDSVFKSIEEFWDGEI

SEQ ID NO: 19215 - protein, 173 aa, Zea mays subsp. mays
  misc_feature (1)..(173): Ceres Seq. ID no. 12369497
MEELYDAGKARAIGVSNFSSKKLADLLAVARVRPAVDQVECHPVWRQGRLRAFCASQGIHLSAYSPLGSPGTATVKAGAVLEHPAVVSAAETLGKTPAQVALRWGVQMGHSVLPKSTDEGRIRANLDVFGWSLPEDLLAKFSEIEQERLIRAGFFVDPDSVFKSIEEFWDGEI

SEQ ID NO: 19216 - DNA, 1155 bp, Zea mays subsp. mays
  misc_feature (1)..(1155): Ceres Seq. ID no. 12369561
atctctggtctggtcgctgcgcctcccgcttggccgcgagcccgcgaccatggcggcgccacccgtccccgtcctctgcagcgcttccccatgtcgcatcaccacccacctcgcccctcctgcctttcggaccgttgccgcggcgcggccgcaggccttgcccttcgtcttgtgcgtcgagcagcgcgtggggccctcggcgcgcgcgcgcgcgccgttcgcggccaagcgcggcggcggcggcgaggtatccgcggaagctccagacggcacgcgcgcgctgctccaggcggcgctctggggcgccgaggctgcctatatactctggctcttccttctgccttacgccccgggcgacccggtctgggcaatctcgcaggctaccatcagcgacctcatcggcctatcactcaacttcttcttcgtcctgccgctgctcaactcagttggcgttcacctgctcgaatcgcctctacttcaccctatggcagaaggattgttcaacttggtgctcgcttggacgctgctttttgcgccactcctcttcacggattgtaggagggaccgctacaagggatcgctcgacgtcctgtggggctttcagatgttcctcacaaacactttcttgataccttacatggcgatccgactgaacggtccggacgcggaccggtctccgccacgaagatcacagctgggttcagtcatggtcaacggcgcgccggctgtgggcgcggtcggcggcctcgtctgcgttctctcgatcgtttgggcgttctctggccgcggagattctggtttcggaggcattgcggaacggtggcagtatctgcagagctacctattctcggagcggcttgcttatgcgtttctctgggatatgtttctgtactccgtattccagccgtggctgatcggggacaatcttgggaacgtgaaggcggatgctgctgggcttgtgagtgtggtgcggttcgtccccgttgtgggtttagttgcctaccttctttgcttagaggaagaggattagctgttaactgtgttttttatatattttttttgtcgatcgtttggatcgttgatcagcgtgcagttgagtggattctgtgcttggtggcagtgagtttgcaactgaaaacacaaatcttgccgccg

SEQ ID NO: 19217 - protein, 342 aa, Zea mays subsp. mays
  misc_feature (1)..(342): Ceres Seq. ID no. 12369562
SLVWSLRLPLGREPATMAAPPVPVLCSASPCRITTHLAPPAFRTVAAARPQALPFVLCVEQRVGPSARARAPFAAKRGGGGEVSAEAPDGTRALLQAALWGAEAAYILWLFLLPYAPGDPVWAISQATISDLIGLSLNFFFVLPLLNSVGVHLLESPLLHPMAEGLFNLVLAWTLLFAPLLFTDCRRDRYKGSLDVLWGFQMFLTNTFLIPYMAIRLNGPDADRSPPRRSQLGSVMVNGAPAVGAVGGLVCVLSIVWAFSGRGDSGFGGIAERWQYLQSYLFSERLAYAFLWDMFLYSVFQPWLIGDNLGNVKADAAGLVSVVRFVPVVGLVAYLLCLEEED

SEQ ID NO: 19218 - protein, 326 aa, Zea mays subsp. mays
  misc_feature (1)..(326): Ceres Seq. ID no. 12369563
MAAPPVPVLCSASPCRITTHLAPPAFRTVAAARPQALPFVLCVEQRVGPSARARAPFAAKRGGGGEVSAEAPDGTRALLQAALWGAEAAYILWLFLLPYAPGDPVWAISQATISDLIGLSLNFFFVLPLLNSVGVHLLESPLLHPMAEGLFNLVLAWTLLFAPLLFTDCRRDRYKGSLDVLWGFQMFLTNTFLIPYMAIRLNGPDADRSPPRRSQLGSVMVNGAPAVGAVGGLVCVLSIVWAFSGRGDSGFGGIAERWQYLQSYLFSERLAYAFLWDMFLYSVFQPWLIGDNLGNVKADAAGLVSVVRFVPVVGLVAYLLCLEEED

SEQ ID NO: 19219 - protein, 208 aa, Zea mays subsp. mays
  misc_feature (1)..(208): Ceres Seq. ID no. 12369564
LWSGRCASRLAASPRPWRRHPSPSSAALPHVASPPTSPLLPFGPLPRRGRRPCPSSCASSSAWGPRRARARRSRPSAAAAARYPRKLQTARARCSRRRSGAPRLPIYSGSSFCLTPRATRSGQSRRLPSATSSAYHSTSSSSCRCSTQLAFTCSNRLYFTLWQKDCSTWCSLGRCFLRHSSSRIVGGTATRDRSTSCGAFRCSSQTLS

SEQ ID NO: 19220 - DNA, 1396 bp, Zea mays subsp. mays
  misc_feature (1)..(1396): Ceres Seq. ID no. 12369569
gcacgagaccattacctagaacatcctaatcgaaaagagttggaggagtcccctctctctctctatacctttcttgcccaagcagtcaatcaagctgggaaacttaaacagaaagcgaagaaattaaaggccaccaccgccttcacttgttccttttggttattttcctcttgctgtggcttaacttgacaagaagaagaggaagaagatgctacgtcggcaaggccgaggtggaaaatttctggaggaggtgctcatcgtcggcgggctcctgctggtgcagtgcgtgctctccggctacgtggtcttcaccgaccacctgctcgccctcggcgccgacccgctggccgtcgtcgtcgtcgccggagccgcctacgccgccttctgctttcccttcgccttcgccctcgagaggaagcgatggccttccacggtttcggggactctggtggcgcaatacctgctcattgctcttggagggacaatcgcgttccaagcgctgatgctgctggggatcaagaagaccacgccggccatcgcatccgccatgcccaacctcagccccggcctcatcttcatcgtcgcagcctgtttcaggctggagaggttcgacagggcgtgcaagtacacgcaggcgaagatggcggggacggtggtgtgcctggcgggagcgctggccatgggcttcctgcacagcccaacttctacgtcctcctctctgcaggcagcagcaggaggtggcgactactactacgactggatcctcggctgctgctgcctcgtcgccgccgtcaccgtcttcgcgctcgtcaccgtcctgcaggccgccacgctcgccgccttccccgcgccgctcaccatgtgctgcgccacctccgcgacgggcgccgctctcaccgccgtcctgcggctcgtcctggaagggaggttcctcggcatggggtcgcccaggatcgacgccacgctcgtcgcggggatcgtcgtcctcggcggggccgcggtgggcgcgtgcatggcgttccaggcgtggtgcctgggcaggaagggcccgctgttcgtctccgtcttcgggcccgtccagaccgtctgcaccgccatcctctccgcggctctcctccgccaagtcctcagcctgggaagcctcgcagggatcgtgctcatgttcactgggctctacattgtcctatggggccaagagcaacgagatctcggctgacgacgaggaacagtcgttgcagggtggcgacgacgccgagaaggcactcctagcctagcctagcaaaatccagagcgaatatcactgcacgctctgtatttgtaaaaatggaatggtgtctacgtacctgtatacatactcgagaggatttagagaaaaaggacatggctacgtttgttc

SEQ ID NO: 19221 - protein, 335 aa, Zea mays subsp. mays
  misc_feature (1)..(335): Ceres Seq. ID no. 12369570
MLRRQGRGGKFLEEVLIVGGLLLVQCVLSGYVVFTDHLLALGADPLAVVVVAGAAYAAFCFPFAFALERKRWPSTVSGTLVAQYLLIALGGTIAFQALMLLGIKKTTPAIASAMPNLSPGLIFIVAACFRLERFDRACKYTQAKMAGTVVCLAGALAMGFLHSPTSTSSSLQAAAGGGDYYYDWILGCCCLVAAVTVFALVTVLQAATLAAFPAPLTMCCATSATGAALTAVLRLVLEGRFLGMGSPRIDATLVAGIVVLGGAAVGACMAFQAWCLGRKGPLFVSVFGPVQTVCTAILSAALLRQVLSLGSLAGIVLMFTGLYIVLWGQEQRDLG

SEQ ID NO: 19222 - protein, 282 aa, Zea mays subsp. mays
  misc_feature (1)..(282): Ceres Seq. ID no. 12369571
MAFHGFGDSGGAIPAHCSWRDNRVPSADAAGDQEDHAGHRIRHAQPQPRPHLHRRSLFQAGEVRQGVQVHAGEDGGDGGVPGGSAGHGLPAQPNFYVLLSAGSSRRWRLLLRLDPRLLLPRRRRHRLRARHRPAGRHARRLPRAAHHVLRHLRDGRRSHRRPAARPGREVPRHGVAQDRRHARRGDRRPRRGRGGRVHGVPGVVPGQEGPAVRLRLRARPDRLHRHPLRGSPPPSPQPGKPRRDRAHVHWALHCPMGPRATRSRLTTRNSRCRVATTPRRHS

SEQ ID NO: 19223 - protein, 237 aa, Zea mays subsp. mays
  misc_feature (1)..(237): Ceres Seq. ID no. 12369572
MLLGIKKTTPAIASAMPNLSPGLIFIVAACFRLERFDRACKYTQAKMAGTVVCLAGALAMGFLHSPTSTSSSLQAAAGGGDYYYDWILGCCCLVAAVTVFALVTVLQAATLAAFPAPLTMCCATSATGAALTAVLRLVLEGRFLGMGSPRIDATLVAGIVVLGGAAVGACMAFQAWCLGRKGPLFVSVFGPVQTVCTAILSAALLRQVLSLGSLAGIVLMFTGLYIVLWGQEQRDLG

SEQ ID NO: 19224 - DNA, 1675 bp, Zea mays subsp. mays
  misc_feature (1)..(1675): Ceres Seq. ID no. 12369580
cttggtcaatgggagtggctgaggctggcgtgcggacctaaaatccccactgatatatctgcccatgcccaggcattggatctcgtccccaatggcaatgcgtcaccagttcggggcttcggtgctgctgcatctactggtgttagcgggggcgggggccatggtcactgctgaccaggagagcgaccggatccgcgagctcccgggccagccgccgaacgtggggttctcgcagtactccggctacgtcaccgtcaacccggcgcgggggcgcgcgctcttctactggctcgtggaggcggtgccggcggccgggcccatcgcgccgctcgtcctctggctcaacggcggccctggatgctcgtcagtcggctacggcgcgtccgaggaggtcggcccgttccgcatcaggccggacggccagactctctacctcaaccccaattcttggaacaaggcggccaatttgctcttcctggagtcgccggccggcgtggggttctcgtactcgaactcgtcgctggatctgtacaccgcaggagatgcaaagacagcactggatgcctacgcttttcttgtgaactggttggagagattcccacagtacaagtacagggagttctatattgctggggaaagttacgcgggtcactacgttccacagttagcccagctcatatatgaaaagaacaagggcattcagaatccaacaattaatttcaaaggattcatggtgggcaatgcagtcactgatgactaccatgattaccttggtacctttgagttttggtggactcatggtctgatctctgacaagacttatcacaacttgaaggcgacatgtttgcttgaatcctcacagcacccttcacctgactgtgtcaagaacttgaatctagccagtgctgaagaaggcaatattgatccttatagtctgaatacaaagccatgcaatgacaccgcctctctcaagcttggcttgggtggacgctacccttggttgtccagagcctatgatccttgtactgaaagatatgcaagtatttactacaacaggccagaagtgcagatggcattgcatgcaaatacaactggaattcattacccttggcaaacatgcagcgatattgttggatcctactgggctgattccccaagatctatgcttccaatctaccaagaactgatagcagctggtatcaagatctgggttttcagtggggacacggatgctgtagttcctgtaactgcgacaaggtactcaatagatgctctcaagcttccaacactggtaaattggtacccttggtatgaccatgggaaggttggaggttggagccaagtttacaaaggactaacccttataaccatagcaggtgcaggacatgaagtgccactgcaccggcctcgacaagctttgatcatgttcagacacttcttgcagaacaaaccgatgccagcacaatagccagtcgaagcagaaatatagtgtaaactaccacagtcatgtttaatattttttaaattcttttttacttgatttgattgttattgttacaacatattgttcaattatctcgattgaatgtatgtacgcccagtagcaaatagggatacctgaaatttgtactgctggagctaaagagctccgctgtatatgataatgatgatcttt

SEQ ID NO: 19225 - protein, 467 aa, Zea mays subsp. mays
  misc_feature (1)..(467): Ceres Seq. ID no. 12369581
MPRHWISSPMAMRHQFGASVLLHLLVLAGAGAMVTADQESDRIRELPGQPPNVGFSQYSGYVTVNPARGRALFYWLVEAVPAAGPIAPLVLWLNGGPGCSSVGYGASEEVGPFRIRPDGQTLYLNPNSWNKAANLLFLESPAGVGFSYSNSSLDLYTAGDAKTALDAYAFLVNWLERFPQYKYREFYIAGESYAGHYVPQLAQLIYEKNKGIQNPTINFKGFMVGNAVTDDYHDYLGTFEFWWTHGLISDKTYHNLKATCLLESSQHPSPDCVKNLNLASAEEGNIDPYSLNTKPCNDTASLKLGLGGRYPWLSRAYDPCTERYASIYYNRPEVQMALHANTTGIHYPWQTCSDIVGSYWADSPRSMLPIYQELIAAGIKIWVFSGDTDAVVPVTATRYSIDALKLPTLVNWYPWYDHGKVGGWSQVYKGLTLITIAGAGHEVPLHRPRQALIMFRHFLQNKPMPAQ

SEQ ID NO: 19226 - protein, 458 aa, Zea mays subsp. mays
  misc_feature (1)..(458): Ceres Seq. ID no. 12369582
MAMRHQFGASVLLHLLVLAGAGAMVTADQESDRIRELPGQPPNVGFSQYSGYVTVNPARGRALFYWLVEAVPAAGPIAPLVLWLNGGPGCSSVGYGASEEVGPFRIRPDGQTLYLNPNSWNKAANLLFLESPAGVGFSYSNSSLDLYTAGDAKTALDAYAFLVNWLERFPQYKYREFYIAGESYAGHYVPQLAQLIYEKNKGIQNPTINFKGFMVGNAVTDDYHDYLGTFEFWWTHGLISDKTYHNLKATCLLESSQHPSPDCVKNLNLASAEEGNIDPYSLNTKPCNDTASLKLGLGGRYPWLSRAYDPCTERYASIYYNRPEVQMALHANTTGIHYPWQTCSDIVGSYWADSPRSMLPIYQELIAAGIKIWVFSGDTDAVVPVTATRYSIDALKLPTLVNWYPWYDHGKVGGWSQVYKGLTLITIAGAGHEVPLHRPRQALIMFRHFLQNKPMPAQ

SEQ ID NO: 19227 - protein, 456 aa, Zea mays subsp. mays
  misc_feature (1)..(456): Ceres Seq. ID no. 12369583
MRHQFGASVLLHLLVLAGAGAMVTADQESDRIRELPGQPPNVGFSQYSGYVTVNPARGRALFYWLVEAVPAAGPIAPLVLWLNGGPGCSSVGYGASEEVGPFRIRPDGQTLYLNPNSWNKAANLLFLESPAGVGFSYSNSSLDLYTAGDAKTALDAYAFLVNWLERFPQYKYREFYIAGESYAGHYVPQLAQLIYEKNKGIQNPTINFKGFMVGNAVTDDYHDYLGTFEFWWTHGLISDKTYHNLKATCLLESSQHPSPDCVKNLNLASAEEGNIDPYSLNTKPCNDTASLKLGLGGRYPWLSRAYDPCTERYASIYYNRPEVQMALHANTTGIHYPWQTCSDIVGSYWADSPRSMLPIYQELIAAGIKIWVFSGDTDAVVPVTATRYSIDALKLPTLVNWYPWYDHGKVGGWSQVYKGLTLITIAGAGHEVPLHRPRQALIMFRHFLQNKPMPAQ

SEQ ID NO: 19228 - DNA, 1883 bp, Zea mays subsp. mays
  misc_feature (1)..(1883): Ceres Seq. ID no. 12369615
cttgactcactcacttggccactcttcttcctcctcatcaatccgctctccagcacttgttcggaagaaaaagaagctagaacacgctaacaagacaacaaggatcatggggcgcgggcgcggccacctcctgctgccggcagcagccgcctgcctgtgggcgctgtcgtgcgcgctgctgctgcgcgcgtcccctcaccgcgctggcgccggcgccggcgggctgctgagggtcgggctcagcaggcgcggcggcgggctcgaccagcgcgcgctggcggcggccaaggccgcgaggcagcaggaggcaagccgtctcggggcctccggcggcggcgacgtccctctcgtcgactacctcaacacccagtactatggggtcgtcggcatcggcacaccgccgcagaacttcaccgtcatcttcgacaccggcagctccaacctctgggtcccctcctccagatgctacttctcgattgcctgctacctgcaccacagatacaagtcggccaagtctagcacgtacaaggcggacggcgagacctgcaagatcacctacggctccggctcgatcgccgggttcttcagcgacgacgacgtgctggtcggggacctgaccgtcaaaaaccagaagttcatcgagacaacgcgcgaaagcagcgtaacgttcataatcggcaagttcgacggcatcctcggtctcggataccccgagatctccgtcggcaaggctcctccgatctggcagagcatgcaggagcaggagctgctggcggaggacgtcttctccttctggctgaaccggagcccggacgcggacgcagcgtccggcggcgagctcgtcttcggcggcgtcgaccctgcgcacttcagcgggaaccacacctacgtccccgtctcccgcaagggatactggcagttcgacatgggggaccttctcatcgacggccactccaccggtttctgcgccaaggggtgcgctgccatcgtcgactccgggacttccttgctcgctggcccaacggccataattgcccaggtgaacgaagcgatcggggcagacgggatcatcagcacggagtgcaaggaagttgtgagccagtacggagagatgatcctcgacatgctcatcgcacagacggatccacagagggtgtgcagccaggttggtctgtgcgtgttcgatggcgctcgatctgtcagcgaggggattgaatctgttgtcgggaaagaaaacctgggctcagatgtcatgtgctcggcctgtcagatggctgtcgtgtggatagagaaccagctccgcgaaaacaagaccaaggagctcatactgcagtacgctaaccagctgtgtgagcgtctgccgagccccaacggagagtcaacagtcagctgccaggagatctccaagatgcccagccttgcgtttcaccatcgcaaacaagaccttcaccctaacacccgagcagtacattgtgaagctggagcaaggaggccaaaccgtctgcatcagtgggttcatggcgtatgacgtgccaccgccgcgtggtcctctctggattcttggggacgtcttcatgggagcttaccacacggtgttcgacttcggcaacgacaggattggcttcgcggaatctgcatgagtgtggagagcactctcatctttataaagacgataccctatgtattagggatgtgtagtttattgtctatccactacatgccaacagtacgctgcaaataaatcggtggccaaaattgctgaaaccagaaacgtgaacagtactgctttctttgtttctggagaagagcaaatggatgcttcaagacatgcatgtccgatgtgtattgagaaatagagcgatgagtgctgctcgatcgtctcg

SEQ ID NO: 19229 - protein, 508 aa, Zea mays subsp. mays
  misc_feature (1)..(508): Ceres Seq. ID no. 12369616
LTHSLGHSSSSSSIRSPALVRKKKKLEHANKTTRIMGRGRGHLLLPAAAACLWALSCALLLRASPHRAGAGAGGLLRVGLSRRGGGLDQRALAAAKAARQQEASRLGASGGGDVPLVDYLNTQYYGVVGIGTPPQNFTVIFDTGSSNLWVPSSRCYFSIACYLHHRYKSAKSSTYKADGETCKITYGSGSIAGFFSDDDVLVGDLTVKNQKFIETTRESSVTFIIGKFDGILGLGYPEISVGKAPPIWQSMQEQELLAEDVFSFWLNRSPDADAASGGELVFGGVDPAHFSGNHTYVPVSRKGYWQFDMGDLLIDGHSTGFCAKGCAAIVDSGTSLLAGPTAIIAQVNEAIGADGIISTECKEVVSQYGEMILDMLIAQTDPQRVCSQVGLCVFDGARSVSEGIESVVGKENLGSDVMCSACQMAVVWIENQLRENKTKELILQYANQLCERLPSPNGESTVSCQEISKMPSLAFHHRKQDLHPNTRAVHCEAGARRPNRLHQWVHGV

SEQ ID NO: 19230 - protein, 473 aa, Zea mays subsp. mays
  misc_feature (1)..(473): Ceres Seq. ID no. 12369617
MGRGRGHLLLPAAAACLWALSCALLLRASPHRAGAGAGGLLRVGLSRRGGGLDQRALAAAKAARQQEASRLGASGGGDVPLVDYLNTQYYGVVGIGTPPQNFTVIFDTGSSNLWVPSSRCYFSIACYLHHRYKSAKSSTYKADGETCKITYGSGSIAGFFSDDDVLVGDLTVKNQKFIETTRESSVTFIIGKFDGILGLGYPEISVGKAPPIWQSMQEQELLAEDVFSFWLNRSPDADAASGGELVFGGVDPAHFSGNHTYVPVSRKGYWQFDMGDLLIDGHSTGFCAKGCAAIVDSGTSLLAGPTAIIAQVNEAIGADGIISTECKEVVSQYGEMILDMLIAQTDPQRVCSQVGLCVFDGARSVSEGIESVVGKENLGSDVMCSACQMAVVWIENQLRENKTKELILQYANQLCERLPSPNGESTVSCQEISKMPSLAFHHRKQDLHPNTRAVHCEAGARRPNRLHQWVHGV

SEQ ID NO: 19231 - protein, 258 aa, Zea mays subsp. mays
  misc_feature (1)..(258): Ceres Seq. ID no. 12369618
MQEQELLAEDVFSFWLNRSPDADAASGGELVFGGVDPAHFSGNHTYVPVSRKGYWQFDMGDLLIDGHSTGFCAKGCAAIVDSGTSLLAGPTAIIAQVNEAIGADGIISTECKEVVSQYGEMILDMLIAQTDPQRVCSQVGLCVFDGARSVSEGIESVVGKENLGSDVMCSACQMAVVWIENQLRENKTKELILQYANQLCERLPSPNGESTVSCQEISKMPSLAFHHRKQDLHPNTRAVHCEAGARRPNRLHQWVHGV

SEQ ID NO: 19232 - DNA, 1583 bp, Zea mays subsp. mays
  misc_feature (1)..(1583): Ceres Seq. ID no. 12369718
aaatcggcattcacgactcacgagcttcaatcagttaccagtctctagctctcctcgtgctgcttgcttctggaccatcgatggaggcctacgcggcaacggcatcgccacccacgacgacagccatgtgtgtggacaagctcagccaccagctcttctccctgctcgagagcaggctcctcggcgggtggtgcccgtccgtccccgggacgccggcgcgggcgctcctcgacggcggccgcgtgcgggtgctcgccatcgacggctgcggcgcgggcgcagaggacgcgctcctggccgccgcggcgctcgcgaggctcgaggccaagctgcgcgaccgcacgggggaccccgacgcgcgcgtcgcggacttcttcgacgtggccgccggcgccggcgcgggaggcgtcctcgccgcgatgctgctcctgaggggcgccgacggccggccgcggtactccggcgcaggaggcgctggcgttcttcgccgggagcgtcgggaccaaaggttggtgcggccggcgcgggcggtgggcgaagctcttccgccgcggttcccgaggcggcgaccgcacgctccgccgcgtgttcggggacgccacgctcagggacaccgtcgcgccgctgctcgtgccgtgctacgacctcgccacggccgcgcccttcgtgttctcgcgcgccgacgccgtcgagagcgacaccttcgacttccgcctgcgcgacgtctgcgccgccgcctgcgccgcgggcggcgcggtcgcgccagtcaggtcggtggacggcctcacggccgtcgccgcggcgtccgggggcgtggcggccatgtgcaacccggccggggccgccatcacgcacgcgctccacaacaagcaggagttccccctcgccaccggcgtcgacgacctcctcgtgctctccatcggcgccggcgcctccgtcgccaacggttcgagcacgccgatgcccgcacgctctccgtcgccgcgggagctggcgcgcgtaaccgccgagggcgtcgcggacatggtggacgaatcattgggcatggcgttcgggcgcgcgcgcggaagcaactacgtgcgcatccaggccggtaaggcgctggtcccgatccgcgccgacgaagcggccgtggccgccgaagcgatgctagcgcagcggaacgtggagtcggtgctgttccgcgagcggaggctgtcggagtggacgaacgccgagaaggtggacgcgctggccgcggagctggtcaaggagcaggagcggcggaggcgcagcccgcttccgaacgtggctatcaaacaggtcggcacaccgccgcggctgtcgtccgcgaccactgcttcgtcgggcactgggacggccaggacggcgtcgacgatgccgtcgccggcgtcatgggagtcacgcaggtagtagttgtgttgattttaggcggtaattgacgtgtgtacatgcatatatgaaatgcaaagctaggagtggggtgtgttgtttttcttctttgaacggacgctcaatcctgcgtgcaactcttcacgtttctagcaaaacgcataaaaaagcgctggctgtcatcctacctt

SEQ ID NO: 19233 - protein, 364 aa, Zea mays subsp. mays
  misc_feature (1)..(364): Ceres Seq. ID no. 12369719
IGIHDSRASISYQSLALLVLLASGPSMEAYAATASPPTTTAMCVDKLSHQLFSLLESRLLGGWCPSVPGTPARALLDGGRVRVLAIDGCGAGAEDALLAAAALARLEAKLRDRTGDPDARVADFFDVAAGAGAGGVLAAMLLLRGADGRPRYSGAGGAGVLRRERRDQRLVRPARAVGEALPPRFPRRRPHAPPRVRGRHAQGHRRAAARAVLRPRHGRALRVLARRRRRERHLRLPPARRLRRRLRRGRRGRASQVGGRPHGRRRGVRGRGGHVQPGRGRHHARAPQQAGVPPRHRRRRPPRALHRRRRLRRQRFEHADARTLSVAAGAGARNRRGRRGHGGRIIGHGVRARARKQLRAHPGR

SEQ ID NO: 19234 - protein, 338 aa, Zea mays subsp. mays
  misc_feature (1)..(338): Ceres Seq. ID no. 12369720
MEAYAATASPPTTTAMCVDKLSHQLFSLLESRLLGGWCPSVPGTPARALLDGGRVRVLAIDGCGAGAEDALLAAAALARLEAKLRDRTGDPDARVADFFDVAAGAGAGGVLAAMLLLRGADGRPRYSGAGGAGVLRRERRDQRLVRPARAVGEALPPRFPRRRPHAPPRVRGRHAQGHRRAAARAVLRPRHGRALRVLARRRRRERHLRLPPARRLRRRLRRGRRGRASQVGGRPHGRRRGVRGRGGHVQPGRGRHHARAPQQAGVPPRHRRRRPPRALHRRRRLRRQRFEHADARTLSVAAGAGARNRRGRRGHGGRIIGHGVRARARKQLRAHPGR

SEQ ID NO: 19235 - protein, 333 aa, Zea mays subsp. mays
  misc_feature (1)..(333): Ceres Seq. ID no. 12369721
NRHSRLTSFNQLPVSSSPRAACFWTIDGGLRGNGIATHDDSHVCGQAQPPALLPAREQAPRRVVPVRPRDAGAGAPRRRPRAGARHRRLRRGRRGRAPGRRGAREARGQAARPHGGPRRARRGLLRRGRRRRRGRRPRRDAAPEGRRRPAAVLRRRRRWRSSPGASGPKVGAAGAGGGRSSSAAVPEAATARSAACSGTPRSGTPSRRCSCRATTSPRPRPSCSRAPTPSRATPSTSACATSAPPPAPRAARSRQSGRWTASRPSPRRPGAWRPCATRPGPPSRTRSTTSRSSPSPPASTTSSCSPSAPAPPSPTVRARRCPHALRRRGSWRA

SEQ ID NO: 19236 - DNA, 1915 bp, Zea mays subsp. mays
  misc_feature (1)..(1915): Ceres Seq. ID no. 12369726
gcacgagaccattacctagaacatcctaatcgaaaagagagaagggagaggcgagggagctcaccaggagagaggggcctgtgtgagcattgagcaaagcaaacgaagcagtacatacatctctcgctcgcagaggcccggccggccggctccatgcaacaagggacgacgagcggtggcggtgggcgatgatgatgatgatggcgggggagcacgtgctggccgctctggccaccctgcttctggcctcgctcctgaccctggtgctgaaccacttcctgcccttgcttctgaaccccaaggcccccaggggaagcttcgggtggccgctcctcggcgagacgctcaggttcctcacgccgcacgcctccaacacgctgggcggcttcctcgaggatcactgctccaggtatgggcgggtgttcaagtcccacctgttctgcaccccgacggtggtgtcctgcgaccaggacctcaaccacttcatcctgcagaacgaggagcggctgttccagtgcagctacccgaggccgatccatggcatcctgggcaagtcctccatgctcgtcgtcctgggcgaggaccacaagcgcctcaggaacctcgccctcgccctcgtcacctccaccaagctcaagcccagctaccttggcgacatcgagaagatcgcgctgcacgtcgtcggcgcatggcgacggcacggcggcgtcagggtcgtcgcattctgcgaggaggcaagaaagttcgcattcagtgtgatagtgaagcaggtgctggggctgtcgccagaggagccggtcactgcaaggatactcgaggacttcctggccttcatgaagggcctcatctccttccccctctacatcccagggaccccatatgccaaggctgtccgggcgagagagaggatatccagcactgtgaagggcatcatcaaggagcggaggagcgctgggtcatggaacaagcagggcgacttccttgacgtgctgctgtcaagcaacgagctatctgacgaggagaaagtgagctttgtgctggactccctgctgggagggtatgagaccacctcgctcctcatctccatggtcgtttatttccttggccagtctgctcaagatctggacctggttaagagggagcacgacagcataagatccaacaaaggcaaggaggagtgcttgacttcagaagactacaagaagatggaatatacccaacaagtcatcaacgaggcgctgagatgcggcaacatcgtcaagttcgtccaccggaaggcgctgaaagacgtcaaatacaaagagtatctgattccatctggctggaaggtcctaccggtcttcactgccgttcatctgaacccctcacttcatggagacgcgcagcagtttcagccctgtaggtgggagggcacaagccaagggacaagcaagaggtttacaccgttcggtggtggcccccggctctgcccaggatcagagctcgctaaagtggagactgctttcttcctccatcaccttgtcctcaattatagatggagaattgatggcgatgacattccaatggcatacccgtatgtggagtttcagagaggtctgccaatagaaatcgagccaacgtcccctgaatcttgactgtcctggagctacagccatcagttatcacaccagagagaaaaggggaaggtgcatggagtatacatgaatggtcagtgacagatctcacaagtgaaggaacactgagggcgcgtgctagtagctagcatatgaggcagctgagactgtaatttaatgtacatggtgtagatatattttgtccatggcaattgcttgaagtggctgattcacttcaccctgtaaaacattctccagtggtttcaactgctatcctataaaaaagaagggcccctgtgttt

SEQ ID NO: 19237 - protein, 481 aa, Zea mays subsp. mays
  misc_feature (1)..(481): Ceres Seq. ID no. 12369727
MMMMMAGEHVLAALATLLLASLLTLVLNHFLPLLLNPKAPRGSFGWPLLGETLRFLTPHASNTLGGFLEDHCSRYGRVFKSHLFCTPTVVSCDQDLNHFILQNEERLFQCSYPRPIHGILGKSSMLVVLGEDHKRLRNLALALVTSTKLKPSYLGDIEKIALHVVGAWRRHGGVRVVAFCEEARKFAFSVIVKQVLGLSPEEPVTARILEDFLAFMKGLISFPLYIPGTPYAKAVRARERISSTVKGIIKERRSAGSWNKQGDFLDVLLSSNELSDEEKVSFVLDSLLGGYETTSLLISMVVYFLGQSAQDLDLVKREHDSIRSNKGKEECLTSEDYKKMEYTQQVINEALRCGNIVKFVHRKALKDVKYKEYLIPSGWKVLPVFTAVHLNPSLHGDAQQFQPCRWEGTSQGTSKRFTPFGGGPRLCPGSELAKVETAFFLHHLVLNYRWRIDGDDIPMAYPYVEFQRGLPIEIEPTSPES

SEQ ID NO: 19238 - protein, 480 aa, Zea mays subsp. mays
  misc_feature (1)..(480): Ceres Seq. ID no. 12369728
MMMMAGEHVLAALATLLLASLLTLVLNHFLPLLLNPKAPRGSFGWPLLGETLRFLTPHASNTLGGFLEDHCSRYGRVFKSHLFCTPTVVSCDQDLNHFILQNEERLFQCSYPRPIHGILGKSSMLVVLGEDHKRLRNLALALVTSTKLKPSYLGDIEKIALHVVGAWRRHGGVRVVAFCEEARKFAFSVIVKQVLGLSPEEPVTARILEDFLAFMKGLISFPLYIPGTPYAKAVRARERISSTVKGIIKERRSAGSWNKQGDFLDVLLSSNELSDEEKVSFVLDSLLGGYETTSLLISMVVYFLGQSAQDLDLVKREHDSIRSNKGKEECLTSEDYKKMEYTQQVINEALRCGNIVKFVHRKALKDVKYKEYLIPSGWKVLPVFTAVHLNPSLHGDAQQFQPCRWEGTSQGTSKRFTPFGGGPRLCPGSELAKVETAFFLHHLVLNYRWRIDGDDIPMAYPYVEFQRGLPIEIEPTSPES

SEQ ID NO: 19239 - protein, 479 aa, Zea mays subsp. mays
  misc_feature (1)..(479): Ceres Seq. ID no. 12369729
MMMAGEHVLAALATLLLASLLTLVLNHFLPLLLNPKAPRGSFGWPLLGETLRFLTPHASNTLGGFLEDHCSRYGRVFKSHLFCTPTVVSCDQDLNHFILQNEERLFQCSYPRPIHGILGKSSMLVVLGEDHKRLRNLALALVTSTKLKPSYLGDIEKIALHVVGAWRRHGGVRVVAFCEEARKFAFSVIVKQVLGLSPEEPVTARILEDFLAFMKGLISFPLYIPGTPYAKAVRARERISSTVKGIIKERRSAGSWNKQGDFLDVLLSSNELSDEEKVSFVLDSLLGGYETTSLLISMVVYFLGQSAQDLDLVKREHDSIRSNKGKEECLTSEDYKKMEYTQQVINEALRCGNIVKFVHRKALKDVKYKEYLIPSGWKVLPVFTAVHLNPSLHGDAQQFQPCRWEGTSQGTSKRFTPFGGGPRLCPGSELAKVETAFFLHHLVLNYRWRIDGDDIPMAYPYVEFQRGLPIEIEPTSPES

SEQ ID NO: 19240 - DNA, 1910 bp, Zea mays subsp. mays
  misc_feature (1)..(1910): Ceres Seq. ID no. 12369790
accaaggcagcaacccgcaaatcaaaaccctactccgcgcgcgctctctcacccgcctccatggacggcgcctcctccagcctccctctcccccaaccaccgccgcaggtttacctccgccgccccgtgccgccgcccggcccgccgcttcaggctgctcctagggtccagccgttcagcgcccctgcgcccatccccatcttctcctcgaagccccgcgccgctgtgaggtccccgattcctcctcctcatcttcctgctgctgttacttcagctcccgctcccctggcggccacagcggaggctccatctcggccgccgcccgcatccaccgaccagccgccccagcagcaaactggtgcgatgcccccgcctccggctccagcaccggcggggaaggggggacccaagcccaaggcacagttgaatgagcaaaacagtggagaatattctcaatctgaaaacaacgtagtagaaactgcacaagggcatgataaggagactacccctggacctgtaaaagctacaaagaggataaaaaaactaaaggcttctaaacacaacttgaacaacacaaattctggagcaattgaaggagatgctgatccttctttatcctcattaaaccactgccgctatgacagctcactaagtctgctgacgaagaagttcatcaacctgcttcaaggagctgaagatggagcccttgatttgaataaagcagctgagacgttggaggtgcaaaagaggaggatatatgatataacaaatgttctagaaggtgttcatttaattgaaaagggacttaagaatatggttcgctggaagggatttgacatatcgaaacctaaggatatagaacgccaaatttcttcattgaaggaagaacttgaatctctttatgatgaagagttaaggttggatgacgaaataagggaagcaaaagaaaaactacaagctctcgccctagatggggataaaagaaagtcgttatatcttttgaaggaagatataaataagattcctcactttcagagatccactatgatcgctataaatgctcctcgtggaacttgtgttgaagttccagaccctaatgcggatcagtacatgtatgggaatctgggtttgcaggagaagcactacaaaattgtcctgagaagttcaatgggtcctgttgattgctatttgataagcggtgaccatgaggatatatttaaccagggccagctggtggcagcagacagattaaaacctgcagttgctactgatagttctcaagatttgcagcagatggattgtgatcctaatcaggcaagtaatggtggctgcatgcgtgcagcagaaccatccagaaagcaagaaattggcattttgagaatcgttccatcagatgccgacgctgatgctgattactggcttgcttctggcgttgacgttagtatgacagatgcttggggcacgtagtggatggatcctcggagttagggctcttaacctgccccttagacagacaaaatagaatgagtctgcagtgcacaattgcattggggctggatcagtaggatacctttagtctccatgctctaggcccgttaactaacaaatcagagggtacatggtaggcagtagatcttgtacattggcggcatgattgtagttgttactctttttcatcgacagttaagatagaatcagcaagtgcggtaggtctcagcttaaacctaccattggacttagcctttgttttgaacggatttgtgcgtatagcaagttagagggcagcacagtccgaaggccatcagtgtatgttctggtcttcgtttgtttgaagagcagtaatattgtacatcctgactatcaccggtcaatcaccaatagcagatctatagaggttatgcaattctttt

SEQ ID NO: 19241 - protein, 488 aa, Zea mays subsp. mays
  misc_feature (1)..(488): Ceres Seq. ID no. 12369791
TKAATRKSKPYSARALSPASMDGASSSLPLPQPPPQVYLRRPVPPPGPPLQAAPRVQPFSAPAPIPIFSSKPRAAVRSPIPPPHLPAAVTSAPAPLAATAEAPSRPPPASTDQPPQQQTGAMPPPPAPAPAGKGGPKPKAQLNEQNSGEYSQSENNVVETAQGHDKETTPGPVKATKRIKKLKASKHNLNNTNSGAIEGDADPSLSSLNHCRYDSSLSLLTKKFINLLQGAEDGALDLNKAAETLEVQKRRIYDITNVLEGVHLIEKGLKNMVRWKGFDISKPKDIERQISSLKEELESLYDEELRLDDEIREAKEKLQALALDGDKRKSLYLLKEDINKIPHFQRSTMIAINAPRGTCVEVPDPNADQYMYGNLGLQEKHYKIVLRSSMGPVDCYLISGDHEDIFNQGQLVAADRLKPAVATDSSQDLQQMDCDPNQASNGGCMRAAEPSRKQEIGILRIVPSDADADADYWLASGVDVSMTDAWGT

SEQ ID NO: 19242 - protein, 468 aa, Zea mays subsp. mays
  misc_feature (1)..(468): Ceres Seq. ID no. 12369792
MDGASSSLPLPQPPPQVYLRRPVPPPGPPLQAAPRVQPFSAPAPIPIFSSKPRAAVRSPIPPPHLPAAVTSAPAPLAATAEAPSRPPPASTDQPPQQQTGAMPPPPAPAPAGKGGPKPKAQLNEQNSGEYSQSENNVVETAQGHDKETTPGPVKATKRIKKLKASKHNLNNTNSGAIEGDADPSLSSLNHCRYDSSLSLLTKKFINLLQGAEDGALDLNKAAETLEVQKRRIYDITNVLEGVHLIEKGLKNMVRWKGFDISKPKDIERQISSLKEELESLYDEELRLDDEIREAKEKLQALALDGDKRKSLYLLKEDINKIPHFQRSTMIAINAPRGTCVEVPDPNADQYMYGNLGLQEKHYKIVLRSSMGPVDCYLISGDHEDIFNQGQLVAADRLKPAVATDSSQDLQQMDCDPNQASNGGCMRAAEPSRKQEIGILRIVPSDADADADYWLASGVDVSMTDAWGT

SEQ ID NO: 19243 - protein, 367 aa, Zea mays subsp. mays
  misc_feature (1)..(367): Ceres Seq. ID no. 12369793
MPPPPAPAPAGKGGPKPKAQLNEQNSGEYSQSENNVVETAQGHDKETTPGPVKATKRIKKLKASKHNLNNTNSGAIEGDADPSLSSLNHCRYDSSLSLLTKKFINLLQGAEDGALDLNKAAETLEVQKRRIYDITNVLEGVHLIEKGLKNMVRWKGFDISKPKDIERQISSLKEELESLYDEELRLDDEIREAKEKLQALALDGDKRKSLYLLKEDINKIPHFQRSTMIAINAPRGTCVEVPDPNADQYMYGNLGLQEKHYKIVLRSSMGPVDCYLISGDHEDIFNQGQLVAADRLKPAVATDSSQDLQQMDCDPNQASNGGCMRAAEPSRKQEIGILRIVPSDADADADYWLASGVDVSMTDAWGT

SEQ ID NO: 19244 - DNA, 916 bp, Zea mays subsp. mays
  misc_feature (1)..(916): Ceres Seq. ID no. 12372196
acctctctgccttcttctcggaggtcggagaagagctctctgcttcattcggccggtccaactccaccgaccgatccaatccaacccactgaccatggggttcccgccggtgtgctgctgcgcccccatccccaagccggtcgtcgccttctgcaacctgctcggcgccatcaaggacgccgtcctgctgacgctcgccgccgtgggcttcccgcacgacgccgcgcgcggctcggcggacgcccaccagcccgaggaggtgaagacccggctccccgccgtggagtacgcccagctcctggccgagcagcagccgtcgcccgccacccacgcggcctgcatcgtttgcctggacacgctggaggcggcggacgaggtgcggcggctgggcaactgcgcgcacgccttccaccgggcctgcatcgaccgttggatcgacctaggccggacgacgtgcccgctgtgccgctccgacctcctgccaagcccctggggccgggccgggctgctcgggctgggccggctcgccagccgtctcacgcgcgttcgcgtttggtgaggaccgtctcggaggccacttttaccttttcggtggccaggccgcggtcgcagcccatcccggtggtgccggaacggcgcggacacgttagcgacggcgaccgggccgccggatggtcttaaatctgctctgccacttgccaaccgctaatcaaccagcgggcttaattagcagcggattggcttggtgtctgacagtcgatattatgacagctaaataagcagttaaatgtttctataggattgagtatacacggcagctaaatgtttcgtatagtagtgctcctaacagccatcttcattgtacatgaatgtcctctatccgatcctttcatatagtataacagttaaattattc

SEQ ID NO: 19245 - protein, 226 aa, Zea mays subsp. mays
  misc_feature (1)..(226): Ceres Seq. ID no. 12372197
TSLPSSRRSEKSSLLHSAGPTPPTDPIQPTDHGVPAGVLLRPHPQAGRRLLQPARRHQGRRPADARRRGLPARRRARLGGRPPARGGEDPAPRRGVRPAPGRAAAVARHPRGLHRLPGHAGGGGRGAAAGQLRARLPPGLHRPLDRPRPDDVPAVPLRPPAKPLGPGRAARAGPARQPSHARSRLVRTVSEATFTFSVARPRSQPIPVVPERRGHVSDGDRAAGWS

SEQ ID NO: 19246 - protein, 185 aa, Zea mays subsp. mays
  misc_feature (1)..(185): Ceres Seq. ID no. 12372198
PLCLLLGGRRRALCFIRPVQLHRPIQSNPLTMGFPPVCCCAPIPKPVVAFCNLLGAIKDAVLLTLAAVGFPHDAARGSADAHQPEEVKTRLPAVEYAQLLAEQQPSPATHAACIVCLDTLEAADEVRRLGNCAHAFHRACIDRWIDLGRTTCPLCRSDLLPSPWGRAGLLGLGRLASRLTRVRVW

SEQ ID NO: 19247 - protein, 154 aa, Zea mays subsp. mays
  misc_feature (1)..(154): Ceres Seq. ID no. 12372199
MGFPPVCCCAPIPKPVVAFCNLLGAIKDAVLLTLAAVGFPHDAARGSADAHQPEEVKTRLPAVEYAQLLAEQQPSPATHAACIVCLDTLEAADEVRRLGNCAHAFHRACIDRWIDLGRTTCPLCRSDLLPSPWGRAGLLGLGRLASRLTRVRVW

SEQ ID NO: 19248 - DNA, 1828 bp, Zea mays subsp. mays
  misc_feature (1)..(1828): Ceres Seq. ID no. 12372212
atcgatctctcccctcctcacttcctcccctcacgggggcagccacgtacaaaggcaggcagctcgccaacgcccagcaccctctcgccgcgccaccccacgccgtgcgcctttaaagagagcgcacgacaagcttaaaggttcccacgccgccgctcgcgcttgtcttggcgccgcgacacagctggtcggtgcctttgatccgttccttccttttccagctgcagaggttacagagtcccgagccgtcgcgcgcgcgaaagcagaggagcggcaatggcggtggccgcgcggctcggcgccgtcttggcgtgcgtcatcttggcggccgtggcggtggcgccgcggccggtggcggggatcctcgacccggtcgacttcctcgcgctgcaggcggtgcggcggtcgctggacgacatgcccgggtccgcgttcttcgacgggtgggacttcaccgccgacccgtgcgggttccccggtgtgttctgcgacgcaccgggtggtggcgctcgcgctcggcgacccgcgggcggggtctccggggctgacggggaggctggacccagcgctgggccggctgtccgcgctcaccgagctctcgctcgtgcccgggcgcgtcgagggggagctcccggcgtcgctggcgtcgtgctcgaacctccgcttcctggccgtcagcaagaacctcctctccggccagatacctgacggcttcagcgcgctgtccaacctgcggacgctcgacgccagcttcaaccagatctccggcaccatcccgccgtccatcgccgcgctgccgtcgatcaccaacctcatcctctgccacaaccagcttaccggcggcgttccatcgttcctggactcgtccccgctcctgcggctggatctcaagcacaacgcgctctccggcggcgtgcctaccctgccggccgggctgcagtacctgtcgctgtccgcgaacaagctcaccggcacggtcgatcaggtgctgcccgggctgtcccggctcaacttcctcgacctcagcatgaaccagcttgagggcccgatcccggcgtcggtgctctcgctgccgctgtccgtgctgcagttgcagcgcaacttcttctcagggccggtgcagccgtcgaacgacgtgacgatcccggtggtggacctgagctacaacaggttctggggccagctctcgccactgctggcgggcgtcgggcagctgtaccttaacaacaaccggttcaccggcgaggtccccgcgcggctggtgcaggagctggtgggctccggcggcctgcaggtgctgtacctgcagcacaacttcctgacgggcatcgcgatatcgccgtcatcgtcgctcccctccaccgtctcgctctgcctgatgtacaactgcatggtgccgccggtgtacgcgccgtgcccgatcaaggccgggtcgcagaacacgcggccggcggaccagtgcccggagtggaggggctgagcctgatgtcggggtgagcttgatcgtgtctcagcaacgccagtgccaatgccggatcgcctccgatcaccggttgggaatagcgggaaagcagaactgaaggtcaatgattctttgattgatttgggtatagttacaggcaagtaagtgccttaataatccggatttacaggtgtgtgtttttgtttagttggtgtatgtgcgtttgtgtatctctgtgctgtatagtgagcagtactccctcccggagcttctatcgcactgccgcatgatgacgctgtttgcatctgatgatggatggtgttagtaagaggcagtgaagttattatttatcgaatcatgtcgctg

SEQ ID NO: 19249 - protein, 492 aa, Zea mays subsp. mays
  misc_feature (1)..(492): Ceres Seq. ID no. 12372213
SISPLLTSSPHGGSHVQRQAARQRPAPSRRATPRRAPLKRAHDKLKGSHAAARACLGAATQLVGAFDPFLPFPAAEVTESRAVARAKAEERQWRWPRGSAPSWRASSWRPWRWRRGRWRGSSTRSTSSRCRRCGGRWTTCPGPRSSTGGTSPPTRAGSPVCSATHRVVALALGDPRAGSPGLTGRLDPALGRLSALTELSLVPGRVEGELPASLASCSNLRFLAVSKNLLSGQIPDGFSALSNLRTLDASFNQISGTIPPSIAALPSITNLILCHNQLTGGVPSFLDSSPLLRLDLKHNALSGGVPTLPAGLQYLSLSANKLTGTVDQVLPGLSRLNFLDLSMNQLEGPIPASVLSLPLSVLQLQRNFFSGPVQPSNDVTIPVVDLSYNRFWGQLSPLLAGVGQLYLNNNRFTGEVPARLVQELVGSGGLQVLYLQHNFLTGIAISPSSSLPSTVSLCLMYNCMVPPVYAPCPIKAGSQNTRPADQCPEWRG

SEQ ID NO: 19250 - DNA, 1245 bp, Zea mays subsp. mays
  misc_feature (1)..(1245): Ceres Seq. ID no. 12372214
attgattccagcgatttggccggggtcagtagctaacgttccatcccagaaaaccccatcttatcataggaagtctaccagttttgccaccaaggtcacaccatccaccacggccatggagtccggcgcagacgaggtggcgttcgagtccccggcacatttccgcatctacaagagcgggaggatcgagcgcctgaaccggcccccggtccttcccgccggcctcgacgaggccaccggtgtcacctcaaaggacgtcgtcctggacgccggcaccggcctttccgtacgcatctacctccccaagctccaggaaccatccaagaagctcccggtcctcgtctacttccacggcggcgcgttcctcctcgagtcggccggctctgccacgtaccacacctacgtcaacccactcgcagccgccgcgggcgtcctggtggtgtccgtggactaccgcctggcaccggagcacccggtcccggcggcctacgaggactcgtgggccgcgctccagtgggtgacgtcggcgcaggacgagtggatcgtcgagcacggcgacacggcgcggctcttcctcgccggcgacagcgccggcgcaaacatcgtgcacgacatgctgatgcgggcgtccggcgccggcgggccgcgcgtcgagggcgccatcctgctccacccgtggttcggcgggaacgcgcccatcgagggcgagccggagggtgccgcagcggccaccgctgggctctggacctacgcgtgcccgggcgcggtcggcggcgccgacgacccgaggatgaaccctctcgcgccgggcgcgccgccgctggagaggctcgggtgcgcgaggatgctggtgtgcgccgggaagaaggacgcgctctacgtgagggaccgcgcgtactatgaagccgtggcggccagcgcgtggcccggggacgtggcgtggctcgagtccgaaggagaggagcacgtcttcttcctcccgaagcccgagtgcgagaacgccaagctgctcatggaccgcgtcgtggccttcattgccggggcctgacttgctctcttgtggccttgttggcgcggcaccgcgcgacgcagcatcaggtcgccattgaagatttaagttgtggacttgtgggcaagtttctctcgctgaatattggtcttgtctaaatttttttctggtacaagtgtggtactgaagtcttgaaactgattttttaataagcaaactataagtccacattattc

SEQ ID NO: 19251 - protein, 348 aa, Zea mays subsp. mays
  misc_feature (1)..(348): Ceres Seq. ID no. 12372215
LIPAIWPGSVANVPSQKTPSYHRKSTSFATKVTPSTTAMESGADEVAFESPAHFRIYKSGRIERLNRPPVLPAGLDEATGVTSKDVVLDAGTGLSVRIYLPKLQEPSKKLPVLVYFHGGAFLLESAGSATYHTYVNPLAAAAGVLVVSVDYRLAPEHPVPAAYEDSWAALQWVTSAQDEWIVEHGDTARLFLAGDSAGANIVHDMLMRASGAGGPRVEGAILLHPWFGGNAPIEGEPEGAAAATAGLWTYACPGAVGGADDPRMNPLAPGAPPLERLGCARMLVCAGKKDALYVRDRAYYEAVAASAWPGDVAWLESEGEEHVFFLPKPECENAKLLMDRVVAFIAGA

SEQ ID NO: 19252 - protein, 310 aa, Zea mays subsp. mays
  misc_feature (1)..(310): Ceres Seq. ID no. 12372216
MESGADEVAFESPAHFRIYKSGRIERLNRPPVLPAGLDEATGVTSKDVVLDAGTGLSVRIYLPKLQEPSKKLPVLVYFHGGAFLLESAGSATYHTYVNPLAAAAGVLVVSVDYRLAPEHPVPAAYEDSWAALQWVTSAQDEWIVEHGDTARLFLAGDSAGANIVHDMLMRASGAGGPRVEGAILLHPWFGGNAPIEGEPEGAAAATAGLWTYACPGAVGGADDPRMNPLAPGAPPLERLGCARMLVCAGKKDALYVRDRAYYEAVAASAWPGDVAWLESEGEEHVFFLPKPECENAKLLMDRVVAFIAGA

SEQ ID NO: 19253 - DNA, 1080 bp, Zea mays subsp. mays
  misc_feature (1)..(1080): Ceres Seq. ID no. 12372229
gtacccgcgccgctcacgcccatccatcccttcgcgcacgcaacgcaaaaacaagcacaaacacgcgcgatccgatctgggccggccaagcagccacccatccatggcgactagggtttggctcaccgccctcctgcttggtttcctcgtcgccgcctcccccttcaccagccgagttgctagagctgaatccgaggaagatgctgctgcagctgaggttgttgaaggggctgatctaggtattgtgggtgatgatacacaggtttccagtgatggacctttaagtcctgctcctggtgtagagacagtagttgtcttcccaaaaaatgctggcaaaattgtactagcaggtgaagaaactgaattactagttggtctgcaaaatgacggtgaatcaattttgaatgttgttgctgttcattcaactctccatcttccttttgaccacaatatgtatggccagaaccttactgttcagaatttcttcaattcatcagttcctgtttctgtgcaagcaaccttcccctacaagttcgttgtgagcaagttcttgcagcctggagcatatgatctggttggttacatagtgtatgagatcgaccagcacccttaccagaatgtattctacaatggcactatcgaggttgttgaggctgtaggcttactcagtgttgagtctgtgttcctcatcacccttggatttgcacttcttggtctgtttggattgtgggcatatggccaggttcagcagctctcgaagaaaacaaagaaggcacccaaggtggagctcggaactggaacaactgatgccaacatcgatgagtggctggagggcacttcgtttgtgcagagaagcaaatccaagaagaagcagacctgagtctctccaggcttagttaaatccttttgaggatctagaatgaggcatttgagggtagcccttcacaagtgacttttgcagaaagatagatgcgtaaggaggtgctgaaaaccgtaaacatcttcattgacattttcgaccttagtgtactttacatggaacaaaattttgttaaaagaaagtatatgctgtggtttctg

SEQ ID NO: 19254 - protein, 292 aa, Zea mays subsp. mays
  misc_feature (1)..(292): Ceres Seq. ID no. 12372230
YPRRSRPSIPSRTQRKNKHKHARSDLGRPSSHPSMATRVWLTALLLGFLVAASPFTSRVARAESEEDAAAAEVVEGADLGIVGDDTQVSSDGPLSPAPGVETVVVFPKNAGKIVLAGEETELLVGLQNDGESILNVVAVHSTLHLPFDHNMYGQNLTVQNFFNSSVPVSVQATFPYKFVVSKFLQPGAYDLVGYIVYEIDQHPYQNVFYNGTIEVVEAVGLLSVESVFLITLGFALLGLFGLWAYGQVQQLSKKTKKAPKVELGTGTTDANIDEWLEGTSFVQRSKSKKKQT

SEQ ID NO: 19255 - protein, 258 aa, Zea mays subsp. mays
  misc_feature (1)..(258): Ceres Seq. ID no. 12372231
MATRVWLTALLLGFLVAASPFTSRVARAESEEDAAAAEVVEGADLGIVGDDTQVSSDGPLSPAPGVETVVVFPKNAGKIVLAGEETELLVGLQNDGESILNVVAVHSTLHLPFDHNMYGQNLTVQNFFNSSVPVSVQATFPYKFVVSKFLQPGAYDLVGYIVYEIDQHPYQNVFYNGTIEVVEAVGLLSVESVFLITLGFALLGLFGLWAYGQVQQLSKKTKKAPKVELGTGTTDANIDEWLEGTSFVQRSKSKKKQT

SEQ ID NO: 19256 - DNA, 888 bp, Zea mays subsp. mays
  misc_feature (1)..(888): Ceres Seq. ID no. 12372263
ctcattcgcgcgaccatggacacggacacggacacgacgacgtccaccggctcccgcctccatcccgcggccggacatgtacgctcattggccgcccggggcgccgagagcctcgtcacctgcgtcttcgcgacggtgggcacggtcctcggcgcgatcaccggtggcctcatcggcctggccacggagacgggcgtgctgcgcggcacgggcgtcggcggcatcacgggcgcgctggtgtccatggaggtcgtcgagtcgctgtggcgctccgacgagccggcaatctggagcgtcgtctacgtgctcgatgtcatctggagcttgctcaccggccgccttgtgcgcgagaaggtggaccccgccgtgctcagcgccgtcgagagccagatgagcgcagcggacacaccggccttgcatgcagaccacgccgacatcttcgacacgggcggcaccaacggcatggcgagggtcgccatggacgcgctccccgtcgttaggttcaccgagcgcagcaacgtcgacgccagcggcgagctcatcgcctgttcggtttgcctccaggaattccaagccggcgacagcgcgaggagcctgccggtgtgccgccacacgttccacctgccgtgcatcgacggctggctgctccggcacgcctcctgccccttgtgccgccgcgctgtctaggccgcgcccgttcctctaccctcaaggatagccgccaccagagcttctctgacaagcgacacccgttccttcaggctgtagccgtacgcacactggcagcgtgatttttctgtagctcatcagatgattcagatgggcgttatgtaaacattggttaatttttaacaaatgcaagtggtgcacatggcgatggccccatcc

SEQ ID NO: 19257 - protein, 228 aa, Zea mays subsp. mays
  misc_feature (1)..(228): Ceres Seq. ID no. 12372264
LIRATMDTDTDTTTSTGSRLHPAAGHVRSLAARGAESLVTCVFATVGTVLGAITGGLIGLATETGVLRGTGVGGITGALVSMEVVESLWRSDEPAIWSVVYVLDVIWSLLTGRLVREKVDPAVLSAVESQMSAADTPALHADHADIFDTGGTNGMARVAMDALPVVRFTERSNVDASGELIACSVCLQEFQAGDSARSLPVCRHTFHLPCIDGWLLRHASCPLCRRAV

SEQ ID NO: 19258 - protein, 223 aa, Zea mays subsp. mays
  misc_feature (1)..(223): Ceres Seq. ID no. 12372265
MDTDTDTTTSTGSRLHPAAGHVRSLAARGAESLVTCVFATVGTVLGAITGGLIGLATETGVLRGTGVGGITGALVSMEVVESLWRSDEPAIWSVVYVLDVIWSLLTGRLVREKVDPAVLSAVESQMSAADTPALHADHADIFDTGGTNGMARVAMDALPVVRFTERSNVDASGELIACSVCLQEFQAGDSARSLPVCRHTFHLPCIDGWLLRHASCPLCRRAV

SEQ ID NO: 19259 - protein, 165 aa, Zea mays subsp. mays
  misc_feature (1)..(165): Ceres Seq. ID no. 12372266
HSRDHGHGHGHDDVHRLPPPSRGRTCTLIGRPGRREPRHLRLRDGGHGPRRDHRWPHRPGHGDGRAARHGRRRHHGRAGVHGGRRVAVALRRAGNLERRLRARCHLELAHRPPCAREGGPRRAQRRREPDERSGHTGLACRPRRHLRHGRHQRHGEGRHGRAPRR

SEQ ID NO: 19260 - DNA, 852 bp, Zea mays subsp. mays
  misc_feature (1)..(852): Ceres Seq. ID no. 12372297
atcggcccctcccttccttctctagttcccttcccttatagtattaactacgacgatggtggtggatgctggtgttggtgttggcggcggcggcggcgccgggacatgtgccgtcggaggattcgcagtctgggacgtgctgctgtggcgccggggccgcgccgacgtgagcgcctgcctgctggcgggcaccgtctcctcctggctgctcttgtacggcggctacaccttggtgtccctcgcctccaacgtgctgctcctgctcctcaccgtgctcttcctgtgggccaaagcggcgcgcctcctgaacaggccgcagcctcccgtcccggagctgcgcgttccgcagcaggccgtggacgaggcggcggcgctgctgcgctctgctctggacgccgcctcggacgccttccgggacatcgcgctgggcagggactcgctgctcttctacagagtcttcctctgcctgtggagcgtgtccatcgtcggcagcgttacagatttcccgaccgcctgctacgcaagtgtggtggctgctctgaccatcccggcgctgtaccacaggcaccaagagtgcatcgccacctacatgagcttcgcctacatgaacctccggatgtacgagatggcgtacgagaggctgtccatgaaatgcttcctcaaggtcagggactggacaatggagctactcaaggatccatgatcccttggttgtttgcgagtgagtgcttcaggtatagagttgattgattggtagatagaatagtggtggttttgattgatgctgactcttgttgtttgatcgatcagtgtgctctggtagatatagtagtggttttgattgtttggtcc

SEQ ID NO: 19261 - protein, 249 aa, Zea mays subsp. mays
  misc_feature (1)..(249): Ceres Seq. ID no. 12372298
IGPSLPSLVPFPYSINYDDGGGCWCWCWRRRRRRDMCRRRIRSLGRAAVAPGPRRRERLPAGGHRLLLAALVRRLHLGVPRLQRAAPAPHRALPVGQSGAPPEQAAASRPGAARSAAGRGRGGGAAALCSGRRLGRLPGHRAGQGLAALLQSLPLPVERVHRRQRYRFPDRLLRKCGGCSDHPGAVPQAPRVHRHLHELRLHEPPDVRDGVREAVHEMLPQGQGLDNGATQGSMIPWLFASECFRYRVD

SEQ ID NO: 19262 - protein, 215 aa, Zea mays subsp. mays
  misc_feature (1)..(215): Ceres Seq. ID no. 12372299
MVVDAGVGVGGGGGAGTCAVGGFAVWDVLLWRRGRADVSACLLAGTVSSWLLLYGGYTLVSLASNVLLLLLTVLFLWAKAARLLNRPQPPVPELRVPQQAVDEAAALLRSALDAASDAFRDIALGRDSLLFYRVFLCLWSVSIVGSVTDFPTACYASVVAALTIPALYHRHQECIATYMSFAYMNLRMYEMAYERLSMKCFLKVRDWTMELLKDP

SEQ ID NO: 19263 - protein, 214 aa, Zea mays subsp. mays
  misc_feature (1)..(214): Ceres Seq. ID no. 12372300
MCRRRIRSLGRAAVAPGPRRRERLPAGGHRLLLAALVRRLHLGVPRLQRAAPAPHRALPVGQSGAPPEQAAASRPGAARSAAGRGRGGGAAALCSGRRLGRLPGHRAGQGLAALLQSLPLPVERVHRRQRYRFPDRLLRKCGGCSDHPGAVPQAPRVHRHLHELRLHEPPDVRDGVREAVHEMLPQGQGLDNGATQGSMIPWLFASECFRYRVD

SEQ ID NO: 19264 - DNA, 1185 bp, Zea mays subsp. mays
  misc_feature (1)..(1185): Ceres Seq. ID no. 12372341
attgctggtaccgacccgtccccaccagtccagtctataagagcgacgggatcacggaaacctgttcaccgctgcgccgcctcactattgactgtcggattccccactcgccggcgacaaccgccgcgcccgatccgtctgctaggtcttgcacctccgggctctggccatggctgccgaagctggcccaatctccaaggtcctcatcgtcgtagcgatgcagacggaggcgatgccgctcgtccacaagttcaagctcgtcgaggcgcccgcccacgaatccacatttcctaaaggtgccccatgggttaggtaccatggcaactacaaaggcctccacattgaccttgtattgcctggaaaggatgctgttttaggagtcgacagtgttggtacggtatcggcagctcttttgactagtttttccattcaaacattgaagccagaccttatcattaatgctggcactgctggtggcttcaaggccaaaggggcaagcattggagatgtattcctggcatcagatgtttcattccatgacaggaggataccaatacctgtttttgacatgtatggaattggagcacggaaaacttctgcagttcctaatatcttgaaggaactcaatttgaagattggcaaattgtcgactggggattctctggatatgtctccccaggatgagaaggtgatactgagcaatgatgctacagtaaaggatatggagggagctgctgtggcatatgtcgccgacatgttttcaacgccagcgatctttgtgaaagctgtgactgatatcgtggatggggataagccaacatctgaggagtttctgcagaacctgattgccgtgacggcggcactggacctggcagtcaccaaagtggtggatttcatcagcgggaaacgcatctctgatctttgaaggctgtcatgaaatacgacacccccactgctctgatgcacgatgctaggctacgaacaatacaacattgggtcaacgattttttgtgaggtgttttctatgtgaggttaaaccttcttaaccctgtgtacaaaattcctgccaattgctatgggccggccatagcgtggaattttatagaataatttgcaaaatgtattttgtggtgcaaatatcgatatataataatatgctgggggacgggatccccgtgggattag

SEQ ID NO: 19265 - protein, 251 aa, Zea mays subsp. mays
  misc_feature (1)..(251): Ceres Seq. ID no. 12372342
MAAEAGPISKVLIVVAMQTEAMPLVHKFKLVEAPAHESTFPKGAPWVRYHGNYKGLHIDLVLPGKDAVLGVDSVGTVSAALLTSFSIQTLKPDLIINAGTAGGFKAKGASIGDVFLASDVSFHDRRIPIPVFDMYGIGARKTSAVPNILKELNLKIGKLSTGDSLDMSPQDEKVILSNDATVKDMEGAAVAYVADMFSTPAIFVKAVTDIVDGDKPTSEEFLQNLIAVTAALDLAVTKVVDFISGKRISDL

SEQ ID NO: 19266 - protein, 235 aa, Zea mays subsp. mays
  misc_feature (1)..(235): Ceres Seq. ID no. 12372343
MQTEAMPLVHKFKLVEAPAHESTFPKGAPWVRYHGNYKGLHIDLVLPGKDAVLGVDSVGTVSAALLTSFSIQTLKPDLIINAGTAGGFKAKGASIGDVFLASDVSFHDRRIPIPVFDMYGIGARKTSAVPNILKELNLKIGKLSTGDSLDMSPQDEKVILSNDATVKDMEGAAVAYVADMFSTPAIFVKAVTDIVDGDKPTSEEFLQNLIAVTAALDLAVTKVVDFISGKRISDL

SEQ ID NO: 19267 - protein, 230 aa, Zea mays subsp. mays
  misc_feature (1)..(230): Ceres Seq. ID no. 12372344
MPLVHKFKLVEAPAHESTFPKGAPWVRYHGNYKGLHIDLVLPGKDAVLGVDSVGTVSAALLTSFSIQTLKPDLIINAGTAGGFKAKGASIGDVFLASDVSFHDRRIPIPVFDMYGIGARKTSAVPNILKELNLKIGKLSTGDSLDMSPQDEKVILSNDATVKDMEGAAVAYVADMFSTPAIFVKAVTDIVDGDKPTSEEFLQNLIAVTAALDLAVTKVVDFISGKRISDL

SEQ ID NO: 19268 - DNA, 1042 bp, Zea mays subsp. mays
  misc_feature (1)..(1042): Ceres Seq. ID no. 12372360
gggaaggctttgctggtagttgtagcacacacggcacaccacacggtttcgtcctcgtccaccatgctatcgtcctcgcacctcgttaagctgcccctcctgccgcgcggcctcctctcgcacctccccgcatccatcctcccgagcgggcgcgagagcaccgcggacgcagcaccctccacgccgccttcttccaagaagatgtcgtcgtccgcgcagcagcagcagcagcagcaagcgggcagcagcaaggcggagtcggcggagctggcgcgcgtgttcgagctgttcgacaaggacggcgacgggcgcatcacgcgggaggagctggcggagtcgctgcgcaagctggggcatgggcgtgccgggcgacgacgagctggcgtccatgatggcgcgcgtggacgccaacggcgacgggtgcgtggacgcggaggagttcggggagctctaccgcggcatcatggacggcgccgcggaggaggaggaggaggaggaggacgacgacgacgacatgcgggaggcgttccgcgtgttcgacgccaacggcgacgggtacatcaccgcggacgagctgggcgcggtgctgtcgtcgctggggctgcggcagggccgcaccgcggaggagtgccggcgcatgatcggccgcgtggaccgcgacggcgacggcagggtcgacttccgcgagttccgccagatgatgcgcgccggcgggctcgccacgctcgggtgatgggtgaccgtcgccggccggtgctgcctgcctcctgctcctgcacctgggcctggccatggagcgccgggcacctttttttctgcatctgcgtgcttgatttcgtgtgctagaaagaacctgtagatagatattgcttgcttggagcgaggggggagctcacgtcacgtaaccgcgttgttccgtcttcgttctgttgatttggttctttagaattgatgggcttgctaattaactgttgtatacttgtatgtactggttgttgccctgcccttaaggattgttcggggacaaggtttcccctgtttt

SEQ ID NO: 19269 - protein, 281 aa, Zea mays subsp. mays
  misc_feature (1)..(281): Ceres Seq. ID no. 12372361
GKALLVVVAHTAHHTVSSSSTMLSSSHLVKLPLLPRGLLSHLPASILPSGRESTADAAPSTPPSSKKMSSSAQQQQQQQAGSSKAESAELARVFELFDKDGDGRITREELAESLRKLGHGRAGRRRAGVHDGARGRQRRRVRGRGGVRGALPRHHGRRRGGGGGGGGRRRRHAGGVPRVRRQRRRVHHRGRAGRGAVVAGAAAGPHRGGVPAHDRPRGPRRRRQGRLPRVPPDDARRRARHARVMGDRRRPVLPASCSCTWAWPWSAGHLFFCICVLDFVC

SEQ ID NO: 19270 - protein, 260 aa, Zea mays subsp. mays
  misc_feature (1)..(260): Ceres Seq. ID no. 12372362
MLSSSHLVKLPLLPRGLLSHLPASILPSGRESTADAAPSTPPSSKKMSSSAQQQQQQQAGSSKAESAELARVFELFDKDGDGRITREELAESLRKLGHGRAGRRRAGVHDGARGRQRRRVRGRGGVRGALPRHHGRRRGGGGGGGGRRRRHAGGVPRVRRQRRRVHHRGRAGRGAVVAGAAAGPHRGGVPAHDRPRGPRRRRQGRLPRVPPDDARRRARHARVMGDRRRPVLPASCSCTWAWPWSAGHLFFCICVLDFVC

SEQ ID NO: 19271 - protein, 214 aa, Zea mays subsp. mays
  misc_feature (1)..(214): Ceres Seq. ID no. 12372363
MSSSAQQQQQQQAGSSKAESAELARVFELFDKDGDGRITREELAESLRKLGHGRAGRRRAGVHDGARGRQRRRVRGRGGVRGALPRHHGRRRGGGGGGGGRRRRHAGGVPRVRRQRRRVHHRGRAGRGAVVAGAAAGPHRGGVPAHDRPRGPRRRRQGRLPRVPPDDARRRARHARVMGDRRRPVLPASCSCTWAWPWSAGHLFFCICVLDFVC

SEQ ID NO: 19272 - DNA, 1092 bp, Zea mays subsp. mays
  misc_feature (1)..(1092): Ceres Seq. ID no. 12372425
ctcatccggagtcgtcgccaagaaccacagccaccgcgatggcgcagatcatcgatggcaaggccatcgccgccgacgtccgccgcgaggtcgccgccgatgtggccgcgctctcgtcagcccacggactcgtgccggggctggccgtggtcatcgtggggagcaggaaggactcgcagacgtacgtgaacatgaagcgcaaggcgtgcgccgaggtcggcatctgctccatcgacgtcgacctcccggaggacatctccgagaccgcgctcgtcgccgaggttcatcgcctcaacgctgaccccgcagtgcacgggatccttgtccagcttccacttcctaagcatatcaacgaagagaagatactgagcgagatttccatcgagaaagatgtggatggcttccatcctctcaacattggcaagcttgcaatgaaaggcagagagccactgttcgtaccatgtacgccaaaggggtgcatggagctcttgtcaaggagcggagtcactgttaaaggtaagcgggcagttgtggttggtcgcagcaacatcgtcgggctacctgtatccctgctccttctgaaggcagatgcgaccgtatctgttgtgcactcgcggacccctgatcctgaaagcattgtacgcgaagctgacatagtcatcgcggcagctgggcaggctatgatgatcaaaggtgactggatcaagccaggtgctgcggtcatcgatgtcgggacgaactccatcgatgaccctacccggaagtccgggtaccggctcgtcggcgatgtggatttcgcagcagcgagcaaggttgctgggtacctgactccggttcccggaggcgttggcccaatgacggtggcaatgctgctgaagaacacggtggatggggcaaagcgggggatagtcgagtagctacgttcatctcacttctcgttgctgtacggcctgtgttgcaaggatgtgagctgactcgaaaagcgtgtgttggttggtgtaacaatctgtttcccaagaataagaatgatagtcacagctgttttcctgtttaataaatgcaatgaagaaagaattttggctttgctgctgt

SEQ ID NO: 19273 - protein, 304 aa, Zea mays subsp. mays
  misc_feature (1)..(304): Ceres Seq. ID no. 12372426
HPESSPRTTATAMAQIIDGKAIAADVRREVAADVAALSSAHGLVPGLAVVIVGSRKDSQTYVNMKRKACAEVGICSIDVDLPEDISETALVAEVHRLNADPAVHGILVQLPLPKHINEEKILSEISIEKDVDGFHPLNIGKLAMKGREPLFVPCTPKGCMELLSRSGVTVKGKRAVVVGRSNIVGLPVSLLLLKADATVSVVHSRTPDPESIVREADIVIAAAGQAMMIKGDWIKPGAAVIDVGTNSIDDPTRKSGYRLVGDVDFAAASKVAGYLTPVPGGVGPMTVAMLLKNTVDGAKRGIVE

SEQ ID NO: 19274 - protein, 292 aa, Zea mays subsp. mays
  misc_feature (1)..(292): Ceres Seq. ID no. 12372427
MAQIIDGKAIAADVRREVAADVAALSSAHGLVPGLAVVIVGSRKDSQTYVNMKRKACAEVGICSIDVDLPEDISETALVAEVHRLNADPAVHGILVQLPLPKHINEEKILSEISIEKDVDGFHPLNIGKLAMKGREPLFVPCTPKGCMELLSRSGVTVKGKRAVVVGRSNIVGLPVSLLLLKADATVSVVHSRTPDPESIVREADIVIAAAGQAMMIKGDWIKPGAAVIDVGTNSIDDPTRKSGYRLVGDVDFAAASKVAGYLTPVPGGVGPMTVAMLLKNTVDGAKRGIVE

SEQ ID NO: 19275 - protein, 241 aa, Zea mays subsp. mays
  misc_feature (1)..(241): Ceres Seq. ID no. 12372428
MKRKACAEVGICSIDVDLPEDISETALVAEVHRLNADPAVHGILVQLPLPKHINEEKILSEISIEKDVDGFHPLNIGKLAMKGREPLFVPCTPKGCMELLSRSGVTVKGKRAVVVGRSNIVGLPVSLLLLKADATVSVVHSRTPDPESIVREADIVIAAAGQAMMIKGDWIKPGAAVIDVGTNSIDDPTRKSGYRLVGDVDFAAASKVAGYLTPVPGGVGPMTVAMLLKNTVDGAKRGIVE

SEQ ID NO: 19276 - DNA, 887 bp, Zea mays subsp. mays
  misc_feature (1)..(887): Ceres Seq. ID no. 12372498
cattttcatgaagcccagtaagggaagggagagccgattcatttgcatttttctgagcagatgcagatcgatcccgagttccgctgactgcagaggagagagatctagagcgagggagggagggaaatgggccacgaggctgcggcgccggggtcgtcggtgctcggccgcgcggtggaggaggtgcgctcggccctcaacgagcacgccgacgtggttgccgacctcttcggtcgcgtctcctccgaagtgcgcaccggcttcgcgcccgccgtcgactccttcgttggcttcttccacgccgtcgactggaaggagccttggctgatcagcatactatctttccatgccattctgctactggttaccatcatctcgaggaggaatatcaatttccagctcatcttgtcagctctaacattttctggtgtattccttgctgagagattaaatacgttcctggcgcaaaactggaagagcttctctacccaaaactattttgatccccagggccttttcatttcggtcatctggtctggccctctcctcctgataacgatccttattctggtgaacactctcgtgacgctctgcacgctaatggtaaggtggaaaagggcaaagctcaggcatcgcgctcggcaagctcgtgacaagcaggactgatctgaaacctgcgtctatgtatcattcggtggcaagtagaaagtcgtgttcttgctacggttggtctaaccaagaatcacatccctggaaacggtgcccatttcattaggtagcagaatataacgttaagatggtcagattttgctcttgtggacccttttggtgcccgggtagccatttactacgctgcaatattatcacgtcacacgatttctttgggc

SEQ ID NO: 19277 - protein, 179 aa, Zea mays subsp. mays
  misc_feature (1)..(179): Ceres Seq. ID no. 12372499
MGHEAAAPGSSVLGRAVEEVRSALNEHADVVADLFGRVSSEVRTGFAPAVDSFVGFFHAVDWKEPWLISILSFHAILLLVTIISRRNINFQLILSALTFSGVFLAERLNTFLAQNWKSFSTQNYFDPQGLFISVIWSGPLLLITILILVNTLVTLCTLMVRWKRAKLRHRARQARDKQD

SEQ ID NO: 19278 - protein, 108 aa, Zea mays subsp. mays
  misc_feature (1)..(108): Ceres Seq. ID no. 12372500
IFMKPSKGRESRFICIFLSRCRSIPSSADCRGERSRAREGGKWATRLRRRGRRCSAARWRRCARPSTSTPTWLPTSSVASPPKCAPASRPPSTPSLASSTPSTGRSLG

SEQ ID NO: 19279 - protein, 106 aa, Zea mays subsp. mays
  misc_feature (1)..(106): Ceres Seq. ID no. 12372501
MKPSKGRESRFICIFLSRCRSIPSSADCRGERSRAREGGKWATRLRRRGRRCSAARWRRCARPSTSTPTWLPTSSVASPPKCAPASRPPSTPSLASSTPSTGRSLG

SEQ ID NO: 19280 - DNA, 662 bp, Zea mays subsp. mays
  misc_feature (1)..(662): Ceres Seq. ID no. 12372505
gaaaatctccccgctcacaaagcagtcctcccaccgcacgcaacgcagcctcgacctcgacctcgccgtcgccatggcgagcaagcagacccgccgcctcttcgtccttgccgccgtcgccgtatgcttcctcctcctcctcctcccagcctcctctgtcgccaccgacgtcgattactgcagtaaaaaggagtacccggtgaaggtgagcggggtgcagatcgtgcccgatccggtcgagcccggcaagcctgccactttcaagatctccgcttctactgataaaaccatcgagaaggggaagctggtgatcgacgtcaagtacttcttcttctacgtgcactcggagacgcgcgacatctgcggagagatctcctgtccggcgaccggcgacttcgtgctgtcccacgagcagacgttgccagggttcactccaccggggtcgtacacgatctacatgaagatggtcggggacgacgacgaggagctgagctgcatctcgttcggcttcagcattgggttcgtcgcctccagctgaaacccgcctgagctgcgcgccagaagtcgcccagcatggatgccattatgtaaaccactagaacataaaatttcgagaaagaatgcattacgaaggagacgctcagatttcttcaacctaaagc

SEQ ID NO: 19281 - protein, 178 aa, Zea mays subsp. mays
  misc_feature (1)..(178): Ceres Seq. ID no. 12372506
KISPLTKQSSHRTQRSLDLDLAVAMASKQTRRLFVLAAVAVCFLLLLLPASSVATDVDYCSKKEYPVKVSGVQIVPDPVEPGKPATFKISASTDKTIEKGKLVIDVKYFFFYVHSETRDICGEISCPATGDFVLSHEQTLPGFTPPGSYTIYMKMVGDDDEELSCISFGFSIGFVASS

SEQ ID NO: 19282 - protein, 154 aa, Zea mays subsp. mays
  misc_feature (1)..(154): Ceres Seq. ID no. 12372507
MASKQTRRLFVLAAVAVCFLLLLLPASSVATDVDYCSKKEYPVKVSGVQIVPDPVEPGKPATFKISASTDKTIEKGKLVIDVKYFFFYVHSETRDICGEISCPATGDFVLSHEQTLPGFTPPGSYTIYMKMVGDDDEELSCISFGFSIGFVASS

SEQ ID NO: 19283 - DNA, 989 bp, Zea mays subsp. mays
  misc_feature (1)..(989): Ceres Seq. ID no. 12372536
ccacacggccacacacacttcacttcataggcgccccagcagagctcatctctgcctcctgtgtccttctccatgacagagaatctccactccaggaaaatggtacagccaaagaagtttcgtggagtccggcagcgccactggggctcctgggtctctgagatcaggcatcccctccttaagaggagggtctggctgggtacctttgagacggctgaggaggcagcgagagcatatgatgaggctgctgtgctgatgagcggacgcaacgccaagaccaacttcccaatccaaagaagcagcacaggggagcctaccccagctgcgggaagggacgcccgcagcaacttcagcagcggctcctctaccaccaacctgtcccagattctcagtgcgaagctccgcaaatgctgcaaggcgccatcaccgtccctgacctgtctccgccttgaccctgagaagtcccacattggtgtttggcagaagcgtgcaggagcccgtgctgactccaactgggtcatgacagtggagctcaacaaagatgcagcatccactgatgctgcatcacagtccacatcagcaacaactgctccaccagccacgccgatggatgaggaggagaggatcgcactgcaaatgatcgaagagttgctgagcagcagcagcccagcttcaccctcaaacggagatgaccaaggtcgcttcatcatctgaaaagcatggatcaaacagcacaagtcaccatcccagatcagagtttcgctaggtcggttggtacacaagcagttcaggttgcttcagtaatatagatatatgtctattactaaatccaacttacaagaactataaagtttgcaattgtgtgcagttctatgtacgtgaaaagctctacatacacatgttcctatcaagatactttgttacacatcaatgtcagtgatataattgcttataaaagaaataaatagattatgattgtgttactgctc

SEQ ID NO: 19284 - protein, 213 aa, Zea mays subsp. mays
  misc_feature (1)..(213): Ceres Seq. ID no. 12372537
MTENLHSRKMVQPKKFRGVRQRHWGSWVSEIRHPLLKRRVWLGTFETAEEAARAYDEAAVLMSGRNAKTNFPIQRSSTGEPTPAAGRDARSNFSSGSSTTNLSQILSAKLRKCCKAPSPSLTCLRLDPEKSHIGVWQKRAGARADSNWVMTVELNKDAASTDAASQSTSATTAPPATPMDEEERIALQMIEELLSSSSPASPSNGDDQGRFII

SEQ ID NO: 19285 - protein, 204 aa, Zea mays subsp. mays
  misc_feature (1)..(204): Ceres Seq. ID no. 12372538
MVQPKKFRGVRQRHWGSWVSEIRHPLLKRRVWLGTFETAEEAARAYDEAAVLMSGRNAKTNFPIQRSSTGEPTPAAGRDARSNFSSGSSTTNLSQILSAKLRKCCKAPSPSLTCLRLDPEKSHIGVWQKRAGARADSNWVMTVELNKDAASTDAASQSTSATTAPPATPMDEEERIALQMIEELLSSSSPASPSNGDDQGRFII

SEQ ID NO: 19286 - protein, 152 aa, Zea mays subsp. mays
  misc_feature (1)..(152): Ceres Seq. ID no. 12372539
MSGRNAKTNFPIQRSSTGEPTPAAGRDARSNFSSGSSTTNLSQILSAKLRKCCKAPSPSLTCLRLDPEKSHIGVWQKRAGARADSNWVMTVELNKDAASTDAASQSTSATTAPPATPMDEEERIALQMIEELLSSSSPASPSNGDDQGRFII

SEQ ID NO: 19287 - DNA, 792 bp, Zea mays subsp. mays
  misc_feature (1)..(792): Ceres Seq. ID no. 12372540
atatccgttgtggcagcagccttcgtgcaggcatggcgagctcatcttgtgcactgctgggtctggcctgcttcgtgctcctggcggcggcagccggcgccacgcagtacaaggtcggcggcgacaatggctgggccgtgccggacgccaccgccgagtcgttcaacacctgggcggagaagaccagcttccagatcgggcgacagcctcttgttcgtgtaccccaaggacaaggactcggtgctgctggtggagccggccgactacaacgcctgcaacacctcctcctacgacaagcagttcgacgacggcagcacgtccgtggcgctggaccgcgccggcgccttcttcttcatcagcggcgtcgaggccaactgccgcgccaacgagaagctcatcgtcatggtcgccggcgcgggcgcgccggcgccggccccggaccggcagggctccggctcttcctcctccccgtcgacgtccgcgccggtaccctccaagggtggcggcgccccggtgccgccgtcctcgcctaaggcccccgccgccaagaactccacggccaagggcgcgcctcccgccgccggcaccgacaggaacggcgctggtgctggactcgccgtggcaggcctcgtcgcctcggttgcaggatgcgtcgcccacgccatgcttgctctctgaaaccgaaaactgctggatgcagtgcagtcgccgtgtagtgtaacaaaccgtgtgggattgtgaacagagtgtatctttcgtgttcgttgcgattcagcgggaaaaaacaaattt

SEQ ID NO: 19288 - protein, 239 aa, Zea mays subsp. mays
  misc_feature (1)..(239): Ceres Seq. ID no. 12372541
YPLWQQPSCRHGELILCTAGSGLLRAPGGGSRRHAVQGRRRQWLGRAGRHRRVVQHLGGEDQLPDRATASCSCTPRTRTRCCWWSRPTTTPATPPPTTSSSTTAARPWRWTAPAPSSSSAASRPTAAPTRSSSSWSPARARRRRPRTGRAPALPPPRRRPRRYPPRVAAPRCRRPRLRPPPPRTPRPRARLPPPAPTGTALVLDSPWQASSPRLQDASPTPCLLSETENCWMQCSRRVV

SEQ ID NO: 19289 - protein, 225 aa, Zea mays subsp. mays
  misc_feature (1)..(225): Ceres Seq. ID no. 12372542
ISVVAAAFVQAWRAHLVHCWVWPASCSWRRQPAPRSTRSAATMAGPCRTPPPSRSTPGRRRPASRSGDSLLFVYPKDKDSVLLVEPADYNACNTSSYDKQFDDGSTSVALDRAGAFFFISGVEANCRANEKLIVMVAGAGAPAPAPDRQGSGSSSSPSTSAPVPSKGGGAPVPPSSPKAPAAKNSTAKGAPPAAGTDRNGAGAGLAVAGLVASVAGCVAHAMLAL

SEQ ID NO: 19290 - protein, 183 aa, Zea mays subsp. mays
  misc_feature (1)..(183): Ceres Seq. ID no. 12372543
MAGPCRTPPPSRSTPGRRRPASRSGDSLLFVYPKDKDSVLLVEPADYNACNTSSYDKQFDDGSTSVALDRAGAFFFISGVEANCRANEKLIVMVAGAGAPAPAPDRQGSGSSSSPSTSAPVPSKGGGAPVPPSSPKAPAAKNSTAKGAPPAAGTDRNGAGAGLAVAGLVASVAGCVAHAMLAL

SEQ ID NO: 19291 - DNA, 956 bp, Zea mays subsp. mays
  misc_feature (1)..(956): Ceres Seq. ID no. 12372548
cttcctcgccgcattgacctattcacttcctccataataactagtgctactaggtcccccacggccgaggaggaattagaaaacaaaattaaatctcaagtctagggcggagatgaatgttgcggaggaggaggtgagcatggagagggaggagaagggcggcaatgttcgcgatggcgaggtgaggacgacggcggcggcggcggcagctgtgagcctggagacgctgcggaagcggatggctgacttcgcgacggagcgggactgggagcagttccactcccccaggaacctccttctcgccctggtaggggaggtgggggagctgtctgagatattccaatggaaaggggaggtgcccaaggggctgccaggctgggacgatgccgagaaggagcacttgggcgaggagctcgccgacgtgctcctctatctggtgcgcctgtcggacatgtgcggcgtcgacctcggcaaggctgccctgcgcaagatggagatcaacgcccgcaaatacccagttggacagtgcaagggttcatccaagaagcacactcactacggctccactaacaatgttggcgacagcgacaaagctaatgccgcgaacaaggagcagcatagctgtggtgtctaaaatgactcggagctccttgaatggtaatttggatggtcgggcatgatctaggttacgtgtgctgatgaaacagggatgctctattttggtgggaaagggacaagttgcgtgggttcaagttcccctatatattagatggctaatgaaccaagtgttaaccacaaagcttcgtaggctgtagctcccctatgtctaatgtgtactggggcattctgattctgctggttcagttatgcagcttcatatgatgcgaaagcaaagctgactattgcagtagtactaatgagtactgacagtactttatgatgcaaaagctttctgt

SEQ ID NO: 19292 - protein, 173 aa, Zea mays subsp. mays
  misc_feature (1)..(173): Ceres Seq. ID no. 12372549
MNVAEEEVSMEREEKGGNVRDGEVRTTAAAAAAVSLETLRKRMADFATERDWEQFHSPRNLLLALVGEVGELSEIFQWKGEVPKGLPGWDDAEKEHLGEELADVLLYLVRLSDMCGVDLGKAALRKMEINARKYPVGQCKGSSKKHTHYGSTNNVGDSDKANAANKEQHSCGV

SEQ ID NO: 19293 - protein, 164 aa, Zea mays subsp. mays
  misc_feature (1)..(164): Ceres Seq. ID no. 12372550
MEREEKGGNVRDGEVRTTAAAAAAVSLETLRKRMADFATERDWEQFHSPRNLLLALVGEVGELSEIFQWKGEVPKGLPGWDDAEKEHLGEELADVLLYLVRLSDMCGVDLGKAALRKMEINARKYPVGQCKGSSKKHTHYGSTNNVGDSDKANAANKEQHSCGV

SEQ ID NO: 19294 - protein, 131 aa, Zea mays subsp. mays
  misc_feature (1)..(131): Ceres Seq. ID no. 12372551
MADFATERDWEQFHSPRNLLLALVGEVGELSEIFQWKGEVPKGLPGWDDAEKEHLGEELADVLLYLVRLSDMCGVDLGKAALRKMEINARKYPVGQCKGSSKKHTHYGSTNNVGDSDKANAANKEQHSCGV

SEQ ID NO: 19295 - DNA, 847 bp, Zea mays subsp. mays
  misc_feature (1)..(847): Ceres Seq. ID no. 12372571
aagtaggtgaaggtcagatcagagtatcaccacttggcaatttctcccccggcacaagcgcatggctaccgtcgggggcaatcgtgctctctatgcagtcgtcgcgctgccacttctcgcgacccttcttcacggaccaatgcggctgtcgcatgccttcccataccgttccctactccagacctgccagcccagcggctccatccagggccgttccggcaactgcaacacggagaacggctccgagtgctgcaagaacgggcgtcgctacaccacatacggctgctccccgcccgtcacgggtagcacccgcgccgtactgactctcaacagcttcgccgagggcggggacggcggcggcgcggccgcctgcacggggaagttctacgacgacagcaagaaggtggtggcgctgtcaactggctggtacaacggcggtagccggtgcagaaagcacatcatgatccacgcgggcaacgggaattccgtgagcgcgttggtcgtcgacgagtgtgactccaccgtgggctgcgacaaggaccacaactttgagccgccgtgccgcaacaacatcgtcgacgggtcgccggcggtgtgggacgctctggggctcaacaaggacgacggccaggcacagatcacctggtccgacgagtgagcgactgtaccaccgctgcaccggccgggtgcgctcgtgcaagtgcaccggccggcacgtctcatgttgccaatatataataagtagtagggtacagtggtacaccctctaaataatcatgcatgaagcagctgttcatctttagacgtgtttaaccatttgcaaaattaaataactgttggccccccg

SEQ ID NO: 19296 - protein, 198 aa, Zea mays subsp. mays
  misc_feature (1)..(198): Ceres Seq. ID no. 12372572
MATVGGNRALYAVVALPLLATLLHGPMRLSHAFPYRSLLQTCQPSGSIQGRSGNCNTENGSECCKNGRRYTTYGCSPPVTGSTRAVLTLNSFAEGGDGGGAAACTGKFYDDSKKVVALSTGWYNGGSRCRKHIMIHAGNGNSVSALVVDECDSTVGCDKDHNFEPPCRNNIVDGSPAVWDALGLNKDDGQAQITWSDE

SEQ ID NO: 19297 - protein, 172 aa, Zea mays subsp. mays
  misc_feature (1)..(172): Ceres Seq. ID no. 12372573
MRLSHAFPYRSLLQTCQPSGSIQGRSGNCNTENGSECCKNGRRYTTYGCSPPVTGSTRAVLTLNSFAEGGDGGGAAACTGKFYDDSKKVVALSTGWYNGGSRCRKHIMIHAGNGNSVSALVVDECDSTVGCDKDHNFEPPCRNNIVDGSPAVWDALGLNKDDGQAQITWSDE

SEQ ID NO: 19298 - protein, 106 aa, Zea mays subsp. mays
  misc_feature (1)..(106): Ceres Seq. ID no. 12372574
VGEGQIRVSPLGNFSPGTSAWLPSGAIVLSMQSSRCHFSRPFFTDQCGCRMPSHTVPYSRPASPAAPSRAVPATATRRTAPSAARTGVATPHTAAPRPSRVAPAPY

SEQ ID NO: 19299 - DNA, 1848 bp, Zea mays subsp. mays
  misc_feature (1)..(1848): Ceres Seq. ID no. 12372600
gcacgagaccattacctagaacatcctaatcgaaaacccatccggcctcccccccgtctcgatagtcgataccaggttctaaatggcgatggcgatgatggctatgcgacgcgcggtggcgctcggcgctcgccacatccccgccgccgcagcctcttcgttccgagtcgtctccctccgccacatgagcgcggacgcgggcgccgcgatggagaagatccgcgccgccgggctgctcaggacgcaggggcttatcgctgggcagtgggtggacgcctacgacggaaagaccattgaggtgcaaaatccagcaactggtgaggtcctggcaaacgtgtcctgtatgggcagcagagaaacatctgatgctattgcttctgctcacagtacattctattcttggagtaaattcactgcaagtgagaggagcaaggcactaagaaaatggtacgatctaattatttcacacaaggaagagcttgcacttctcatgacactggagcaggggaaacctatgaaagaagcccttggtgaggtcaattatggtgcaagtttcatagaatattttgcagaggaagcaaagcgtatatatggtgacatcattcccccaactttatctgatcgcagattgttggttttgaagcagcctgttggggtagttggagctattacaccatggaattttccattagcaatgataacccgcaaggttggaccagctttggcctgtggctgtactgttgttgtcaagccatcggagttcacacctctgacagcattagctgcagcagatcttgctcttcaagcgggaataccagcgggtgcattgaatgttgtgatgggtaatgctgctgagataggtgatgcgttgctgcagagtacacaggtcagaaagattacattcactggatcaacagctgttggcaaaaaactgatggctggatctgcaaatactgtgaaaaaggtctccttggaacttggtgggaatgcaccttgcattgttttcgatgatgcggacattgatgttgctgttaaaggcagtcttgctgccaagttccgtaacagtggacagacatgtgtttgtgcaaacaggatattggtgcaagaaggtatctacgaaaagtttgcaaaagcattcatccaggctgttcagagtttgaaggtcggtaacggtctagaagagagtacatctcagggtcctctgattaacgaagctgctgttcaaaaggtggagaagttcataaatgacgcaacttcaaagggagcaaatgtcatgctaggtggtaaaagacacagcctgggaatgtcattttatgagccaactgtagtagggaatgtcagcaacgatatgcttcttttcagagaagaagtttttggtccagttgcaccccttataccgttcaaaactgaggaagaagcagtccatatggccaacgatacaaacacaggcttagctgcatacatttttaccaagagcatacctcgttcttggcgtgtatctgaatctcttgagtacggcttagttggggtaaacgaggggattatttcaacggaggtggcgccatttggcggagtaaagcagtctggtctagggagagaaggatcgaagtacggcattgacgagtacttggagctcaagtacatctgcatgggcaacttgggttgagtcctgaagtcggcctctagctcgaaacactcggcagatgatgaacggagaaaccaggcgtgcttagaagggcgtgagttgcgtttagctgcaagatcggtcatgatggctgtgggagagcagttttagaataaatcgaataagccgcggagcattaaataaaagaagtggaaatgagatgt

SEQ ID NO: 19300 - protein, 527 aa, Zea mays subsp. mays
  misc_feature (1)..(527): Ceres Seq. ID no. 12372601
MAMAMMAMRRAVALGARHIPAAAASSFRVVSLRHMSADAGAAMEKIRAAGLLRTQGLIAGQWVDAYDGKTIEVQNPATGEVLANVSCMGSRETSDAIASAHSTFYSWSKFTASERSKALRKWYDLIISHKEELALLMTLEQGKPMKEALGEVNYGASFIEYFAEEAKRIYGDIIPPTLSDRRLLVLKQPVGVVGAITPWNFPLAMITRKVGPALACGCTVVVKPSEFTPLTALAAADLALQAGIPAGALNVVMGNAAEIGDALLQSTQVRKITFTGSTAVGKKLMAGSANTVKKVSLELGGNAPCIVFDDADIDVAVKGSLAAKFRNSGQTCVCANRILVQEGIYEKFAKAFIQAVQSLKVGNGLEESTSQGPLINEAAVQKVEKFINDATSKGANVMLGGKRHSLGMSFYEPTVVGNVSNDMLLFREEVFGPVAPLIPFKTEEEAVHMANDTNTGLAAYIFTKSIPRSWRVSESLEYGLVGVNEGIISTEVAPFGGVKQSGLGREGSKYGIDEYLELKYICMGNLG

SEQ ID NO: 19301 - protein, 525 aa, Zea mays subsp. mays
  misc_feature (1)..(525): Ceres Seq. ID no. 12372602
MAMMAMRRAVALGARHIPAAAASSFRVVSLRHMSADAGAAMEKIRAAGLLRTQGLIAGQWVDAYDGKTIEVQNPATGEVLANVSCMGSRETSDAIASAHSTFYSWSKFTASERSKALRKWYDLIISHKEELALLMTLEQGKPMKEALGEVNYGASFIEYFAEEAKRIYGDIIPPTLSDRRLLVLKQPVGVVGAITPWNFPLAMITRKVGPALACGCTVVVKPSEFTPLTALAAADLALQAGIPAGALNVVMGNAAEIGDALLQSTQVRKITFTGSTAVGKKLMAGSANTVKKVSLELGGNAPCIVFDDADIDVAVKGSLAAKFRNSGQTCVCANRILVQEGIYEKFAKAFIQAVQSLKVGNGLEESTSQGPLINEAAVQKVEKFINDATSKGANVMLGGKRHSLGMSFYEPTVVGNVSNDMLLFREEVFGPVAPLIPFKTEEEAVHMANDTNTGLAAYIFTKSIPRSWRVSESLEYGLVGVNEGIISTEVAPFGGVKQSGLGREGSKYGIDEYLELKYICMGNLG

SEQ ID NO: 19302 - protein, 523 aa, Zea mays subsp. mays
  misc_feature (1)..(523): Ceres Seq. ID no. 12372603
MMAMRRAVALGARHIPAAAASSFRVVSLRHMSADAGAAMEKIRAAGLLRTQGLIAGQWVDAYDGKTIEVQNPATGEVLANVSCMGSRETSDAIASAHSTFYSWSKFTASERSKALRKWYDLIISHKEELALLMTLEQGKPMKEALGEVNYGASFIEYFAEEAKRIYGDIIPPTLSDRRLLVLKQPVGVVGAITPWNFPLAMITRKVGPALACGCTVVVKPSEFTPLTALAAADLALQAGIPAGALNVVMGNAAEIGDALLQSTQVRKITFTGSTAVGKKLMAGSANTVKKVSLELGGNAPCIVFDDADIDVAVKGSLAAKFRNSGQTCVCANRILVQEGIYEKFAKAFIQAVQSLKVGNGLEESTSQGPLINEAAVQKVEKFINDATSKGANVMLGGKRHSLGMSFYEPTVVGNVSNDMLLFREEVFGPVAPLIPFKTEEEAVHMANDTNTGLAAYIFTKSIPRSWRVSESLEYGLVGVNEGIISTEVAPFGGVKQSGLGREGSKYGIDEYLELKYICMGNLG

SEQ ID NO: 19303 - DNA, 1876 bp, Zea mays subsp. mays
  misc_feature (1)..(1876): Ceres Seq. ID no. 12372612
gcacgagaccattacctagaacatcctaatcgaaaaatctatctttgtggtcgtggtcctcccgtcgtcgtcgactcgtcgtcgtcggtgttgctccgatgggcaaggactcgaagccgaaggacgccaaggggaagggcaagcaggcggccggctcctctggcggcgacgacggcggcggcaagggaggcaagggcaagggcaagggcaagggcggcaagtccgctgacggactcggcacttgcacctacgtcaaagctaggcacgtattgtgtgagaagcaggggaagatcaatgaagcttataagaagttgcaggatggatggctgaataatggggacaaagttcctcctgctgagtttgctaaggtaaggacccgaatgacgggcagtcctccactcttctaggctcaaggatagttaggtttgcttagacgaaaagggtagtgatgcactatgcgcattgatactgacgagacttcatcgttttgcgactttgaaagttttatttacattttagtgacatttccccatcttctatttggccttgtagagaatgaataaaggctatataggttaagttactgatcttgtacttattcatgaggtacagtttgtggtctgcatcacgatcttcttgtactgatagtatcctttgattttgaatgagcttgatctttggttgcactttgatgatatcctgactgccattaatccatttgtttcatggcaagtgcagagaatggatgctgtgtatgggcagttactagttaaagacggttgctttagctggcatatgaataatgcatctatgtgtattgactatcgagaaaaaggttttgtatgattttgttgcagctggcaaggcttctggtagcttagtcttagaaattagtacttggctgtttgcttttggtttagcctttttctgacagggaactggtctgggtactactcgccaaaggaccatatatcataattggaaaggagcaaggcaagctgtagggaagatcactgcacaattatttttatattatcgttcctataaggttttgagaatctgtggttaagttgtattgtaaagctagttagtagcaaaattgtttataaggctatttgagctcttatatcttcatacacatttaatttttcgcagcttgtgaacattgggaagcccaattaaatatttgaatctgcatagagtattggaaatagtcaatagtggtgaacttttgaatgattcagttttgagactctggttggagcatgtgtagctactatttagtggggtgcatgtgacatcaaatttcgattgttgacctcatatatgttactggacttcaaaatttgttcttccattttcaatctgactaactacttcgtcgaagtttttctcatattttttgtgccattattagataccatgatgataatagatcctgactttattttttgtactacaggtagcacaagagtattctgaatgcccatcagggaagaaaggtggagatcttggttggttcccgcgtggcaagatggctggtcctttccaggaggttgctttcaacacacctgagggaactgttagcgcaccattcaagtccacgcacgggtatcactttatcctctgcgaaggaaggaagaactgatctggaaatgtcggttggggagactgcatcatcaggttgtatgagacgcaatgcaaactactcaccttctctaataagcgctggacatgtgtactttgtgttgggctattcgcattctgttccaaacaagttgccaaaacaaaagaatgtgtgattcgctgtaattaacatattgtactgataatctgatatggcatacctatctgggtcagttaacaggtgggtttt

SEQ ID NO: 19304 - protein, 109 aa, Zea mays subsp. mays
  misc_feature (1)..(109): Ceres Seq. ID no. 12372613
ARDHYLEHPNRKIYLCGRGPPVVVDSSSSVLLRWARTRSRRTPRGRASRRPAPLAATTAAAREARARARARAASPLTDSALAPTSKLGTYCVRSRGRSMKLIRSCRMDG

SEQ ID NO: 19305 - protein, 102 aa, Zea mays subsp. mays
  misc_feature (1)..(102): Ceres Seq. ID no. 12372614
MGKDSKPKDAKGKGKQAAGSSGGDDGGGKGGKGKGKGKGGKSADGLGTCTYVKARHVLCEKQGKINEAYKKLQDGWLNNGDKVPPAEFAKVRTRMTGSPPLF

SEQ ID NO: 19306 - DNA, 1626 bp, Zea mays subsp. mays
  misc_feature (1)..(1626): Ceres Seq. ID no. 12372619
ctctgattccttcctctcctctcgccccacgcccctctccatctgctcccgctccgcctcgcctagggttttgcccccaaacctagcctcccccgaatctcccacgccatggacgtcgagggcgaggtccccgccgccgccgcggcggcggtggcgaacggcctgggcggcgcgggcgcggaggaggcctctccgtcgccggtctcggctgagcagctcgacgtggaggcgtacgcggcgcagtactcggggcggacccgcctcgtgcgcctcctctttgtcgccgaccggtgcggggtggaggcgatgcagctcgaggcgctgcggatggcttacgacgagatcaagcgcggggaggacgtgcagctccaccgcgacgtcgtcaccaagatcggcggccgcctcggtccgcgctacggcctcgaccaggcgtgggtcttcagcgtctcccgccgcgccgaccagcgcaaggagaagctcgagagcgagctcaatggatacaggactaacttaatcaaagagagcatcagaatgggctacaatgacattggtgatttcttctatgcccatggccaactttcagatgctttcaaaagctacatcaggactcgggactattgcaccacttccaaacatatagttcagatgtgcatgaatgtgattctggttagcattgagctggggcaatatgcacatgtttcaaactatgtcagcaaagcagagcaaacccccgactctctggatcctaccattgttgcaaagctgaaggcagctgcaggattagccaacttggaaacaaagaaatacaaatttgctgctcgtaagtttgttgagacaggaattgaactaggaaacaacttctctgaagtcatagctcctcaagacgtggcagtctatggtgccctttgtgcacttgcttcttttgaccgttcagacctgaagagcaaagtcattgacaatatcaacttccgtaactttctggagctggtgcctgaagtaagggagctggttaatgatttttatgcaagtcgctatggatcttgcttgggtcatcttgagaagctaaagcctaacctgctcctggatatccatttgcatcagcatgtagagactctgtatatggagattcgccacaaagcgatcatacagtacacacttccttttatatctgttgacctcaacacgatggcagccgcctttaagacttcggtctccatgctgcagaaggagctggccgcactgattactgaggacaaaatacaggcccggatagactcccacaacaagatcctttacgcaaggcatgctgaccagagaaatgcaactttccagcgtgtccttcaaaccggcaatgactttgagagagatgtcaagtccatgcttctgcgtgccaacctcctcaagcatgattacattcagaagacaagcggaccaaggaagatgtaaagattgcgggcgtcgctgctaggcaaggcttcctgctgcatgcctctccacttttttttttgaagaattgttctgtgacataaaagggaccgaagtctgtctaaatgccctccccctctttctttttattggttgatgaaagttattgtcgaagtaatgtatggttgagcatctggatgt

SEQ ID NO: 19307 - protein, 445 aa, Zea mays subsp. mays
  misc_feature (1)..(445): Ceres Seq. ID no. 12372620
MDVEGEVPAAAAAAVANGLGGAGAEEASPSPVSAEQLDVEAYAAQYSGRTRLVRLLFVADRCGVEAMQLEALRMAYDEIKRGEDVQLHRDVVTKIGGRLGPRYGLDQAWVFSVSRRADQRKEKLESELNGYRTNLIKESIRMGYNDIGDFFYAHGQLSDAFKSYIRTRDYCTTSKHIVQMCMNVILVSIELGQYAHVSNYVSKAEQTPDSLDPTIVAKLKAAAGLANLETKKYKFAARKFVETGIELGNNFSEVIAPQDVAVYGALCALASFDRSDLKSKVIDNINFRNFLELVPEVRELVNDFYASRYGSCLGHLEKLKPNLLLDIHLHQHVETLYMEIRHKAIIQYTLPFISVDLNTMAAAFKTSVSMLQKELAALITEDKIQARIDSHNKILYARHADQRNATFQRVLQTGNDFERDVKSMLLRANLLKHDYIQKTSGPRKM

SEQ ID NO: 19308 - protein, 379 aa, Zea mays subsp. mays
  misc_feature (1)..(379): Ceres Seq. ID no. 12372621
MQLEALRMAYDEIKRGEDVQLHRDVVTKIGGRLGPRYGLDQAWVFSVSRRADQRKEKLESELNGYRTNLIKESIRMGYNDIGDFFYAHGQLSDAFKSYIRTRDYCTTSKHIVQMCMNVILVSIELGQYAHVSNYVSKAEQTPDSLDPTIVAKLKAAAGLANLETKKYKFAARKFVETGIELGNNFSEVIAPQDVAVYGALCALASFDRSDLKSKVIDNINFRNFLELVPEVRELVNDFYASRYGSCLGHLEKLKPNLLLDIHLHQHVETLYMEIRHKAIIQYTLPFISVDLNTMAAAFKTSVSMLQKELAALITEDKIQARIDSHNKILYARHADQRNATFQRVLQTGNDFERDVKSMLLRANLLKHDYIQKTSGPRKM

SEQ ID NO: 19309 - protein, 372 aa, Zea mays subsp. mays
  misc_feature (1)..(372): Ceres Seq. ID no. 12372622
MAYDEIKRGEDVQLHRDVVTKIGGRLGPRYGLDQAWVFSVSRRADQRKEKLESELNGYRTNLIKESIRMGYNDIGDFFYAHGQLSDAFKSYIRTRDYCTTSKHIVQMCMNVILVSIELGQYAHVSNYVSKAEQTPDSLDPTIVAKLKAAAGLANLETKKYKFAARKFVETGIELGNNFSEVIAPQDVAVYGALCALASFDRSDLKSKVIDNINFRNFLELVPEVRELVNDFYASRYGSCLGHLEKLKPNLLLDIHLHQHVETLYMEIRHKAIIQYTLPFISVDLNTMAAAFKTSVSMLQKELAALITEDKIQARIDSHNKILYARHADQRNATFQRVLQTGNDFERDVKSMLLRANLLKHDYIQKTSGPRKM

SEQ ID NO: 19310 - DNA, 1951 bp, Zea mays subsp. mays
  misc_feature (1)..(1951): Ceres Seq. ID no. 12372631
gcacgagaccattacctagaacatcctaatcgaaaaaacggatcaagcgaggtagacgactccgcgtctaattaaacctgtggtctgcggacgggcggtcgtcggttagagcattgcttccgtgtggtgcggttgatagctcggatcttctgctggcggagttcgtcttggaggagaagagagagagagagcgcgcgcgccgggatcggagccaggaagcatccagcagcgatggcgggcggcggggtggcggcgctgggcgtgaagacggaccgcgcggcgcagtacaaggggcgcatgacgctcgccgtcgccacgacctgcctcgtggccgccgtcgggggcgccatcttcggctacgacatcggcatctccggaggcgtgacatccatggacccattcctggagaaattcttcccggtagtgttccaccggaagaactccggcgggaagaacaactactgtaagtacgacaaccagggactagcggcgttcacatcgtcactctacctcgccggcctcgttgcctccctcgtcgcgtcccccgtgacgaggaactacggccgcaaagctagcattgtctgcggcggcgtgagcttcctcatcggcgcggccctcaacgtggccgccgtgaatctggctatgctcatcctcgggcgcatcatgctcggcgtcggcatcggttttggcaaccaggctgtgccgctgtacctgtcggagatggcgccggcgcacctccgcggcggcctgaacatgatgttccagctcgcgacgacgctgggcatcttcacggcgaacctgatcaactatggcacgcagaacatcaagccgtgggggtggcggctgtcgctgggcctcgcggcggtgccggcgctgctgatgacgttgggcgggctctttcttccggagactcccaacagcctcattgagcgcgggcgcgtggaggagggtcggcgcgtgctggagcgcatccggggcacggccgacgtggacgccgagttcacggacatggtggaggcgagcgagctggccaacaccgtcgagcacccgttccggaacatcctgcagccgcgcaaccggccgcagctggtgatggccgtgtgcatgccggcgttccagatcctgacgggcatcaactccatcctcttctacgcgccggtcctgttccagagcatgggtttcggcgggaacgcgtcccctctactcctccgtgctcaccggcgccgtgctcttctcctcgacgctcatctccatcggcatcgtcgaccgcctcggccgccggaagctcctcatcagcggcgggatccagatgatcgtctgccaggtgatcgtggcggtgatcctgggcgtgaagttcggggcggagaagcaactggcgcggagctactcggtcgcggtggtggtggtgatctgcctgttcgttctggcgttcgggtggtcgtggggcccgctgggatggacggtgccgagcgagatcttcccgctggagacgcggtcggcggggcagagcatcacggtggccgtgaacctgctcttcaccttcgccatcgcgcaggcgttcctgtcgctgctgtgcgccttcaagttcggcatcttcctctttttcgcggggtggatcaccgtcatgaccgtgttcgtctacgtcttcctgccggagaccaagggcgtgcccatcgaagagatggtgctgctatggcggaagcactggttctggaagaaggtcatgccggacatgccgctcgaggatggctggggcgcggctgagggtcatgcggcacctgccagcaacaatcacaagggatgactggagtgaagcatgcatggttgcctggttggtttcgtggacactttatataataactgaagaaaacaagacacacactaacatgtaggcggctgcttattcttattgtattttgtataaagcaggctgtgtgatatgcaggggtag

SEQ ID NO: 19311 - protein, 510 aa, Zea mays subsp. mays
  misc_feature (1)..(510): Ceres Seq. ID no. 12372632
MAGGGVAALGVKTDRAAQYKGRMTLAVATTCLVAAVGGAIFGYDIGISGGVTSMDPFLEKFFPVVFHRKNSGGKNNYCKYDNQGLAAFTSSLYLAGLVASLVASPVTRNYGRKASIVCGGVSFLIGAALNVAAVNLAMLILGRIMLGVGIGFGNQAVPLYLSEMAPAHLRGGLNMMFQLATTLGIFTANLINYGTQNIKPWGWRLSLGLAAVPALLMTLGGLFLPETPNSLIERGRVEEGRRVLERIRGTADVDAEFTDMVEASELANTVEHPFRNILQPRNRPQLVMAVCMPAFQILTGINSILFYAPVLFQSMGFGGNASPLLLRAHRRRALLLDAHLHRHRRPPRPPEAPHQRRDPDDRLPGDRGGDPGREVRGGEATGAELLGRGGGGDLPVRSGVRVVVGPAGMDGAERDLPAGDAVGGAEHHGGREPALHLRHRAGVPVAAVRLQVRHLPLFRGVDHRHDRVRLRLPAGDQGRAHRRDGAAMAEALVLEEGHAGHAARGWLGRG

SEQ ID NO: 19312 - protein, 488 aa, Zea mays subsp. mays
  misc_feature (1)..(488): Ceres Seq. ID no. 12372633
MTLAVATTCLVAAVGGAIFGYDIGISGGVTSMDPFLEKFFPVVFHRKNSGGKNNYCKYDNQGLAAFTSSLYLAGLVASLVASPVTRNYGRKASIVCGGVSFLIGAALNVAAVNLAMLILGRIMLGVGIGFGNQAVPLYLSEMAPAHLRGGLNMMFQLATTLGIFTANLINYGTQNIKPWGWRLSLGLAAVPALLMTLGGLFLPETPNSLIERGRVEEGRRVLERIRGTADVDAEFTDMVEASELANTVEHPFRNILQPRNRPQLVMAVCMPAFQILTGINSILFYAPVLFQSMGFGGNASPLLLRAHRRRALLLDAHLHRHRRPPRPPEAPHQRRDPDDRLPGDRGGDPGREVRGGEATGAELLGRGGGGDLPVRSGVRVVVGPAGMDGAERDLPAGDAVGGAEHHGGREPALHLRHRAGVPVAAVRLQVRHLPLFRGVDHRHDRVRLRLPAGDQGRAHRRDGAAMAEALVLEEGHAGHAARGWLGRG

SEQ ID NO: 19313 - protein, 457 aa, Zea mays subsp. mays
  misc_feature (1)..(457): Ceres Seq. ID no. 12372634
MDPFLEKFFPVVFHRKNSGGKNNYCKYDNQGLAAFTSSLYLAGLVASLVASPVTRNYGRKASIVCGGVSFLIGAALNVAAVNLAMLILGRIMLGVGIGFGNQAVPLYLSEMAPAHLRGGLNMMFQLATTLGIFTANLINYGTQNIKPWGWRLSLGLAAVPALLMTLGGLFLPETPNSLIERGRVEEGRRVLERIRGTADVDAEFTDMVEASELANTVEHPFRNILQPRNRPQLVMAVCMPAFQILTGINSILFYAPVLFQSMGFGGNASPLLLRAHRRRALLLDAHLHRHRRPPRPPEAPHQRRDPDDRLPGDRGGDPGREVRGGEATGAELLGRGGGGDLPVRSGVRVVVGPAGMDGAERDLPAGDAVGGAEHHGGREPALHLRHRAGVPVAAVRLQVRHLPLFRGVDHRHDRVRLRLPAGDQGRAHRRDGAAMAEALVLEEGHAGHAARGWLGRG

SEQ ID NO: 19314 - DNA, 1450 bp, Zea mays subsp. mays
  misc_feature (1)..(1450): Ceres Seq. ID no. 12372642
gcacgagaccattacctagaacatcctaatcgaaaaggcttctcgattcttgaccatcctgctgttctgccttctccgtccgcgccttcgagaaggccacagagcgaaggaattgcagagttttcttggcgcgaaagaaggggagagagagagagaaagacgaagatgtttatccagaaggcatggaggacggcggcgtttgggctctacggcttcaaccatttcacaaaatctggtttcctggagcatgcgaagaaattcagagaggaggatatgcagatccggttggatggaaaaaattgcctagtaactggagcgaattctggcattggttttgctatggctgagggcttggcttcacatggtgctaccgtctatatggtctgtcgtaacaaggagagaggggaggcagctctcaaccaaataagatccaaaactggcaatgcaaacgttcatctggagatatgtgacctttcatctatcaatcaagtaaaatcgtttgcaacaaagttcacttcgatggataaaccactccatgtcttggtaaacaatgctggcttattagagcacaagcatgagactacagcagaagggttggagctcaattttgctgtcaatgtagctgcaacatacactttaacagagctagttatgccgtcattggagaaagcggcaccagatgctcgtgtcatcacagttgcatcaggaggcatgtacaccgagccactgaacaaagacttacagttcaccgaaggcaccttcgatgggacgcaacagtatgctcgaaacaaaagagttcaggtggcactgactgaatggtgggctgagaaaagcggtgacaggggagtcggtttctacgccatgcatcctggatgggccgatacgcctggggtcgccaagagcttgcccggactgtcagagaggttgtctggaaacctgagaacaaatgacgaaggagctgatacagttgtttggttggcttgcaacctaaggagaagttagcctcgggagccttttacttcgaccgtgctgaagcaccaaaacatttgaagtttgctgggactgcagattcgcacgctcagataaaccctatcgttgatagcattagatccatctgtggtctctctgttaatggttgagctgccaaagcaaaagtgatatacagctccatcgtcaatagcattagattcatctgtggcttctctgttaaaggttgagcttccaaagcaaaagtgaagtgatatattacttgatataatgggtgcatgattcataaaaccgcaaaaaattgaagagtggaaaaaaaaatgcaccagccgggaatcgaacccgggtctgtaccgtggcagggtactattctaccactagaccactggtgcctttgatgctaaagttatgtacgtatttaatttcttttgaatcaacaatcaaacatagatccaacattctt

SEQ ID NO: 19315 - protein, 333 aa, Zea mays subsp. mays
  misc_feature (1)..(333): Ceres Seq. ID no. 12372643
ARDHYLEHPNRKGFSILDHPAVLPSPSAPSRRPQSEGIAEFSWRERRGERERKTKMFIQKAWRTAAFGLYGFNHFTKSGFLEHAKKFREEDMQIRLDGKNCLVTGANSGIGFAMAEGLASHGATVYMVCRNKERGEAALNQIRSKTGNANVHLEICDLSSINQVKSFATKFTSMDKPLHVLVNNAGLLEHKHETTAEGLELNFAVNVAATYTLTELVMPSLEKAAPDARVITVASGGMYTEPLNKDLQFTEGTFDGTQQYARNKRVQVALTEWWAEKSGDRGVGFYAMHPGWADTPGVAKSLPGLSERLSGNLRTNDEGADTVVWLACNLRRS

SEQ ID NO: 19316 - protein, 278 aa, Zea mays subsp. mays
  misc_feature (1)..(278): Ceres Seq. ID no. 12372644
MFIQKAWRTAAFGLYGFNHFTKSGFLEHAKKFREEDMQIRLDGKNCLVTGANSGIGFAMAEGLASHGATVYMVCRNKERGEAALNQIRSKTGNANVHLEICDLSSINQVKSFATKFTSMDKPLHVLVNNAGLLEHKHETTAEGLELNFAVNVAATYTLTELVMPSLEKAAPDARVITVASGGMYTEPLNKDLQFTEGTFDGTQQYARNKRVQVALTEWWAEKSGDRGVGFYAMHPGWADTPGVAKSLPGLSERLSGNLRTNDEGADTVVWLACNLRRS

SEQ ID NO: 19317 - protein, 242 aa, Zea mays subsp. mays
  misc_feature (1)..(242): Ceres Seq. ID no. 12372645
MQIRLDGKNCLVTGANSGIGFAMAEGLASHGATVYMVCRNKERGEAALNQIRSKTGNANVHLEICDLSSINQVKSFATKFTSMDKPLHVLVNNAGLLEHKHETTAEGLELNFAVNVAATYTLTELVMPSLEKAAPDARVITVASGGMYTEPLNKDLQFTEGTFDGTQQYARNKRVQVALTEWWAEKSGDRGVGFYAMHPGWADTPGVAKSLPGLSERLSGNLRTNDEGADTVVWLACNLRRS

SEQ ID NO: 19318 - DNA, 1636 bp, Zea mays subsp. mays
  misc_feature (1)..(1636): Ceres Seq. ID no. 12372649
gcacgagaccattacctagaacatcctaatcgaaaagaccgatagaacacgaccttaggggttcagatcggatcggaagcttccataagtttccatcgggcgtcgccggtatggcgatccgcaaggggtcttcgtacgccgtcgcggcacttctcgcgctcgcctctgtcgccgccgtcgcaggggaggtcttcttccaggagaagttcgaagatggctgggaaagtaggtgggtcaagtctgagtggaagaaggatgagaacatggctggtgaatggaaccacacctcgggaaaatggaatggagatgccgaggacaaaggtattcaaacctccgaggattacaggttctatgccatttcagccgaataccctgagttcagcaacaaggataagaccctggtgctgcagttctctgtgaagcacgagcagaagcttgactgcggcggtggctacgtcaaattgctgggtggtggtgatgtagaccagaagaaatttggtggagacacatcttacagcattatgtttggaccagatatctgtgggtacagcaccaagaaggttcacactatcctgaccaaggatggcaagaaccacttgatcaagaaggatgtgccttgtgagactgatcagttgactcatgtttacactttgatcatccgtcctgatgcaacatacagcattctcattgataatgaagagaagcaaactggcagcatctacgagcattgggatattcttccccctaagaaaatcaaggacccagaggctaagaagcctgaggactgggatgacaaggagtacattcctgaccctgaggacaagaagccagagggctatgatgatattcccaaggaaattcctgaccctgatgctaagaagcctgaggactgggacgatgaggaagatggtgaatggactgcccctaccattcccaacccagaatacaagggaccatggaaacaaaagaaaatcaagaacccgaactaccagggtaaatggaaggcacctatgattgacaacccagattttaaggatgatccatacatttacgccttcgacagcttgaagtacattggcattgagctgtggcaggttaaatcgggcactctgtttgacaacatcatcatcactgatgaccctgcgttggccaagacttttgcagaggagacctggggcaagcacaaggaggcagaaaaggctgcttttgatgaggccgagaaaaagaaggaagaagaggatgccgccaagggtggggatgatgaggatgatgacctagaggatgaggaagacgatgagaaggcagacgaggacaaggccgactctgatgccgaggatagcaaggattctgatgatgagaagcagcacgacgagctctagatggcgaggatgatgtttcgcgccgctggcctagatttatcagctctgccactatgaagttctttttttttcccgtgaccaccaagaatgtagaacactgctaataagcagatggacagtttgggtcgccgtagcgctttgtagtcatttttcccattaaagccgataacactgaacaaggaggaaggatcttttgcccacgattgttatctccctttctgatgttaaatgtgagcctttgcggcgagtttaggttc

SEQ ID NO: 19319 - protein, 422 aa, Zea mays subsp. mays
  misc_feature (1)..(422): Ceres Seq. ID no. 12372650
MAIRKGSSYAVAALLALASVAAVAGEVFFQEKFEDGWESRWVKSEWKKDENMAGEWNHTSGKWNGDAEDKGIQTSEDYRFYAISAEYPEFSNKDKTLVLQFSVKHEQKLDCGGGYVKLLGGGDVDQKKFGGDTSYSIMFGPDICGYSTKKVHTILTKDGKNHLIKKDVPCETDQLTHVYTLIIRPDATYSILIDNEEKQTGSIYEHWDILPPKKIKDPEAKKPEDWDDKEYIPDPEDKKPEGYDDIPKEIPDPDAKKPEDWDDEEDGEWTAPTIPNPEYKGPWKQKKIKNPNYQGKWKAPMIDNPDFKDDPYIYAFDSLKYIGIELWQVKSGTLFDNIIITDDPALAKTFAEETWGKHKEAEKAAFDEAEKKKEEEDAAKGGDDEDDDLEDEEDDEKADEDKADSDAEDSKDSDDEKQHDEL

SEQ ID NO: 19320 - protein, 371 aa, Zea mays subsp. mays
  misc_feature (1)..(371): Ceres Seq. ID no. 12372651
MAGEWNHTSGKWNGDAEDKGIQTSEDYRFYAISAEYPEFSNKDKTLVLQFSVKHEQKLDCGGGYVKLLGGGDVDQKKFGGDTSYSIMFGPDICGYSTKKVHTILTKDGKNHLIKKDVPCETDQLTHVYTLIIRPDATYSILIDNEEKQTGSIYEHWDILPPKKIKDPEAKKPEDWDDKEYIPDPEDKKPEGYDDIPKEIPDPDAKKPEDWDDEEDGEWTAPTIPNPEYKGPWKQKKIKNPNYQGKWKAPMIDNPDFKDDPYIYAFDSLKYIGIELWQVKSGTLFDNIIITDDPALAKTFAEETWGKHKEAEKAAFDEAEKKKEEEDAAKGGDDEDDDLEDEEDDEKADEDKADSDAEDSKDSDDEKQHDEL

SEQ ID NO: 19321 - protein, 285 aa, Zea mays subsp. mays
  misc_feature (1)..(285): Ceres Seq. ID no. 12372652
MFGPDICGYSTKKVHTILTKDGKNHLIKKDVPCETDQLTHVYTLIIRPDATYSILIDNEEKQTGSIYEHWDILPPKKIKDPEAKKPEDWDDKEYIPDPEDKKPEGYDDIPKEIPDPDAKKPEDWDDEEDGEWTAPTIPNPEYKGPWKQKKIKNPNYQGKWKAPMIDNPDFKDDPYIYAFDSLKYIGIELWQVKSGTLFDNIIITDDPALAKTFAEETWGKHKEAEKAAFDEAEKKKEEEDAAKGGDDEDDDLEDEEDDEKADEDKADSDAEDSKDSDDEKQHDEL

SEQ ID NO: 19322 - DNA, 1444 bp, Zea mays subsp. mays
  misc_feature (1)..(1444): Ceres Seq. ID no. 12372668
gcacgagaccattacctagaacatcctaatcgaaaaaaattaggaataccagcaatgctgggattacatttggagccccaggaggcattatttgtgcgaaggcatccatgttactgcagagcgtcccaccagcagtactggtacgatttctgagggagcatagatccgaatgggctgattacaatattgatgcatatttggcttcatcattgaagaccagtgcgtgctcacttcctgggttgcgacccatgagattttctgaggggcagatgatcatgccacttgctcacacagtggagaacgaggagattcttgaagttgtccgccttgaaggtcaacctcttactcatgatgaagctcttctttcaagggacatccaccttctccagctttgcactggaatagatgagaaatctgtgggttcctccttccagcttgtgtttgcaccaattgatgagcatttcccagatgatgctccattgatttcttctggctttcgtgtcataccacttgatgtgaaaacagatggtgtatcctctggtaggacgctagatttggcatctagtcttgatgtgggctctgctgcaccccaagcctcaggggatgcatctccagatgactgcaatttgagatctgtgctgacaatcgcctttcaattcccgtatgagatgcaccttcaggacagcgttgcagcaatggcccgtcaatatgttcgtagtgtcatttctgctgtgcaaagagtgtcgatggctatatctccctcccaatctggtctaaatgctgggcataggatactttctggcttccctgaagctgccacacttgctagatgggtttgccagagttatcactaccatctaggtatggaattacttaatcaatcagatggagctggtgaagcattgttgaaaatgctctggcatcatccagatgctgttctgtgctgctcctttaaggagaaacctatgtttacgtttgcaaacaaggcagggctggacatgttagaaacatctcttgttgcgctgcaagacctgacgctagacaagatcttcgacgagtcaggaaggaaagcactattctcagacatctcgaaactaatggaacagggctacgcgtacctgccgtcaggcgtgtgcatgtcaggaatgggccgccatgtttctttcgaccaagctgtagcgtggaaggtgctcggcgaggatagcaacatccactgcctggcgttctgcttcgtcaactggtccttcgtgtgactgaagcccaacccgtcgggtggttatggcgagctgacccattttttttttgtatggaaaatcatcagctgtgacaaaaggcatatgttgctaggtgtcatagtgatgcacggctacacatgatccagcattaaccaaacaaccgcgtcgccagtttctttctattcgatcagggagatgcattttctggc

SEQ ID NO: 19323 - protein, 381 aa, Zea mays subsp. mays
  misc_feature (1)..(381): Ceres Seq. ID no. 12372669
MLLQSVPPAVLVRFLREHRSEWADYNIDAYLASSLKTSACSLPGLRPMRFSEGQMIMPLAHTVENEEILEVVRLEGQPLTHDEALLSRDIHLLQLCTGIDEKSVGSSFQLVFAPIDEHFPDDAPLISSGFRVIPLDVKTDGVSSGRTLDLASSLDVGSAAPQASGDASPDDCNLRSVLTIAFQFPYEMHLQDSVAAMARQYVRSVISAVQRVSMAISPSQSGLNAGHRILSGFPEAATLARWVCQSYHYHLGMELLNQSDGAGEALLKMLWHHPDAVLCCSFKEKPMFTFANKAGLDMLETSLVALQDLTLDKIFDESGRKALFSDISKLMEQGYAYLPSGVCMSGMGRHVSFDQAVAWKVLGEDSNIHCLAFCFVNWSFV

SEQ ID NO: 19324 - protein, 334 aa, Zea mays subsp. mays
  misc_feature (1)..(334): Ceres Seq. ID no. 12372670
MRFSEGQMIMPLAHTVENEEILEVVRLEGQPLTHDEALLSRDIHLLQLCTGIDEKSVGSSFQLVFAPIDEHFPDDAPLISSGFRVIPLDVKTDGVSSGRTLDLASSLDVGSAAPQASGDASPDDCNLRSVLTIAFQFPYEMHLQDSVAAMARQYVRSVISAVQRVSMAISPSQSGLNAGHRILSGFPEAATLARWVCQSYHYHLGMELLNQSDGAGEALLKMLWHHPDAVLCCSFKEKPMFTFANKAGLDMLETSLVALQDLTLDKIFDESGRKALFSDISKLMEQGYAYLPSGVCMSGMGRHVSFDQAVAWKVLGEDSNIHCLAFCFVNWSFV

SEQ ID NO: 19325 - protein, 327 aa, Zea mays subsp. mays
  misc_feature (1)..(327): Ceres Seq. ID no. 12372671
MIMPLAHTVENEEILEVVRLEGQPLTHDEALLSRDIHLLQLCTGIDEKSVGSSFQLVFAPIDEHFPDDAPLISSGFRVIPLDVKTDGVSSGRTLDLASSLDVGSAAPQASGDASPDDCNLRSVLTIAFQFPYEMHLQDSVAAMARQYVRSVISAVQRVSMAISPSQSGLNAGHRILSGFPEAATLARWVCQSYHYHLGMELLNQSDGAGEALLKMLWHHPDAVLCCSFKEKPMFTFANKAGLDMLETSLVALQDLTLDKIFDESGRKALFSDISKLMEQGYAYLPSGVCMSGMGRHVSFDQAVAWKVLGEDSNIHCLAFCFVNWSFV

SEQ ID NO: 19326 - DNA, 1312 bp, Zea mays subsp. mays
  misc_feature (1)..(1312): Ceres Seq. ID no. 12372672
aagcagagccaagcctactcttccaatccctgtcagggtggttagtctttgagctggtgggatcatggttgccaagacgaggacgaggcgacagctcgccaagctcgcgctgcttctactcgccctgctgctcctgctcgccgccatcctgctgtgcgtcttcttgatcccgcgccaccacaggaggccgctgccccccgcctcgccgccgggggcggggaacgcctcgaatcccgacgacagcatcgtggcgttcgacttctccccgtacctcatcatgtacaagagcggccgcgtgcaccggctggacggcaccgcccggtgctcggccggcgtggacgaggccacgggggtgacctccaaggacgtcgtgatcgacagcgggaccaggctcgcggcacggatgtacctgccgccggcgccccgcgggacgcaaagcaagggcctcggcaggcggcacccggtgctggtgttctaccacggcggcgcgttcgtcatcgagtcggcgttcacgccgctgtaccacgcctacctgaacggcgtggcggcgaaggcgcgcgtggtggcggtgtccgtggagtaccgcctggcgccggagcaccggctgccgacggcgtacgacgactcgtggcaggcgctcaactgggtggccaggaacgccggatccgggccggagccgtggctgcgggaccggggcaacctgtcccggctgttcgtcgccggggacagcgccggcgccaacatcgcgcacgacatggccatgcgcgcgggcacggggggcgggctggacggcggcgcggccatcgcgggcctcctgctcctggacccctacttctgggggaagaagccggtggccggggagacgacggacccggccaggcggcgccagtacgaggcgacgtggtcgttcatctgcggcgggcggtacggcatcgacgacccgctggtggacccgctgtcgatgccggcgtccgagtggcggaagctggcgtgcctcgcgcgtggcggtgacgtcgtcgggcctcgacgacttccggccgcgcgggctggcgtacgtggcggcgctccgcgacagcgggtgggacggggagacggagcagtacgagacgcccggcgagcggcacgtctacttcttggataggcccaaggaccccaattccgtcaaggagctggccttcgtcaccggattcctgagccgggagtaggtaggtagccatcacggcgagggcgtacagtttaggtgcaatcgtgaggattgcttgctgatcgaggcacgtgaatacgtgattgattaatagagactattatttct

SEQ ID NO: 19327 - protein, 358 aa, Zea mays subsp. mays
  misc_feature (1)..(358): Ceres Seq. ID no. 12372673
MVAKTRTRRQLAKLALLLLALLLLLAAILLCVFLIPRHHRRPLPPASPPGAGNASNPDDSIVAFDFSPYLIMYKSGRVHRLDGTARCSAGVDEATGVTSKDVVIDSGTRLAARMYLPPAPRGTQSKGLGRRHPVLVFYHGGAFVIESAFTPLYHAYLNGVAAKARVVAVSVEYRLAPEHRLPTAYDDSWQALNWVARNAGSGPEPWLRDRGNLSRLFVAGDSAGANIAHDMAMRAGTGGGLDGGAAIAGLLLLDPYFWGKKPVAGETTDPARRRQYEATWSFICGGRYGIDDPLVDPLSMPASEWRKLACLARGGDVVGPRRLPAARAGVRGGAPRQRVGRGDGAVRDARRAARLLLG

SEQ ID NO: 19328 - protein, 287 aa, Zea mays subsp. mays
  misc_feature (1)..(287): Ceres Seq. ID no. 12372674
MYKSGRVHRLDGTARCSAGVDEATGVTSKDVVIDSGTRLAARMYLPPAPRGTQSKGLGRRHPVLVFYHGGAFVIESAFTPLYHAYLNGVAAKARVVAVSVEYRLAPEHRLPTAYDDSWQALNWVARNAGSGPEPWLRDRGNLSRLFVAGDSAGANIAHDMAMRAGTGGGLDGGAAIAGLLLLDPYFWGKKPVAGETTDPARRRQYEATWSFICGGRYGIDDPLVDPLSMPASEWRKLACLARGGDVVGPRRLPAARAGVRGGAPRQRVGRGDGAVRDARRAARLLLG

SEQ ID NO: 19329 - protein, 245 aa, Zea mays subsp. mays
  misc_feature (1)..(245): Ceres Seq. ID no. 12372675
MYLPPAPRGTQSKGLGRRHPVLVFYHGGAFVIESAFTPLYHAYLNGVAAKARVVAVSVEYRLAPEHRLPTAYDDSWQALNWVARNAGSGPEPWLRDRGNLSRLFVAGDSAGANIAHDMAMRAGTGGGLDGGAAIAGLLLLDPYFWGKKPVAGETTDPARRRQYEATWSFICGGRYGIDDPLVDPLSMPASEWRKLACLARGGDVVGPRRLPAARAGVRGGAPRQRVGRGDGAVRDARRAARLLLG

SEQ ID NO: 19330 - DNA, 1530 bp, Zea mays subsp. mays
  misc_feature (1)..(1530): Ceres Seq. ID no. 12372712
gcacgagaccattacctagaacatcctaatcgaaaagtggatgttcggaagcaagctttgtcgacagacagatggggaaggcggggcggttgctcaagagcatcttggcggggaggaagagcggcgtcagagacaaggcgctgcggcatcagcagcagcaaggcgacgccactccgctgccggccgcgagcagcccccgggagaagaggcgctggagcttcaggcggcccgcgacggcgcccacgaagcaggaggggaaggccaataacgcggcgccgtccccgttgtcgtcgctggagccgtcggcgcgggagctcgaccagagcgagcacgccgtggcagcggcggcggctgccaccgaggtggctcgtctgacggctgctgacgagagccatctgtcagtcagctgctgccccnncgaggaggcggccgccgtcaggatccaggccaccttcagaggctatctggctcggaaggcgctgtgcgcgctgcgcggactagtgaagctgcaggcgctggtcaggggccagctggtgaggaggcaggccaacgccacagctccgccgcatgcaggccctcgtcgacgcgcagtcccgcctgcgcgcccagcgcgcgcgcatgctggacgcggaccacgccacgccgccagcggcctaccagcgccgctcaccgcaccatcccattccgatgcgccgcagctcntacgaggcgatggaccggtcgggggaggagcacgtgaaggtcgtggagatggacgccggcgacccggcgcgacgcgggcggagcagctgctcggcggcggccaccgagtccagggagcgccgcctcgccgagtactaccaccacggcggcggcgggcagtgctcgcccgcgccgttcctcttcgcccccgacctcagcccgcagcgcggcgacagcggccacctggaggacgtgttcgcgttcgaccccgcggcgacggcgcgcagcagcccgtacgtggccccctacgacgacgccgccgacgcctacggcgtcgtcccgagctacatggccaacaccgagtcgtcccgcgccaaggtccggtcccagagcgcgccgcgccagcgcaccgacgcggcgctggagcgccagcccagcaggcgccgcgcccagcagggcgcgcccaggaagatgcagcgctcgtcgtcgcacgtcggcgtgccggcggcggccgcgtacgggtacccggcgcagccgtgggcgggcgtcaggctggaccggtccagcgcgtcgctggtgggcagcgagtgcggctcgaccagctccgtgctcaccgcggccaccgtcggctactgccgctcgctcgtcggattcgaggtccaccggggccactactgaacagcaagttgatcaccattgcaatgttgtacttgtaccgatccatctattgcctgatgatggttcttgtgaaatattagctgtgtgctgttgttgttgttgttctcgtcaatatgtaaattccaaatgtcaactgcatgtgtcgtccttaatccaaatgcataatgattc

SEQ ID NO: 19331 - protein, 455 aa, Zea mays subsp. mays
  misc_feature (1)..(455): Ceres Seq. ID no. 12372713
  misc_feature (116)..(116): Xaa is any aa, unknown or other
  misc_feature (211)..(211): Xaa is any aa, unknown or other
MGKAGRLLKSILAGRKSGVRDKALRHQQQQGDATPLPAASSPREKRRWSFRRPATAPTKQEGKANNAAPSPLSSLEPSARELDQSEHAVAAAAAATEVARLTAADESHLSVSCCPXEEAAAVRIQATFRGYLARKALCALRGLVKLQALVRGQLVRRQANATAPPHAGPRRRAVPPARPARAHAGRGPRHAASGLPAPLTAPSHSDAPQLXRGDGPVGGGAREGRGDGRRRPGATRAEQLLGGGHRVQGAPPRRVLPPRRRRAVLARAVPLRPRPQPAARRQRPPGGRVRVRPRGDGAQQPVRGPLRRRRRRLRRRPELHGQHRVVPRQGPVPERAAPAHRRGAGAPAQQAPRPAGRAQEDAALVVARRRAGGGRVRVPGAAVGGRQAGPVQRVAGGQRVRLDQLRAHRGHRRLLPLARRIRGPPGPLLNSKLITIAMLYLYRSIYCLMMVLVKY

SEQ ID NO: 19332 - protein, 263 aa, Zea mays subsp. mays
  misc_feature (1)..(263): Ceres Seq. ID no. 12372714
  misc_feature (45)..(45): Xaa is any aa, unknown or other
MQALVDAQSRLRAQRARMLDADHATPPAAYQRRSPHHPIPMRRSXYEAMDRSGEEHVKVVEMDAGDPARRGRSSCSAAATESRERRLAEYYHHGGGGQCSPAPFLFAPDLSPQRGDSGHLEDVFAFDPAATARSSPYVAPYDDAADAYGVVPSYMANTESSRAKVRSQSAPRQRTDAALERQPSRRRAQQGAPRKMQRSSSHVGVPAAAAYGYPAQPWAGVRLDRSSASLVGSECGSTSSVLTAATVGYCRSLVGFEVHRGHY

SEQ ID NO: 19333 - protein, 246 aa, Zea mays subsp. mays
  misc_feature (1)..(246): Ceres Seq. ID no. 12372715
  misc_feature (28)..(28): Xaa is any aa, unknown or other
MLDADHATPPAAYQRRSPHHPIPMRRSXYEAMDRSGEEHVKVVEMDAGDPARRGRSSCSAAATESRERRLAEYYHHGGGGQCSPAPFLFAPDLSPQRGDSGHLEDVFAFDPAATARSSPYVAPYDDAADAYGVVPSYMANTESSRAKVRSQSAPRQRTDAALERQPSRRRAQQGAPRKMQRSSSHVGVPAAAAYGYPAQPWAGVRLDRSSASLVGSECGSTSSVLTAATVGYCRSLVGFEVHRGHY

SEQ ID NO: 19334 - DNA, 1304 bp, Zea mays subsp. mays
  misc_feature (1)..(1304): Ceres Seq. ID no. 12372716
gcacgagaccattacctagaacatcctaatcaaaaaaggccacaagcgcccgagcggcttaaaccctagctcgccgtcgtgctcggctcgccaccccgcgcctgctcctttcaggccctaaccgttcgccgccgcgcattcgagcacacgcggaagcgcacctagtgccatggcgaagaagcggaagcgcaccgacgcgcccgcagaggcggccggcgcagagaagcctgacgactccgcgccggcgcgcccggagcgcacgctcttcggcttcaaggacctggtccccgacgccgagcccgcctccgcgggcgccgaggccgcggtggcgccgttccggaacagggagaaggtactcatcacctgctcccgccgaatcacgtataggtatcggcacctgatgcaggacgtgctgtcgctgctcccgcatgcgaagaaggacagcaaggtcgagtcgaagcagagcaaggggaacgcgctgaacgagctccttgagctcaggagctgctccagctgccttttcttcgagtgcagaaaacagaaggatctttacctttggatggtgaagtctcctggaggaccatcagtaaaatttctagttaatgctgttcacaccatggaggagttgaagcttaccggtaaccatctgaaagggtcacgcccacttcttacattttctacaaattttgatgagcaacctcattggaagcttgtgaaggaaatgataactcagatatttgctactcctaaagatcaccgtaaagcaaaacctttccatgaccatgtgtttgtcttctccattgtggatggccatgtttggtttcgaaactaccagatttcggttccccacaatgagattgataaagttgataaaggtggtctggataaaatgacacttattgaggttggccccaggttctgtttgaatccaatcaaaatatttggtggtagttttggtggtcctacatgggtatgagaacccatactacatttcccccaatcagatccgtgcactagagaagaggcagaaggcaggcaaatatgccaagaaggtgaaggccaaggtgaggcggaagatgcacgagatggagaacacgctggagcctgatgagtttgctgagctctggaaaggggagtaactggtctttgatcgaccctgtcaaagtcgtgaagcaccagcaactccttccacttccaccaagcgcaggtcttgtttaccattgtggcagtgccgactgtcgaggttgtggaagttttgtatcacaaagcatacttttatttatataaaatcggattttagtgat

SEQ ID NO: 19335 - protein, 268 aa, Zea mays subsp. mays
  misc_feature (1)..(268): Ceres Seq. ID no. 12372717
MAKKRKRTDAPAEAAGAEKPDDSAPARPERTLFGFKDLVPDAEPASAGAEAAVAPFRNREKVLITCSRRITYRYRHLMQDVLSLLPHAKKDSKVESKQSKGNALNELLELRSCSSCLFFECRKQKDLYLWMVKSPGGPSVKFLVNAVHTMEELKLTGNHLKGSRPLLTFSTNFDEQPHWKLVKEMITQIFATPKDHRKAKPFHDHVFVFSIVDGHVWFRNYQISVPHNEIDKVDKGGLDKMTLIEVGPRFCLNPIKIFGGSFGGPTWV

SEQ ID NO: 19336 - protein, 191 aa, Zea mays subsp. mays
  misc_feature (1)..(191): Ceres Seq. ID no. 12372718
MQDVLSLLPHAKKDSKVESKQSKGNALNELLELRSCSSCLFFECRKQKDLYLWMVKSPGGPSVKFLVNAVHTMEELKLTGNHLKGSRPLLTFSTNFDEQPHWKLVKEMITQIFATPKDHRKAKPFHDHVFVFSIVDGHVWFRNYQISVPHNEIDKVDKGGLDKMTLIEVGPRFCLNPIKIFGGSFGGPTWV

SEQ ID NO: 19337 - protein, 138 aa, Zea mays subsp. mays
  misc_feature (1)..(138): Ceres Seq. ID no. 12372719
MVKSPGGPSVKFLVNAVHTMEELKLTGNHLKGSRPLLTFSTNFDEQPHWKLVKEMITQIFATPKDHRKAKPFHDHVFVFSIVDGHVWFRNYQISVPHNEIDKVDKGGLDKMTLIEVGPRFCLNPIKIFGGSFGGPTWV

SEQ ID NO: 19338 - DNA, 1301 bp, Zea mays subsp. mays
  misc_feature (1)..(1301): Ceres Seq. ID no. 12372750
gcacgagaccattacctagaacatcctaatcgaaaaatctttgcgcttggggcaatgacgcagcttatgaggtcataccgaggcgcgtcaattgctggttgaaaactatttccaaaccccctctttggcccactgggccactgagaatttctggaagggctccttttcctcggataagttcctattgagatcatcgcatcatttaggagaatgaagaaactcgttcaagacctctcagtaattgaagctgcactcaggacatcatcaaagctggttgtaagttcaaatgggaaacgggtcaggaggttacatccattgccacacaaagaattgaaagattcaaagaaaagcactgttttggtcgaaaatctacctccagatttctcaatggagagtattcaggaaaaattcgcaacagtgggcaaagttgtgaacataacaattaatgatccagaatcagtgaaagaattttcaactgctaagaagcctgacttcaatttaagttttaaggctcatgtacttgttgaatatgaagcagtggaggctgctgagaaggctgttactgccctaagtgatgagagcaactggagaactgggatgaaagtcaggcttctgtctaaacaaagtgtaatgggaccaggaaagtataaaaaaccttctaaagaaaatcaagatgcagtttccaaaatgattgatcagaatcaacattcaaaagaagaccagcttaaaaccttggaaaagatctccggtgctgatgcagtggggattaccaaggacagagataatttgaaacctgtttttatcactgagactgagcaccaagatcagaagccaaatgctagaggacgaaaaggatggtacaaaggtcaaggtcagatgcagcaaaatgcaaacaaacaaggcagttgtggttccgagtcattaaacaagcctatttctggaccgaggatgccagatggaacaaggggcttcacactgggacgtggtagatctcttccactacagaagtctgagaaggctgaagagtagagctaccaaaaaaggcctgttaagaaccttatccaaagaagctgggtaaaatctaacagaaaacctttgcttttttttttttgaaacttaagatcatcgaagccgttctttgcatggaatgggacacagaagaaagggaatcttggaatggctttctctctgcaagaaatggaacacaaaagggaatctgggaatgacttgtacagaaacacaattgtctgggggtagttccgagttcactcgtatggaacacagtagaacctttgcatgtc

SEQ ID NO: 19339 - protein, 272 aa, Zea mays subsp. mays
  misc_feature (1)..(272): Ceres Seq. ID no. 12372751
MKKLVQDLSVIEAALRTSSKLVVSSNGKRVRRLHPLPHKELKDSKKSTVLVENLPPDFSMESIQEKFATVGKVVNITINDPESVKEFSTAKKPDFNLSFKAHVLVEYEAVEAAEKAVTALSDESNWRTGMKVRLLSKQSVMGPGKYKKPSKENQDAVSKMIDQNQHSKEDQLKTLEKISGADAVGITKDRDNLKPVFITETEHQDQKPNARGRKGWYKGQGQMQQNANKQGSCGSESLNKPISGPRMPDGTRGFTLGRGRSLPLQKSEKAEE

SEQ ID NO: 19340 - protein, 213 aa, Zea mays subsp. mays
  misc_feature (1)..(213): Ceres Seq. ID no. 12372752
MESIQEKFATVGKVVNITINDPESVKEFSTAKKPDFNLSFKAHVLVEYEAVEAAEKAVTALSDESNWRTGMKVRLLSKQSVMGPGKYKKPSKENQDAVSKMIDQNQHSKEDQLKTLEKISGADAVGITKDRDNLKPVFITETEHQDQKPNARGRKGWYKGQGQMQQNANKQGSCGSESLNKPISGPRMPDGTRGFTLGRGRSLPLQKSEKAEE

SEQ ID NO: 19341 - protein, 143 aa, Zea mays subsp. mays
  misc_feature (1)..(143): Ceres Seq. ID no. 12372753
MKVRLLSKQSVMGPGKYKKPSKENQDAVSKMIDQNQHSKEDQLKTLEKISGADAVGITKDRDNLKPVFITETEHQDQKPNARGRKGWYKGQGQMQQNANKQGSCGSESLNKPISGPRMPDGTRGFTLGRGRSLPLQKSEKAEE

SEQ ID NO: 19342 - DNA, 1997 bp, Zea mays subsp. mays
  misc_feature (1)..(1997): Ceres Seq. ID no. 12372765
attcagatttcatcctcggcgtcgtctcctgtcctctccacgccaagcaacctccccaccccgccccaccctccatgctcgcctcgagatcttagcgggcagctccggagagcgccgacgagccccctgatccctcctcgccgccgccgccaaccgaccgggggaggagaggaggggaggggagcgatggagaccgccgactactccgggaagctcttcgtcggcggcatctcatgggagacggacgaggaccgcctccgcgagtacttcggccgcttcggtgaggtcactgaggccgtcatcatgcgggaccgcagcacgggccgcgctcgagggttcggtttcgtggtctttgctgacgccacggtcgccgagcgcgtcaccatcgaaaaacacatgatcgacggccgaatggtggaggccaagaaggctgttcccagggatgaccacagtattgtgagcaagagcaacacaagcagcatagggtcacctgggccgggccgtaccagaaagatctttgttggaggtctgccctcaaatgttacagaggctgacttcagggggtattttgagcagttcggtgtcataactgatgtggttgtgatgtatgatcacaacacacagagaccgaggggctttggattcatcacctatgattcagaagatgctgtggacaaagccctgcacaagagctttcatgagctaaatggtaaaatggttgaggtcaagaaggctgttccaaaggagcagtctcctggacctgttgcacgctcacctgcaggagtggggcagaactatgctatgaacagggttcatagcttcttgaatgacttcaaccaaggttacaatccgaaccctataggaggttatggcatgagggtggatggaaggtttggccagctttcaggtgcacgaaatgggctctcttcttttggcccaggttatgggatgggtatgaacgttgaaggtaggatgagtggaacttttggtgcaaactctggtttcatcagtaactccaatgggaggcaaatgggttcatacttcaatggaagttcgaatagattgagtagttctattgggtatcttggttatgactcaggatcgatgttgagttccatgtctaggaattttaatgcaggtgtaaactacccgatcaatcctacaaacatgagtgcttttgctgcccttggaaatgggggtggcgtcaattatatgggtctcccttctattgcccctgagttggcccagttgggcaacatttcaagccttgggtcagggaactttagccgtggagctggagttaataacttaagcttaccttctggctcctatgggaggagcaattcaactggtacaattggtgaacctttttctgcatcaggcaatgcatatgaagtgaacaacccagatacatatgggaacaactctatttatggtggaacatcctggaggttcccttcatctgaagttgacgtgccttctttcagtcatgatcttggaaatgttgatccgaatatgaaatcagacatatcagcaaattacatgggaaattattctgttagcaacaatcagccaagcagaggtatcacttcatagtgggagtattactacacattcatatatgacttgggatagatgaagcacccattcagtcaggcagccaggtgcgtgcatggcactgtgaatgggtgatatgtcaggttagttttgtctagctgaccagcggtgtggtttacaacaccaacatgctagagggggaggaagcggatacagaaacattttctgaggggcttctttttctttgagtcatgtttttagttttgattcctgcgcgtggctagctccttttggtttttgaatgagatgtgtagtggtgattattgcggcgcatattttagagatcgtggttcttccaacataagctggaaaaagaagtctgtatacggatgaacatgtataccaaccaaagggatgctgtattatcttgcccatttgtt

SEQ ID NO: 19343 - protein, 531 aa, Zea mays subsp. mays
  misc_feature (1)..(531): Ceres Seq. ID no. 12372766
IQISSSASSPVLSTPSNLPTPPHPPCSPRDLSGQLRRAPTSPLIPPRRRRQPTGGGEEGRGAMETADYSGKLFVGGISWETDEDRLREYFGRFGEVTEAVIMRDRSTGRARGFGFVVFADATVAERVTIEKHMIDGRMVEAKKAVPRDDHSIVSKSNTSSIGSPGPGRTRKIFVGGLPSNVTEADFRGYFEQFGVITDVVVMYDHNTQRPRGFGFITYDSEDAVDKALHKSFHELNGKMVEVKKAVPKEQSPGPVARSPAGVGQNYAMNRVHSFLNDFNQGYNPNPIGGYGMRVDGRFGQLSGARNGLSSFGPGYGMGMNVEGRMSGTFGANSGFISNSNGRQMGSYFNGSSNRLSSSIGYLGYDSGSMLSSMSRNFNAGVNYPINPTNMSAFAALGNGGGVNYMGLPSIAPELAQLGNISSLGSGNFSRGAGVNNLSLPSGSYGRSNSTGTIGEPFSASGNAYEVNNPDTYGNNSIYGGTSWRFPSSEVDVPSFSHDLGNVDPNMKSDISANYMGNYSVSNNQPSRGITS

SEQ ID NO: 19344 - protein, 469 aa, Zea mays subsp. mays
  misc_feature (1)..(469): Ceres Seq. ID no. 12372767
METADYSGKLFVGGISWETDEDRLREYFGRFGEVTEAVIMRDRSTGRARGFGFVVFADATVAERVTIEKHMIDGRMVEAKKAVPRDDHSIVSKSNTSSIGSPGPGRTRKIFVGGLPSNVTEADFRGYFEQFGVITDVVVMYDHNTQRPRGFGFITYDSEDAVDKALHKSFHELNGKMVEVKKAVPKEQSPGPVARSPAGVGQNYAMNRVHSFLNDFNQGYNPNPIGGYGMRVDGRFGQLSGARNGLSSFGPGYGMGMNVEGRMSGTFGANSGFISNSNGRQMGSYFNGSSNRLSSSIGYLGYDSGSMLSSMSRNFNAGVNYPINPTNMSAFAALGNGGGVNYMGLPSIAPELAQLGNISSLGSGNFSRGAGVNNLSLPSGSYGRSNSTGTIGEPFSASGNAYEVNNPDTYGNNSIYGGTSWRFPSSEVDVPSFSHDLGNVDPNMKSDISANYMGNYSVSNNQPSRGITS

SEQ ID NO: 19345 - protein, 430 aa, Zea mays subsp. mays
  misc_feature (1)..(430): Ceres Seq. ID no. 12372768
MRDRSTGRARGFGFVVFADATVAERVTIEKHMIDGRMVEAKKAVPRDDHSIVSKSNTSSIGSPGPGRTRKIFVGGLPSNVTEADFRGYFEQFGVITDVVVMYDHNTQRPRGFGFITYDSEDAVDKALHKSFHELNGKMVEVKKAVPKEQSPGPVARSPAGVGQNYAMNRVHSFLNDFNQGYNPNPIGGYGMRVDGRFGQLSGARNGLSSFGPGYGMGMNVEGRMSGTFGANSGFISNSNGRQMGSYFNGSSNRLSSSIGYLGYDSGSMLSSMSRNFNAGVNYPINPTNMSAFAALGNGGGVNYMGLPSIAPELAQLGNISSLGSGNFSRGAGVNNLSLPSGSYGRSNSTGTIGEPFSASGNAYEVNNPDTYGNNSIYGGTSWRFPSSEVDVPSFSHDLGNVDPNMKSDISANYMGNYSVSNNQPSRGITS

SEQ ID NO: 19346 - DNA, 1233 bp, Zea mays subsp. mays
  misc_feature (1)..(1233): Ceres Seq. ID no. 12372784
ccgagtcgtcttcccgttgatcggcaaagagactttagggttttagcggcttctatttctgagcgagggtttatccgccaggggcggcgcgacgcggcggcagttgagctgggatttccttcccatcccgttcccttccaggcgaggcgatggacgaggcggcggtcgacgacctcatccggcggctcctcgaggcccgcggcgggcgcaccccgcgcaacgcgcaggtgaccgacgctgagatccggcgcctctgcgccgccgccaaggatgtgttcctctcccagcccaacctcctggagctcgaggcccccatcaagatatgcggggatgtccatggtcagtattcagaccttcttcgattatttgagtatggtggctatccaccagatgcaaattatctgttcctcggtgactatgttgatagggggaaacagagcatagaaacaatatgccttctcttggcatacaagataaagtacccagaaaacttctttcttctcaggggaaaccatgaatgcgcctcaatcaaccgaatatatgggttttttgatgagtgtaagaggagattcaatgttcgtatctggaagatattcaccgagtgttttaactgcctcccagtggctgcgcttattgatgacaagatcttttgcatgcatggagggttgtctcctgagctaaagagcatggaccaaatacgtaacatttctcgtcctgtggatgttcctgatgttggtctcctatgtgatctgttatggtcggaccctgataaggagattgataggtggggtgagaatgacaggggtgtttcctacacctttggagctgacgtagttgccgagtttcttcagaaacatgatctagatttgatctgcagggcccaccaggtcgtagaggatggttatgaatttttcgcaaaacgccagcttgtaacaatattctcagctccgaactactgtggagagttcgacaatgctggtgcactgatgagcattgacaactccctagtatgctcgttccagatactcaagccttctgagaagaaaggaaaagcaggaaatgggaacatgccaaagcccggtacacctcccaggaagataaaaataagtgttacccatatttagccaggttctcgctatcaatctgcatttgcgaagttgtgattaagtgctcccccaaacttgtggtagtttttttttttggtgagcttaacacgattttaaattgtggacc

SEQ ID NO: 19347 - protein, 324 aa, Zea mays subsp. mays
  misc_feature (1)..(324): Ceres Seq. ID no. 12372785
MDEAAVDDLIRRLLEARGGRTPRNAQVTDAEIRRLCAAAKDVFLSQPNLLELEAPIKICGDVHGQYSDLLRLFEYGGYPPDANYLFLGDYVDRGKQSIETICLLLAYKIKYPENFFLLRGNHECASINRIYGFFDECKRRFNVRIWKIFTECFNCLPVAALIDDKIFCMHGGLSPELKSMDQIRNISRPVDVPDVGLLCDLLWSDPDKEIDRWGENDRGVSYTFGADVVAEFLQKHDLDLICRAHQVVEDGYEFFAKRQLVTIFSAPNYCGEFDNAGALMSIDNSLVCSFQILKPSEKKGKAGNGNMPKPGTPPRKIKISVTHI

SEQ ID NO: 19348 - DNA, 2011 bp, Zea mays subsp. mays
  misc_feature (1)..(2011): Ceres Seq. ID no. 12372807
agaggacgcgcacccggggtggagctgagagcaacaggagctcctgcggcgaattcgggccccgagtacgccggttcaggcggccgccgccggtggaattgtgccagtcgaggtggcctgctggtgcggcgggagtttgcgagtagggcggttccggttttgagtgagcgaaggtgttgttgggggcgtggatctggccggcggcgggcgatgggaaggagggactagggctcgattggagggaaaggcgtgatccatgggcggatgcttctcgcaggaggagcaccggctccagagcaggccagctgaagctgctggaccagacggactgcagaagtcaaaatctgattctaaagctacagcaagtgttcttgctccaccaaaagctgtggtggatctgcaagtggaaggatatggaaatgtgaatattttcacatatgacgaattgagcgcagccacaaaaaacttccgaccagatcaaattcttggagagggtgggtttggagttgtttacaaaggtgtaattgatgaaaatgttagagcaggtttcccatccaggcaggttgctgtgaaagaactaaacccagagggttttcaaggggacaaggagtggctggcagaagtcaactatcttgggcaacttagtcatccaaatcttgttgaactgattggctattgctgtgagggttcacatagactgcttgtgtatgagtacatgggcttgtggaagcctcgaaaagcacctttttcggcgggtttgccttaatatgccatggtcaacacgcatgaagattgcattgggtgctgcaagggggctcgagtaccttcacagagctgagagatccatcatttatcgagatttcaagacatcaaacatcttgctagatgcggattataatgctaagctttcagactttggtctcgcaagaacaggtcctagtggagaccaaacccacgtgtcaactcgtgttatgggaacttatggatacgcggctccagaatatgtcatgactggccatctgacagcacgaagtgatgtttatggctttggagtcgtgcttctagagatgattattggaagaagggctgtggacgatagccggccgagccgtgagcataacctagttgactgggcacggcccctcctcgtccataacaggaagctgttccggataatcgatccaagaatggaagggcagtactccaccaaggctgccaccgaggtggcaagccttgcataccgctgcctgagccagaaccccaaaggacgaccaaccatgagccaagttgttgagacctttgaggccgtgcagaacatgcctgaatgccaggacatactcctccagaacggcatcacaggtgccgtgacgctctacgaggtcccaaaggagcctgcagacagagttgagctggagaaggccaagcaggaaccggcagtaaagaccgccgcaatcccgcccgtgaacggaaagccggccccccagagcaggcgaacgcggcctgggaatggccggagcaagagcgagccatcgttggagtgtaagatgtacatcccatcaccagactctgacgaacagcagctcggcctggaggcactggcgtccccaaatggcagcatgaaggaccatcctgatgaggatttgtacaagatataaaaccagagccctcgttgctcgccttttgcgccgcacaccccagttctcaaagatcggtcagttacaattttttctctgatagccaccggcctcgctagggttcttattcttccgattagcaatagtatgtagagggagagttgtgatggaaagcatgtgtgtgcttgccatgacgatgctgtagagatctgatacacttctttctggggaatttccactccaaaaatggaagttgagagatgtgtcctgacgattggtgcgttttacccgtgtgttgagtttacttgtaaagatgcttcttcgttgtaatcttcagttctgcgggaaatcaacaccagcatagaaattgatagatc

SEQ ID NO: 19349 - protein, 315 aa, Zea mays subsp. mays
  misc_feature (1)..(315): Ceres Seq. ID no. 12372808
MSTWACGSLEKHLFRRVCLNMPWSTRMKIALGAARGLEYLHRAERSIIYRDFKTSNILLDADYNAKLSDFGLARTGPSGDQTHVSTRVMGTYGYAAPEYVMTGHLTARSDVYGFGVVLLEMIIGRRAVDDSRPSREHNLVDWARPLLVHNRKLFRIIDPRMEGQYSTKAATEVASLAYRCLSQNPKGRPTMSQVVETFEAVQNMPECQDILLQNGITGAVTLYEVPKEPADRVELEKAKQEPAVKTAAIPPVNGKPAPQSRRTRPGNGRSKSEPSLECKMYIPSPDSDEQQLGLEALASPNGSMKDHPDEDLYKI

SEQ ID NO: 19350 - protein, 295 aa, Zea mays subsp. mays
  misc_feature (1)..(295): Ceres Seq. ID no. 12372809
MPWSTRMKIALGAARGLEYLHRAERSIIYRDFKTSNILLDADYNAKLSDFGLARTGPSGDQTHVSTRVMGTYGYAAPEYVMTGHLTARSDVYGFGVVLLEMIIGRRAVDDSRPSREHNLVDWARPLLVHNRKLFRIIDPRMEGQYSTKAATEVASLAYRCLSQNPKGRPTMSQVVETFEAVQNMPECQDILLQNGITGAVTLYEVPKEPADRVELEKAKQEPAVKTAAIPPVNGKPAPQSRRTRPGNGRSKSEPSLECKMYIPSPDSDEQQLGLEALASPNGSMKDHPDEDLYKI

SEQ ID NO: 19351 - protein, 289 aa, Zea mays subsp. mays
  misc_feature (1)..(289): Ceres Seq. ID no. 12372810
MKIALGAARGLEYLHRAERSIIYRDFKTSNILLDADYNAKLSDFGLARTGPSGDQTHVSTRVMGTYGYAAPEYVMTGHLTARSDVYGFGVVLLEMIIGRRAVDDSRPSREHNLVDWARPLLVHNRKLFRIIDPRMEGQYSTKAATEVASLAYRCLSQNPKGRPTMSQVVETFEAVQNMPECQDILLQNGITGAVTLYEVPKEPADRVELEKAKQEPAVKTAAIPPVNGKPAPQSRRTRPGNGRSKSEPSLECKMYIPSPDSDEQQLGLEALASPNGSMKDHPDEDLYKI

SEQ ID NO: 19352 - DNA, 2010 bp, Zea mays subsp. mays
  misc_feature (1)..(2010): Ceres Seq. ID no. 12372814
aacctctagtttccaggatgacaaaatatgagatcagattcgattcgtgagcctgtagaacaaggatgctcctccaatccatactaaattgaacccacgcagcagacatccgcgcgcagtacgtccccttcgcgaagcaccgccatcctcaccacgccgccgagtcgggcggcgcatgcgccatggcgttcctattcggcgcattcctgggcctggtggtgggcgtggccgtcgtgatggcgttcgcgcgattcgagaacagccgcgccgagcagcgccgtgagctggctgctacagctgcagctttctcgaagttgactgtacaggatttgaggaagctcatccctcccgagttttatccatcatgggtttcattcacacaaaagcagaagcttaaatggctgaatcaagagctgacaaaaatctggccatttgtcaatgaggctgcatcagagttgatcaaaacttctgtggagcctatttttgagcagtacaagtcattcatcctggcctccctccatttctcaaagttgacacttggtactgttgctcctcagtttactggtgtttcaatcttggagagtgatgattctgccatcatcatggaacttgagttgcaatgggatggcaatcccaatatagtacttgacatccaaacaacacttggaatttctcttcctgtacaggtgaaaaatattggattcacaggagtacttcggctcatatttaaaccgctggtatctgaattcccctgttttggagctgtttgctgttctttaagggagaagagcaaggtggaatttaccctcaaggttattggtggcgaaatgactgctattccaggaatttctgatgcaattgaggggacaatacgtgatactattgaggatacactgacatggccgaatcgcataattgttcccattgtacctggagactatagtgacttggagttgaaacctactggggtattagaagtaaaactggtggaagctagggacctaaagaacaaggatcttgtgggaaagtcggacccttttgcattgatatacatacgtccattgcatgataaaacaaagaaaagcaaaacaattaacaatgatttgaatcccatctggaatgagcactatgaatttgtggttgaggacatatctacgcagcacttgactgtaaaaatttatgatgatgaaggactccaatcatcagagatcattggctgtgctcgagtagacttagctgatatacagccaggaaaagtgaaggatttatggttagatcttgtgaaggacctggaaattcaacgagacaagaaacctcgtggtcaggttcacctggagctcctctactacccttacgctaagcatgaaggggttcctaatccttttgctaatcagattcaactaacttcattggagaaggttctcaaaaccgagtctaatggatatgatattaatcagaggaaaaatgttattatgagaggagtcctttcggtgacggtcatatctgcagaggagttgccacctatggacattggtggcaaggctgacccatttgtggtcctgtacttaaagaagggagaaaccaaaaagaagacaagggttgtgacagacacgctaaatccaatatggaaccagacatttgatttcatggtagaagatgcactgcatgatttgctcatggtggaagtatgggaccatgatacatttggaaaggattacatagggaggtgcatcttgacactgacgagagttatactcgaaggtgaattccaagatacctttgtcttgcaaggtgccaaatcgggaaaactaaacttgcatttcaagtggacgccacagccaatctatcgtgatcgtgacagggatcagtgagacttgtaaacgaaaaaggccgataaacacttatccccaacgatgctatgtatattatccgttctgtatttacacaaatcccacggttcttgtagccacgtgaccaaaaagagatcaacccaccgacctgtattttctc

SEQ ID NO: 19353 - protein, 562 aa, Zea mays subsp. mays
  misc_feature (1)..(562): Ceres Seq. ID no. 12372815
MAFLFGAFLGLVVGVAVVMAFARFENSRAEQRRELAATAAAFSKLTVQDLRKLIPPEFYPSWVSFTQKQKLKWLNQELTKIWPFVNEAASELIKTSVEPIFEQYKSFILASLHFSKLTLGTVAPQFTGVSILESDDSAIIMELELQWDGNPNIVLDIQTTLGISLPVQVKNIGFTGVLRLIFKPLVSEFPCFGAVCCSLREKSKVEFTLKVIGGEMTAIPGISDAIEGTIRDTIEDTLTWPNRIIVPIVPGDYSDLELKPTGVLEVKLVEARDLKNKDLVGKSDPFALIYIRPLHDKTKKSKTINNDLNPIWNEHYEFVVEDISTQHLTVKIYDDEGLQSSEIIGCARVDLADIQPGKVKDLWLDLVKDLEIQRDKKPRGQVHLELLYYPYAKHEGVPNPFANQIQLTSLEKVLKTESNGYDINQRKNVIMRGVLSVTVISAEELPPMDIGGKADPFVVLYLKKGETKKKTRVVTDTLNPIWNQTFDFMVEDALHDLLMVEVWDHDTFGKDYIGRCILTLTRVILEGEFQDTFVLQGAKSGKLNLHFKWTPQPIYRDRDRDQ

SEQ ID NO: 19354 - protein, 544 aa, Zea mays subsp. mays
  misc_feature (1)..(544): Ceres Seq. ID no. 12372816
MAFARFENSRAEQRRELAATAAAFSKLTVQDLRKLIPPEFYPSWVSFTQKQKLKWLNQELTKIWPFVNEAASELIKTSVEPIFEQYKSFILASLHFSKLTLGTVAPQFTGVSILESDDSAIIMELELQWDGNPNIVLDIQTTLGISLPVQVKNIGFTGVLRLIFKPLVSEFPCFGAVCCSLREKSKVEFTLKVIGGEMTAIPGISDAIEGTIRDTIEDTLTWPNRIIVPIVPGDYSDLELKPTGVLEVKLVEARDLKNKDLVGKSDPFALIYIRPLHDKTKKSKTINNDLNPIWNEHYEFVVEDISTQHLTVKIYDDEGLQSSEIIGCARVDLADIQPGKVKDLWLDLVKDLEIQRDKKPRGQVHLELLYYPYAKHEGVPNPFANQIQLTSLEKVLKTESNGYDINQRKNVIMRGVLSVTVISAEELPPMDIGGKADPFVVLYLKKGETKKKTRVVTDTLNPIWNQTFDFMVEDALHDLLMVEVWDHDTFGKDYIGRCILTLTRVILEGEFQDTFVLQGAKSGKLNLHFKWTPQPIYRDRDRDQ

SEQ ID NO: 19355 - protein, 422 aa, Zea mays subsp. mays
  misc_feature (1)..(422): Ceres Seq. ID no. 12372817
MELELQWDGNPNIVLDIQTTLGISLPVQVKNIGFTGVLRLIFKPLVSEFPCFGAVCCSLREKSKVEFTLKVIGGEMTAIPGISDAIEGTIRDTIEDTLTWPNRIIVPIVPGDYSDLELKPTGVLEVKLVEARDLKNKDLVGKSDPFALIYIRPLHDKTKKSKTINNDLNPIWNEHYEFVVEDISTQHLTVKIYDDEGLQSSEIIGCARVDLADIQPGKVKDLWLDLVKDLEIQRDKKPRGQVHLELLYYPYAKHEGVPNPFANQIQLTSLEKVLKTESNGYDINQRKNVIMRGVLSVTVISAEELPPMDIGGKADPFVVLYLKKGETKKKTRVVTDTLNPIWNQTFDFMVEDALHDLLMVEVWDHDTFGKDYIGRCILTLTRVILEGEFQDTFVLQGAKSGKLNLHFKWTPQPIYRDRDRDQ

SEQ ID NO: 19356 - DNA, 1370 bp, Zea mays subsp. mays
  misc_feature (1)..(1370): Ceres Seq. ID no. 12372818
atattgtaatgaacactcccttacgtgcagtgccgcgagctgacctccacgaggaccgaaacaattatcgccagattggccgcttcacctcgacagccacgccaccaccactgcgggtctgcggcagtcggcacatggagctcctgcgggacagcatctccatggtgtccctggctgtcctggtgaccgcggtgtgcgcgcgcgccgcgtcctcgtggctccgccccggtctccctcgcctggcgtcgttgctcccgatggtcgcctttcttgccgcggctcccctggctttctcctctgcaatcatccggggacttgcaggcttcttcctcgggtggctcggcgtgttcaaggtcgtcctcctggccgtcggccgcggcccgcttgaccccgccctccccgttctcccgttcgtcttcaccacagcgcttcccgttaagctcagatgcagcagcaccggcgctgcagcagcgtgcagggccaaatcggtctccctcgtctcgtgcgcggtcaaggtcgcggtcatagccgccatcctccatgtgtaccagtacacggaccagctgcatctctacactcgcctcgctctgtacagcgtccacatctactgcttcttggacttcctcctcccgtgcatcgcggcggctggcggcgccctcggcatggatatggagccgcagttcgacaagccgtacctggcgtcgtccctacgcgacttctggggccggcggtggaacctcgtggtgtcggacatcctccggccgtctgtctacggccccgtgcgcgcgcgcgccgggaaggcaccggccgtcctggccacgttcctcgtgtccgggctgatgcacgaggtcatgatttactacctcaccctgcgatcacccaccggtgagatgacggccttcttcctgctccatggcgtctgctgtattgccgaggagtcgtgcgcgcggcggtggatgcagtggggttggaggccgccgccgcgacccgtggctacgctgctcgtggtggtgttcgtggccggcaccgcattctggctcttcttcccgcaaatttgcagggaaggaatggaggagttactgctcgaggagtgggcagcggtaggggcgttcttcaacgacgccgcccgaaagctgctccagatgttcacgtgaagacttgaaagtcggcagtcggcaccagcagactcgttccaatcctctagagataattagtagctatggttttagctgtgttcacagagctaacaacaatagcaatagctatttgagaaacatatagtgtgtttggtttgagaaacgaagtggtgtatctctttctcacttttcacttttttatttggtttgtgaattttatttggtttgtgaaat

SEQ ID NO: 19357 - protein, 383 aa, Zea mays subsp. mays
  misc_feature (1)..(383): Ceres Seq. ID no. 12372819
IVMNTPLRAVPRADLHEDRNNYRQIGRFTSTATPPPLRVCGSRHMELLRDSISMVSLAVLVTAVCARAASSWLRPGLPRLASLLPMVAFLAAAPLAFSSAIIRGLAGFFLGWLGVFKVVLLAVGRGPLDPALPVLPFVFTTALPVKLRCSSTGAAAACRAKSVSLVSCAVKVAVIAAILHVYQYTDQLHLYTRLALYSVHIYCFLDFLLPCIAAAGGALGMDMEPQFDKPYLASSLRDFWGRRWNLVVSDILRPSVYGPVRARAGKAPAVLATFLVSGLMHEVMIYYLTLRSPTGEMTAFFLLHGVCCIAEESCARRWMQWGWRPPPRPVATLLVVVFVAGTAFWLFFPQICREGMEELLLEEWAAVGAFFNDAARKLLQMFT

SEQ ID NO: 19358 - protein, 381 aa, Zea mays subsp. mays
  misc_feature (1)..(381): Ceres Seq. ID no. 12372820
MNTPLRAVPRADLHEDRNNYRQIGRFTSTATPPPLRVCGSRHMELLRDSISMVSLAVLVTAVCARAASSWLRPGLPRLASLLPMVAFLAAAPLAFSSAIIRGLAGFFLGWLGVFKVVLLAVGRGPLDPALPVLPFVFTTALPVKLRCSSTGAAAACRAKSVSLVSCAVKVAVIAAILHVYQYTDQLHLYTRLALYSVHIYCFLDFLLPCIAAAGGALGMDMEPQFDKPYLASSLRDFWGRRWNLVVSDILRPSVYGPVRARAGKAPAVLATFLVSGLMHEVMIYYLTLRSPTGEMTAFFLLHGVCCIAEESCARRWMQWGWRPPPRPVATLLVVVFVAGTAFWLFFPQICREGMEELLLEEWAAVGAFFNDAARKLLQMFT

SEQ ID NO: 19359 - protein, 339 aa, Zea mays subsp. mays
  misc_feature (1)..(339): Ceres Seq. ID no. 12372821
MELLRDSISMVSLAVLVTAVCARAASSWLRPGLPRLASLLPMVAFLAAAPLAFSSAIIRGLAGFFLGWLGVFKVVLLAVGRGPLDPALPVLPFVFTTALPVKLRCSSTGAAAACRAKSVSLVSCAVKVAVIAAILHVYQYTDQLHLYTRLALYSVHIYCFLDFLLPCIAAAGGALGMDMEPQFDKPYLASSLRDFWGRRWNLVVSDILRPSVYGPVRARAGKAPAVLATFLVSGLMHEVMIYYLTLRSPTGEMTAFFLLHGVCCIAEESCARRWMQWGWRPPPRPVATLLVVVFVAGTAFWLFFPQICREGMEELLLEEWAAVGAFFNDAARKLLQMFT

SEQ ID NO: 19360 - DNA, 1274 bp, Zea mays subsp. mays
  misc_feature (1)..(1274): Ceres Seq. ID no. 12372822
ccaaccaaacttccggtcttctcttctccactacccacccgcctgcccgcccgccttctcctccaccactgccccgccgctaaccaaccactcgtgcgccacaagtctcccgtcgtggaatagggcaaaggccaggcatctcgcttctgtcctctgtcgaggggatcggacccgatcggagaaagaatgggctcggaggcggactgcgacaggatcaggggcccgtggagccccgaggaggacgacgcgctgcggcggctcgtggagcggcacggcgcgcgcaactggacggcgatcgggcgcgagatcccggggcggtcgggcaagtcgtgccgcctgcggtggtgcaaccagctgtcgccgcaggtggagcgccggcccttcacggcggaggaggacgcggccatcgtccgcgcccacgcccgcctcggcaaccgctgggccgccatcgcgcgcctcctccccggccgcaccgacaacgccgtcaagaaccactggaactgctcgctcaagcgcaagctcgccgccgcgtccgccccggcgggttcctccgacgtcgaggcgcgcccgaccaagcgcgtcagcctctcgcccgacagcccgtcggggtcggggtcggggtcagggtcagggtccgggtccgggtccgggtccgaccgtagcgacctgagccacggcgccggccaggtttaccgcccagtggcgcggtccggcgggttcgagccggcggactgcgcgatgagccgtccgctggaggaagaggaggaggaaaaggaggacccgctcacctccctcagcctctcgcttccaggcacggaccagcggttccaccacgaccgcgcccacagccagttccaggagctcccggcgtcgccgccctcgccctccccgcctccgccgccggttctctcggcgtacccgttcagccccgtgttcatggaggcgatgcaggagctgatccgcacggaggtgcagcggtacatggcgagcgtgggcgtgcgcgccgggtgcggcgccgccggcggggccgacctctgcatgccgcaactggtcgacggcgtcatgcgcgccgccgccgagcgggtcggccggatgcagtagcagtagctcctgccatcaaatgctcccgaaccgtcaatcgatcttctaggacgaacgcgcagcagctgttgttatcagtagcaaacttccaagttattattttcctttttttaaaactttattctctcgaaccgctgtgaaaccgaaacagcagtgaaaagagtcagcaactg

SEQ ID NO: 19361 - protein, 304 aa, Zea mays subsp. mays
  misc_feature (1)..(304): Ceres Seq. ID no. 12372823
MGSEADCDRIRGPWSPEEDDALRRLVERHGARNWTAIGREIPGRSGKSCRLRWCNQLSPQVERRPFTAEEDAAIVRAHARLGNRWAAIARLLPGRTDNAVKNHWNCSLKRKLAAASAPAGSSDVEARPTKRVSLSPDSPSGSGSGSGSGSGSGSGSDRSDLSHGAGQVYRPVARSGGFEPADCAMSRPLEEEEEEKEDPLTSLSLSLPGTDQRFHHDRAHSQFQELPASPPSPSPPPPPVLSAYPFSPVFMEAMQELIRTEVQRYMASVGVRAGCGAAGGADLCMPQLVDGVMRAAAERVGRMQ

SEQ ID NO: 19362 - protein, 222 aa, Zea mays subsp. mays
  misc_feature (1)..(222): Ceres Seq. ID no. 12372824
QPNFRSSLLHYPPACPPAFSSTTAPPLTNHSCATSLPSWNRAKARHLASVLCRGDRTRSEKEWARRRTATGSGARGAPRRTTRCGGSWSGTARATGRRSGARSRGGRASRAACGGATSCRRRWSAGPSRRRRTRPSSAPTPASATAGPPSRASSPAAPTTPSRTTGTARSSASSPPRPPRRVPPTSRRARPSASASRPTARRGRGRGQGQGPGPGPGPTVAT

SEQ ID NO: 19363 - DNA, 2084 bp, Zea mays subsp. mays
  misc_feature (1)..(2084): Ceres Seq. ID no. 12372847
actcgcacggacgagcgaggcagccccgcaggtcgcagccacaacccaagcgcagcgatctgcctccgctccggctcagctcccgccctgcctccgccttccattccgccgcgcggcgctgccgagtgccgacgtcgtccccgccggagtttctggtttctgggttggatctctcggagtcggagcgagcgaggatgggcggcggcaacggtgaaaccacccagctgggggagccactgctggcgaagaaggcgaaggcgtaccgccctaggtgccccggctgccgggtggaccgcctcaacgcggagcgggagggggtcttccctctcaaggacctcttcctcatctggctcgtcaccatcacctgcaccctgccgatccagtctctgttccccttcttgtatttcatgataagggatctgcatattgctaaacaaacacaagacattggattttatgctggttttgttggcgcttcatatatgtgtgggagggcagtctcctcaacagtatggggaatcgtggctgataagtatggaaggaaaccagttatcgtactgacccttattgcaatagttatcttcaatactatgtttggactaagctcaaactattggatggcattaatcacacgatgcctgcttggaatcatgtgtggttatctcgggccaattaaggcttatgctacagaagtgtgccgaaaagaatacaatcatctggctttggcagttgtttcttcctcacgaggcattggtctcattattggtccagctcttggtggttatcttgcgcagcctgcagataaatatccaagtatattctctcagacgtccatatttgggaggtttccatactttcttccgtgcctgtgtatatcaatccttgcagttattgctctaattgcctgcatctggtttccggaaactttgcataaacacaatggggatgccgttgataattccgttgaaacagtagaagaatctcttgctggcaccgacactgaagaaaatggaggtggcggatgtctaaaattatttacaaactggccgttgatgtcagctattactttatattgtatcttctctcttcaggatgtggcttatgcagagacattctctctttgggctgtcagtgacagatcgtttggtggattaagctttactaccacagatgtgggcaatgtccttgcgatgtcaggtctcttcctttttctatatcaaatgttgatctatccgttccttgccaaaacggtagaccacatcacattagtccgtgcagtggcgttattgactctaccggttcttgctagctacccattctttccttcgttgtccgggttcgggctcatggtggtagtaaattgtgcatcttttctgaagaatacattctcggtaactaccattaccgtgttcaacattttgatgaatgaagctgtgactcaggatgtaagagccgcagccaatgggatagctgtaacactaatgtccatctctaaagcggttgctccagctgttgcaggaatcatattttcgtgggcccagaggcgtcaaacagctgcatttcttccaggcgaccacttggtgttcttcatactgaacatcttcacgttcatcggtttcgtcttcaccttcagaccgtttttcgttcgaggcagtgccaagcactgaaacatggatgaagcggacgacgacccatgggtatcctatccaggggcaatcgaatatagattttcttgtggcgtggccaagggcggtgccgagcctgtaccagtacgacgactcaggccagaacacacggcgtatggtatggtacacagcaaggccgtgttgttgctgtaagttttgtaatttctgtttccttcttctcggcttcgcagcatgcagttgctgtatatgatggaagaacactctgttactgggcatgttgcgcggtttccacgcgtgtaagtaatgtagaagtcgctatggtaggtatttccataccgtcattagtggatcattgaatttttttgtaagaaggttattgcaatgccctttttccgggcatgaataagaaaaaggaaatatgcttatatgcatggtatt

SEQ ID NO: 19364 - protein, 554 aa, Zea mays subsp. mays
  misc_feature (1)..(554): Ceres Seq. ID no. 12372848
SHGRARQPRRSQPQPKRSDLPPLRLSSRPASAFHSAARRCRVPTSSPPEFLVSGLDLSESERARMGGGNGETTQLGEPLLAKKAKAYRPRCPGCRVDRLNAEREGVFPLKDLFLIWLVTITCTLPIQSLFPFLYFMIRDLHIAKQTQDIGFYAGFVGASYMCGRAVSSTVWGIVADKYGRKPVIVLTLIAIVIFNTMFGLSSNYWMALITRCLLGIMCGYLGPIKAYATEVCRKEYNHLALAVVSSSRGIGLIIGPALGGYLAQPADKYPSIFSQTSIFGRFPYFLPCLCISILAVIALIACIWFPETLHKHNGDAVDNSVETVEESLAGTDTEENGGGGCLKLFTNWPLMSAITLYCIFSLQDVAYAETFSLWAVSDRSFGGLSFTTTDVGNVLAMSGLFLFLYQMLIYPFLAKTVDHITLVRAVALLTLPVLASYPFFPSLSGFGLMVVVNCASFLKNTFSVTTITVFNILMNEAVTQDVRAAANGIAVTLMSISKAVAPAVAGIIFSWAQRRQTAAFLPGDHLVFFILNIFTFIGFVFTFRPFFVRGSAKH

SEQ ID NO: 19365 - protein, 490 aa, Zea mays subsp. mays
  misc_feature (1)..(490): Ceres Seq. ID no. 12372849
MGGGNGETTQLGEPLLAKKAKAYRPRCPGCRVDRLNAEREGVFPLKDLFLIWLVTITCTLPIQSLFPFLYFMIRDLHIAKQTQDIGFYAGFVGASYMCGRAVSSTVWGIVADKYGRKPVIVLTLIAIVIFNTMFGLSSNYWMALITRCLLGIMCGYLGPIKAYATEVCRKEYNHLALAVVSSSRGIGLIIGPALGGYLAQPADKYPSIFSQTSIFGRFPYFLPCLCISILAVIALIACIWFPETLHKHNGDAVDNSVETVEESLAGTDTEENGGGGCLKLFTNWPLMSAITLYCIFSLQDVAYAETFSLWAVSDRSFGGLSFTTTDVGNVLAMSGLFLFLYQMLIYPFLAKTVDHITLVRAVALLTLPVLASYPFFPSLSGFGLMVVVNCASFLKNTFSVTTITVFNILMNEAVTQDVRAAANGIAVTLMSISKAVAPAVAGIIFSWAQRRQTAAFLPGDHLVFFILNIFTFIGFVFTFRPFFVRGSAKH

SEQ ID NO: 19366 - protein, 419 aa, Zea mays subsp. mays
  misc_feature (1)..(419): Ceres Seq. ID no. 12372850
MIRDLHIAKQTQDIGFYAGFVGASYMCGRAVSSTVWGIVADKYGRKPVIVLTLIAIVIFNTMFGLSSNYWMALITRCLLGIMCGYLGPIKAYATEVCRKEYNHLALAVVSSSRGIGLIIGPALGGYLAQPADKYPSIFSQTSIFGRFPYFLPCLCISILAVIALIACIWFPETLHKHNGDAVDNSVETVEESLAGTDTEENGGGGCLKLFTNWPLMSAITLYCIFSLQDVAYAETFSLWAVSDRSFGGLSFTTTDVGNVLAMSGLFLFLYQMLIYPFLAKTVDHITLVRAVALLTLPVLASYPFFPSLSGFGLMVVVNCASFLKNTFSVTTITVFNILMNEAVTQDVRAAANGIAVTLMSISKAVAPAVAGIIFSWAQRRQTAAFLPGDHLVFFILNIFTFIGFVFTFRPFFVRGSAKH

SEQ ID NO: 19367 - DNA, 1838 bp, Zea mays subsp. mays
  misc_feature (1)..(1838): Ceres Seq. ID no. 12372855
accaacccgacgcaaagccgccggctttccccgatggcgacgacgatgtcagtttcggcggtgtccccgcccgccgcggctgtcacgcggccgcggacgatggtctgcgtgccggcgacggcgcgggcgccgcgggagatggcggcggagctggccgccgccgccgcgctcggcgccgacgtggcggagcttcgcctcgactgcctcgccgggttcacgccgcgcagggacctgcccgtcatcctcgccaagccccgcccgctccccgctctcgtcacctacaggcccaagtgggaaggaggcgaatacgaaggcgatgacgattcacggtttgaggctctgctattagcaatggagctgggagctgaatatgtggatgtcgagcttaaggtggctgacaaatttatgaaacttatttctgggaggaaacctgataactgtaaacttatagtttcatcccacaactatgagaccactccatcgtccgaggaacttgcaaatttggtggctcagattcaagcaacgggggctgatatcgtgaaaatagctacaaccgctactgaaattgttgatgtggcaaaaatgtttcaaatacttgttcactgccaggtgccaatcattgggctgctgatgaacgacagaggttttatttctcgggttctttgcccaaaatatggtggattccttacttttgggtcactcaagaaaggaaaagagtctgcacctgcacagccaactgctgcagacttgataaatctgtacaatattaggcagatagggccagacactaaggtctttggtataattggtaaaccagttggccatagcaaaagcccaattttgcataatgaagctttcagatcagtgggtttcaacgctgtgtatgttccatttttggtggatgacttggctaaatttcttgatacatactcttcaccagactttgctggcttcagttgcacaattccacacaaagaagctgctgttaggtgctgtgacgaggtcgatcccattgccagggacattggagctgttaacacaattgttagaagacctgatggaaagcttgttggctataatactgactatgttggtgctatatctgctattgaggatggaataaaagcatcagaatcagaaccaacagatccagacaaatcaccactggctggaaggctttttgttgttataggggctggtggtgcgggaaaagcactagcatatggggcaaaagagaaaggagcaagagttgtaattgcaaaccgtacctttgcacgagcacaagaacttgccaacttaattggtgggcctgcattgactcttgcggatttggaaaactaccatccagaggaagggatgattcttgcaaatacaacagccattggaatgcatccaaatgtgaatgaaactcctctatctaagcaagcactcagatcttatgctgttgtgtttgatgcggtctacacaccaaaagagaccagacttctccgagaagctgcagaatgtggagccacagttgttagtggtctggagatgtttatacggcaagctatgggccagtttgagcatttcacgggcatgccagtggatgattacaaattccgagcaattgcaagttcattggacaatcctaacaccatgaagcctcgtctgtgagagattcatccatgcccacaaacttccttgtttttcctttttagattcggattcagtgatcagtttgcctctcagccattgtaaattaatttgatgttccgagctgaaacattttggtgtgccttatttgtatcagcatgaacagcagtgggtttgaatcagtctcttcatatttgcgttcc

SEQ ID NO: 19368 - protein, 551 aa, Zea mays subsp. mays
  misc_feature (1)..(551): Ceres Seq. ID no. 12372856
TNPTQSRRLSPMATTMSVSAVSPPAAAVTRPRTMVCVPATARAPREMAAELAAAAALGADVAELRLDCLAGFTPRRDLPVILAKPRPLPALVTYRPKWEGGEYEGDDDSRFEALLLAMELGAEYVDVELKVADKFMKLISGRKPDNCKLIVSSHNYETTPSSEELANLVAQIQATGADIVKIATTATEIVDVAKMFQILVHCQVPIIGLLMNDRGFISRVLCPKYGGFLTFGSLKKGKESAPAQPTAADLINLYNIRQIGPDTKVFGIIGKPVGHSKSPILHNEAFRSVGFNAVYVPFLVDDLAKFLDTYSSPDFAGFSCTIPHKEAAVRCCDEVDPIARDIGAVNTIVRRPDGKLVGYNTDYVGAISAIEDGIKASESEPTDPDKSPLAGRLFVVIGAGGAGKALAYGAKEKGARVVIANRTFARAQELANLIGGPALTLADLENYHPEEGMILANTTAIGMHPNVNETPLSKQALRSYAVVFDAVYTPKETRLLREAAECGATVVSGLEMFIRQAMGQFEHFTGMPVDDYKFRAIASSLDNPNTMKPRL

SEQ ID NO: 19369 - protein, 540 aa, Zea mays subsp. mays
  misc_feature (1)..(540): Ceres Seq. ID no. 12372857
MATTMSVSAVSPPAAAVTRPRTMVCVPATARAPREMAAELAAAAALGADVAELRLDCLAGFTPRRDLPVILAKPRPLPALVTYRPKWEGGEYEGDDDSRFEALLLAMELGAEYVDVELKVADKFMKLISGRKPDNCKLIVSSHNYETTPSSEELANLVAQIQATGADIVKIATTATEIVDVAKMFQILVHCQVPIIGLLMNDRGFISRVLCPKYGGFLTFGSLKKGKESAPAQPTAADLINLYNIRQIGPDTKVFGIIGKPVGHSKSPILHNEAFRSVGFNAVYVPFLVDDLAKFLDTYSSPDFAGFSCTIPHKEAAVRCCDEVDPIARDIGAVNTIVRRPDGKLVGYNTDYVGAISAIEDGIKASESEPTDPDKSPLAGRLFVVIGAGGAGKALAYGAKEKGARVVIANRTFARAQELANLIGGPALTLADLENYHPEEGMILANTTAIGMHPNVNETPLSKQALRSYAVVFDAVYTPKETRLLREAAECGATVVSGLEMFIRQAMGQFEHFTGMPVDDYKFRAIASSLDNPNTMKPRL

SEQ ID NO: 19370 - protein, 536 aa, Zea mays subsp. mays
  misc_feature (1)..(536): Ceres Seq. ID no. 12372858
MSVSAVSPPAAAVTRPRTMVCVPATARAPREMAAELAAAAALGADVAELRLDCLAGFTPRRDLPVILAKPRPLPALVTYRPKWEGGEYEGDDDSRFEALLLAMELGAEYVDVELKVADKFMKLISGRKPDNCKLIVSSHNYETTPSSEELANLVAQIQATGADIVKIATTATEIVDVAKMFQILVHCQVPIIGLLMNDRGFISRVLCPKYGGFLTFGSLKKGKESAPAQPTAADLINLYNIRQIGPDTKVFGIIGKPVGHSKSPILHNEAFRSVGFNAVYVPFLVDDLAKFLDTYSSPDFAGFSCTIPHKEAAVRCCDEVDPIARDIGAVNTIVRRPDGKLVGYNTDYVGAISAIEDGIKASESEPTDPDKSPLAGRLFVVIGAGGAGKALAYGAKEKGARVVIANRTFARAQELANLIGGPALTLADLENYHPEEGMILANTTAIGMHPNVNETPLSKQALRSYAVVFDAVYTPKETRLLREAAECGATVVSGLEMFIRQAMGQFEHFTGMPVDDYKFRAIASSLDNPNTMKPRL

SEQ ID NO: 19371 - DNA, 1649 bp, Zea mays subsp. mays
  misc_feature (1)..(1649): Ceres Seq. ID no. 12372859
tagttcatttatgatttcctgcgagcacaaagctagcgaagataccaaacaatggggagcacgagcgccacaggcaccacgtcgtcttcctcatcggctgcccacgggggcggtgccgcacacgtactgctcctgccgtacccgggcgcgcagggccatacaaacccgctgctccagttcggccgctgcctcgcctaccacggcctccgccccacgctcgtcacctcgcggtacgtgctctccaccaccccgcctcccggggagcccttcagggtggccgccatttccgatggcttcgacgacggcggggcggccgcgtgccccgacctcgacgtgtactggcgccagctcgaggccgtcggctcggagacgctggcggagctgatccgctccgaggccgccgatgggcggcctgtgcgcgtgctggtttacgacccgcacctgccgtgggcgcgacgggtggcacaggcggccgggctggcggcagcggcgttcctatcgcagccatgcgccgtcgacgtcgtctacggggaggtgtgtgcaggacggctgccactgccggtggtggacgggaaagagctgtttgcacgcgggctgctgggtgtcgagctcggtcccgacgacgttccgccgttcgcagcaaagccagactggtgccctgtgttccttcgggcatcactgcggcaatttgaggggctggaggacgccgacgacgtgctcgtcaactcattccacgagatcgaacccaaggaggcagattatatggccctaacatggcatgcaaagacaataggcccaactttgccatcattttatcttgatgatgaccgtttgcccttgaacaagacttacggtttcaacctcttcaacagcagcgagtcatgtctggcttggcttgacaaacagcttccgtgttctgttgttcttgtatcctatggtactgtctctgattatgatgaagcacagttagaggagcttggcaatggattgtacaattctggcaaaccattcatttgggttgtgaggtcaaacgaagaacacaagttgtccaatgaacttcgtgacaagtgcaaggaacgtggccttattgtttcttggtgcccccagctggaagttctagcacataaagctacaggttgtttcttcacacattgcggatggaactcgacattggaagcaattgttaatggtgtgccaatggtggcaataccacactgggcagaccagccgaccatatcaaaatatatggagagcatgtggggcttgggtgtccgagtgcgcaaggatgagaaaggcttggtaacgagggacgaggtggaaaggtgcatcaaggatgtcatggatggtgatagtaaggataagtataggaagagtgccactatgtggatgcaaaaggccaaggcagctatgcagaatggagggagctcggccaagaatattacagaattcgccgcgaagtattctttaagttaatttttcaaatatttcgtaaaaaaagttaattttcaaagatataatgatagtgttataattacttcctataccttcatggattgtatgccttcctgcatgttatatttttgtctcgggattgtgcgtattacgttttgacttgatgatgtacatgctacagcagcaacctccacgtc

SEQ ID NO: 19372 - protein, 473 aa, Zea mays subsp. mays
  misc_feature (1)..(473): Ceres Seq. ID no. 12372860
MGSTSATGTTSSSSSAAHGGGAAHVLLLPYPGAQGHTNPLLQFGRCLAYHGLRPTLVTSRYVLSTTPPPGEPFRVAAISDGFDDGGAAACPDLDVYWRQLEAVGSETLAELIRSEAADGRPVRVLVYDPHLPWARRVAQAAGLAAAAFLSQPCAVDVVYGEVCAGRLPLPVVDGKELFARGLLGVELGPDDVPPFAAKPDWCPVFLRASLRQFEGLEDADDVLVNSFHEIEPKEADYMALTWHAKTIGPTLPSFYLDDDRLPLNKTYGFNLFNSSESCLAWLDKQLPCSVVLVSYGTVSDYDEAQLEELGNGLYNSGKPFIWVVRSNEEHKLSNELRDKCKERGLIVSWCPQLEVLAHKATGCFFTHCGWNSTLEAIVNGVPMVAIPHWADQPTISKYMESMWGLGVRVRKDEKGLVTRDEVERCIKDVMDGDSKDKYRKSATMWMQKAKAAMQNGGSSAKNITEFAAKYSLS

SEQ ID NO: 19373 - protein, 236 aa, Zea mays subsp. mays
  misc_feature (1)..(236): Ceres Seq. ID no. 12372861
MALTWHAKTIGPTLPSFYLDDDRLPLNKTYGFNLFNSSESCLAWLDKQLPCSVVLVSYGTVSDYDEAQLEELGNGLYNSGKPFIWVVRSNEEHKLSNELRDKCKERGLIVSWCPQLEVLAHKATGCFFTHCGWNSTLEAIVNGVPMVAIPHWADQPTISKYMESMWGLGVRVRKDEKGLVTRDEVERCIKDVMDGDSKDKYRKSATMWMQKAKAAMQNGGSSAKNITEFAAKYSLS

SEQ ID NO: 19374 - DNA, 1990 bp, Zea mays subsp. mays
  misc_feature (1)..(1990): Ceres Seq. ID no. 12372870
gttccaggtcgtggtctttgccaaattcccacgcccctgcccaccctgcccgaatcctctcgccctttacccccgcccgcgaccccattcacactctcgctgctccactccgctccgctcagctcgtcgggacgcgcccccgcctcccatcccatgcccgcccccgcgctcgtcggaggccgctcgcggcggcctcccatcccgccgcgctgacgagagggcctctcggtgggggcgcttcgggtgttcattttgtccgttcggggaaggggagtgcggcgatggggaagcagcaggaggggaagcggcggcgcggggagaaggacgggcagcggaaggggagggggaagacagctgcagcggcggtgccggaggacgcggcgccagtggccgggtgctggatccgcttcccgcgcctccgcggctgcatgccgtcgcgcgccaaggtcgactcctccaccagcgcgcgtggcggcggccgggaaaccaaaccatctactgatgatgcttgccaggaccaatcagtaccaccagcctctggttccgcaacaaccagtaacactggaagtatctcaccttcttccatagttggagaggagctaaaactagctttccaactgcgtagatttacttttagtgaactgaaatgtgccacgagaaacttccgacctgagagtcttcttggcgagggaggttttggctgtgtctttaaaggatggattgaggagaatggaactgctcctgttaagccaggcaccggattaactgttgctgtcaagacactcaaccatgatgggttgcaggggcataaagagtgggtggcagaagttgattttcttggaaaccttcagcatccacatctagtgaaattggttggctactgcattgaagatgaccagaggttgcttgtgtatgaatttatgccccgtggaagtttggagaatcatctttttagaaagtcattgcctctaccatgggccattagaatgaaaattgctcttggtgctgcgaaaagcctcgcttttcttcatgaagaagctgaaagaccagtaatctatcgggacttcaaaacctccaatattcttttagatgcggactataacgcaaaactctctgattttggacttgctaaagatggccctgagggtgataaaacacatgtgtcaactagggtcatgggaacatatggatatgctgcacctgaatatgtaatgacaggtcacctgacatcgaagagtgacgtatatagctttggagttgtactactagagatgatgactggtagaaggtcaatggacaagaacaggccaaacggagaacacaacctggttgaatgggcacgcccttatctgggagaaagacgcagattctataagcttgtagaccctcgtttggatgggaacttctccataaaaggcgcccagaagacggctcagctggcccatgcctgcctcagccgtgaccccaaggctaggcctctgatgagccaggtggtggaggtgctgaagcctctccagaacctcaaggacatggccagctcttcctactacttccagtccatgcaacatgagcggcgcacagcacttgccaacccatatggcagtcaaagcatgaaagcgcagagcacctttgcgcggaacgggcagcagcccatgaggagcctctcgtatggccctcatgcttccccgtatcgccagtcgccaaggcttgacagcaagcggcaatgagtcatggtgcttgtctgtcgaccataacatattttcaagactgaagttgtaaccagaactggtgtatgaactcagccatccaacaagcatctgagctatctattattgtggatgaagcagcaacattgattcgaatttgcatatcatctgcgagtgaatttttttctctcttgttatcgcttacattttagctgtactgtctttacggctctagataccttgacttgaaaggtggaactaaacagggttttgatcggtctttg

SEQ ID NO: 19375 - protein, 574 aa, Zea mays subsp. mays
  misc_feature (1)..(574): Ceres Seq. ID no. 12372871
SRSWSLPNSHAPAHPARILSPFTPARDPIHTLAAPLRSAQLVGTRPRLPSHARPRARRRPLAAASHPAALTRGPLGGGASGVHFVRSGKGSAAMGKQQEGKRRRGEKDGQRKGRGKTAAAAVPEDAAPVAGCWIRFPRLRGCMPSRAKVDSSTSARGGGRETKPSTDDACQDQSVPPASGSATTSNTGSISPSSIVGEELKLAFQLRRFTFSELKCATRNFRPESLLGEGGFGCVFKGWIEENGTAPVKPGTGLTVAVKTLNHDGLQGHKEWVAEVDFLGNLQHPHLVKLVGYCIEDDQRLLVYEFMPRGSLENHLFRKSLPLPWAIRMKIALGAAKSLAFLHEEAERPVIYRDFKTSNILLDADYNAKLSDFGLAKDGPEGDKTHVSTRVMGTYGYAAPEYVMTGHLTSKSDVYSFGVVLLEMMTGRRSMDKNRPNGEHNLVEWARPYLGERRRFYKLVDPRLDGNFSIKGAQKTAQLAHACLSRDPKARPLMSQVVEVLKPLQNLKDMASSSYYFQSMQHERRTALANPYGSQSMKAQSTFARNGQQPMRSLSYGPHASPYRQSPRLDSKRQ

SEQ ID NO: 19376 - protein, 481 aa, Zea mays subsp. mays
  misc_feature (1)..(481): Ceres Seq. ID no. 12372872
MGKQQEGKRRRGEKDGQRKGRGKTAAAAVPEDAAPVAGCWIRFPRLRGCMPSRAKVDSSTSARGGGRETKPSTDDACQDQSVPPASGSATTSNTGSISPSSIVGEELKLAFQLRRFTFSELKCATRNFRPESLLGEGGFGCVFKGWIEENGTAPVKPGTGLTVAVKTLNHDGLQGHKEWVAEVDFLGNLQHPHLVKLVGYCIEDDQRLLVYEFMPRGSLENHLFRKSLPLPWAIRMKIALGAAKSLAFLHEEAERPVIYRDFKTSNILLDADYNAKLSDFGLAKDGPEGDKTHVSTRVMGTYGYAAPEYVMTGHLTSKSDVYSFGVVLLEMMTGRRSMDKNRPNGEHNLVEWARPYLGERRRFYKLVDPRLDGNFSIKGAQKTAQLAHACLSRDPKARPLMSQVVEVLKPLQNLKDMASSSYYFQSMQHERRTALANPYGSQSMKAQSTFARNGQQPMRSLSYGPHASPYRQSPRLDSKRQ

SEQ ID NO: 19377 - protein, 432 aa, Zea mays subsp. mays
  misc_feature (1)..(432): Ceres Seq. ID no. 12372873
MPSRAKVDSSTSARGGGRETKPSTDDACQDQSVPPASGSATTSNTGSISPSSIVGEELKLAFQLRRFTFSELKCATRNFRPESLLGEGGFGCVFKGWIEENGTAPVKPGTGLTVAVKTLNHDGLQGHKEWVAEVDFLGNLQHPHLVKLVGYCIEDDQRLLVYEFMPRGSLENHLFRKSLPLPWAIRMKIALGAAKSLAFLHEEAERPVIYRDFKTSNILLDADYNAKLSDFGLAKDGPEGDKTHVSTRVMGTYGYAAPEYVMTGHLTSKSDVYSFGVVLLEMMTGRRSMDKNRPNGEHNLVEWARPYLGERRRFYKLVDPRLDGNFSIKGAQKTAQLAHACLSRDPKARPLMSQVVEVLKPLQNLKDMASSSYYFQSMQHERRTALANPYGSQSMKAQSTFARNGQQPMRSLSYGPHASPYRQSPRLDSKRQ

SEQ ID NO: 19378 - DNA, 1721 bp, Zea mays subsp. mays
  misc_feature (1)..(1721): Ceres Seq. ID no. 12372921
ataattccatagtctaacctgccaaccacttccaccgccaccgccgagcgcggtggcaccgacacgacacacgtagctgcagacctgcagtgccagcacggctgccaatccctgctggcgctgttcccggctccgagatcatttggactcggcactcggcagggatggggatggggacggaatggccgccgacgcctgcgcagcagaggaaagcggtggtgagcgccgggtcggcgctgaagctggtactgttcgtgattctcgcgggcctcgcactgcggctgctggtggggcccccagcctacctcctgccgcccaccgccgcgccagagggggccgctcgtcttttcgcggtgccggagagggaaagaaccgccggcggcggcggcggcggataccttccgtcgaaacggatgatgcggtttttactttgaccgattcagaacctctaacagctttaggcaagaaggaaggttccacaaaaccagaagaaagttgtgatcttttccatggcgagtgggttcccaattcatcaggaccagcttatactaatgcaagctgccgcttcattgagtctcctcagaactgtatgacaaatggaagacctgacacagattatctcaattggagatggaagccatatggttgtgaggtatcaccatttgacggcaagaagtttttggatggcatgaaaggcaagcattgggcactcattggtgattccatccttcgcaaccacgtccagtcattgctttgtcttctttccaaggtcgaagatgctactgaggtttaccacgacgatacattcagatccagaagatggcacttcccttcgtacaattttacgatctcccttgtctgggcaccattcctggtcaaagctaaaatatttgaggacgacgatggagtttctactgctgatctccagctgcaccttgacgttctcgagacagactggactagtcaatgggagaagttcgattacgcggtgatatccacgggccaatggttcttcaagactgcagtgtactgggagaatggagctgcgattggctgccactcctgccagaacaaaaccctggaagagaggcctccggagtactccttccgcagggcactcagggtggccttccagttcatcacatcctcacctcacaagccagtagtcttctacagaacgtgggctccctcgcattttgagaacggcgagtggttcagcggcgggacttgcaacaggacggccccattcaagccaggggaggccggtgacagagaatgggacaatagtatgtggaggattgagagagaagagtttcacaacgcggtgcctatcggtggtgaccgtctgaaactgctcgatacatttgagctctctctcctcaggcctgatggtcatccagggccttatagagcataccatccttacgagaagggcgtgacagccaaagtccagaatgactgcctccactggtgcttgcctgggcctattgatgcgtggaacgatgtaattatgaagatggtggcaaaggactgaagcattatcaggtggtagtgtggtaccctaggcatggcatctgatctgaacaccagtattgtctcaagtctcattttcatacatatgtatgtttctgggcattgcatggcgtctcctctatctggtgtcaagaaactcaagtagattcggacttctcttcatggtgggtatgatttttttttatgtt

SEQ ID NO: 19379 - protein, 450 aa, Zea mays subsp. mays
  misc_feature (1)..(450): Ceres Seq. ID no. 12372922
MAADACAAEESGGERRVGAEAGTVRDSRGPRTAAAGGAPSLPPAAHRRARGGRSSFRGAGEGKNRRRRRRRIPSVETDDAVFTLTDSEPLTALGKKEGSTKPEESCDLFHGEWVPNSSGPAYTNASCRFIESPQNCMTNGRPDTDYLNWRWKPYGCEVSPFDGKKFLDGMKGKHWALIGDSILRNHVQSLLCLLSKVEDATEVYHDDTFRSRRWHFPSYNFTISLVWAPFLVKAKIFEDDDGVSTADLQLHLDVLETDWTSQWEKFDYAVISTGQWFFKTAVYWENGAAIGCHSCQNKTLEERPPEYSFRRALRVAFQFITSSPHKPVVFYRTWAPSHFENGEWFSGGTCNRTAPFKPGEAGDREWDNSMWRIEREEFHNAVPIGGDRLKLLDTFELSLLRPDGHPGPYRAYHPYEKGVTAKVQNDCLHWCLPGPIDAWNDVIMKMVAKD

SEQ ID NO: 19380 - protein, 314 aa, Zea mays subsp. mays
  misc_feature (1)..(314): Ceres Seq. ID no. 12372923
MTNGRPDTDYLNWRWKPYGCEVSPFDGKKFLDGMKGKHWALIGDSILRNHVQSLLCLLSKVEDATEVYHDDTFRSRRWHFPSYNFTISLVWAPFLVKAKIFEDDDGVSTADLQLHLDVLETDWTSQWEKFDYAVISTGQWFFKTAVYWENGAAIGCHSCQNKTLEERPPEYSFRRALRVAFQFITSSPHKPVVFYRTWAPSHFENGEWFSGGTCNRTAPFKPGEAGDREWDNSMWRIEREEFHNAVPIGGDRLKLLDTFELSLLRPDGHPGPYRAYHPYEKGVTAKVQNDCLHWCLPGPIDAWNDVIMKMVAKD

SEQ ID NO: 19381 - protein, 281 aa, Zea mays subsp. mays
  misc_feature (1)..(281): Ceres Seq. ID no. 12372924
MKGKHWALIGDSILRNHVQSLLCLLSKVEDATEVYHDDTFRSRRWHFPSYNFTISLVWAPFLVKAKIFEDDDGVSTADLQLHLDVLETDWTSQWEKFDYAVISTGQWFFKTAVYWENGAAIGCHSCQNKTLEERPPEYSFRRALRVAFQFITSSPHKPVVFYRTWAPSHFENGEWFSGGTCNRTAPFKPGEAGDREWDNSMWRIEREEFHNAVPIGGDRLKLLDTFELSLLRPDGHPGPYRAYHPYEKGVTAKVQNDCLHWCLPGPIDAWNDVIMKMVAKD

SEQ ID NO: 19382 - DNA, 1981 bp, Zea mays subsp. mays
  misc_feature (1)..(1981): Ceres Seq. ID no. 12372957
aaccaactcatgctcgacggaccacctcgtcggagcttcgcatttatcgtgccgtccatgtccatgcaacagccgacgaacgccgcaagccaacttcacgccgcgatggaagcgccattgtcgctctcgtcactgcagctcgccttcacggcggtcgcggcgatcgcggcgctggccgtcgcggtggccgtcacgaggtacaaccggagatacatgggcctgaggctgcctccgggcccgcccgggtggcccgtcgtcggcaacctcttccaggtggcgttctccggcaagctcttcatccactacatccgcgagctccgcaaggagtacggccccatcctgacgctgcgcatgggggagcgcacgctcgtgatcatcagcagcgccgagctcgcgcacgaggcgctggtggagaaagggcgggagttcgcgagccggccccgggagaacaccacgcgcaacatcttctcgtccaacaagctcaccgtgaactccgcggtgtacgggcccgagtggcggtcgctcgccggaacatggtgtccgggatgctgagcacgtcgcggctcagggagttccggcacgcccggaggcgcgccatggaccggttcgtgtcgcggatgcgcgccgaggccgcggcgtcgcccgacggcgcgtccgtctgggtgctccgcaacgcgcggttcgccgtgttctgcatcctgctcgacatgaccttcggcctgctggacctccgcgaggagcacatcgtgcgcatcgacgccgtcatgaagcgcgtgctgctcgccgtcggcgtgcgcatggacgactacctcccgttcctccgcccgttcttctggcggcaccagcgccgtgccctcgccgtccgccgcgagcagatcgacaccctgctcccgctcatcaacaggcggcgcgcaatgcttcgcgacatgcagcagaggcagagctcatcgccgctgcccgaccccagcgtcgcagcgcccttctcgtacctcgactccgtgctcgacctccgcatcgagggccgcgacgacggcgcgctcaccgacgacgagctggtgacgctctgcgcggagctgttgaatggcggcaccgacaccacggccaccgcgatcgagtggggcatggcgcgcatcgtggacagcccgtccatccaggcacggctccacgaggaggtcatgcagcaggtcggcgacgcgcggccggtcgacgacaaggacaccgacgccatgccgtacctccaggccttcgtgaaggagctgctccggaagcacccgcccacgtacttctcgctcacccacgccgctgtgcagccgggatgcaagctcgccggctacgacgtgcccgtggacgcgaacctggacatcttcctcccgaccatctccgaggacccaaagctgtgggaccggccgacggagttcgacccggacaggttcgtgtccggcggcgagacggcggacatgacggggtcagcggggatccggatgatcccgttcggcgcggggcggaggatctgccctgggcttgccatggggacgacgcacatcgccctgatggtggcgcggatggtgcaggcgttcgagtggcgcgcgcacccgtcgcagccgcagctggacttcaaggacaaggtggagttcacggtggtgatggatcggccgctgctggccgcagtgaagccgcgaaacctcgcgttctgatcggacgggcggacggacgcgcgcatgcatggctacagtgtgcgcgtgtcagctagcgtggcagtacgacatcgctcgtaccgtcgtacgtgtgctctgcacgcccagctgcaccacgcatcgccgtttggctatgcatgcatgcatgctagccgcccatgagttgtggacgccactactgtcgtgtactcgtgtctgtatgatgtaacatacacggaaatgctagacgtttgcatatgtgtgtggatgtgtacgtactacgtatataagaatgaactcttttgtgc

SEQ ID NO: 19383 - protein, 563 aa, Zea mays subsp. mays
  misc_feature (1)..(563): Ceres Seq. ID no. 12372958
PTHARRTTSSELRIYRAVHVHATADERRKPTSRRDGSAIVALVTAARLHGGRGDRGAGRRGGRHEVQPEIHGPEAASGPARVARRRQPLPGGVLRQALHPLHPRAPQGVRPHPDAAHGGAHARDHQQRRARARGAGGERAGVREPAPGEHHAQHLLVQQAHRELRGVRARVAVARRNMVSGMLSTSRLREFRHARRRAMDRFVSRMRAEAAASPDGASVWVLRNARFAVFCILLDMTFGLLDLREEHIVRIDAVMKRVLLAVGVRMDDYLPFLRPFFWRHQRRALAVRREQIDTLLPLINRRRAMLRDMQQRQSSSPLPDPSVAAPFSYLDSVLDLRIEGRDDGALTDDELVTLCAELLNGGTDTTATAIEWGMARIVDSPSIQARLHEEVMQQVGDARPVDDKDTDAMPYLQAFVKELLRKHPPTYFSLTHAAVQPGCKLAGYDVPVDANLDIFLPTISEDPKLWDRPTEFDPDRFVSGGETADMTGSAGIRMIPFGAGRRICPGLAMGTTHIALMVARMVQAFEWRAHPSQPQLDFKDKVEFTVVMDRPLLAAVKPRNLAF

SEQ ID NO: 19384 - protein, 386 aa, Zea mays subsp. mays
  misc_feature (1)..(386): Ceres Seq. ID no. 12372959
MVSGMLSTSRLREFRHARRRAMDRFVSRMRAEAAASPDGASVWVLRNARFAVFCILLDMTFGLLDLREEHIVRIDAVMKRVLLAVGVRMDDYLPFLRPFFWRHQRRALAVRREQIDTLLPLINRRRAMLRDMQQRQSSSPLPDPSVAAPFSYLDSVLDLRIEGRDDGALTDDELVTLCAELLNGGTDTTATAIEWGMARIVDSPSIQARLHEEVMQQVGDARPVDDKDTDAMPYLQAFVKELLRKHPPTYFSLTHAAVQPGCKLAGYDVPVDANLDIFLPTISEDPKLWDRPTEFDPDRFVSGGETADMTGSAGIRMIPFGAGRRICPGLAMGTTHIALMVARMVQAFEWRAHPSQPQLDFKDKVEFTVVMDRPLLAAVKPRNLAF

SEQ ID NO: 19385 - protein, 382 aa, Zea mays subsp. mays
  misc_feature (1)..(382): Ceres Seq. ID no. 12372960
MLSTSRLREFRHARRRAMDRFVSRMRAEAAASPDGASVWVLRNARFAVFCILLDMTFGLLDLREEHIVRIDAVMKRVLLAVGVRMDDYLPFLRPFFWRHQRRALAVRREQIDTLLPLINRRRAMLRDMQQRQSSSPLPDPSVAAPFSYLDSVLDLRIEGRDDGALTDDELVTLCAELLNGGTDTTATAIEWGMARIVDSPSIQARLHEEVMQQVGDARPVDDKDTDAMPYLQAFVKELLRKHPPTYFSLTHAAVQPGCKLAGYDVPVDANLDIFLPTISEDPKLWDRPTEFDPDRFVSGGETADMTGSAGIRMIPFGAGRRICPGLAMGTTHIALMVARMVQAFEWRAHPSQPQLDFKDKVEFTVVMDRPLLAAVKPRNLAF

SEQ ID NO: 19386 - DNA, 1738 bp, Zea mays subsp. mays
  misc_feature (1)..(1738): Ceres Seq. ID no. 12372961
atccatcaaagtcacagagacgaccagctgaagcgaacacagagctgctcgccgtgtaacgcagcaggcagcagcacccagaggcggcaggacacacacacagcacacgcagatcttcgatcaccaccatgggttctctcggcagcgccgcgcagcagcagccgcagcaaccgcacgccgtgtgcctgccgtacccagcgcagggccacatcaccccgatgctcaacgtggcgaagctgctgcacgcccggggcttccacgtcaccttcgtcaacaccgagtacaaccaggcgcgcctcgtccggacccgcggggcggcggccgtggccggcctcccgggcttccgcttcgccaccatccccgacggcctgccgccgtcggaggacgacgacgtcacgcaggacatcccctcgctgtgcaagtccaccacggagacctgcctcggtcccttccgccgcctgctcgcggacctcagcgacccgcccgtcacctgcgtcgtctccgacgtcgtcatgggcttctccatcgacgccaccaaggagctcggccttccctacgtccagctctggactgccagcaccatcagcttcctcggctaccgccactaccacctcctcaagagccgtggcctcgctccgctcaaaagtgtggagcagctgacgaacggattccttgacacggcggtggaggacgtgccggggctgcggaacatgaggttccgggacttcccgagcttcatccgctccacggacccggacgagtacatggtgggctacgtcctccaggagacggggcgcacggcgggcgcgtcggccgtgatcctcaacaccttcgacgagctggagggcgaggcggtggcggccatgcgctcgctcggcctggcgcgcaaggtgtacacgctgggcccgctcccgctgctggcgcgcgaggacccgcccaccccgcgctccgccatcagcctcagcctgtggaaggaggaggaggagtgcctgcggtggctcgacggcagggaccccggctccgtcgtctacgtcaacttcggcagcatcaccgtgatgaccagcgaccagctggtggagttcgcgtgggggctggccaacagcggcaggccgttcctgtggatcatccggcgcgacctcgtcaggggcgacactgccgtgctgccgccggagttcctgtccgagacggccggccgcgggctcatggccacctggtgcccgcagcaggcggtgctggaccacccggccgtggccgcgttcctcacgcacagcggatggaactccacgctggaggccatgtgcggcggcgtcccggtcatcagctggcccttcttcgccgaccagcagaccaactgccgctaccagtgcaacgagtggggcgtcgggatggagatcgacagcaacgtccggcgcgacgccgtggcgagcctcatcgctgagctcatggagggggagcaggggaaggagatgaggagaagggcactggaatggagggacaaggccatcgaggtggccaagcccggaggcacgtcttaccggaatttcgatgaactggttcgcaatgtgctcctgccaaagaactaggcaacttagctctatatttgcagtttgcacggtgcttctgccagtgccgtgtgattttgttcctttgttttggagggagatggacaggtcagtgtcgttgtgtaaacaataaaaatacatgcatacgagcgtccaattgaggatgggcaagtctg

SEQ ID NO: 19387 - protein, 484 aa, Zea mays subsp. mays
  misc_feature (1)..(484): Ceres Seq. ID no. 12372962
MGSLGSAAQQQPQQPHAVCLPYPAQGHITPMLNVAKLLHARGFHVTFVNTEYNQARLVRTRGAAAVAGLPGFRFATIPDGLPPSEDDDVTQDIPSLCKSTTETCLGPFRRLLADLSDPPVTCVVSDVVMGFSIDATKELGLPYVQLWTASTISFLGYRHYHLLKSRGLAPLKSVEQLTNGFLDTAVEDVPGLRNMRFRDFPSFIRSTDPDEYMVGYVLQETGRTAGASAVILNTFDELEGEAVAAMRSLGLARKVYTLGPLPLLAREDPPTPRSAISLSLWKEEEECLRWLDGRDPGSVVYVNFGSITVMTSDQLVEFAWGLANSGRPFLWIIRRDLVRGDTAVLPPEFLSETAGRGLMATWCPQQAVLDHPAVAAFLTHSGWNSTLEAMCGGVPVISWPFFADQQTNCRYQCNEWGVGMEIDSNVRRDAVASLIAELMEGEQGKEMRRRALEWRDKAIEVAKPGGTSYRNFDELVRNVLLPKN

SEQ ID NO: 19388 - protein, 454 aa, Zea mays subsp. mays
  misc_feature (1)..(454): Ceres Seq. ID no. 12372963
MLNVAKLLHARGFHVTFVNTEYNQARLVRTRGAAAVAGLPGFRFATIPDGLPPSEDDDVTQDIPSLCKSTTETCLGPFRRLLADLSDPPVTCVVSDVVMGFSIDATKELGLPYVQLWTASTISFLGYRHYHLLKSRGLAPLKSVEQLTNGFLDTAVEDVPGLRNMRFRDFPSFIRSTDPDEYMVGYVLQETGRTAGASAVILNTFDELEGEAVAAMRSLGLARKVYTLGPLPLLAREDPPTPRSAISLSLWKEEEECLRWLDGRDPGSVVYVNFGSITVMTSDQLVEFAWGLANSGRPFLWIIRRDLVRGDTAVLPPEFLSETAGRGLMATWCPQQAVLDHPAVAAFLTHSGWNSTLEAMCGGVPVISWPFFADQQTNCRYQCNEWGVGMEIDSNVRRDAVASLIAELMEGEQGKEMRRRALEWRDKAIEVAKPGGTSYRNFDELVRNVLLPKN

SEQ ID NO: 19389 - protein, 356 aa, Zea mays subsp. mays
  misc_feature (1)..(356): Ceres Seq. ID no. 12372964
MGFSIDATKELGLPYVQLWTASTISFLGYRHYHLLKSRGLAPLKSVEQLTNGFLDTAVEDVPGLRNMRFRDFPSFIRSTDPDEYMVGYVLQETGRTAGASAVILNTFDELEGEAVAAMRSLGLARKVYTLGPLPLLAREDPPTPRSAISLSLWKEEEECLRWLDGRDPGSVVYVNFGSITVMTSDQLVEFAWGLANSGRPFLWIIRRDLVRGDTAVLPPEFLSETAGRGLMATWCPQQAVLDHPAVAAFLTHSGWNSTLEAMCGGVPVISWPFFADQQTNCRYQCNEWGVGMEIDSNVRRDAVASLIAELMEGEQGKEMRRRALEWRDKAIEVAKPGGTSYRNFDELVRNVLLPKN

SEQ ID NO: 19390 - DNA, 2056 bp, Zea mays subsp. mays
  misc_feature (1)..(2056): Ceres Seq. ID no. 12372969
agtatacacgccaagtcgccagccagcatttcctcccgaaccatccttccactccctcgccgaccctccccccgcgcccgccatggacacggcgatcggctccgtcccggcagcctccgacgcggcgcgtcacccagcgccgtccgcgtccgccccgcgcgacgcgacgctgggccggcacctggcgcggcgcctggcggaggtgggcgcccgggacgtgttcacggtgccgggggacttcaacctcacgctcctcgacgagctggaggccgagccgggcggcgtccgcctcgtcggctgctgcaacgagctcaacgcggcgtacgcggccgacgggtacgcccgcgcgcgcgccggcggggtcggcgcctgcgccgtcaccttcaccgtcggcggcctcagcgccatcaacggcgtcgccggcgccttcagcgagaacctccccgtcgtgtgcatcgtcggcggacccaacagcaacgactacgggagtaacaggatcctgcaccataccatcggcttgcctgatttcacgcaggagctcaggtgcttccagaacgtcacgtgctatcaggctgtggtgaacaacttggaagatgcgcacgagcagatcgatactgccatctccacggcaatcaaggagagcaagcctgtttacattagcatcaggctgcaacctcccttcgatcccacatcccaccttcagccgccatcctgtccctttcttcctctccccaaggctatcgaaccagatgaacctggaggctgcagtggaagccgccgcggctttcttgaacaaagccgtcaagccagtgcttgtaggtgggccaaagatgagggtgtccaaagcatgcgaagccttggcagagctggcagatgcctgcggctatcccgtcgccgtgatgccttctgcgaaggggctagtgccagagcaccactctaggttcattggcacgtactggggtgcggtgagcactccattctgtgctgagatcgtcgagtctgccgatgcctacctatttgctggccccgtattcaacgactacagctcggttgggtactcgctgctcctcaagaaggagaaggccatcattgtccaaccagagcgggtggtggtcgggcacggacccgcgtttgggtgtgttctgatgaaggatttccttcatgcccttgcaacccgtctgaagaagaacactgccgcgtatgagaactaccgtcgaatttatgtgcctttaggcgaaccacttccatctgaacctggcgagccgttgagagtgaacgtgctattcaagcatattcaggcaatgctgtctggcgacacggctgtcatcgcagagactggggactcgtggtttaactgccagaagctgaagctaccggaaggctgtggatacgaattccagatgcagtatggatcaattggctggtcagtgggcgcaactctaggatacgcacaggctgccaaggataaacgtgtcattgcctgcattggagacggcagctttcaggtgacggcacaagaagtgtcaacgatgctccggtgggggcacaacagcatcatcttcctgataaacaatggagggtacacaatcgaggtggagattcacgatggcccttataacgttatcaagaactggaactacaccggtctggtggaagcgttccacaatggcgagggcgcgtgctacacagcaaaggttcgaacagaggaggagctgacggaggcactggaggcagctctgggacctaagaaggactgcttatgcttcatcgaggtcatcgtgcataaggatgacaccagcaaagagcttctcgagtggggatctagggtttctgcggcgaatagccgtccacctaatcctcagtgaaatagccgtacatcaggtctcccgaattgtcctgtagatcaaaccgttttctggtgacgtccatagcaaaaagtctcggcgaggacatgctgtcgatttctgaataaattgtccctgcaattcactggtgttgaagtcctcgttgtaaaggtacaaagacgtttggaaaaatcactgacagcgtaaactct

SEQ ID NO: 19391 - protein, 423 aa, Zea mays subsp. mays
  misc_feature (1)..(423): Ceres Seq. ID no. 12372970
MRTSRSILPSPRQSRRASLFTLASGCNLPSIPHPTFSRHPVPFFLSPRLSNQMNLEAAVEAAAAFLNKAVKPVLVGGPKMRVSKACEALAELADACGYPVAVMPSAKGLVPEHHSRFIGTYWGAVSTPFCAEIVESADAYLFAGPVFNDYSSVGYSLLLKKEKAIIVQPERVVVGHGPAFGCVLMKDFLHALATRLKKNTAAYENYRRIYVPLGEPLPSEPGEPLRVNVLFKHIQAMLSGDTAVIAETGDSWFNCQKLKLPEGCGYEFQMQYGSIGWSVGATLGYAQAAKDKRVIACIGDGSFQVTAQEVSTMLRWGHNSIIFLINNGGYTIEVEIHDGPYNVIKNWNYTGLVEAFHNGEGACYTAKVRTEEELTEALEAALGPKKDCLCFIEVIVHKDDTSKELLEWGSRVSAANSRPPNPQ

SEQ ID NO: 19392 - protein, 371 aa, Zea mays subsp. mays
  misc_feature (1)..(371): Ceres Seq. ID no. 12372971
MNLEAAVEAAAAFLNKAVKPVLVGGPKMRVSKACEALAELADACGYPVAVMPSAKGLVPEHHSRFIGTYWGAVSTPFCAEIVESADAYLFAGPVFNDYSSVGYSLLLKKEKAIIVQPERVVVGHGPAFGCVLMKDFLHALATRLKKNTAAYENYRRIYVPLGEPLPSEPGEPLRVNVLFKHIQAMLSGDTAVIAETGDSWFNCQKLKLPEGCGYEFQMQYGSIGWSVGATLGYAQAAKDKRVIACIGDGSFQVTAQEVSTMLRWGHNSIIFLINNGGYTIEVEIHDGPYNVIKNWNYTGLVEAFHNGEGACYTAKVRTEEELTEALEAALGPKKDCLCFIEVIVHKDDTSKELLEWGSRVSAANSRPPNPQ

SEQ ID NO: 19393 - protein, 344 aa, Zea mays subsp. mays
  misc_feature (1)..(344): Ceres Seq. ID no. 12372972
MRVSKACEALAELADACGYPVAVMPSAKGLVPEHHSRFIGTYWGAVSTPFCAEIVESADAYLFAGPVFNDYSSVGYSLLLKKEKAIIVQPERVVVGHGPAFGCVLMKDFLHALATRLKKNTAAYENYRRIYVPLGEPLPSEPGEPLRVNVLFKHIQAMLSGDTAVIAETGDSWFNCQKLKLPEGCGYEFQMQYGSIGWSVGATLGYAQAAKDKRVIACIGDGSFQVTAQEVSTMLRWGHNSIIFLINNGGYTIEVEIHDGPYNVIKNWNYTGLVEAFHNGEGACYTAKVRTEEELTEALEAALGPKKDCLCFIEVIVHKDDTSKELLEWGSRVSAANSRPPNPQ

SEQ ID NO: 19394 - DNA, 1522 bp, Zea mays subsp. mays
  misc_feature (1)..(1522): Ceres Seq. ID no. 12372985
aacacctttcatcacaaccacaaagacagccagccagccagccatcattgatcatagcatcagcagcttagtataccgtaccgctccacatccgagtgctagaagatcagaagaagcccggcccggccagtacctatagctgcctagcggccggcgcgaacgaagcagagatatggcgagagcgctgccgctggtgctcgcggcgtccgtcctgctggcggccgcgctgctgctgctggccttcgcgccggcgccggccgccgcggtcgacttcggcgcggaggacctggcgtcggaggaggcgctgtgggcgctgtacgagcgctggcgcggccgccacgcgctggcgcgggacctgggcgacaaggcgcgccgcttcaacgtcttcaaggccaacgtgcgcctcatccacgagttcaaccgccgggacgagccctacaagctccgcctcaaccgcttcggcgacatgaccgccgacgagttccgacgccactacgcgggctccagggtcgcgcaccatcgcatgttccgcggcgacaggcagggctcctcggcgtcggcgtcgttcatgtacgccgacgcgcgcgatgtcccggcctccgtcgactggaggcagaagggcgctgtcaccgacgtcaaggaccagggccagtgcggtagctgctgggcgttctcgacgatcgccgccgtggagggcatcaacgcgatcaagaccaagaacctgacgtcgctgtcggagcagcagctggtggactgcgacaccaaggccaacgccggctgcaacgggggcctcatggactacgcgttccagtacatcgccaagcacggcggggtggcggcggaggacgcgtacccgtacagagcgcgccaggcgtcctgcaagaagtcgccggccccggtcgtcaccatcgacggctacgaggacgtgccggccaacgacgagtcggcgctcaagaaggcggtggcgcaccagcccgtgtccgtcgccatcgaggccagcggctcgcacttccagttctactccgagggggtgttctccggcaggtgcgggacggagctggaccacggcgtcacggcggtcggctacggggtcaccgcggacggcaccaagtactggctggtcaagaactcgtggggccccgagtggggcgagaaggggtacatccgcatggcgcgcgacgtggccgccaaggagggacactgcggcatcgccatggaggcatcctaccccgtcaagacctcgcccaaccccaaggtccacgccgtcgtcgacgaggacggctccagccacgacgagctctgaattgcgcactacactactacgtactagctatagcctatatagctatactatgattgatccatgtatgctcggacaggaacatcgccgactgtgaatgtctgaatggcatacgcacatcgtacacctgcattcatgtaataccagtcgagagttgatctaccagcaactttcatttcattcggttattattatattatttaactactgcttcctccgtcc

SEQ ID NO: 19395 - protein, 376 aa, Zea mays subsp. mays
  misc_feature (1)..(376): Ceres Seq. ID no. 12372986
MARALPLVLAASVLLAAALLLLAFAPAPAAAVDFGAEDLASEEALWALYERWRGRHALARDLGDKARRFNVFKANVRLIHEFNRRDEPYKLRLNRFGDMTADEFRRHYAGSRVAHHRMFRGDRQGSSASASFMYADARDVPASVDWRQKGAVTDVKDQGQCGSCWAFSTIAAVEGINAIKTKNLTSLSEQQLVDCDTKANAGCNGGLMDYAFQYIAKHGGVAAEDAYPYRARQASCKKSPAPVVTIDGYEDVPANDESALKKAVAHQPVSVAIEASGSHFQFYSEGVFSGRCGTELDHGVTAVGYGVTADGTKYWLVKNSWGPEWGEKGYIRMARDVAAKEGHCGIAMEASYPVKTSPNPKVHAVVDEDGSSHDEL

SEQ ID NO: 19396 - protein, 278 aa, Zea mays subsp. mays
  misc_feature (1)..(278): Ceres Seq. ID no. 12372987
MTADEFRRHYAGSRVAHHRMFRGDRQGSSASASFMYADARDVPASVDWRQKGAVTDVKDQGQCGSCWAFSTIAAVEGINAIKTKNLTSLSEQQLVDCDTKANAGCNGGLMDYAFQYIAKHGGVAAEDAYPYRARQASCKKSPAPVVTIDGYEDVPANDESALKKAVAHQPVSVAIEASGSHFQFYSEGVFSGRCGTELDHGVTAVGYGVTADGTKYWLVKNSWGPEWGEKGYIRMARDVAAKEGHCGIAMEASYPVKTSPNPKVHAVVDEDGSSHDEL

SEQ ID NO: 19397 - protein, 259 aa, Zea mays subsp. mays
  misc_feature (1)..(259): Ceres Seq. ID no. 12372988
MFRGDRQGSSASASFMYADARDVPASVDWRQKGAVTDVKDQGQCGSCWAFSTIAAVEGINAIKTKNLTSLSEQQLVDCDTKANAGCNGGLMDYAFQYIAKHGGVAAEDAYPYRARQASCKKSPAPVVTIDGYEDVPANDESALKKAVAHQPVSVAIEASGSHFQFYSEGVFSGRCGTELDHGVTAVGYGVTADGTKYWLVKNSWGPEWGEKGYIRMARDVAAKEGHCGIAMEASYPVKTSPNPKVHAVVDEDGSSHDEL

SEQ ID NO: 19398 - DNA, 1321 bp, Zea mays subsp. mays
  misc_feature (1)..(1321): Ceres Seq. ID no. 12373031
tctgcttcaaccaagttacttgttgatattctccttagtgagtgggaggacaggatgactcgaggcttattccgctacgatgtcactgcctgtgagaccaaggtcattcctggcaaccttgggtttgttgcacaactcaatgaagggcgccatcttaagaagcgccctactgagtttcgtgtggaccgtgtgctccagccgtttgaccctgccaaattcaatttcacaaaagttggccaggaagaggttctcttccaatttgagaatagtggtggtgatgacagctatttcctgaacaacgctccaatcattgctgttgatcgggctccaaatgttattgctatcaatgtaagcccaattgaatatggacatgtgcttctcattcctcgtgttctggaccgcctgcctcagaggattgatccagagagcttcttgcttgcactgcaaatggcagccgagggaggtagcccatacttcaggcttggttacaatagcttgggtgcgtttgccaccatcaatcacctccactttcaggcgtactacttgtcagtgcctttccctgttgagaaggcagctacccacaagatcccactctctgaggacacgaagaagaatggggtgaccgtgtccaagctgataaattatcctgtgagaggcctggtatttgagggagggaacaccctggacgacctggccactgtggtttctaatgcttggcatttggctgcaagacaacaatgtgccttacaatgtgctcatttctgactgtggcaagagggttttcctgttcccccagtgctacgcagagaagcaggctctgggtgaagtgagccaggagctgctggacactcaggtgaacccagctgtgtgggagatcagtggacacatggtgctgaaacggaggatggactatgaggaggcatctgaaacctccgcgtggaaactcctcgccgaggtctctctctccgaggagcgcttcgaggaagtgaaggcgtacatcttcagcgctgctggcctggttcagtatgatgaggaagaggaggaagccagcgacggtgagggccctacggcctatgttcctgtcaaggttacccctctgcccgtcgctgaagggtgcctcgtcctcccgtgagtccgtggtcggttaaataaagggccgtatatgattgcgagccctgtgctctgccgctattttcttctcgtttgtgtcttgctgctctcgtggtgaactcgctactccagtactctgcaatattaagcagaagctattgtattgtttgggtcgtttgtcagctaaattgaaatgcgatggacatttact

SEQ ID NO: 19399 - protein, 254 aa, Zea mays subsp. mays
  misc_feature (1)..(254): Ceres Seq. ID no. 12373032
SASTKLLVDILLSEWEDRMTRGLFRYDVTACETKVIPGNLGFVAQLNEGRHLKKRPTEFRVDRVLQPFDPAKFNFTKVGQEEVLFQFENSGGDDSYFLNNAPIIAVDRAPNVIAINVSPIEYGHVLLIPRVLDRLPQRIDPESFLLALQMAAEGGSPYFRLGYNSLGAFATINHLHFQAYYLSVPFPVEKAATHKIPLSEDTKKNGVTVSKLINYPVRGLVFEGGNTLDDLATVVSNAWHLAARQQCALQCAHF

SEQ ID NO: 19400 - protein, 236 aa, Zea mays subsp. mays
  misc_feature (1)..(236): Ceres Seq. ID no. 12373033
MTRGLFRYDVTACETKVIPGNLGFVAQLNEGRHLKKRPTEFRVDRVLQPFDPAKFNFTKVGQEEVLFQFENSGGDDSYFLNNAPIIAVDRAPNVIAINVSPIEYGHVLLIPRVLDRLPQRIDPESFLLALQMAAEGGSPYFRLGYNSLGAFATINHLHFQAYYLSVPFPVEKAATHKIPLSEDTKKNGVTVSKLINYPVRGLVFEGGNTLDDLATVVSNAWHLAARQQCALQCAHF

SEQ ID NO: 19401 - protein, 140 aa, Zea mays subsp. mays
  misc_feature (1)..(140): Ceres Seq. ID no. 12373034
MLGIWLQDNNVPYNVLISDCGKRVFLFPQCYAEKQALGEVSQELLDTQVNPAVWEISGHMVLKRRMDYEEASETSAWKLLAEVSLSEERFEEVKAYIFSAAGLVQYDEEEEEASDGEGPTAYVPVKVTPLPVAEGCLVLP

SEQ ID NO: 19402 - DNA, 1541 bp, Zea mays subsp. mays
  misc_feature (1)..(1541): Ceres Seq. ID no. 12373039
cccgttcaacccacctttctgccacacacctcgagcgaagcaagcaccgcaagaattgaagagccagggagattttccgtcgctccgtccgatccatggccgaacagtggtggggcagtgcctctcacaggagtcacggcacgtcggcgtgctcggccgccgcgccaccgccgctcacggtcacgggcagggtggcctgcggcagcaccttccccaccgcagccgttgagtcgacgagctccgtaaccttccaggacccttatagaagctccacccatcagcctttgtctgatgccgcctcctcgctcggtgatccacacctggactggacgcaaaccttcttgagcgggaggagcgatgccagcttccaagccgtgctccaagaaccctccgcgacgaacgatccattaatcagggaccacatggacatgggtgccggcttcttggccgaccaggcgcagctagcgccgtcgccgtacggcgatacggagccatcgcaagctcaagctctattcgacgccacggcggccgtgcacaacattttgatgtacggagacagcgaatcctcggtcagctacgacgccggcgcggcatcgatgcagttttcccagctgctcaggacctcggtgcccgcgtctacgcctacgcctacgcaaggcgacggcgtcagcgtcggcgtcggcgctccgatgcagtacttgtccggcagcagttacctgcctttcggtggcccgctgccgtctcaccttctcttgcaggccctgcaggcggctaagcccaatagccgcagctccaacgctaactctccgtcggcgaaggacgactgctctccaccaccggcggcgacgaggaaaagcgtctccgagccgcctgccgccgcgaaaaggccacggatcgaggcgccatcgccgctaccgacttttaaggtgcggaaagagaagctaggggacagaatcactgcgctccagcaactcgtctcgccttttggaaagactgataccgcatcggttcttcacgaggccatcgaatacatcaaattccttcacgaccaagttgcgtcactgagctctccctacttgaaaaatgggatccccatgaagcaattccagcacaagggctctgaggattccaaggataacggcgacacgaagcaagcagacctgcggagccggggcctgtgccttgtcccagtagcgagcacatacacggtggcggccgagacaccggagttctggcaccctacatttggaggcacattccgatggtgatgatcgtccagttttagtagcaagctaagtagcctgctgagacggaaagcaagaagtcatgatgcggcccaaagcaatcgaaggatgttttgcaagggaaaagatgtacgagatggatatgataataggtttccagtggtctcttctaagacatgcatgctggatcaggtgcagaagagagaatgattaattgaggccgtgtgtatgtgtggcacctatactcatatatatgcatgcatgcaactttgcaagcaaataattagtgacagctat

SEQ ID NO: 19403 - protein, 390 aa, Zea mays subsp. mays
  misc_feature (1)..(390): Ceres Seq. ID no. 12373040
MAEQWWGSASHRSHGTSACSAAAPPPLTVTGRVACGSTFPTAAVESTSSVTFQDPYRSSTHQPLSDAASSLGDPHLDWTQTFLSGRSDASFQAVLQEPSATNDPLIRDHMDMGAGFLADQAQLAPSPYGDTEPSQAQALFDATAAVHNILMYGDSESSVSYDAGAASMQFSQLLRTSVPASTPTPTQGDGVSVGVGAPMQYLSGSSYLPFGGPLPSHLLLQALQAAKPNSRSSNANSPSAKDDCSPPPAATRKSVSEPPAAAKRPRIEAPSPLPTFKVRKEKLGDRITALQQLVSPFGKTDTASVLHEAIEYIKFLHDQVASLSSPYLKNGIPMKQFQHKGSEDSKDNGDTKQADLRSRGLCLVPVASTYTVAAETPEFWHPTFGGTFRW

SEQ ID NO: 19404 - protein, 281 aa, Zea mays subsp. mays
  misc_feature (1)..(281): Ceres Seq. ID no. 12373041
MDMGAGFLADQAQLAPSPYGDTEPSQAQALFDATAAVHNILMYGDSESSVSYDAGAASMQFSQLLRTSVPASTPTPTQGDGVSVGVGAPMQYLSGSSYLPFGGPLPSHLLLQALQAAKPNSRSSNANSPSAKDDCSPPPAATRKSVSEPPAAAKRPRIEAPSPLPTFKVRKEKLGDRITALQQLVSPFGKTDTASVLHEAIEYIKFLHDQVASLSSPYLKNGIPMKQFQHKGSEDSKDNGDTKQADLRSRGLCLVPVASTYTVAAETPEFWHPTFGGTFRW

SEQ ID NO: 19405 - protein, 279 aa, Zea mays subsp. mays
  misc_feature (1)..(279): Ceres Seq. ID no. 12373042
MGAGFLADQAQLAPSPYGDTEPSQAQALFDATAAVHNILMYGDSESSVSYDAGAASMQFSQLLRTSVPASTPTPTQGDGVSVGVGAPMQYLSGSSYLPFGGPLPSHLLLQALQAAKPNSRSSNANSPSAKDDCSPPPAATRKSVSEPPAAAKRPRIEAPSPLPTFKVRKEKLGDRITALQQLVSPFGKTDTASVLHEAIEYIKFLHDQVASLSSPYLKNGIPMKQFQHKGSEDSKDNGDTKQADLRSRGLCLVPVASTYTVAAETPEFWHPTFGGTFRW

SEQ ID NO: 19406 - DNA, 1208 bp, Zea mays subsp. mays
  misc_feature (1)..(1208): Ceres Seq. ID no. 12373055
atcagactaaacaagacctcggtcctcggcttgacctgttgctgttggccatacctcctctctcgcctccggtcagatcagattagcctccatggccgccgatcgccgcttcaagatctttgcagccgccgatggcttcggccagccactcaaggacgccgtcgtcgcttatctccgcgcccaccccgccgtcgccgaggtcgttgacctcggcgtcgacaagtactacgccgccgccgcagccgtcgcccgacacgtctcctctcccgactcggagcccgacgctcccgagttccgcggcgtggtcgtctgcggcaccggcgccggcgtctgcatcttcgccaacaagtacccgcgcgtctacgccacccactgcgcttcccccgccgacgccgtcaacacacgctccatcaacgcctgcaacgtcctcgctctctccggaatcgccacgcagcccgacgccgcggccgccatagccgattcctggctcgccacgcccttccgcgccccttgccccgcctccggcgacgcgccctggccggaggacatccaggggttcttcgacaccgcgccagacgagatggccgccatcccggaggcggagggtgccccggactcggtctgcgccatctgctgtctcaggaacgggatggagttcgagccggtggggattatgcctggcggcgagatgcggatcgtgcgggagagccccacctcggcgtacgtccgcttcaaggctggcagtgtggagccagcgcaccaccacacctttggccacgacctggtggtcatcaagggcaagaagaaggtttggaacctcaccaagaaggaaagctacgacctggtggacggagattttctcttcacacctgccggggatgtgcacagggtcaagtactttgaggacacagagttcttcatccgttgggatggccactgggacatctttctcgacgaggatctcgacactgcacgcagtgccattgacgcggagcttgcagctgccagcaagtgagatcatgccatctatgtgcagtgatggcaacgcttctgaaggtgttatgctcacatatcctcatttgggattgtgattgatggtcttgcttccataatgttagttattcgaactctgtgtatgatcctcatcgtcctgtcttgttattttgtggaattatggttattgacaacgatgatggtacaatttggtt

SEQ ID NO: 19407 - protein, 307 aa, Zea mays subsp. mays
  misc_feature (1)..(307): Ceres Seq. ID no. 12373056
MAADRRFKIFAAADGFGQPLKDAVVAYLRAHPAVAEVVDLGVDKYYAAAAAVARHVSSPDSEPDAPEFRGVVVCGTGAGVCIFANKYPRVYATHCASPADAVNTRSINACNVLALSGIATQPDAAAAIADSWLATPFRAPCPASGDAPWPEDIQGFFDTAPDEMAAIPEAEGAPDSVCAICCLRNGMEFEPVGIMPGGEMRIVRESPTSAYVRFKAGSVEPAHHHTFGHDLVVIKGKKKVWNLTKKESYDLVDGDFLFTPAGDVHRVKYFEDTEFFIRWDGHWDIFLDEDLDTARSAIDAELAAASK

SEQ ID NO: 19408 - DNA, 1340 bp, Zea mays subsp. mays
  misc_feature (1)..(1340): Ceres Seq. ID no. 12373073
atagatcgatcacacagcctgcaggcacagacaagagttaggctgttctacctgatcatatgaccctccagcaattctctcatccacacacaaactgaagcaagaattattgcttatctatatcctgtctgtcctttcctctatttcccccctcccctttctatttccattgtgcagcttgttattagtagatagcagtggatcgatgtgtgatggaggaaacaagctagctagctagctaccagctgaagcagcagggagaagaaggatagagagagagagagagagaaaacatcttcttcatccatagtctcggcctttcttcaccaggtcgtctgcagatctgtctcctgtgaccttccagaggccaagctaggccaggaaggaaaaatggcgtccccgtcgagcaccagcaacaactcggccttctcccctgtggcggcgtcggccgggacgacgatgcctggtgccggggcgccgtgcgcggcgtgcaagttcctgcggcgcaagtgcctgccggggtgcgtgttcgcgccctacttcccgccggaggagccgcagaagttcgccaacgtgcacaaggtgttcggcgccagcaacgtgaccaagctgctgaacgagctgctgccgcaccagcgggaggacgccgtgagctcgctcgcctacgaggccgaggcgcgcgtcaaggaccccgtctacggctgcgtcggcgccatctccgtgctgcagcgccaggtccaccgcctccagaaggagctggacgccgcgcacgccgagctcctccgctacgcctgcggcgacgtcgccgccggcatccccaccgcgctccccgtcgtcagcgccgcccccaggctctccacggcgccaatgacgacgacgagccccggccagttcgccgccggcatgtacggcagcggcaggaggcttggggtcgtcgacggactagcagcgccaccgctgcctccgtcgggcggcggcggcggctgctacttcatgcggaaccaccacaacaacgtcgtcattagtagctccccaggcgctgacgtggcgcccgtcctgccttacgcttccgtggctaattgggcggtgaatgccatcagcgcgtcgacgaccaccacctccggatcagagagcattgggttggatcacaaggaagagggagacagcagcatgtgaagtgaagggaagcgctgcgctgccgtgaatggtaaggcgctgtttgtttctctctgagtaattttaattctgcacggcggccatgcccatgcatgatgtatagctactgtatgtgctagctagtttgtgtgttttaattatatacatatatagctgttcttatc

SEQ ID NO: 19409 - protein, 261 aa, Zea mays subsp. mays
  misc_feature (1)..(261): Ceres Seq. ID no. 12373074
MASPSSTSNNSAFSPVAASAGTTMPGAGAPCAACKFLRRKCLPGCVFAPYFPPEEPQKFANVHKVFGASNVTKLLNELLPHQREDAVSSLAYEAEARVKDPVYGCVGAISVLQRQVHRLQKELDAAHAELLRYACGDVAAGIPTALPVVSAAPRLSTAPMTTTSPGQFAAGMYGSGRRLGVVDGLAAPPLPPSGGGGGCYFMRNHHNNVVISSSPGADVAPVLPYASVANWAVNAISASTTTTSGSESIGLDHKEEGDSSM

SEQ ID NO: 19410 - protein, 238 aa, Zea mays subsp. mays
  misc_feature (1)..(238): Ceres Seq. ID no. 12373075
MPGAGAPCAACKFLRRKCLPGCVFAPYFPPEEPQKFANVHKVFGASNVTKLLNELLPHQREDAVSSLAYEAEARVKDPVYGCVGAISVLQRQVHRLQKELDAAHAELLRYACGDVAAGIPTALPVVSAAPRLSTAPMTTTSPGQFAAGMYGSGRRLGVVDGLAAPPLPPSGGGGGCYFMRNHHNNVVISSSPGADVAPVLPYASVANWAVNAISASTTTTSGSESIGLDHKEEGDSSM

SEQ ID NO: 19411 - DNA, 1601 bp, Zea mays subsp. mays
  misc_feature (1)..(1601): Ceres Seq. ID no. 12373088
cacaacacaacacccctccctttccaggattctcctctcctccaaaagatcggtggcgggtcacgggtgagacgagaaggaaagaagctgacaaaggcgagaagggatagagagaggagagaaagggaaggtagaaactggacagaaagtttctccccgctagaagtagctcggcggtgagggagcgagagacctgccgcctacccttgccccaccgtttttttcataccgtctcgccggaatcctgctttattttcccggccagtccaccgccttctcgggctaccacgctgatccggcgtcgtctgcggtccttccgaccaactcttcaatcttgtgaattgcttttcgcccagttagggcagatcaccattccttgcaggagttcgttgccgtctctccaatcctccctggctcgactgctcagtggtgactgatgtggtccactgccctgccctgcacctgcaagttagtttcactcgtgatccgtcagcttgccacccagcaaccgctgattatcagaaatccacttctcaaagcttcaaggagcatccttcgaacaagttcctgattccttcgcctcccgccctccccgtttcttctctggcatccttgtccgttgaccacagagggaagaaatctgttccgggcaggcaggcgcattctccgccacaatggacgatggagctgacctcccctgccagttgctcttctcccacccggagatgcctcacagcttcgacgagttcttcagcagcgccacgaccacgaccacctgcacccacacgcacagctgcgaccctccgggcccctcggccgccatgcatacccacacgtgcctgcacacgcacacccaggtcctgggcagcggcggggaggacgacggctcagcgaagccgcggaggcccctgggaaacagggaagccgtgcgcaagtaccgcgagaagaagaaggcgcgcgcggccttcctggaaggggaggtcaagaagctgcgcgccgccaaccagcagctcgtgcggcggctgcaagaccacgcggctctggaggcggaggtggcgaggctcaggggcctcctgctcgacgtccggggcaggatcgacgccgaggtcggcgtgtccccgtttcagaggccatgcagcgcgggctctgtggagtgcggcgctgatccagctctgcgcttcgatggcagctcggaggtagtaggaggtggtggctgggagaagagctcaagccctcaagttgcggactgcaggatcgatgaagggggaggagggatgtcacgggaacttgatgttctagaagtttcggggcctctgccagcttctttgggctttgctttaaagataaattaaattattcatggatttaggagaatgaggaaccgacagtgagtagaactatcttcgcatcgctgtggtttatgtttcttatgctggtgttcagtgtgtatatatagggtacagaatactttcatatgagcactgaagaaatcgaaattgacaatgtttcatgcgaaattgtactgcgggtatgtaaatgaagtgcgcctgacttctgacttgtagcctgtttgtgcttagctgaaatattattaagctatt

SEQ ID NO: 19412 - protein, 225 aa, Zea mays subsp. mays
  misc_feature (1)..(225): Ceres Seq. ID no. 12373089
MDDGADLPCQLLFSHPEMPHSFDEFFSSATTTTTCTHTHSCDPPGPSAAMHTHTCLHTHTQVLGSGGEDDGSAKPRRPLGNREAVRKYREKKKARAAFLEGEVKKLRAANQQLVRRLQDHAALEAEVARLRGLLLDVRGRIDAEVGVSPFQRPCSAGSVECGADPALRFDGSSEVVGGGGWEKSSSPQVADCRIDEGGGGMSRELDVLEVSGPLPASLGFALKIN

SEQ ID NO: 19413 - protein, 208 aa, Zea mays subsp. mays
  misc_feature (1)..(208): Ceres Seq. ID no. 12373090
MPHSFDEFFSSATTTTTCTHTHSCDPPGPSAAMHTHTCLHTHTQVLGSGGEDDGSAKPRRPLGNREAVRKYREKKKARAAFLEGEVKKLRAANQQLVRRLQDHAALEAEVARLRGLLLDVRGRIDAEVGVSPFQRPCSAGSVECGADPALRFDGSSEVVGGGGWEKSSSPQVADCRIDEGGGGMSRELDVLEVSGPLPASLGFALKIN

SEQ ID NO: 19414 - protein, 176 aa, Zea mays subsp. mays
  misc_feature (1)..(176): Ceres Seq. ID no. 12373091
MHTHTCLHTHTQVLGSGGEDDGSAKPRRPLGNREAVRKYREKKKARAAFLEGEVKKLRAANQQLVRRLQDHAALEAEVARLRGLLLDVRGRIDAEVGVSPFQRPCSAGSVECGADPALRFDGSSEVVGGGGWEKSSSPQVADCRIDEGGGGMSRELDVLEVSGPLPASLGFALKIN

SEQ ID NO: 19415 - DNA, 1887 bp, Zea mays subsp. mays
  misc_feature (1)..(1887): Ceres Seq. ID no. 12373110
gggccaagtcgcagacgcggagccaccgccattttttttactcccgaaaccaggcaggagggaggaggcgacgacatcgccatcacaccagatcactgaagaagagagaggcgcgtcgagtctccccaaagaacgagctagtacaaagtctcctcttcctttgactccgaatcccctagaccattgatggttgcgggggcaccggaaggagccactgacgatgggcctctgctcctcctccaccgccgcccgggccgcctccgaccccggcgccgcagccgcgggtgatgccgccgcggcaaagaaggggcgcgggatcgtcgcgtgcgggaagcggaccgacttcggatacgacaaggatttcgaggtgcgctactcgcttgggaagcttttgggccacggccagttcggctacacctttgccgccgtcgatcgcgcctccaccgagcgcgtcgccgtcaagcgcatcgacaagaataagatggtccttcctgttgctgttgaagacgtaaagagagaagttaaaatcttaaaggcattacaagggcacgaaaatgttgtacacttttacaatgcattcgaagatgacaactatgtttatatagtcatggaattatgtgagggtggcgagctacttgatcggatattagccaagaaagatagtcgttacagcgagaaagatgctgcagtagttgtccgacagatgctcaaggttgcagctgagtgccacctgcatggtttggttcatcgggacatgaaacctgagaacttcctattcaaatcaaaaaaggaggactcgccccttaaggctacagattttggtctttcagacttcataaaaccagggaggcaattccgtgacattgttggaagtgcctactacgtagcaccagaagtactcaaacgcaggtcagggccagaatccgatgtttggagtataggtgttataacctatattttgctgtgtggaagacgaccattctgggacaaaacagaagatgggatatttaaagaggtcttaaaaaagaagccagatttccgccgcaagccttggtcaaacattacttcgagtgcaaaagattttgtacaaaaattactagttaaggatccccgtgcaagactaactgctgcacaggcattatcacatgattgggtgagagaaggaggaaaggcatctgaaatacccttggatatatcagtattacataatatgcgtcagtttgtgaaatacagtcgtttcaagcaatttgctttaagggcattagcatctacattaaactcagaagagatgtctgatcttcgtgatcaattcaatgccattgatgttgacaaaaatggaacgattagtcttgaggaactgaagcaggctcttgcaaaggatgttccatggagattaaagggtccacgtgttttagagatcattgaagcgattgacagtaatacagatgggctagttgattttgaggagtttgttgctgcaacactacacgtgcatcagctggtggaacatgatactgagaagtggaaatcattgtctcaagctgcatttgataaatttgatgttgacagagatggctacatcacacctgatgaacttagaatgcatacaggaatgaagggttctattgatcccctcctggaggaggctgacattgacaaagatggcaagataagcctagatgaatttcgccggctcttgaagactgcaagcatgagcgcacgcaatgtacaaactcctaggggtgttcgcaagtcatagttttctgttttttgtagttcacataactgaactagagagcagcagcacatgtgattggagaaaggcttttccatgtaaattagacaatcaataatacacatgaatggaggtaatccgtagttgttcct

SEQ ID NO: 19416 - protein, 512 aa, Zea mays subsp. mays
  misc_feature (1)..(512): Ceres Seq. ID no. 12373111
MGLCSSSTAARAASDPGAAAAGDAAAAKKGRGIVACGKRTDFGYDKDFEVRYSLGKLLGHGQFGYTFAAVDRASTERVAVKRIDKNKMVLPVAVEDVKREVKILKALQGHENVVHFYNAFEDDNYVYIVMELCEGGELLDRILAKKDSRYSEKDAAVVVRQMLKVAAECHLHGLVHRDMKPENFLFKSKKEDSPLKATDFGLSDFIKPGRQFRDIVGSAYYVAPEVLKRRSGPESDVWSIGVITYILLCGRRPFWDKTEDGIFKEVLKKKPDFRRKPWSNITSSAKDFVQKLLVKDPRARLTAAQALSHDWVREGGKASEIPLDISVLHNMRQFVKYSRFKQFALRALASTLNSEEMSDLRDQFNAIDVDKNGTISLEELKQALAKDVPWRLKGPRVLEIIEAIDSNTDGLVDFEEFVAATLHVHQLVEHDTEKWKSLSQAAFDKFDVDRDGYITPDELRMHTGMKGSIDPLLEEADIDKDGKISLDEFRRLLKTASMSARNVQTPRGVRKS

SEQ ID NO: 19417 - protein, 425 aa, Zea mays subsp. mays
  misc_feature (1)..(425): Ceres Seq. ID no. 12373112
MVLPVAVEDVKREVKILKALQGHENVVHFYNAFEDDNYVYIVMELCEGGELLDRILAKKDSRYSEKDAAVVVRQMLKVAAECHLHGLVHRDMKPENFLFKSKKEDSPLKATDFGLSDFIKPGRQFRDIVGSAYYVAPEVLKRRSGPESDVWSIGVITYILLCGRRPFWDKTEDGIFKEVLKKKPDFRRKPWSNITSSAKDFVQKLLVKDPRARLTAAQALSHDWVREGGKASEIPLDISVLHNMRQFVKYSRFKQFALRALASTLNSEEMSDLRDQFNAIDVDKNGTISLEELKQALAKDVPWRLKGPRVLEIIEAIDSNTDGLVDFEEFVAATLHVHQLVEHDTEKWKSLSQAAFDKFDVDRDGYITPDELRMHTGMKGSIDPLLEEADIDKDGKISLDEFRRLLKTASMSARNVQTPRGVRKS

SEQ ID NO: 19418 - protein, 383 aa, Zea mays subsp. mays
  misc_feature (1)..(383): Ceres Seq. ID no. 12373113
MELCEGGELLDRILAKKDSRYSEKDAAVVVRQMLKVAAECHLHGLVHRDMKPENFLFKSKKEDSPLKATDFGLSDFIKPGRQFRDIVGSAYYVAPEVLKRRSGPESDVWSIGVITYILLCGRRPFWDKTEDGIFKEVLKKKPDFRRKPWSNITSSAKDFVQKLLVKDPRARLTAAQALSHDWVREGGKASEIPLDISVLHNMRQFVKYSRFKQFALRALASTLNSEEMSDLRDQFNAIDVDKNGTISLEELKQALAKDVPWRLKGPRVLEIIEAIDSNTDGLVDFEEFVAATLHVHQLVEHDTEKWKSLSQAAFDKFDVDRDGYITPDELRMHTGMKGSIDPLLEEADIDKDGKISLDEFRRLLKTASMSARNVQTPRGVRKS

SEQ ID NO: 19419 - DNA, 1997 bp, Zea mays subsp. mays
  misc_feature (1)..(1997): Ceres Seq. ID no. 12373118
agaggagagagtcgctctgcactgcacgactcctcccccatctaccactacctgtctacctacccagcccatcgactgcccctcgcaacgcaatggcgctcgccaccaactccgccgctgccgcagcagctgccgtatccggcggcgcggcatcccagccgcaccgcgcggccacgttcctcccgctgaagaggcgcaccatctccgccatccacgccgccgacccgtctaagaacaacgggcccgccgtccccgcggccgccgccgctaagtcatctgcctctgcggtggccacgccggagaagaatccggcggcgccggtaaagtgggcggtcgacagctggaagtcgaagaaggcgctgcagctcccagagtacccaaaccaggaggagctggacacggtgctcaagaccatcgagacgttcccgccggtggtgttcgccggagaggcgcgtcacctcgaggagcgcatggccgaggccgccatgggccgcgccttcatcctccagggcggcgactgcgccgagagcttcaaggagttccacgccaacaacatccgtgacaccttccgtattctgcttcagatgggcgccgtgctcatgttcggtggtcaggtgccggtcgtcaaggtggggaggatggctggccagtttgccaagccaaggtccgaaccgttggaggagagggacggcgtcaagctgccaagctacaggggcgacaacgtcaacggcgacgacttcaccgagaagagccgcgtgccagacccgcagaggatgatccgcgcctactcgcagtcggtggcgacgctcaacctgctccgcgcgttggcgaccggagggtacgctgccatgcagcgcgtcacacagtggaacctcgatttcatggatcacagcgagcaaggtgataggtaccgtgaattggcccatagggtggatgaggctcttgggttcatgactgcagcagggcttacagttgaccacccgataatgacgactactgacttctggacctcgcacgagtgccttctcttaccctacgagcagtctcttacccgtaaagactccaccagtggccttttctacgattgttcggcccacatgttgtgggttggtgagcgcactcgtcaactcgatggagcgcatgttgaattcctccgtggtgttgccaaccctcttggcataaaggtgagcgacaaaatgaaccccagtgacttggtgaagctgattgagattctgaacccttcaaacaaacctggaaggatcaccataattacaaggatgggggcagagaacatgagagtgaagttgcctcatctcatccgtgctgttcgcaatgctggattgattgtcacatggattactgatcctatgcatggaaacaccatcaaggccccttgtggcctgaagactcgtccattcgactcaattctggctgaagtgcgcgcattcttcgacgtgcatgatcaagaaggaagtcacccaggaggcatccaccttgaaatgactgggcagaacgtgaccgagtgcattggtggatcacggactgtgaccttcgatgaccttagcgaccgctaccacacccactgtgacccaaggctgaacgcctcccagtccctggagctcgccttcatcattgcagagaggctcaggaagaggaggatgcggtcggggctcaacaacagcctgcctctgccaccactggctttctaagtagccgaagctgaacagagaaggtagagggatagttgcagcgactcgaaagattacgcctgtttatttgttgatgcttggtgtggaggcctggtgggtgctcttggcacaagttacatgctggggagctataggagggtacctgttgcgttgtggaagacagtagctagtattatgtgttgtaattgtatgccttcgtttcatgttctgggtgcgtgacttgtcgactttgctgcttctggggttctgaccttggtaaggagagaataaagagataatataattgcg

SEQ ID NO: 19420 - protein, 568 aa, Zea mays subsp. mays
  misc_feature (1)..(568): Ceres Seq. ID no. 12373119
RRESLCTARLLPHLPLPVYLPSPSTAPRNAMALATNSAAAAAAAVSGGAASQPHRAATFLPLKRRTISAIHAADPSKNNGPAVPAAAAAKSSASAVATPEKNPAAPVKWAVDSWKSKKALQLPEYPNQEELDTVLKTIETFPPVVFAGEARHLEERMAEAAMGRAFILQGGDCAESFKEFHANNIRDTFRILLQMGAVLMFGGQVPVVKVGRMAGQFAKPRSEPLEERDGVKLPSYRGDNVNGDDFTEKSRVPDPQRMIRAYSQSVATLNLLRALATGGYAAMQRVTQWNLDFMDHSEQGDRYRELAHRVDEALGFMTAAGLTVDHPIMTTTDFWTSHECLLLPYEQSLTRKDSTSGLFYDCSAHMLWVGERTRQLDGAHVEFLRGVANPLGIKVSDKMNPSDLVKLIEILNPSNKPGRITIITRMGAENMRVKLPHLIRAVRNAGLIVTWITDPMHGNTIKAPCGLKTRPFDSILAEVRAFFDVHDQEGSHPGGIHLEMTGQNVTECIGGSRTVTFDDLSDRYHTHCDPRLNASQSLELAFIIAERLRKRRMRSGLNNSLPLPPLAF

SEQ ID NO: 19421 - protein, 538 aa, Zea mays subsp. mays
  misc_feature (1)..(538): Ceres Seq. ID no. 12373120
MALATNSAAAAAAAVSGGAASQPHRAATFLPLKRRTISAIHAADPSKNNGPAVPAAAAAKSSASAVATPEKNPAAPVKWAVDSWKSKKALQLPEYPNQEELDTVLKTIETFPPVVFAGEARHLEERMAEAAMGRAFILQGGDCAESFKEFHANNIRDTFRILLQMGAVLMFGGQVPVVKVGRMAGQFAKPRSEPLEERDGVKLPSYRGDNVNGDDFTEKSRVPDPQRMIRAYSQSVATLNLLRALATGGYAAMQRVTQWNLDFMDHSEQGDRYRELAHRVDEALGFMTAAGLTVDHPIMTTTDFWTSHECLLLPYEQSLTRKDSTSGLFYDCSAHMLWVGERTRQLDGAHVEFLRGVANPLGIKVSDKMNPSDLVKLIEILNPSNKPGRITIITRMGAENMRVKLPHLIRAVRNAGLIVTWITDPMHGNTIKAPCGLKTRPFDSILAEVRAFFDVHDQEGSHPGGIHLEMTGQNVTECIGGSRTVTFDDLSDRYHTHCDPRLNASQSLELAFIIAERLRKRRMRSGLNNSLPLPPLAF

SEQ ID NO: 19422 - protein, 412 aa, Zea mays subsp. mays
  misc_feature (1)..(412): Ceres Seq. ID no. 12373121
MAEAAMGRAFILQGGDCAESFKEFHANNIRDTFRILLQMGAVLMFGGQVPVVKVGRMAGQFAKPRSEPLEERDGVKLPSYRGDNVNGDDFTEKSRVPDPQRMIRAYSQSVATLNLLRALATGGYAAMQRVTQWNLDFMDHSEQGDRYRELAHRVDEALGFMTAAGLTVDHPIMTTTDFWTSHECLLLPYEQSLTRKDSTSGLFYDCSAHMLWVGERTRQLDGAHVEFLRGVANPLGIKVSDKMNPSDLVKLIEILNPSNKPGRITIITRMGAENMRVKLPHLIRAVRNAGLIVTWITDPMHGNTIKAPCGLKTRPFDSILAEVRAFFDVHDQEGSHPGGIHLEMTGQNVTECIGGSRTVTFDDLSDRYHTHCDPRLNASQSLELAFIIAERLRKRRMRSGLNNSLPLPPLAF

SEQ ID NO: 19423 - DNA, 1478 bp, Zea mays subsp. mays
  misc_feature (1)..(1478): Ceres Seq. ID no. 12373137
ttaatcaaaaactaaacccaatcccccttccaccattcacacgtaccggcggagaaggaaggaattggtcgccgccgcctgcctctctccgatcctcctccgtcagtggcggtggccacgccgtgctaagctaagctaagcttgcgcaagtgacaagttctttggttggttggaggcagagccacatggcatcgtcgtcgcggctggatctcccgccggggttccgcttccaccccaccgacgaggaggtggtgtcgcactacctgacccacaaggcgctggacagccgcttctcctgcgtcgtcatcgccgacgccgacctgaacaagatcgagccgtgggatctcccaagcaaggctaagatgggcgagaaggagtggtacttcttctgccacaaggaccgcaagtacccgacggggatgcgcaccaaccgcgccaccgccagcgggtactggaaggccacgggcaaggacaaggagatcttccgcggcagtagtccccgccgcgtgctcgtcggcatgaagaagacgctcgtcttctacacgggccgcgcgccgcgcggaggcaagacgccgtgggtcatgcacgagtaccgcctcgagggcagcctgccgcccaacctccaccgcggggccaaggacgaatgggctgtgtgtaaggtgatcaacaaagacttggcgggcaaggctgggcagcaacaaatggcgccgccgcacgccgtgtccgtgggcatggagcgcagcgactcgctggccttcctcgacgacctggtgctcgacaacgccgacgacctgcccccgctcatcgactcgacaacgtacgccgcggcggggacgaccacgacgacgaacgacgacagcggcgggtaccaacaagccaccaaggcggagccgcagccgcatctgcccgcgccgagcaacagcccgtaccagcagcaggccatacggaggcactgcaaggcggaggcgccggcgccggcgatggttctgagcccgtcgcgcgagacgccgggcgcggacatgttccagctccagcatgtggacgagctgctccagctggacggcggcttcatggaggactactacaacatgaacatgtggaaggtctagttaggccgctcggatcgtcggttgcctggcggatgatggattgattagttggttgattggattaacctgttattagacgaagaggagtggaaaggccggccgcgccgattggcatggacgaggtctgtctgacgaagatgtgtcgagacctcgccggcggtgtggtttgtgagaattggttagttagctaatcttcattagctagctagctagctagctactgattagaacagctagcagtagtgtgtaaccgcgcgcgtgtcgttgcctctgctggtcgagaggattgaagcacgcatgtgtacataataataggtaggagtcgtcgtcgttgagtgatgagaaaaatgaatgaaacatactatatat

SEQ ID NO: 19424 - protein, 307 aa, Zea mays subsp. mays
  misc_feature (1)..(307): Ceres Seq. ID no. 12373138
MASSSRLDLPPGFRFHPTDEEVVSHYLTHKALDSRFSCVVIADADLNKIEPWDLPSKAKMGEKEWYFFCHKDRKYPTGMRTNRATASGYWKATGKDKEIFRGSSPRRVLVGMKKTLVFYTGRAPRGGKTPWVMHEYRLEGSLPPNLHRGAKDEWAVCKVINKDLAGKAGQQQMAPPHAVSVGMERSDSLAFLDDLVLDNADDLPPLIDSTTYAAAGTTTTTNDDSGGYQQATKAEPQPHLPAPSNSPYQQQAIRRHCKAEAPAPAMVLSPSRETPGADMFQLQHVDELLQLDGGFMEDYYNMNMWKV

SEQ ID NO: 19425 - protein, 248 aa, Zea mays subsp. mays
  misc_feature (1)..(248): Ceres Seq. ID no. 12373139
MGEKEWYFFCHKDRKYPTGMRTNRATASGYWKATGKDKEIFRGSSPRRVLVGMKKTLVFYTGRAPRGGKTPWVMHEYRLEGSLPPNLHRGAKDEWAVCKVINKDLAGKAGQQQMAPPHAVSVGMERSDSLAFLDDLVLDNADDLPPLIDSTTYAAAGTTTTTNDDSGGYQQATKAEPQPHLPAPSNSPYQQQAIRRHCKAEAPAPAMVLSPSRETPGADMFQLQHVDELLQLDGGFMEDYYNMNMWKV

SEQ ID NO: 19426 - protein, 229 aa, Zea mays subsp. mays
  misc_feature (1)..(229): Ceres Seq. ID no. 12373140
MRTNRATASGYWKATGKDKEIFRGSSPRRVLVGMKKTLVFYTGRAPRGGKTPWVMHEYRLEGSLPPNLHRGAKDEWAVCKVINKDLAGKAGQQQMAPPHAVSVGMERSDSLAFLDDLVLDNADDLPPLIDSTTYAAAGTTTTTNDDSGGYQQATKAEPQPHLPAPSNSPYQQQAIRRHCKAEAPAPAMVLSPSRETPGADMFQLQHVDELLQLDGGFMEDYYNMNMWKV

SEQ ID NO: 19427 - DNA, 1997 bp, Zea mays subsp. mays
  misc_feature (1)..(1997): Ceres Seq. ID no. 12373157
attcgatagttccatcctcctccctcccccttcgccggcctcgcttcgtccctcccgctctcccccttttaaatcaaaccctctctcggctcctttataaatcctagtcgaagcaagggtgcgcgcacttcactacccaacctgaccccgaagatcgcgtccgcagagacagtagccgcgtcatggcgaccccgccgccgccgctcccgcccatgccgccgaggcacgtctcctgcggctcacttctacaggaactgcaggaactatggggagaaattggtcaggatgaaatgaaaagagataggatgatactgcaactggaggaggattgtctcaatgtttacaagcaaaaagtgaatcagactaggaaacagaaggcagacctgcttcaagagctgtcccttggcgaagctgatatagacaagatcctttctgctcttggagagagagaaacatttcctaggtcagagaagcttgggggcacattaatggaacaactcgctaagatagagccagtgctagaagatttgaggcgtaggagggatgagagagtaaatgagttcaaggctattcagtcaaagattgtatgtctacaagcagaaatttcaggagccattgatcatggggatcctgctgctcctgtggtagatgagaatgatttatccttgaaaagatcaggggaattgaaggagcatcttaatgatcttcagacagaaaagaatggaaggctgcaaaaaattgacatccagactaacagtattcatgaaatgtgcaacataatgtctattgatctcaaaatggcactaaaggatgttcatcccagttacgctgagctggggagaagcaaacccatgagtattagcaacagttcgcttgatagactatctgaaaaagtacatgcgttaaatcatgaaaagaaacaaaggcttcggaagcttcaagatcttggcagcacactcattgagttatggaacctcatggatacaccaactgatgaacagagattttttgaccatgtgacttctcttattaaagtctcaccaactacagcgatgccccaagggtgccttgcacacgaaataattgaaaaggtagagactgaggttaagagactgactaagttgaaagctagcaaaatgaaagagctagtcttcaagaaattgactgatcttgaggaaatctacagaagtgttcacatggatattgatagtgattctgagcggcaaaccctcaatgatctcattgattctggtagagcagatctttcagagttgctggcaagaatggatattcgaattgcggaggcaaaagaacatgcattaagtagaaaggatattttagaaaaggtggagaagtggacattggcatcagaagaggagacttggcttgatgaatacgaaagggatcaaaaccgatataatgctgtccgaggagctcacataaatctcaagcgtgcggagaaagctaggatattggtcagcaaacttccatctcttttggagaacttgactgctaaaattaaagcctgggaaaaggaaatgggtattccatttatatttaacaaggtgaggctgttggactgtttagatgaatacacctgtacaagacagcaaaaagaagaggaaaagcgccgatcaagggaattgaagaaactgcaagaacagtttgctacagagcaaggtgccaagttcggaacgaaaccaagccctatccgtcctctttcttcaaggaagcctcttgggcagagctctaatgccaatattattggtggaactccgaccagccgccgtgtttctacccccatgtcacggaagggtaggccatcttctggaagggtgcaggaagctgtcaagactgctgtggcaccagcaaactatgttgcccttcccaaggactgctcagacatttctaccctttgaagtgtaatcacctactctgaccatcgattgacttctcacttgatcgacctacatactatatagtcttgactccagtgc

SEQ ID NO: 19428 - protein, 578 aa, Zea mays subsp. mays
  misc_feature (1)..(578): Ceres Seq. ID no. 12373158
MATPPPPLPPMPPRHVSCGSLLQELQELWGEIGQDEMKRDRMILQLEEDCLNVYKQKVNQTRKQKADLLQELSLGEADIDKILSALGERETFPRSEKLGGTLMEQLAKIEPVLEDLRRRRDERVNEFKAIQSKIVCLQAEISGAIDHGDPAAPVVDENDLSLKRSGELKEHLNDLQTEKNGRLQKIDIQTNSIHEMCNIMSIDLKMALKDVHPSYAELGRSKPMSISNSSLDRLSEKVHALNHEKKQRLRKLQDLGSTLIELWNLMDTPTDEQRFFDHVTSLIKVSPTTAMPQGCLAHEIIEKVETEVKRLTKLKASKMKELVFKKLTDLEEIYRSVHMDIDSDSERQTLNDLIDSGRADLSELLARMDIRIAEAKEHALSRKDILEKVEKWTLASEEETWLDEYERDQNRYNAVRGAHINLKRAEKARILVSKLPSLLENLTAKIKAWEKEMGIPFIFNKVRLLDCLDEYTCTRQQKEEEKRRSRELKKLQEQFATEQGAKFGTKPSPIRPLSSRKPLGQSSNANIIGGTPTSRRVSTPMSRKGRPSSGRVQEAVKTAVAPANYVALPKDCSDISTL

SEQ ID NO: 19429 - protein, 568 aa, Zea mays subsp. mays
  misc_feature (1)..(568): Ceres Seq. ID no. 12373159
MPPRHVSCGSLLQELQELWGEIGQDEMKRDRMILQLEEDCLNVYKQKVNQTRKQKADLLQELSLGEADIDKILSALGERETFPRSEKLGGTLMEQLAKIEPVLEDLRRRRDERVNEFKAIQSKIVCLQAEISGAIDHGDPAAPVVDENDLSLKRSGELKEHLNDLQTEKNGRLQKIDIQTNSIHEMCNIMSIDLKMALKDVHPSYAELGRSKPMSISNSSLDRLSEKVHALNHEKKQRLRKLQDLGSTLIELWNLMDTPTDEQRFFDHVTSLIKVSPTTAMPQGCLAHEIIEKVETEVKRLTKLKASKMKELVFKKLTDLEEIYRSVHMDIDSDSERQTLNDLIDSGRADLSELLARMDIRIAEAKEHALSRKDILEKVEKWTLASEEETWLDEYERDQNRYNAVRGAHINLKRAEKARILVSKLPSLLENLTAKIKAWEKEMGIPFIFNKVRLLDCLDEYTCTRQQKEEEKRRSRELKKLQEQFATEQGAKFGTKPSPIRPLSSRKPLGQSSNANIIGGTPTSRRVSTPMSRKGRPSSGRVQEAVKTAVAPANYVALPKDCSDISTL

SEQ ID NO: 19430 - protein, 542 aa, Zea mays subsp. mays
  misc_feature (1)..(542): Ceres Seq. ID no. 12373160
MKRDRMILQLEEDCLNVYKQKVNQTRKQKADLLQELSLGEADIDKILSALGERETFPRSEKLGGTLMEQLAKIEPVLEDLRRRRDERVNEFKAIQSKIVCLQAEISGAIDHGDPAAPVVDENDLSLKRSGELKEHLNDLQTEKNGRLQKIDIQTNSIHEMCNIMSIDLKMALKDVHPSYAELGRSKPMSISNSSLDRLSEKVHALNHEKKQRLRKLQDLGSTLIELWNLMDTPTDEQRFFDHVTSLIKVSPTTAMPQGCLAHEIIEKVETEVKRLTKLKASKMKELVFKKLTDLEEIYRSVHMDIDSDSERQTLNDLIDSGRADLSELLARMDIRIAEAKEHALSRKDILEKVEKWTLASEEETWLDEYERDQNRYNAVRGAHINLKRAEKARILVSKLPSLLENLTAKIKAWEKEMGIPFIFNKVRLLDCLDEYTCTRQQKEEEKRRSRELKKLQEQFATEQGAKFGTKPSPIRPLSSRKPLGQSSNANIIGGTPTSRRVSTPMSRKGRPSSGRVQEAVKTAVAPANYVALPKDCSDISTL

SEQ ID NO: 19431 - DNA, 1186 bp, Zea mays subsp. mays
  misc_feature (1)..(1186): Ceres Seq. ID no. 12373161
acaaaacccgccttcctctcattccccaatcgccacaactctcgtcggagctccgagccctaaacaacagccttcgccggccgactcccgggcggaggaggcggccggggagatggacgacatcggcggcggcgcaccgggtgcctgccccaagaacaagaagccccggcacctgtcccgctcgctgacctaccaccaccacccgtaccaggggcgccaggtgctgccggcgccggcgcccaacccgcagcgcccgcagtcggtggtcctgtacacgacgtcgctccgcggcgtgcgccgcacgttcgcggactgctgcgcggtgcgcgccgcgctgcggggcctccgcgtcgccgtggacgagcgccacgtctccatggacgcggcgctccggcgcgagctgcaggggatcctcgcggcacggggccgcgggttctcgctcccgcagctcctggtcgggggcgcgctcgtcggcggcgccgacgaggtccgccggctgcacgagtccggcgagctccgccgcgtcctcgaaggcgcccccgggcaggaccccgccttcgtctgcggcgcctgcggcgggttccggttcgcgccctgtccggcctgcgacggctcccgcaaggtgttcgtggaggaagaggggcgagcccgccgctgcctggagtgcaacgaaaacggcttggtacgctgccccaattgctgttcttgatagcttgtttaagttgagtgtatacgagaacttaaggattgcttgattagaggtagtgggagaggaaaagagcatttcttgtgttctttggctgctgtatattgtggacgcagttgggaggataggtattgggtatgccatcagtgttttgaaaggatagcgaatgggttcttggccctcaagttatcacgtctggagtaccatcgatggtaaggtgccatctcatagtacttcatgtacatgtgtgtgtctgtgaatgtgtattgatagaccttcttcaagttggaaaagaaggcccaaagcaaagggttagagatttagaggttgtgctacatagcggcaagaaaaggtggagccttccttgattctttgggcgtgctattagcatattctgagaagggcaatatggcttctggccctatagtttgagattgtataaaatatgtatattatacattgataaccagagtgggtttg

SEQ ID NO: 19432 - protein, 235 aa, Zea mays subsp. mays
  misc_feature (1)..(235): Ceres Seq. ID no. 12373162
QNPPSSHSPIATTLVGAPSPKQQPSPADSRAEEAAGEMDDIGGGAPGACPKNKKPRHLSRSLTYHHHPYQGRQVLPAPAPNPQRPQSVVLYTTSLRGVRRTFADCCAVRAALRGLRVAVDERHVSMDAALRRELQGILAARGRGFSLPQLLVGGALVGGADEVRRLHESGELRRVLEGAPGQDPAFVCGACGGFRFAPCPACDGSRKVFVEEEGRARRCLECNENGLVRCPNCCS

SEQ ID NO: 19433 - protein, 198 aa, Zea mays subsp. mays
  misc_feature (1)..(198): Ceres Seq. ID no. 12373163
MDDIGGGAPGACPKNKKPRHLSRSLTYHHHPYQGRQVLPAPAPNPQRPQSVVLYTTSLRGVRRTFADCCAVRAALRGLRVAVDERHVSMDAALRRELQGILAARGRGFSLPQLLVGGALVGGADEVRRLHESGELRRVLEGAPGQDPAFVCGACGGFRFAPCPACDGSRKVFVEEEGRARRCLECNENGLVRCPNCCS

SEQ ID NO: 19434 - DNA, 1267 bp, Zea mays subsp. mays
  misc_feature (1)..(1267): Ceres Seq. ID no. 12373164
actctccagtctccactagcatcagtcgccgccgcctatcctcgagcaccatttccatcaacagcatccgcctctggcaagctagcgacagcaactcatggcactccgcgcgctcgacaacacgatgcccgccgccgtcgaggagcggcccaagaaggtggctaaggtgggcgtccccgccgccgccgccaaggccgccgcctccccctcccccgggagtggcggcaagaagaagaaggggaacgacgagaactcggcgccaagggccacggccgcggcggcggagcaggcggtggagtacatctcgtcggaggagctggaggcggcggccagccccaaggccaaggccgcggggctggtgcgcggacctggactccaaggactgggtcaggacctgcgaggcgctcaacgacgcgcgccgcctcgcgatccaccaccccgcgctgctgaacccgatcctggagaaggtggtgctggcggtcgtgaagacgatgaagagcccccgcagcgcggtgctcaagacgtccatcatggcctgcgccgacatcttcagttccttcggcaacctcctcgcctccgtctccgacgacaccttcgacaagctgctgctccagctcctgctgaaggcgtcccaggacaagcggttcgtgtgcgaggaggccgagaaggcgacgcgcgcgatggcggcgtcgatggcgccgctgccgctgctgaagaagctcaaggcgtacgtccaccacgccaacctcagggtcagggctaaggccgccgtcgccatctcccactgcgccgcccggatggacatcggcgcgatgaaggagttcgggatgtcggcgctgctgcagctggcggcggagctgctgaacgaccggctgccggaggcgagggaggccgcccgcggcgtggtggcgtcgacgcacgcggccttcgccaaggaggccgccgcgagcggccaggaggacgacgcggccgcgtcctgggagagcctctgcgcgctcagcctcccgcccatctccgcgcaggccgtcgccaagatcgctgccgccgccgcctcctcgcagtagccactgcacgcgtgcggacgtgcgccgctggcgttgattttgggggtcgtctggttcggttcagaagtagcgctcgtgagtcttcagacagagctcgtttgtcgccgccgccgccgagtctgtttgtttgttctttctactccatgctatctcgcatggttagtgttctgtttatggcttcgtcaagtaataacatatcaatt

SEQ ID NO: 19435 - protein, 353 aa, Zea mays subsp. mays
  misc_feature (1)..(353): Ceres Seq. ID no. 12373165
SPVSTSISRRRLSSSTISINSIRLWQASDSNSWHSARSTTRCPPPSRSGPRRWLRWASPPPPPRPPPPPPPGVAARRRRGTTRTRRQGPRPRRRSRRWSTSRRRSWRRRPAPRPRPRGWCADLDSKDWVRTCEALNDARRLAIHHPALLNPILEKVVLAVVKTMKSPRSAVLKTSIMACADIFSSFGNLLASVSDDTFDKLLLQLLLKASQDKRFVCEEAEKATRAMAASMAPLPLLKKLKAYVHHANLRVRAKAAVAISHCAARMDIGAMKEFGMSALLQLAAELLNDRLPEAREAARGVVASTHAAFAKEAAASGQEDDAAASWESLCALSLPPISAQAVAKIAAAAASSQ

SEQ ID NO: 19436 - protein, 221 aa, Zea mays subsp. mays
  misc_feature (1)..(221): Ceres Seq. ID no. 12373166
MALRALDNTMPAAVEERPKKVAKVGVPAAAAKAAASPSPGSGGKKKKGNDENSAPRATAAAAEQAVEYISSEELEAAASPKAKAAGLVRGPGLQGLGQDLRGAQRRAPPRDPPPRAAEPDPGEGGAGGREDDEEPPQRGAQDVHHGLRRHLQFLRQPPRLRLRRHLRQAAAPAPAEGVPGQAVRVRGGREGDARDGGVDGAAAAAEEAQGVRPPRQPQGQG

SEQ ID NO: 19437 - protein, 212 aa, Zea mays subsp. mays
  misc_feature (1)..(212): Ceres Seq. ID no. 12373167
MPAAVEERPKKVAKVGVPAAAAKAAASPSPGSGGKKKKGNDENSAPRATAAAAEQAVEYISSEELEAAASPKAKAAGLVRGPGLQGLGQDLRGAQRRAPPRDPPPRAAEPDPGEGGAGGREDDEEPPQRGAQDVHHGLRRHLQFLRQPPRLRLRRHLRQAAAPAPAEGVPGQAVRVRGGREGDARDGGVDGAAAAAEEAQGVRPPRQPQGQG

SEQ ID NO: 19438 - DNA, 1534 bp, Zea mays subsp. mays
  misc_feature (1)..(1534): Ceres Seq. ID no. 12373172
tcgtattacgtactcctgcatagcgatagcatagcttagcttgcttccccaatgccaatgtcatcgacagcacaaatggcttccctcgccgttctcatcatttccctcgtctttgcggcgcttgcctccgacgccgccgcaggcgtccgcgtcgagctcacgcgcgtccacgccgaccccagcgtgaccgcgtcccagttcgtccgcggcgccctgcgccgcgacatgcaccggcacaacgccaggaagctagccctagccgcgtcgtctggcgccacggtgtccgcgccgacccagaactcgcccaccgccggggagtacctgatggcgctggccatcggcacgccgccgctgccgtaccaggccatcgccgacacgggcagcgacctcatctggacgcagtgcgcgccctgcacctcccagtgcttccgccagccgacgccgctgtacaacccgtccagctccaccacgttcgccgtgctcccgtgcaacagctcgctgagcgtatgcgcggcggcgctggccgggaccgggacggccccgccgccggggtgcgcgtgcacgtacaacgtcacgtacggcagcgggtggacgagtgtctttcaggggtccgagaccttcacgttcgggtccacgccggccggtcagtcccgcgtccctggcatcgccttcggctgcagcaccgccagcagcggcttcaacgcctcgtccgcgtccggcctcgtcgggctgggcagggggaggctgtcgctcgtctcccagctcggcgtccccaagttctcctactgcctcacgccgtaccaggacaccaacagcacgagcacgctcctcctcgggccgtcggcgtcgctcaacggcaccgccggcgtcagctccacgcctttcgtcgccagcccttccactgcgcccatgaacaccttctactatctcaacctgaccggcatatccctcggcacgacggcactgtccatcccgcccgacgccttcttgctcaacgcggacggcaccgggcgggctcatcatcgactctggcaccaccatcacattactgggcaacacggcgtaccagcaggtccgggcagcggtcgtctccctggtgacgctgcccaccacagacgggtcggcagccacggggctcgacctgtgcttcatgctgccctcctcaacgtcggcgccgccggccatgccgagcatgacgctccacttcaacggcgcggacatggtgctcccggcggacagctacatgatgtcggacgactccggcttgtggtgcctggccatgcagaaccagaccgacggcgaggtaaacattctcggcaactaccagcagcaaaacatgcacatcctctacgacattgggcaggagacattgtcgtttgctccggccaaatgcagcgcgctctgatcagagctttacagaactgaaaatatgtgcgcgcaattgcataaggatcgtgatttttttaactatatattatgtaaaaatgtcgtgttgcttgggttgggttgtaaagcaggagatatttttccttcc

SEQ ID NO: 19439 - protein, 457 aa, Zea mays subsp. mays
  misc_feature (1)..(457): Ceres Seq. ID no. 12373173
MPMSSTAQMASLAVLIISLVFAALASDAAAGVRVELTRVHADPSVTASQFVRGALRRDMHRHNARKLALAASSGATVSAPTQNSPTAGEYLMALAIGTPPLPYQAIADTGSDLIWTQCAPCTSQCFRQPTPLYNPSSSTTFAVLPCNSSLSVCAAALAGTGTAPPPGCACTYNVTYGSGWTSVFQGSETFTFGSTPAGQSRVPGIAFGCSTASSGFNASSASGLVGLGRGRLSLVSQLGVPKFSYCLTPYQDTNSTSTLLLGPSASLNGTAGVSSTPFVASPSTAPMNTFYYLNLTGISLGTTALSIPPDAFLLNADGTGRAHHRLWHHHHITGQHGVPAGPGSGRLPGDAAHHRRVGSHGARPVLHAALLNVGAAGHAEHDAPLQRRGHGAPGGQLHDVGRLRLVVPGHAEPDRRRGKHSRQLPAAKHAHPLRHWAGDIVVCSGQMQRALIRALQN

SEQ ID NO: 19440 - protein, 455 aa, Zea mays subsp. mays
  misc_feature (1)..(455): Ceres Seq. ID no. 12373174
MSSTAQMASLAVLIISLVFAALASDAAAGVRVELTRVHADPSVTASQFVRGALRRDMHRHNARKLALAASSGATVSAPTQNSPTAGEYLMALAIGTPPLPYQAIADTGSDLIWTQCAPCTSQCFRQPTPLYNPSSSTTFAVLPCNSSLSVCAAALAGTGTAPPPGCACTYNVTYGSGWTSVFQGSETFTFGSTPAGQSRVPGIAFGCSTASSGFNASSASGLVGLGRGRLSLVSQLGVPKFSYCLTPYQDTNSTSTLLLGPSASLNGTAGVSSTPFVASPSTAPMNTFYYLNLTGISLGTTALSIPPDAFLLNADGTGRAHHRLWHHHHITGQHGVPAGPGSGRLPGDAAHHRRVGSHGARPVLHAALLNVGAAGHAEHDAPLQRRGHGAPGGQLHDVGRLRLVVPGHAEPDRRRGKHSRQLPAAKHAHPLRHWAGDIVVCSGQMQRALIRALQN

SEQ ID NO: 19441 - protein, 449 aa, Zea mays subsp. mays
  misc_feature (1)..(449): Ceres Seq. ID no. 12373175
MASLAVLIISLVFAALASDAAAGVRVELTRVHADPSVTASQFVRGALRRDMHRHNARKLALAASSGATVSAPTQNSPTAGEYLMALAIGTPPLPYQAIADTGSDLIWTQCAPCTSQCFRQPTPLYNPSSSTTFAVLPCNSSLSVCAAALAGTGTAPPPGCACTYNVTYGSGWTSVFQGSETFTFGSTPAGQSRVPGIAFGCSTASSGFNASSASGLVGLGRGRLSLVSQLGVPKFSYCLTPYQDTNSTSTLLLGPSASLNGTAGVSSTPFVASPSTAPMNTFYYLNLTGISLGTTALSIPPDAFLLNADGTGRAHHRLWHHHHITGQHGVPAGPGSGRLPGDAAHHRRVGSHGARPVLHAALLNVGAAGHAEHDAPLQRRGHGAPGGQLHDVGRLRLVVPGHAEPDRRRGKHSRQLPAAKHAHPLRHWAGDIVVCSGQMQRALIRALQN

SEQ ID NO: 19442 - DNA, 1690 bp, Zea mays subsp. mays
  misc_feature (1)..(1690): Ceres Seq. ID no. 12373176
gttcctgccgacgccgccggcaagccgcacgccgtgctcgtgccgttcccggcgcagggccacgtcacaccgatgctgaagctagcaaagatcctccactgccggggcttccacgtcaccttcgtcaacagcgagtacaaccgccgccgcttgctccggtcccgcggcgcggacgcgctcgacggcctcccaggcttccgtttcgcgaccatcccggatggcctgccgccgtccgacaccgacgccacccaggacgtgccgtccctctgccgctccacggaggagacctgtctcccgcatttcagggccctgctccagtgtctcaacgcctcctcccctgtcccctgacgtgccgctggtcacctgcgtcgtcggcgacgacatcatgggctttaccttggatgccgccagggagataggcgtgccgtgcgctctgttctggactgccagcacctgcgggtacatgggctaccgctactaccgcaccctcatcgacaagggcatcttcccgttgaaagaggagcagctgacgaatgggttcttagacacgccggtggagttcgcgccgcccgggatgagcaagcacatgcggctcaaggacttcccaagcttcatgcgctccacggacccctacgagttcatggtccactacgccgtcagggtgacggatcacacagccggcgcggacgccgtccttctcaacaccttcgacgagctcgagcaggaggcgctggacgccatgcgcgccgtgatctcatctgccgcgtccatcaacaccatcggcccgctcaccctcctcgccgaacagatcgtgcccagaggcagccaactggactcgctgggctctaacctctggaaggaggacgcctcctgcttccgctggctcgacggccggaagcccaggtccgtggtgttcgtgaactacggcagtgtgacggtgatgaccagcgcggagctggtggagttcgcgtggggtctggccaacagcggccacgacttcctgtggatcatccggccggacctcgtaagcggcgacgccgccgtgctgcccccggagttccaggaggcgatcgaggggcgcggcctgctggcgaactggtgcgctcaggacgcggtgctgcgtcacgaggcggtgggcgtgttcctgacgcactctgggtggaactcgacgctggagagcctctgcgccggggtgccgatgctgtgctggcctttcttcgcggagcagcagaccaactgccggtacacatgcgcggagtggggcgtggagatcggccacgacgtgcgacgggaggccgtggaagagaagatacgggaggccatgggcggggagaaagggaaggagatgcgtcgccgactcgccgcgcggtggagtggcgggagaccgccgtgcgcgcgacgcggcccggcgggcgctcgtacgccaacctggagaagctggtgactgacgtactcctctcgggtggcaagaattattaaacctccttgctatcaggcttcaggcatcagcactgctccatatgcatgcataaaccatcaaatacactttagctcagttttaagatctacgtgtcattgctctctctagtacgtgatgtattatgcacccgcctcttgttggcattattgttgtattatttagatctggtttctggaaacgagtgtgcatatattttgattctctaagcgg

SEQ ID NO: 19443 - protein, 408 aa, Zea mays subsp. mays
  misc_feature (1)..(408): Ceres Seq. ID no. 12373177
MACRRPTPTPPRTCRPSAAPRRRPVSRISGPCSSVSTPPPLSPDVPLVTCVVGDDIMGFTLDAAREIGVPCALFWTASTCGYMGYRYYRTLIDKGIFPLKEEQLTNGFLDTPVEFAPPGMSKHMRLKDFPSFMRSTDPYEFMVHYAVRVTDHTAGADAVLLNTFDELEQEALDAMRAVISSAASINTIGPLTLLAEQIVPRGSQLDSLGSNLWKEDASCFRWLDGRKPRSVVFVNYGSVTVMTSAELVEFAWGLANSGHDFLWIIRPDLVSGDAAVLPPEFQEAIEGRGLLANWCAQDAVLRHEAVGVFLTHSGWNSTLESLCAGVPMLCWPFFAEQQTNCRYTCAEWGVEIGHDVRREAVEEKIREAMGGEKGKEMRRRLAARWSGGRPPCARRGPAGARTPTWRSW

SEQ ID NO: 19444 - protein, 352 aa, Zea mays subsp. mays
  misc_feature (1)..(352): Ceres Seq. ID no. 12373178
MGFTLDAAREIGVPCALFWTASTCGYMGYRYYRTLIDKGIFPLKEEQLTNGFLDTPVEFAPPGMSKHMRLKDFPSFMRSTDPYEFMVHYAVRVTDHTAGADAVLLNTFDELEQEALDAMRAVISSAASINTIGPLTLLAEQIVPRGSQLDSLGSNLWKEDASCFRWLDGRKPRSVVFVNYGSVTVMTSAELVEFAWGLANSGHDFLWIIRPDLVSGDAAVLPPEFQEAIEGRGLLANWCAQDAVLRHEAVGVFLTHSGWNSTLESLCAGVPMLCWPFFAEQQTNCRYTCAEWGVEIGHDVRREAVEEKIREAMGGEKGKEMRRRLAARWSGGRPPCARRGPAGARTPTWRSW

SEQ ID NO: 19445 - protein, 326 aa, Zea mays subsp. mays
  misc_feature (1)..(326): Ceres Seq. ID no. 12373179
MGYRYYRTLIDKGIFPLKEEQLTNGFLDTPVEFAPPGMSKHMRLKDFPSFMRSTDPYEFMVHYAVRVTDHTAGADAVLLNTFDELEQEALDAMRAVISSAASINTIGPLTLLAEQIVPRGSQLDSLGSNLWKEDASCFRWLDGRKPRSVVFVNYGSVTVMTSAELVEFAWGLANSGHDFLWIIRPDLVSGDAAVLPPEFQEAIEGRGLLANWCAQDAVLRHEAVGVFLTHSGWNSTLESLCAGVPMLCWPFFAEQQTNCRYTCAEWGVEIGHDVRREAVEEKIREAMGGEKGKEMRRRLAARWSGGRPPCARRGPAGARTPTWRSW

SEQ ID NO: 19446 - DNA, 1443 bp, Zea mays subsp. mays
  misc_feature (1)..(1443): Ceres Seq. ID no. 12373180
agcattctagttctactgctgatcttctgcatggccatggtgaggaacccaagagaccttgaaacatactaggagtactagcagtagaggatttaaacctatcttggagtttgcaactggtatcttcttgcaagatcccaaggccaccgtaagatttgttgcagcgtgagacaggagctgcggctgcggaggaagtgagcaaaagcatggatctttccggcacgcagggcgagctgccgatggcaacaatgcacgccggcgggtcgccgtacctggggctgcaccacgggcacccacagcagcacaaccatggcgcgaacggccggcacatgtcgccgccggatgtggtggcggaggaggccaagaaccggcagctggcggtggtgcccgtgggcacaggaggcggaggcggggcaggggtgaggtaccgcgagtgcctgaagaaccacgcggctgccatcggcgggagcgcgacggacgggtgcggcgagttcatgcccgcgggcgaggaggggtcgctggacgcgctccggtgctcggcgtgcgggtgccaccgcaacttccaccgcaaggagccgccgggcggcgacgggcggcagctgtacgggcaccaccaccaccacccgctgagcccgctggccgcggtgcacccccaccatcaccgggggctgctggtggcggcgcttcccccggcgccgacgcgcatggtgatgccgctgagcgccgccatgcaccatcaccagcagccgccgcagcagcaccacagctcggcgtcagcggactccgacgacgcacacgtgccaggggtgcgcgggggggaggtgcagcagcagcagcaggcaccggcacggaagcggttccggaccaagttcaccgcggagcagaaggcccggatgctggggttcgcggaggacgccgggtggcggctgcagaagctggacgaggcggcggtgcagcgcttctgccaggaggtcggcgtgaagcggcgcgtgctcaaggtgtggatgcacaacaacaagcacaccctggcgcggcgcggccacgccgggctccccggcgacccggagctgctggggccgcacgacggccagctcggcatgccgctcccggagccggcggcggagcccgcagttgctgctgcggctgcggctggacttggagtgaccgaccaagccatgtctttcgggactggacgacattgatcaagagagtctaatgctgactgaatcagccttgcggcatagggaagctgttttctttgttaatctgctgctgatctcatcaatctagccgtagctttagctgcatttgcattccactgttccatccatcctagctatccatcaaccacaaactgatgatgcggagtctccatggatttctattccttgttgatttctgtagctgctctccccgctcttgactttaattttttagtgctcg

SEQ ID NO: 19447 - protein, 331 aa, Zea mays subsp. mays
  misc_feature (1)..(331): Ceres Seq. ID no. 12373181
MDLSGTQGELPMATMHAGGSPYLGLHHGHPQQHNHGANGRHMSPPDVVAEEAKNRQLAVVPVGTGGGGGAGVRYRECLKNHAAAIGGSATDGCGEFMPAGEEGSLDALRCSACGCHRNFHRKEPPGGDGRQLYGHHHHHPLSPLAAVHPHHHRGLLVAALPPAPTRMVMPLSAAMHHHQQPPQQHHSSASADSDDAHVPGVRGGEVQQQQQAPARKRFRTKFTAEQKARMLGFAEDAGWRLQKLDEAAVQRFCQEVGVKRRVLKVWMHNNKHTLARRGHAGLPGDPELLGPHDGQLGMPLPEPAAEPAVAAAAAAGLGVTDQAMSFGTGRH

SEQ ID NO: 19448 - protein, 320 aa, Zea mays subsp. mays
  misc_feature (1)..(320): Ceres Seq. ID no. 12373182
MATMHAGGSPYLGLHHGHPQQHNHGANGRHMSPPDVVAEEAKNRQLAVVPVGTGGGGGAGVRYRECLKNHAAAIGGSATDGCGEFMPAGEEGSLDALRCSACGCHRNFHRKEPPGGDGRQLYGHHHHHPLSPLAAVHPHHHRGLLVAALPPAPTRMVMPLSAAMHHHQQPPQQHHSSASADSDDAHVPGVRGGEVQQQQQAPARKRFRTKFTAEQKARMLGFAEDAGWRLQKLDEAAVQRFCQEVGVKRRVLKVWMHNNKHTLARRGHAGLPGDPELLGPHDGQLGMPLPEPAAEPAVAAAAAAGLGVTDQAMSFGTGRH

SEQ ID NO: 19449 - protein, 317 aa, Zea mays subsp. mays
  misc_feature (1)..(317): Ceres Seq. ID no. 12373183
MHAGGSPYLGLHHGHPQQHNHGANGRHMSPPDVVAEEAKNRQLAVVPVGTGGGGGAGVRYRECLKNHAAAIGGSATDGCGEFMPAGEEGSLDALRCSACGCHRNFHRKEPPGGDGRQLYGHHHHHPLSPLAAVHPHHHRGLLVAALPPAPTRMVMPLSAAMHHHQQPPQQHHSSASADSDDAHVPGVRGGEVQQQQQAPARKRFRTKFTAEQKARMLGFAEDAGWRLQKLDEAAVQRFCQEVGVKRRVLKVWMHNNKHTLARRGHAGLPGDPELLGPHDGQLGMPLPEPAAEPAVAAAAAAGLGVTDQAMSFGTGRH

SEQ ID NO: 19450 - DNA, 1068 bp, Zea mays subsp. mays
  misc_feature (1)..(1068): Ceres Seq. ID no. 12373184
atctctctctctctctctcttcctgcgcccacacgcacgtttccactccgaccgggccagagccccgccgggcagtttccgttcgctgttgcgatccacctcctgcctgcacatcccctcccccgagttcgagccggagggccgaagagtagatctgcggcggcggccagaggatggccgtcaactgggagctgcggggctgctgcgaccacgaccagaggatcttcatcgccgccgtcggcgtctccaccgtcgtcatcctcctcctctggaggacgttcctgctcacgccgttcaagctcatcaccgtcttcctccacgagaccagccacgcgcttgcctgcaagctcacttgcggcgatgtagaaggcatgcaggtccatgcgaatgagggtggcgttactcaaacccggggtggcatatattggataatcttgcccgctggatatctgggttcatcattttggggaatggtcttcatacttgcatccacaaatctcctcactacaagaattgcagcgggttgtttcatacttgcattgtttattgttctttttgttgcagaaaatgtaagacttgtttgaattgtgcagtggtttcttcgctggctctgccttggattcattgtgttcattgctgttgtttgggtcatacaagaatttacatctttccatgttctgaaatatgtgatcttattcataggtgtgatgaacagcttattttcagtttacgatatttatgatgacttgatatcccgaagagttaacacaagtgatgctgaaaagtttgctgaaatctgcccttgcccctgcaatggttttgcatggggtgttatatggggattcatctcgtttatctttctctgcgcttcaatataccttggactggtcatattgtcttgagggttcgccattttgatctgacaatcgactctggttggctttttcgaagcttcgttgctcgaggttttggttcaagcttacaaggttctggtggttgtacagtatacatgtgcagggtaaacatgtacatccattataagttaatttggtggggattattcatggg

SEQ ID NO: 19451 - protein, 136 aa, Zea mays subsp. mays
  misc_feature (1)..(136): Ceres Seq. ID no. 12373185
MAVNWELRGCCDHDQRIFIAAVGVSTVVILLLWRTFLLTPFKLITVFLHETSHALACKLTCGDVEGMQVHANEGGVTQTRGGIYWIILPAGYLGSSFWGMVFILASTNLLTTRIAAGCFILALFIVLFVAENVRLV

SEQ ID NO: 19452 - protein, 129 aa, Zea mays subsp. mays
  misc_feature (1)..(129): Ceres Seq. ID no. 12373186
SLSLSLFLRPHARFHSDRARAPPGSFRSLLRSTSCLHIPSPEFEPEGRRVDLRRRPEDGRQLGAAGLLRPRPEDLHRRRRRLHRRHPPPLEDVPAHAVQAHHRLPPRDQPRACLQAHLRRCRRHAGPCE

SEQ ID NO: 19453 - protein, 121 aa, Zea mays subsp. mays
  misc_feature (1)..(121): Ceres Seq. ID no. 12373187
ISLSLSLPAPTRTFPLRPGQSPAGQFPFAVAIHLLPAHPLPRVRAGGPKSRSAAAARGWPSTGSCGAAATTTRGSSSPPSASPPSSSSSSGGRSCSRRSSSSPSSSTRPATRLPASSLAAM

SEQ ID NO: 19454 - DNA, 1806 bp, Zea mays subsp. mays
  misc_feature (1)..(1806): Ceres Seq. ID no. 12373188
accagtcaaacaacgccaagcgcgcctcccgtgaacccagcggcccgtcaagtcaaagcatggacgtgccgctcccgctgctgctcggctccgtggccgtttccctcgtcgtgtggtgccttctgctccgccgcggcggggccgggaaggggaagcggccgctgccgcccggtccccggggctggccggtgctgggcaacctgccgcaggtcggcgccaagccgcaccacaccatgtgtgctctggcgcgggagtacggcccgctgttccggctccggttcggcagcgccgaggtggtggtggccgcgtcggcgcgggtggcggcccagttcctgcgcgcccacgacgccaacttcagcaaccgcccgcccaactccggggccgagcacgtggcgtacaactaccaggacctggtgttcgccccgtacggctcccggtggcgcgcgctacggaagctgtgcgcgctccacctcttctccgccaaggccctggacgacctgcgcggcgtcagggagggcgaggtggcgctcatggtgagggagctcgcccggcagggagagcgagaacgggccgccgtggcgctgggccaggtggccaacgtctgcgcgaccaacacgctggcccgggcgaccgtgggccggcgcgtgttcgccgtcgacggaggggagggcgccagggagttcaaggagatggtggtggagctgatgcagctcgccggggtcttcaacgtcggggacttcgtgccggcgctcgcgtggctcgacccgcagggcgtggtcggcaggatgaagcggctgcaccgcaggtacgacgacatgatgaacgggatcatcagggagaggaaggccgccgaggaaggcaaggacctgctcagcgtgctgctggccaggatgcgggagcagcagccgctagcggagggcgacgacactaggttcaacgagactgacatcaaggcacttctcctgaacctcttcacggctgggacggacacgacatccagcacggtggagtgggcgctggccgagctgatccggcatccggacgtgctcaggaaggcccagcaggagctcgacgccgtcgtcggccgcgaccgcctcgtctccgagtcggacctcccgcgcctcacgtacctcacggcggtgatcaaggagacgttccgtctgcacccgtccacgccgctgtcgctgccccgcgtcgccgccgaggagtgcgaggtggacgggttccgcatccccgccggcaccacgctgctggtgaacgtgtgggcgatcgcccgagacccggaggcgtggcccgagcctctcgagttccggcccggccgcttcctcccgggcggctcgcacgcgggagtcgatgtcaaagggagcgacttcgagctcatcccgttcggcgccggccggagaatctgcgcgggcctcagctggggtctgcggatggtcacgctcatgacggccacgctggtgcacgccctggactgggacctcgccgacggcatgaccgcggacaagctggacatggaggaggcctacgggctcaccctgcagcgcgccgtgccgttaatggtccgcccagcacccagactgctgccgtctgcttacgcagagtagaaatcgatgctcgccggccggccatatccatgccgtccgtatgcatggatgcatggtcaaataaataagcgttgtacgtgggtatcggtgtcacaaactcacaatgtgtatcatgtattgcttcgtcagtggcgtgtgtaagcgtccgtttttttttgtattttattctttttccagaaaaaatcaccgttgaaatcgc

SEQ ID NO: 19455 - protein, 534 aa, Zea mays subsp. mays
  misc_feature (1)..(534): Ceres Seq. ID no. 12373189
QSNNAKRASREPSGPSSQSMDVPLPLLLGSVAVSLVVWCLLLRRGGAGKGKRPLPPGPRGWPVLGNLPQVGAKPHHTMCALAREYGPLFRLRFGSAEVVVAASARVAAQFLRAHDANFSNRPPNSGAEHVAYNYQDLVFAPYGSRWRALRKLCALHLFSAKALDDLRGVREGEVALMVRELARQGERERAAVALGQVANVCATNTLARATVGRRVFAVDGGEGAREFKEMVVELMQLAGVFNVGDFVPALAWLDPQGVVGRMKRLHRRYDDMMNGIIRERKAAEEGKDLLSVLLARMREQQPLAEGDDTRFNETDIKALLLNLFTAGTDTTSSTVEWALAELIRHPDVLRKAQQELDAVVGRDRLVSESDLPRLTYLTAVIKETFRLHPSTPLSLPRVAAEECEVDGFRIPAGTTLLVNVWAIARDPEAWPEPLEFRPGRFLPGGSHAGVDVKGSDFELIPFGAGRRICAGLSWGLRMVTLMTATLVHALDWDLADGMTADKLDMEEAYGLTLQRAVPLMVRPAPRLLPSAYAE

SEQ ID NO: 19456 - protein, 515 aa, Zea mays subsp. mays
  misc_feature (1)..(515): Ceres Seq. ID no. 12373190
MDVPLPLLLGSVAVSLVVWCLLLRRGGAGKGKRPLPPGPRGWPVLGNLPQVGAKPHHTMCALAREYGPLFRLRFGSAEVVVAASARVAAQFLRAHDANFSNRPPNSGAEHVAYNYQDLVFAPYGSRWRALRKLCALHLFSAKALDDLRGVREGEVALMVRELARQGERERAAVALGQVANVCATNTLARATVGRRVFAVDGGEGAREFKEMVVELMQLAGVFNVGDFVPALAWLDPQGVVGRMKRLHRRYDDMMNGIIRERKAAEEGKDLLSVLLARMREQQPLAEGDDTRFNETDIKALLLNLFTAGTDTTSSTVEWALAELIRHPDVLRKAQQELDAVVGRDRLVSESDLPRLTYLTAVIKETFRLHPSTPLSLPRVAAEECEVDGFRIPAGTTLLVNVWAIARDPEAWPEPLEFRPGRFLPGGSHAGVDVKGSDFELIPFGAGRRICAGLSWGLRMVTLMTATLVHALDWDLADGMTADKLDMEEAYGLTLQRAVPLMVRPAPRLLPSAYAE

SEQ ID NO: 19457 - protein, 457 aa, Zea mays subsp. mays
  misc_feature (1)..(457): Ceres Seq. ID no. 12373191
MCALAREYGPLFRLRFGSAEVVVAASARVAAQFLRAHDANFSNRPPNSGAEHVAYNYQDLVFAPYGSRWRALRKLCALHLFSAKALDDLRGVREGEVALMVRELARQGERERAAVALGQVANVCATNTLARATVGRRVFAVDGGEGAREFKEMVVELMQLAGVFNVGDFVPALAWLDPQGVVGRMKRLHRRYDDMMNGIIRERKAAEEGKDLLSVLLARMREQQPLAEGDDTRFNETDIKALLLNLFTAGTDTTSSTVEWALAELIRHPDVLRKAQQELDAVVGRDRLVSESDLPRLTYLTAVIKETFRLHPSTPLSLPRVAAEECEVDGFRIPAGTTLLVNVWAIARDPEAWPEPLEFRPGRFLPGGSHAGVDVKGSDFELIPFGAGRRICAGLSWGLRMVTLMTATLVHALDWDLADGMTADKLDMEEAYGLTLQRAVPLMVRPAPRLLPSAYAE

SEQ ID NO: 19458 - DNA, 1991 bp, Zea mays subsp. mays
  misc_feature (1)..(1991): Ceres Seq. ID no. 12373199
agggttagatttccaagcaccacgccacccgtacacggtttccagcagagcattccggaaggagggggcgcgatgtggcacgaggcgcggcggtcggagcggaaggtccacgacctcatggacgcggcccgccgccgggcgcagcgccgagccgtctacctcgcccgccgccgcggcgacccgcagcaggcgctccaggtctccggcacgcggtgccgcgttcaccgcgacgacgccctgtaccaggccaccgaggaccagcagggattgatacaatggaatggaaagcaagatgttttgattgacagatttgatggccgtgcattgcttgattttatccgagactcgagctctcgcccttttcgagtccaagggaaatctgaagaagaggaagagttagaggaatttgttaattttgaacgttaccgggatttgattaagcatcgtcgcagaggatgtcggtacctttttggtttctctgttctattgctgttgctgtagaaatttcatatcttgcatccatttacatcacttgagggattgtcctaatgcacactttatttgtttctaaattggtacagaaaaagggtgctatttcttaattcaaagcactagttaactgaacatttacctagcttcttttcacagtttctgatgaggccggtttgcagcatgttgtgcaagagttggaggcaaaagctcttcttccttttagctttgacaaaccacaatcctcacagcctcctgctagcaaaggcgcatattcacaggttggatactcatacaagggagacggaaatgaggaatctgaagacctagacagtgatgacgacgacgaagaggaagaagttgatgatgatgacaaggacttcagtagtgatgatagcagtgatgaacgaatggaaagtatagcgaaagaatttgggataaaaagatataactggcttgtttacatggataaaaaaaacaaagaacaggagaagaggcagaaagaaattgttaaaggcgacccatctataaaaaaaatgagccgtagagaaagaaggaaggcttctcagattgagcgggaaaaggagcgggaggcagcacgttctgttggaagggtatcttatcgtgatccttatagggaacaaaggagaagcccatcatatgaagcatattcaaggggcagaagatcaagatcgagatcaagatctcgttcaccatcccattctaggcgtcatggccgtgggatacatgctgaaagcaattattggagcaagcaaaaggctcctagggttgaatatattactgaatttggaggttccgatgataccagtgaaccaaaagtttcagggatctctccgccttcgtctccaatacgaattgacatacctaaccggttgtctggtggtcaaattcttgaggcacttcacagtgatcctgcctcttctttgtctgtggaacaggaaagaactgcaaaacttttgaaaccttcccccagtacatcatcagcattagctaaactaagcaaggttgcttctgggggaactggtaaaactccccagactgaaaagaaagaaacaccacaagaaagacttaagaggataatgagcaaacagcttaacaagcaaattaaaaaggacacggctgctgagattgccaagaaacgagaacagaaacgacaaaggcaggaaaaacttgctgaagttggtcgatacaagcgtcgtagccgcagtagaagtcttagccgttccccaccaagaaggcggcgatatagcagaagccgtagtaggagcaaaagcccaagaaggtaccgatcccgctcgctctccagttcccggtcgccctctcgctctccaaggtaccgaagcaggtcaagacactgaaaatatccaggcagccactaacaaagtgccttgccatgttgtagttaatttattttatagactttttcattcctgcagcgatgtgtactcatgagaagcctccgtttttgttttcttagtcct

SEQ ID NO: 19459 - protein, 322 aa, Zea mays subsp. mays
  misc_feature (1)..(322): Ceres Seq. ID no. 12373200
MESIAKEFGIKRYNWLVYMDKKNKEQEKRQKEIVKGDPSIKKMSRRERRKASQIEREKEREAARSVGRVSYRDPYREQRRSPSYEAYSRGRRSRSRSRSRSPSHSRRHGRGIHAESNYWSKQKAPRVEYITEFGGSDDTSEPKVSGISPPSSPIRIDIPNRLSGGQILEALHSDPASSLSVEQERTAKLLKPSPSTSSALAKLSKVASGGTGKTPQTEKKETPQERLKRIMSKQLNKQIKKDTAAEIAKKREQKRQRQEKLAEVGRYKRRSRSRSLSRSPPRRRRYSRSRSRSKSPRRYRSRSLSSSRSPSRSPRYRSRSRH

SEQ ID NO: 19460 - protein, 304 aa, Zea mays subsp. mays
  misc_feature (1)..(304): Ceres Seq. ID no. 12373201
MDKKNKEQEKRQKEIVKGDPSIKKMSRRERRKASQIEREKEREAARSVGRVSYRDPYREQRRSPSYEAYSRGRRSRSRSRSRSPSHSRRHGRGIHAESNYWSKQKAPRVEYITEFGGSDDTSEPKVSGISPPSSPIRIDIPNRLSGGQILEALHSDPASSLSVEQERTAKLLKPSPSTSSALAKLSKVASGGTGKTPQTEKKETPQERLKRIMSKQLNKQIKKDTAAEIAKKREQKRQRQEKLAEVGRYKRRSRSRSLSRSPPRRRRYSRSRSRSKSPRRYRSRSLSSSRSPSRSPRYRSRSRH

SEQ ID NO: 19461 - protein, 280 aa, Zea mays subsp. mays
  misc_feature (1)..(280): Ceres Seq. ID no. 12373202
MSRRERRKASQIEREKEREAARSVGRVSYRDPYREQRRSPSYEAYSRGRRSRSRSRSRSPSHSRRHGRGIHAESNYWSKQKAPRVEYITEFGGSDDTSEPKVSGISPPSSPIRIDIPNRLSGGQILEALHSDPASSLSVEQERTAKLLKPSPSTSSALAKLSKVASGGTGKTPQTEKKETPQERLKRIMSKQLNKQIKKDTAAEIAKKREQKRQRQEKLAEVGRYKRRSRSRSLSRSPPRRRRYSRSRSRSKSPRRYRSRSLSSSRSPSRSPRYRSRSRH

SEQ ID NO: 19462 - DNA, 1707 bp, Zea mays subsp. mays
  misc_feature (1)..(1707): Ceres Seq. ID no. 12373211
atcggagcttgcatccgaccgcgagcaagcggaccaaatcctcctccatattctatcgcgtgcacgcatctggccgcctcgaccctcggcggcggcggcggcgacggcgacgacgacgatggggctggagatggaggcgatggcggggtcgatcggcgtgtcggtgcccgtgctccggttcctgctctgtttcgcggccaccatcccgacgggcctcctgtggcgcgcggtgcccggcgccatggggcgccacctctacgcggggctcactggtgccacgctctcctacctctccttcggggccacctccaacctcctcttcgtcgtgcccatgacgctcggttaccttgccatgctcctgttccgccgccacgccgggctcatcaccttcctcggcgccttcggcttcctcatcgcatgtcatgtgtactacatgagcggggatgcgtggaaggagggaggcattgatgcaactggagctttaatggttttaacgctgaaagtcatttcgtgctcaataaactacagtgatggtatcttgaaggaagagggtttacgcgatgctcagaaaaaaaaccgattgactaagcttccttctctaattgaatattttgggtattgtctctgttgtgggagccactttgctggaccggtatatgagatgaaagattatcttgaatggactgaaaggaaaggaatatgggctagcccaactccttcgccattgttacctactttgcgtgctctagttcaggctggtatatgcatggggttatatttatacctgtcacctaaatttccactctcacggtttagtgagcccctatattatgaatggggtttttggcaccgactcttctatcagtacatgtcaggctttaccgctcgttggaaatattactttatatggtcaatttcagaagcctcaattatcatatctggtctaggctttactggttggtcggaatcttctcccccaaaagccaaatgggatcgtgcaaaaaaatgttgatgtattaggtgttgaattagctggaagttcagttcaattgccccttgtgtggaatattcaagtgagcacatggctacgatactatgtctatgagaggttaattcagaaaggaaagaaaccaggtttccttcaattgttgggcacacagacagtcagtgccatctggcatggactatatcctggatatatcatattctttgttcaatcagcattgatgataaatggttcacgagttatatacagatggcagcaagcagcgagcagttcattactaagcggtatcctggcctttctaaattttgcttatacattgctggtgcttaactactcctgcatcgggttccaggtactgagcttcaaagaaaccttggcatcctaccggagcgtatattatgttggcacaattgttcccattgtgtgtcttctgctgggcaatgttatcaagccagcaaggaaggcgaaggctcggaagaccgagtgaggaaatactcactcaagtgacctttacatagaagaaagatggtgaagcttcaacgaagataaggacattctagttttcaatttatttattctgtctttttgtacggtatcaaatttagcataaggataatgtggtgaccccggttctcctacctcggaactcgattgcgattgatcaatcattaaaacgtgacataaccactggattttccttt

SEQ ID NO: 19463 - protein, 336 aa, Zea mays subsp. mays
  misc_feature (1)..(336): Ceres Seq. ID no. 12373212
SELASDREQADQILLHILSRARIWPPRPSAAAAATATTTMGLEMEAMAGSIGVSVPVLRFLLCFAATIPTGLLWRAVPGAMGRHLYAGLTGATLSYLSFGATSNLLFVVPMTLGYLAMLLFRRHAGLITFLGAFGFLIACHVYYMSGDAWKEGGIDATGALMVLTLKVISCSINYSDGILKEEGLRDAQKKNRLTKLPSLIEYFGYCLCCGSHFAGPVYEMKDYLEWTERKGIWASPTPSPLLPTLRALVQAGICMGLYLYLSPKFPLSRFSEPLYYEWGFWHRLFYQYMSGFTARWKYYFIWSISEASIIISGLGFTGWSESSPPKAKWDRAKKC

SEQ ID NO: 19464 - protein, 297 aa, Zea mays subsp. mays
  misc_feature (1)..(297): Ceres Seq. ID no. 12373213
MGLEMEAMAGSIGVSVPVLRFLLCFAATIPTGLLWRAVPGAMGRHLYAGLTGATLSYLSFGATSNLLFVVPMTLGYLAMLLFRRHAGLITFLGAFGFLIACHVYYMSGDAWKEGGIDATGALMVLTLKVISCSINYSDGILKEEGLRDAQKKNRLTKLPSLIEYFGYCLCCGSHFAGPVYEMKDYLEWTERKGIWASPTPSPLLPTLRALVQAGICMGLYLYLSPKFPLSRFSEPLYYEWGFWHRLFYQYMSGFTARWKYYFIWSISEASIIISGLGFTGWSESSPPKAKWDRAKKC

SEQ ID NO: 19465 - protein, 293 aa, Zea mays subsp. mays
  misc_feature (1)..(293): Ceres Seq. ID no. 12373214
MEAMAGSIGVSVPVLRFLLCFAATIPTGLLWRAVPGAMGRHLYAGLTGATLSYLSFGATSNLLFVVPMTLGYLAMLLFRRHAGLITFLGAFGFLIACHVYYMSGDAWKEGGIDATGALMVLTLKVISCSINYSDGILKEEGLRDAQKKNRLTKLPSLIEYFGYCLCCGSHFAGPVYEMKDYLEWTERKGIWASPTPSPLLPTLRALVQAGICMGLYLYLSPKFPLSRFSEPLYYEWGFWHRLFYQYMSGFTARWKYYFIWSISEASIIISGLGFTGWSESSPPKAKWDRAKKC

SEQ ID NO: 19466 - DNA, 1386 bp, Zea mays subsp. mays
  misc_feature (1)..(1386): Ceres Seq. ID no. 12373219
gcagcggattgcggagtggcattgggttggcagcacgcccctgcacacggtgacacgggccacggcgcggcgcggcgcggcacggggagcgagcgccgagcgagagcaagcaaccgctgtccgccgggccggccacggcgctgccccctgcttcgcgccttcgccggtgcgctcacgcctcacgcaggtgcatgcatcgacctacggtatcctagtctgggatcagaaaagaacacagcaacaacaaagaagaaaggcgcgagcgatggacggtgacgccggaccagagcaacacgggtgcgtgcactacaggaggggatgcaagataagggcgccgtgctgcggcgaggtatttggttgcaggcactgccacaacgaagccaaggactcgctggaggtcagcgtccacgaccgccacgtgcttccccgtcacgacatcaagctggttatctgctctctctgcaacaaagaacaggatgtaagttccctgacgaagcagggacagtgttcttcggccactgttggtgttacctgccacacaccacatgaaaaaaaaacccatctcgtctgtcgacaggtgcagcaagactgtgcgaactgcggagcatgtctcggcaaatacttctgcgcgaaatgcaacctcttcgacgacgatgtgtcgaagaaccaatttcactgcgatgggtgcggcatatgcaggactggtggcgctgagaatttctatcactgtggcagatgtggatgctgctacaccactccgctgaaggattctcaccgctgcgtggacggagctatgcatcacaactgccctgtctgcatggagtatctattcgactcgatgaaagctatcagcgtgctccactgcggacacaccatccacctggaatgcctttacgagatgagagcgcaccagcagttttcatgcccggtgtgcctgaggtctgcctgcaacatgtccgacatctggcaaaagctggatcagcaggttgcagcgtccccgatgccagcgatctaccagaagaagatggtatggatcctttgcaacgactgtggcgtgacgtccaacgtgcagttccacatcttggcgcacaagtgccctggatgcagctcttacaacacccggcagacgaggggcgatccagccgcatgctctagagtctgagagcaaataaaactgcagtactgcactgcacataaactcgtggggttgtgcggtcgatcgataggtagcttgcagggaggaaattaaagactaccattgcgcatggacacgattggtgccggcagttgagtacgtgtattaggcctgtcatatgtagatgtatcatatgcaatgccttcacaaagaagaatttggcgcagcggacagggtttttttttgttgct

SEQ ID NO: 19467 - protein, 386 aa, Zea mays subsp. mays
  misc_feature (1)..(386): Ceres Seq. ID no. 12373220
QRIAEWHWVGSTPLHTVTRATARRGAARGASAEREQATAVRRAGHGAAPCFAPSPVRSRLTQVHASTYGILVWDQKRTQQQQRRKARAMDGDAGPEQHGCVHYRRGCKIRAPCCGEVFGCRHCHNEAKDSLEVSVHDRHVLPRHDIKLVICSLCNKEQDVSSLTKQGQCSSATVGVTCHTPHEKKTHLVCRQVQQDCANCGACLGKYFCAKCNLFDDDVSKNQFHCDGCGICRTGGAENFYHCGRCGCCYTTPLKDSHRCVDGAMHHNCPVCMEYLFDSMKAISVLHCGHTIHLECLYEMRAHQQFSCPVCLRSACNMSDIWQKLDQQVAASPMPAIYQKKMVWILCNDCGVTSNVQFHILAHKCPGCSSYNTRQTRGDPAACSRV

SEQ ID NO: 19468 - protein, 298 aa, Zea mays subsp. mays
  misc_feature (1)..(298): Ceres Seq. ID no. 12373221
MDGDAGPEQHGCVHYRRGCKIRAPCCGEVFGCRHCHNEAKDSLEVSVHDRHVLPRHDIKLVICSLCNKEQDVSSLTKQGQCSSATVGVTCHTPHEKKTHLVCRQVQQDCANCGACLGKYFCAKCNLFDDDVSKNQFHCDGCGICRTGGAENFYHCGRCGCCYTTPLKDSHRCVDGAMHHNCPVCMEYLFDSMKAISVLHCGHTIHLECLYEMRAHQQFSCPVCLRSACNMSDIWQKLDQQVAASPMPAIYQKKMVWILCNDCGVTSNVQFHILAHKCPGCSSYNTRQTRGDPAACSRV

SEQ ID NO: 19469 - DNA, 1633 bp, Zea mays subsp. mays
  misc_feature (1)..(1633): Ceres Seq. ID no. 12373222
atcaagcgtgcaaggtctcaatctcgcggtaatggcgaggccacacgtcgtggttgtgccgtacccatgctccggcaacatcaacccagcgctgcagatcgccaggctgctccaccgccacggcgtctacgtcaccttcgtcaacaccgagcacaaccaccggcgcgtgcaggccaccgagggcgccggagccgtgcgcggcggggaggggttccgcttcgaggcaatcccggacggcctgtccgaggccgagcggggcaagcaggactacgggcgcagcctggctgtgtccacgagcacgcgctgcgctgcgccgctcagggacctcatcgcgcggctcaacggcacgccgggcgtgccgccggtcacctgcgtgctgcccaccatgctgatgagcttcgcgctgggcgtggcgcgggagctcgggatcccgaccatgtcgttctggacggccagcgcggcctcgctgatgacgcacatgaggctccgcgagctgcaggaaagagggtacgtgccactcaaggatgagagtttcttgacgaacggctacctcgagacgacggtcatcgactggatccccggggtgccgccgatccgcctcggcgacttctcgagcttcctccgcaccaccgacccggacgacttcggtctgcgcttcaacgagtcggaggcgaacagctgcgccaaggccggcgccctcatcctcaacaccttagacggcctcgaggccgacgtgctcgccgcgctgcgcgccgagtacccgcgcgtgtacaccgtcgggcccctgggcctgctcctcagccaggacgacgaccgagacagcagcgcctccgccagcggcagcaccgagtcgaccggcctgagcctgtggaagaaggacgccgagtgcctcgcctggctggacgcgcaagagcggggctccgtcgtgtacgtcaacttcggcagccacacggtggtgacgccggagcagctgaacgagttcgcgtggggcctcgcggcgagcggccaccggttcctctggtccatgagggacaacctcgtccgcggcggcggcggcgccggcgccggcctggacgcgatgccctcgaccttcaaggctgagacggcggggcggtgccacgtggccgcgtggtgtccccaggagcaggtgctgcggcacccggccgtcggctgcttcctgacccacagcggatggaactcgacgtgcgagagtctggccgccggcgtgcccatggtgtgctggccgggcttctcggaccagtacaccaactgcaagtacagctgcgaggtctggggtgtcggcgtccggctggaggcaacggtggagagggagcaggtcgccatgcacgtcaggaaggtgatggcaagcgaggagatgcggaagagcgcggccaagtggaaggaggaggcggaggctgcggccggccccggcggttcgtcacgcgagaacctgctgagcatggtgagagcgctcagccccgcacccaactcgtcagatgcagaagagcccaaagataagtagtcacactagaacggaatctaatgaagcaattgttcatgatcgacgccagtaaagtttgtgttcagttgattgattttctgtgagtaaattggagtagcggtcctcagccgg

SEQ ID NO: 19470 - protein, 506 aa, Zea mays subsp. mays
  misc_feature (1)..(506): Ceres Seq. ID no. 12373223
SSVQGLNLAVMARPHVVVVPYPCSGNINPALQIARLLHRHGVYVTFVNTEHNHRRVQATEGAGAVRGGEGFRFEAIPDGLSEAERGKQDYGRSLAVSTSTRCAAPLRDLIARLNGTPGVPPVTCVLPTMLMSFALGVARELGIPTMSFWTASAASLMTHMRLRELQERGYVPLKDESFLTNGYLETTVIDWIPGVPPIRLGDFSSFLRTTDPDDFGLRFNESEANSCAKAGALILNTLDGLEADVLAALRAEYPRVYTVGPLGLLLSQDDDRDSSASASGSTESTGLSLWKKDAECLAWLDAQERGSVVYVNFGSHTVVTPEQLNEFAWGLAASGHRFLWSMRDNLVRGGGGAGAGLDAMPSTFKAETAGRCHVAAWCPQEQVLRHPAVGCFLTHSGWNSTCESLAAGVPMVCWPGFSDQYTNCKYSCEVWGVGVRLEATVEREQVAMHVRKVMASEEMRKSAAKWKEEAEAAAGPGGSSRENLLSMVRALSPAPNSSDAEEPKDK

SEQ ID NO: 19471 - protein, 496 aa, Zea mays subsp. mays
  misc_feature (1)..(496): Ceres Seq. ID no. 12373224
MARPHVVVVPYPCSGNINPALQIARLLHRHGVYVTFVNTEHNHRRVQATEGAGAVRGGEGFRFEAIPDGLSEAERGKQDYGRSLAVSTSTRCAAPLRDLIARLNGTPGVPPVTCVLPTMLMSFALGVARELGIPTMSFWTASAASLMTHMRLRELQERGYVPLKDESFLTNGYLETTVIDWIPGVPPIRLGDFSSFLRTTDPDDFGLRFNESEANSCAKAGALILNTLDGLEADVLAALRAEYPRVYTVGPLGLLLSQDDDRDSSASASGSTESTGLSLWKKDAECLAWLDAQERGSVVYVNFGSHTVVTPEQLNEFAWGLAASGHRFLWSMRDNLVRGGGGAGAGLDAMPSTFKAETAGRCHVAAWCPQEQVLRHPAVGCFLTHSGWNSTCESLAAGVPMVCWPGFSDQYTNCKYSCEVWGVGVRLEATVEREQVAMHVRKVMASEEMRKSAAKWKEEAEAAAGPGGSSRENLLSMVRALSPAPNSSDAEEPKDK

SEQ ID NO: 19472 - protein, 378 aa, Zea mays subsp. mays
  misc_feature (1)..(378): Ceres Seq. ID no. 12373225
MLMSFALGVARELGIPTMSFWTASAASLMTHMRLRELQERGYVPLKDESFLTNGYLETTVIDWIPGVPPIRLGDFSSFLRTTDPDDFGLRFNESEANSCAKAGALILNTLDGLEADVLAALRAEYPRVYTVGPLGLLLSQDDDRDSSASASGSTESTGLSLWKKDAECLAWLDAQERGSVVYVNFGSHTVVTPEQLNEFAWGLAASGHRFLWSMRDNLVRGGGGAGAGLDAMPSTFKAETAGRCHVAAWCPQEQVLRHPAVGCFLTHSGWNSTCESLAAGVPMVCWPGFSDQYTNCKYSCEVWGVGVRLEATVEREQVAMHVRKVMASEEMRKSAAKWKEEAEAAAGPGGSSRENLLSMVRALSPAPNSSDAEEPKDK

SEQ ID NO: 19473 - DNA, 1560 bp, Zea mays subsp. mays
  misc_feature (1)..(1560): Ceres Seq. ID no. 12373262
gaaccccgagtcccgaccagagagagacacggagaggagcagacctgcccgtcgcaatggcgatgccaccgaagcccggcgacccgccgcagcgctcgccggcacgtagcccaaacctcaatctcccctgcccgctgccgccggtcccgggcggggcgccgccaccgccgcagcagcagccgggcgccgggctgcccccgccgcgcgtgggccaccaccgccgcgccagatctgaggtggccttccgcttcccggacgacctgcccggcggcgggggcggcggcttcgacgagatcggctccgaggacgacctcttctccaccttcatggacatggacaagatcgccggcgccgaccgcgaccgcgccgccgagacctcctcgccgccgcgcccagccaagcaccgccacagcgtctcctttgacggcttcggcatgggggctgccgccggcggcccgggcggccagcaggacgggggtggaggcgtgttcggagaggtgatggaggccaagaaggccatgtgcttccgagcagctctccgagctcgccgccatcgatcccaagcgcgccaaaagaattattgcaaacaggcaatctgcagcacggtcaaaggaaagaaaagctcgatatataacagaattggagcggaaggttcaaactcttcagacagaggctactactctttcagcacagctgacactattccagagagacacaactggactttcagcagaaaatgctgagctcaagataaggttgcaggccatggagcagcaggctcagctgcgtgacgctctaaatgatgcactgaggcaagaagtggagaggcttaagatagcaacgggcgagatgtcgaagtccaataacgagcatttcaatatgggaatgcagcacgtctcctacagcccttcattcttccagctctcggagcaacacacaatgcagcagcatggaaacattcagctgccgcatcatttccaacagcctccgctgactgtcccgagccaccagatgctatcccaccccaactccctctcgaacatggtgcagccaagactcgcttgggcggctccaggggctggacattgggaaaggatccatggctgtgaagtcggaggctgaggtcgtggtgaagtcggagggcagctctatatctgcgggtgaaagcaacaccaccttctagctatacaatacgtctgccttccaagaagcctttgtttggtttagagttcttcttttgttcatagtctgacatccttgaactgcttcctccttccctgtagtttttttattccattcgttatatctagttaccattgatcggttgtgtcgatcgttgttgtcgtggtggctgattttatagggacattggtgtgttggttttgagtttgttatgtgtgtggtatggttggttgtttcgagctagtgactgagagggcaccgagtgattttttggcagattttcttttctccacctgtcttagttttgttatagaacaaccatgatttctccttctgggaatgtgtacattgcgtgaagtgtgttgtttcaggctatct

SEQ ID NO: 19474 - protein, 246 aa, Zea mays subsp. mays
  misc_feature (1)..(246): Ceres Seq. ID no. 12373263
TPSPDQRETRRGADLPVAMAMPPKPGDPPQRSPARSPNLNLPCPLPPVPGGAPPPPQQQPGAGLPPPRVGHHRRARSEVAFRFPDDLPGGGGGGFDEIGSEDDLFSTFMDMDKIAGADRDRAAETSSPPRPAKHRHSVSFDGFGMGAAAGGPGGQQDGGGGVFGEVMEAKKAMCFRAALRARRHRSQARQKNYCKQAICSTVKGKKSSIYNRIGAEGSNSSDRGYYSFSTADTIPERHNWTFSRKC

SEQ ID NO: 19475 - protein, 228 aa, Zea mays subsp. mays
  misc_feature (1)..(228): Ceres Seq. ID no. 12373264
MAMPPKPGDPPQRSPARSPNLNLPCPLPPVPGGAPPPPQQQPGAGLPPPRVGHHRRARSEVAFRFPDDLPGGGGGGFDEIGSEDDLFSTFMDMDKIAGADRDRAAETSSPPRPAKHRHSVSFDGFGMGAAAGGPGGQQDGGGGVFGEVMEAKKAMCFRAALRARRHRSQARQKNYCKQAICSTVKGKKSSIYNRIGAEGSNSSDRGYYSFSTADTIPERHNWTFSRKC

SEQ ID NO: 19476 - protein, 226 aa, Zea mays subsp. mays
  misc_feature (1)..(226): Ceres Seq. ID no. 12373265
MPPKPGDPPQRSPARSPNLNLPCPLPPVPGGAPPPPQQQPGAGLPPPRVGHHRRARSEVAFRFPDDLPGGGGGGFDEIGSEDDLFSTFMDMDKIAGADRDRAAETSSPPRPAKHRHSVSFDGFGMGAAAGGPGGQQDGGGGVFGEVMEAKKAMCFRAALRARRHRSQARQKNYCKQAICSTVKGKKSSIYNRIGAEGSNSSDRGYYSFSTADTIPERHNWTFSRKC

SEQ ID NO: 19477 - DNA, 1448 bp, Zea mays subsp. mays
  misc_feature (1)..(1448): Ceres Seq. ID no. 12373281
atatccccgcagtttctagctcgattccccaaccgccgtgcttccgctctcgcaccgcgtcttccttgttcgtgtgctccttcctcagacccaggctcttcccgagtccgaatccgagtctgagatccagatccgcgctcagatccatcgctggggggcgccatgaacccgacgcgccccgcgcaggcgtcgttccgcgaccgtaccaacgagttccgcgccgcagttgagagcgcgcgccgccacgctgcaccttcctcgtcgtcggcccccaccgcggcgagcagcagctctaccgggtccctcgacgggatgatctcggccacgtcggctcgctcggagttcaacaaccgcgcgtccaagatcgggctcgggatccaccagacctcccagaagctagcccgccttgccaaattggcaaagagaacgtctgtttttgatgatcctacattagagattcaagagctgacctcagttatcaaaaaggatatcacggctttgaatactgctgtcgtagacctacaagctctctgcaattcacaaaatgagagtggcagtctctccaaggacacaacaaaccattccactacagtcgtggacaaccttaaaaatcgtctgatgagtgcaacaaaagaatttaaagaagttcttaccatgcgaaccgagaatttgaaggttcatgaaaatagaaggcaaatattttcttcgtcagctgcaaaggatgagtcaaatccattcatccgtcaacgaccccttgttgctagggatccatcggagtcctctgtgcccccagcaccatgggccagcgactctgcatctaccccactattccagaggaagaagactaatggagatcatggagcatcatcatcatctcagcctttcgtgcagcagcagcaattggcagtacaacaggacagttacatgcagagcagagctgaagctctacaaaatgtggaatcaacaatccatgagctgagcaacatctttacacagttggcaaccatggtttctcaacagggagagctagcaatcagaatcgacgagaacatggaggaaaccgtggctaacgtggagggagcgcagggccagctcctgaagtacctcaacagcatttcgtccaacaggtggctgatgatgaagatattctttgtgctgatggtgttcctcatgatcttcatattcttcgtcgcttgaccttctgcaatcattctgcccgagacgctctggctgctaaacgcatagcattcttttatttttaactcatactacaccgtgtacacaattttcacccatggatgatgagcagagtcgttcacccttttgtggtcatgtaaatcgggaggagttccagtacttaagtttactcttgattggtaatatctccactgtatttgatgtatcagtatgctgaacagtaatagtaataggcaggtggtagcagtgtt

SEQ ID NO: 19478 - protein, 344 aa, Zea mays subsp. mays
  misc_feature (1)..(344): Ceres Seq. ID no. 12373282
MNPTRPAQASFRDRTNEFRAAVESARRHAAPSSSSAPTAASSSSTGSLDGMISATSARSEFNNRASKIGLGIHQTSQKLARLAKLAKRTSVFDDPTLEIQELTSVIKKDITALNTAVVDLQALCNSQNESGSLSKDTTNHSTTVVDNLKNRLMSATKEFKEVLTMRTENLKVHENRRQIFSSSAAKDESNPFIRQRPLVARDPSESSVPPAPWASDSASTPLFQRKKTNGDHGASSSSQPFVQQQQLAVQQDSYMQSRAEALQNVESTIHELSNIFTQLATMVSQQGELAIRIDENMEETVANVEGAQGQLLKYLNSISSNRWLMMKIFFVLMVFLMIFIFFVA

SEQ ID NO: 19479 - protein, 294 aa, Zea mays subsp. mays
  misc_feature (1)..(294): Ceres Seq. ID no. 12373283
MISATSARSEFNNRASKIGLGIHQTSQKLARLAKLAKRTSVFDDPTLEIQELTSVIKKDITALNTAVVDLQALCNSQNESGSLSKDTTNHSTTVVDNLKNRLMSATKEFKEVLTMRTENLKVHENRRQIFSSSAAKDESNPFIRQRPLVARDPSESSVPPAPWASDSASTPLFQRKKTNGDHGASSSSQPFVQQQQLAVQQDSYMQSRAEALQNVESTIHELSNIFTQLATMVSQQGELAIRIDENMEETVANVEGAQGQLLKYLNSISSNRWLMMKIFFVLMVFLMIFIFFVA

SEQ ID NO: 19480 - protein, 192 aa, Zea mays subsp. mays
  misc_feature (1)..(192): Ceres Seq. ID no. 12373284
MSATKEFKEVLTMRTENLKVHENRRQIFSSSAAKDESNPFIRQRPLVARDPSESSVPPAPWASDSASTPLFQRKKTNGDHGASSSSQPFVQQQQLAVQQDSYMQSRAEALQNVESTIHELSNIFTQLATMVSQQGELAIRIDENMEETVANVEGAQGQLLKYLNSISSNRWLMMKIFFVLMVFLMIFIFFVA

SEQ ID NO: 19481 - DNA, 1681 bp, Zea mays subsp. mays
  misc_feature (1)..(1681): Ceres Seq. ID no. 12373285
atcgcgtgcgctctgtggaccgtggtggcgactactgggtggccgccgccacccccgctcggccgccctacgccaggtgctcaccgtcttcgggaccttcgccggcaacgaacactcaccagggaggatgttgcccttgtttagacactgctgtgcctttggaagtcatcatcctcatcccttaatttggaggaacatcttccaaacatcgcgaagagaacaaaaacaaatcaggagttgggatgcacagtgctcagcaaatcaggatcaagcttctatagagaaatgcaatgctccaaagaatttaccaatacctgataattcacttctcgatgctcgtattctctattgtacctctcctgccctgggtcataacaaagaagcacacccagaatcgaacaaaagagttcctgtgatagttgatactcttgagaaattggagcttagtcccaagcatcgtggttcacaggttcttgaaattcaaaatttcaaccctgcttctctagatgatgttgcacgagttcattcaagatcttacatcactggactagaaaaggctatgggcagagcttcagatgaaggtctgatattgattgaagggacaggaccaacatacgctacagaaactactttccgagaatcacttctatcagctggtgccggaatcacactggttgattcagtggtcgcagcgtcaaagttaggtcctaatccgccccttggctttgcattgataaggccaccaggacatcatgctgttcctcaaggtcccatgggtttttgtgtctttgggaacattgcagtggcagctcggtacgctcagcatcaacatggactaaagcgtgtgatgataatagattttgatgttcaccatggcaatgggacgtcagattcattttatgatgatccagatatcttcttcttgtcaactcaccagcttggaagctaccctggtactggtaagatcaatgaagtcggacagggtgatggtgaaggcacgacactcaaccttcctctgcccggtggcgcaggtgactacgcaatgagatgtgcatttgatgaggtcattgctccatcggcccatcgattcaagcctgatataatccttgtatcagctggatacgacgcacacgcgctggaccctctggctggccttcagttcacaacaggcacgttctacatgctggcatccagcatcaagcaggtgaccaaggaactctgtggtggccgctgtgtcttcttcctggaaggcgggtacaacctgcagtcgctctccagctccgttgccgacacgttccgtgcattccttgatgagcccagcctcgcagcacagtttgatgatccagcgatacttttcgaagagccgactcggaagatcaaggaagcaatcgagaaggccaagagcatccactcactctaggctgtcagctaattttccccccaatccccagaaatcccggaggggtagccctaaattgggaaaaggtgctgtcagcagtgtgcactgcagaactgcaagatcttgtggcaattggcattttgcaggtaggtagtgcatagtttgaacttggaaggcatggtcattttaatttagccaattctcaccagaaaatggaattaccgttctctcaatactagctgtatatattgaccaaaagttatgtgctacattattaatttt

SEQ ID NO: 19482 - protein, 472 aa, Zea mays subsp. mays
  misc_feature (1)..(472): Ceres Seq. ID no. 12373286
SRALCGPWWRLLGGRRHPRSAALRQVLTVFGTFAGNEHSPGRMLPLFRHCCAFGSHHPHPLIWRNIFQTSRREQKQIRSWDAQCSANQDQASIEKCNAPKNLPIPDNSLLDARILYCTSPALGHNKEAHPESNKRVPVIVDTLEKLELSPKHRGSQVLEIQNFNPASLDDVARVHSRSYITGLEKAMGRASDEGLILIEGTGPTYATETTFRESLLSAGAGITLVDSVVAASKLGPNPPLGFALIRPPGHHAVPQGPMGFCVFGNIAVAARYAQHQHGLKRVMIIDFDVHHGNGTSDSFYDDPDIFFLSTHQLGSYPGTGKINEVGQGDGEGTTLNLPLPGGAGDYAMRCAFDEVIAPSAHRFKPDIILVSAGYDAHALDPLAGLQFTTGTFYMLASSIKQVTKELCGGRCVFFLEGGYNLQSLSSSVADTFRAFLDEPSLAAQFDDPAILFEEPTRKIKEAIEKAKSIHSL

SEQ ID NO: 19483 - protein, 430 aa, Zea mays subsp. mays
  misc_feature (1)..(430): Ceres Seq. ID no. 12373287
MLPLFRHCCAFGSHHPHPLIWRNIFQTSRREQKQIRSWDAQCSANQDQASIEKCNAPKNLPIPDNSLLDARILYCTSPALGHNKEAHPESNKRVPVIVDTLEKLELSPKHRGSQVLEIQNFNPASLDDVARVHSRSYITGLEKAMGRASDEGLILIEGTGPTYATETTFRESLLSAGAGITLVDSVVAASKLGPNPPLGFALIRPPGHHAVPQGPMGFCVFGNIAVAARYAQHQHGLKRVMIIDFDVHHGNGTSDSFYDDPDIFFLSTHQLGSYPGTGKINEVGQGDGEGTTLNLPLPGGAGDYAMRCAFDEVIAPSAHRFKPDIILVSAGYDAHALDPLAGLQFTTGTFYMLASSIKQVTKELCGGRCVFFLEGGYNLQSLSSSVADTFRAFLDEPSLAAQFDDPAILFEEPTRKIKEAIEKAKSIHSL

SEQ ID NO: 19484 - protein, 286 aa, Zea mays subsp. mays
  misc_feature (1)..(286): Ceres Seq. ID no. 12373288
MGRASDEGLILIEGTGPTYATETTFRESLLSAGAGITLVDSVVAASKLGPNPPLGFALIRPPGHHAVPQGPMGFCVFGNIAVAARYAQHQHGLKRVMIIDFDVHHGNGTSDSFYDDPDIFFLSTHQLGSYPGTGKINEVGQGDGEGTTLNLPLPGGAGDYAMRCAFDEVIAPSAHRFKPDIILVSAGYDAHALDPLAGLQFTTGTFYMLASSIKQVTKELCGGRCVFFLEGGYNLQSLSSSVADTFRAFLDEPSLAAQFDDPAILFEEPTRKIKEAIEKAKSIHSL

SEQ ID NO: 19485 - DNA, 1054 bp, Zea mays subsp. mays
  misc_feature (1)..(1054): Ceres Seq. ID no. 12373289
aagatcgccgcctcgcagtcgcacagtcgcactcgctccacttccattcccagcgaccccgcccgcccggaggcgtcgcacctgcacgctgcggcagcgggcagccgccaagcctctctcgtgcggcaagcaccacacagacacccgatggcgctgctgctgctgcgcggctgcgccgcgccgccagccgtccacgcggccccggcggggtcccggctgctccctccggcgctgccgcggcggcggctcgtggccgtcgcctcttcggcctcctccgcgccgtccggcgaggtggcgtcgtcgtcccaggacggccgcggctacgggatcgtgggcgggcccaacggccacgccatcgctcccgccacagacaccaagtccaccgccgtcgagaccaccgtcgagagggtgatcttcgacttccggttcctggcactcctcgccgtcgccgggtcgctcgccggctccgtcctgtgcttcctcaatggctgtgtcttcatcaaagaggcgtaccaggtttactggtcgagctgtgtcaagggggttcattcggggcagatggtcctcaaggtcgtcgaggccatcgatgtgtatcttgctggaacagtcatgctgatatttgggatgggtctctacggcctcttcatcagcaacgctcccgccggtgttcctcctgaatccgaccgtgccctcagcggctcgtcgctgttcggaatgttcgctttgaaggaacgcccgaagtggatgaacatcacctcgcttgacgagctcaagacaaaagtggggcacgtcatcgtgatgattctacttgtgaagatgttcgagaagagcaagatggtgacgatagccacggggctggacctcctcagctactcgatctgcatcttcttgtcatcagcttctctctacatcctgcacaatcttcacaagggcgaccatgaggagtgacgagagtgaaatgccgaatttgtagcctattcgagagagagagttgacggtcttgtccaataatcaatactggatttttaagactctcttcaacggtgttctcttc

SEQ ID NO: 19486 - protein, 315 aa, Zea mays subsp. mays
  misc_feature (1)..(315): Ceres Seq. ID no. 12373290
KIAASQSHSRTRSTSIPSDPARPEASHLHAAAAGSRQASLVRQAPHRHPMALLLLRGCAAPPAVHAAPAGSRLLPPALPRRRLVAVASSASSAPSGEVASSSQDGRGYGIVGGPNGHAIAPATDTKSTAVETTVERVIFDFRFLALLAVAGSLAGSVLCFLNGCVFIKEAYQVYWSSCVKGVHSGQMVLKVVEAIDVYLAGTVMLIFGMGLYGLFISNAPAGVPPESDRALSGSSLFGMFALKERPKWMNITSLDELKTKVGHVIVMILLVKMFEKSKMVTIATGLDLLSYSICIFLSSASLYILHNLHKGDHEE

SEQ ID NO: 19487 - protein, 266 aa, Zea mays subsp. mays
  misc_feature (1)..(266): Ceres Seq. ID no. 12373291
MALLLLRGCAAPPAVHAAPAGSRLLPPALPRRRLVAVASSASSAPSGEVASSSQDGRGYGIVGGPNGHAIAPATDTKSTAVETTVERVIFDFRFLALLAVAGSLAGSVLCFLNGCVFIKEAYQVYWSSCVKGVHSGQMVLKVVEAIDVYLAGTVMLIFGMGLYGLFISNAPAGVPPESDRALSGSSLFGMFALKERPKWMNITSLDELKTKVGHVIVMILLVKMFEKSKMVTIATGLDLLSYSICIFLSSASLYILHNLHKGDHEE

SEQ ID NO: 19488 - protein, 224 aa, Zea mays subsp. mays
  misc_feature (1)..(224): Ceres Seq. ID no. 12373292
DRRLAVAQSHSLHFHSQRPRPPGGVAPARCGSGQPPSLSRAASTTQTPDGAAAAARLRRAASRPRGPGGVPAAPSGAAAAAARGRRLFGLLRAVRRGGVVVPGRPRLRDRGRAQRPRHRSRHRHQVHRRRDHRREGDLRLPVPGTPRRRRVARRLRPVLPQWLCLHQRGVPGLLVELCQGGSFGADGPQGRRGHRCVSCWNSHADIWDGSLRPLHQQRSRRCSS

SEQ ID NO: 19489 - DNA, 999 bp, Zea mays subsp. mays
  misc_feature (1)..(999): Ceres Seq. ID no. 12373297
tgcgaggtgcgacaaaccgacaagccaacaatggcgtcgtcagctgctacgaccgcgaagccgatcgcgctcccgccggcgccaacccgcggcggctgctgctgctggaggacacgcaggcccgcgatccccgcggcggcggcacgcctcaaggtctccgcctccgccgcctcgtcggacgtgccggacttcctctcgtccaattggcttgaaacccgcaagagaaagcccttcggtcccaggttgaattttagtgcagaagaagcagtcgaataccagcttgagtccttaaagtacaatgatctgccccgcccagattatgggatagaggtcatgtaccggtttgcaggctttgaccctttcgagaggtcaacttactttggacgacagtttgatctaggacagttcgagcgcttccggcgtctgttttcaccactcaacctacagagtgctgctgggccacagagagagaagaatattgagcagtttatgggttgaagagaaccagttcaagcaaagagtttgggtacaaggagcccgtcccgaggaagaagagatatttcaattcacaatggttcagagggtcggaggatcatgggatggttactggctgacagagagcttaataaacgatggagacgcgttctcgggtgggattgcttactgatgtagtgatgattggtgtaaatcgatcaggtgcagactagcaggtggcgtgaaaaagctgagagacatgttggtgtgtagaatttgccctggctttctggagatgtttggcagtgtcggacacgctagtattgtacaggaagagacctctcacggcgcccatagcaccagatggccaagcatgctgtcatggaccttcggtccatgagatagctgtcttctccggcgaggttatacccctctgccgcaggcttggttctagggtagcagccctaggcgcttgagagggtcattgcaagggagagagattggtttgataatgatcttgcttgc

SEQ ID NO: 19490 - protein, 165 aa, Zea mays subsp. mays
  misc_feature (1)..(165): Ceres Seq. ID no. 12373298
CEVRQTDKPTMASSAATTAKPIALPPAPTRGGCCCWRTRRPAIPAAAARLKVSASAASSDVPDFLSSNWLETRKRKPFGPRLNFSAEEAVEYQLESLKYNDLPRPDYGIEVMYRFAGFDPFERSTYFGRQFDLGQFERFRRLFSPLNLQSAAGPQREKNIEQFMG

SEQ ID NO: 19491 - protein, 155 aa, Zea mays subsp. mays
  misc_feature (1)..(155): Ceres Seq. ID no. 12373299
MASSAATTAKPIALPPAPTRGGCCCWRTRRPAIPAAAARLKVSASAASSDVPDFLSSNWLETRKRKPFGPRLNFSAEEAVEYQLESLKYNDLPRPDYGIEVMYRFAGFDPFERSTYFGRQFDLGQFERFRRLFSPLNLQSAAGPQREKNIEQFMG

SEQ ID NO: 19492 - DNA, 1445 bp, Zea mays subsp. mays
  misc_feature (1)..(1445): Ceres Seq. ID no. 12373364
atacatcccttgcctctttctcctcccccgcatctgcttctttctctccacgccaacccgacaccgcgcggtcggctcggctcggccatccccgccagctcccgctcgagatcccagcgccatgacgatcggcgtcgctctcttgctcgacctcacctcccgcctgccccgcgccggggcatccgccgcctccgcagccgtccgctcccaccccggtctctctaccaccgccttcgccgcgactgccgcggccgcgttgtcgtcctccggggtgccgctctccgcgcgccacctcttcggttttcatgggtttactgttgctcattgtgatgctggcacacctgcctggatggaatgatggttctgatgatcttgttaatgagattaataccaagattattgattccttgcaatatgcaagaaaagactacttccagaacacaacaaaggaatacccttcagagctgaagccactcttttctgcctttgggttgaaaaattttactatcacaaccctaaggtctttcctattatattatttgccactcatacaacctaaacctcacactggttctgatgatgaggatgatgatctgcttcatgacactcaagagaaaaccatggatctggttactcccttctacaattcagtaaagcaaatcgtgcgggagacttctattgtaacgaccagacgagtatttgaaaggattgtagttcgtcatgtttcacaaagaacagcatggaaacttctcaaagatgcttcaaaatcatcaaaaaggaaagctgcaagggggatgccaactccacagtacacatactgtgttgccagaacaactttccgagcacatgcactgggaataaccgctgcttgggtagtgcaatccataattgaagtatacagatgtttcatccgtaagcctagtgaggactgtgaagcactatcaagcgacggcaatgcacagtttgacgatatgaataaattcagattgtttgggaggaagatttatgggattaccatcaaaagttgtttctctttggttttggcctcagctggagcaggcattggtgccctcgtgcatccagtgcatggacaatggttgggttgtgccttgggagatattgcaggtccaattatcgctataattgtttttgagaagatgcagctaccactatgagaaactggatttttggcgaccactggttttgggtcccttgtgcaagtcatggccttcagtcttctgtgtggttggagatccctgatctaacttgaaagttcacagttgatgaataacagctttcacctcagtgctcgtagttttgtagctccctttacagatgccttcgggtcttgtgggacatgagcatgtacttttgcagttttgctaaattttgtactctcagatttgaagaatccaaacaagaaatttaattttactagatttgag

SEQ ID NO: 19493 - protein, 289 aa, Zea mays subsp. mays
  misc_feature (1)..(289): Ceres Seq. ID no. 12373365
MGLLLLIVMLAHLPGWNDGSDDLVNEINTKIIDSLQYARKDYFQNTTKEYPSELKPLFSAFGLKNFTITTLRSFLLYYLPLIQPKPHTGSDDEDDDLLHDTQEKTMDLVTPFYNSVKQIVRETSIVTTRRVFERIVVRHVSQRTAWKLLKDASKSSKRKAARGMPTPQYTYCVARTTFRAHALGITAAWVVQSIIEVYRCFIRKPSEDCEALSSDGNAQFDDMNKFRLFGRKIYGITIKSCFSLVLASAGAGIGALVHPVHGQWLGCALGDIAGPIIAIIVFEKMQLPL

SEQ ID NO: 19494 - protein, 281 aa, Zea mays subsp. mays
  misc_feature (1)..(281): Ceres Seq. ID no. 12373366
MLAHLPGWNDGSDDLVNEINTKIIDSLQYARKDYFQNTTKEYPSELKPLFSAFGLKNFTITTLRSFLLYYLPLIQPKPHTGSDDEDDDLLHDTQEKTMDLVTPFYNSVKQIVRETSIVTTRRVFERIVVRHVSQRTAWKLLKDASKSSKRKAARGMPTPQYTYCVARTTFRAHALGITAAWVVQSIIEVYRCFIRKPSEDCEALSSDGNAQFDDMNKFRLFGRKIYGITIKSCFSLVLASAGAGIGALVHPVHGQWLGCALGDIAGPIIAIIVFEKMQLPL

SEQ ID NO: 19495 - protein, 184 aa, Zea mays subsp. mays
  misc_feature (1)..(184): Ceres Seq. ID no. 12373367
MDLVTPFYNSVKQIVRETSIVTTRRVFERIVVRHVSQRTAWKLLKDASKSSKRKAARGMPTPQYTYCVARTTFRAHALGITAAWVVQSIIEVYRCFIRKPSEDCEALSSDGNAQFDDMNKFRLFGRKIYGITIKSCFSLVLASAGAGIGALVHPVHGQWLGCALGDIAGPIIAIIVFEKMQLPL

SEQ ID NO: 19496 - DNA, 1105 bp, Zea mays subsp. mays
  misc_feature (1)..(1105): Ceres Seq. ID no. 12373368
gcacgagaccattacctagaacatcctaatcgaaaagaatccgcatttccccttccccgcaccgcaccgcaccgcacccaacccccgtcggagagagagatggcatcggtggcggagatgcagcccctcgcgccggcggggtaccgccgcgcgccggagatgaaggagaaggtggaggcgtcggtggtggacctggaggccgggaccggggagacgctgtacccggggatctcgcgcggggagagcgccctccgatggggcttcgtccgcaaggtctacggcatcctcgctgcgcagctgctcctcaccaccgccgtctccgccctcaccgttctccaccccaccctcaacgccacgctctccgactccccgggcctcgcgctcgtgctcgccgtcctgcccttcatcctgatgatcccattgtaccattatcagcacaagcacccacacaatttcgttttcctgggtctgttcacgttgtgcttgagcttcagcatcggcgtggcttgtgctaacacccaaggaaaaatcgttctggaggctttagtgctgacggctggcgtggtggtttctctgactgcgtatgctttctgggcgtcaaagaagggcaaggaatttgggtacctggggcctatcctgtcttccgcgcttactatcctcgtcctaactagctttcttcaggttttcttcccactgggacccgtgtcggtgggcttgttcggtggtctaggggctctggtcttctcaggcttcatcctgtacgacaccgagaacctgatcaagcgccacacctacgacgagtacatctgggcgtcggttgggctgtacctcgacatcctgaacctgttcctctccatcctgaacatgctcaggagcatgcaatccgacaactagcctcttgatcgaacacggtatacccccatggtaaatgcggtcctgtgctctggttgttagaggacgggatcgacgtgcgacatatgtattgtgtgagcccactcgtgtcaacactgcaaacaattgtggtcatgtcaccttgtatgttcttggtcacttttcaaacaattgtaagtacctcatatcgttttgcgctcgtgctattcgcgcc

SEQ ID NO: 19497 - protein, 297 aa, Zea mays subsp. mays
  misc_feature (1)..(297): Ceres Seq. ID no. 12373369
ARDHYLEHPNRKESAFPLPRTAPHRTQPPSEREMASVAEMQPLAPAGYRRAPEMKEKVEASVVDLEAGTGETLYPGISRGESALRWGFVRKVYGILAAQLLLTTAVSALTVLHPTLNATLSDSPGLALVLAVLPFILMIPLYHYQHKHPHNFVFLGLFTLCLSFSIGVACANTQGKIVLEALVLTAGVVVSLTAYAFWASKKGKEFGYLGPILSSALTILVLTSFLQVFFPLGPVSVGLFGGLGALVFSGFILYDTENLIKRHTYDEYIWASVGLYLDILNLFLSILNMLRSMQSDN

SEQ ID NO: 19498 - protein, 264 aa, Zea mays subsp. mays; identical to SEQ ID NO: 16066
  misc_feature (1)..(264): Ceres Seq. ID no. 12373370

SEQ ID NO: 19499 - protein, 258 aa, Zea mays subsp. mays; identical to SEQ ID NO: 16067
  misc_feature (1)..(258): Ceres Seq. ID no. 12373371

SEQ ID NO: 19500 - DNA, 2062 bp, Zea mays subsp. mays
  misc_feature (1)..(2062): Ceres Seq. ID no. 12373375
ctctcactaccaccaccactgccccggatccataccagctgcagcagcagcgcgcgcgagctagcttcggtcggtcgatagatcgatcgatcgctcggccatcatggcgcgggaggagcaggcgctgctgtcgacggagatcgtgaaccgcggcgtggagccgtcgggcccggacgccggctcgccggccttctcggtgcgcgtgcgccgccgcctgccggacttcctgcagtcggtgaacctcaagtacgtgcgcctcgggtaccactacctcatcagccacggcgtgtacctggccaccatccccgtcatcgtgctggtgtgcggcgccgagctgggcagcctcagccgcgacgagctgtggcgcaaggtgtggggggaggccacctacgacctcgccaccgtgctcgccttcctcgccgtcctcgccttcaccatctccgtctacatcatgtccaggcccaggcccgtgtacctcatcgacttcgcatgctacaagccggccgacgagctcaaggtgtccaaggcggagttcatcgacctggcgcgcaagtccggcaagttcgacgaggacagcctggcgttccagtcgcgtctgctggccaagtccggcatcggcgacgagtcgtacatgccgcgctgcgtgttcgagcccaacgccagctgcgccaccatgaaggagggccgcgccgaggcgtccacggccatgttcgcggcgctggacgagctgttcgacaagtgccgcgtccggcccaaggacgtgggcgtgctggtggtcaactgcagcctcttcaacccgacgccctccctgtccgccatgatcgtcaaccactacaagatgcgcggcaacatcctgagctacaacctgggggggcatgggctgcagcggcgggcgtcatcgccatcgatctggcccgcgacatgctccaggccagcggcgcgggcctggccgtggtggtcagcacggaggccgtctccttcacgtggtaccccgggaagcggcgctccatgctcatcccgaacgccttcttccgggccggctgcgcggcggtgctgctgtccaaccggcgccgcgacttccaccgcgccaagtaccagctggagcacgtggtgcgcacgcacaagggcgcggacgaccgcgccttccgctccgtgtaccaggaggaggacgagcagcggatcaagggcctgtccatcagccgcgacctgctggaggtgggcggccacgcgctcaagaccaacatcaccacgctggggcccctggtgctgcccttctccgagcagctgctcttcttcgcgggcgtgctgttccgccacctgttcccgtccaaggcctccacgccggcgccgccgaccaccccaggggacgcctcggccgccgcgccctacatcccggacttcaagcgcgcgttcgagcacttctgcatgcacgcggccagccgcgacgtgctggagcacctgcagagcaacctgggcctgcgcaacgccgacctggaggcctcccgcgccgcgctgcaccgcttcggcaacacctcaagcagcagcatctggtacgagctggcgtacctggaggccaagggccgcgtccgccgcggcgaccgcgtctggcagctcgccttcgggtcgggcttcaagtgcaacagcgcggtgtggcgcgccgtccgccgcgtgcgccgccccgcgcgcagcccctggctgggactgcgtcgaccagtacccggcgcgcatggacgcctagcacgtacctgcaatgcagtggctgctatctatctatcgctcgcttcgctaccactaccagtgcagtgctgcacttcaccgatggatgatggatcggatatgatatggtataggacgcggtcggtcgatttgcatgcatgcacaagtgttagtataccgttctgaaggtacgtttgaactttgttcgtttgtattgcactattgcttgttgtttaagtagcggttaagggaggcatacgtacgctgtactaccataatggaagtactccggtccggtcctgtcctgtgtgagccttatgtacgtgcaattttaatgtgttttggt

SEQ ID NO: 19501 - protein, 544 aa, Zea mays subsp. mays
  misc_feature (1)..(544): Ceres Seq. ID no. 12373376
MAREEQALLSTEIVNRGVEPSGPDAGSPAFSVRVRRRLPDFLQSVNLKYVRLGYHYLISHGVYLATIPVIVLVCGAELGSLSRDELWRKVWGEATYDLATVLAFLAVLAFTISVYIMSRPRPVYLIDFACYKPADELKVSKAEFIDLARKSGKFDEDSLAFQSRLLAKSGIGDESYMPRCVFEPNASCATMKEGRAEASTAMFAALDELFDKCRVRPKDVGVLVVNCSLFNPTPSLSAMIVNHYKMRGNILSYNLGGHGLQRRASSPSIWPATCSRPAARAWPWWSARRPSPSRGTPGSGAPCSSRTPSSGPAARRCCCPTGAATSTAPSTSWSTWCARTRARTTAPSAPCTRRRTSSGSRACPSAATCWRWAATRSRPTSPRWGPWCCPSPSSCSSSRACCSATCSRPRPPRRRRRPPQGTPRPPRPTSRTSSARSSTSACTRPAATCWSTCRATWACATPTWRPPAPRCTASATPQAAASGTSWRTWRPRAASAAATASGSSPSGRASSATARCGAPSAACAAPRAAPGWDCVDQYPARMDA

SEQ ID NO: 19502 - protein, 470 aa, Zea mays subsp. mays
  misc_feature (1)..(470): Ceres Seq. ID no. 12373377
MLQAGRRAQGVQGGVHRPGAQVRQVRRGQPGVPVASAGQVRHRRRVVHAALRVRAQRQLRHHEGGPRRGVHGHVRGAGRAVRQVPRPAQGRGRAGGQLQPLQPDALPVRHDRQPLQDARQHPELQPGGAWAAAAGVIAIDLARDMLQASGAGLAVVVSTEAVSFTWYPGKRRSMLIPNAFFRAGCAAVLLSNRRRDFHRAKYQLEHVVRTHKGADDRAFRSVYQEEDEQRIKGLSISRDLLEVGGHALKTNITTLGPLVLPFSEQLLFFAGVLFRHLFPSKASTPAPPTTPGDASAAAPYIPDFKRAFEHFCMHAASRDVLEHLQSNLGLRNADLEASRAALHRFGNTSSSSIWYELAYLEAKGRVRRGDRVWQLAFGSGFKCNSAVWRAVRRVRRPARSPWLGLRRPVPGAHGRLARTCNAVAAIYLSLASLPLPVQCCTSPMDDGSDMIWYRTRSVDLHACTSVSIPF

SEQ ID NO: 19503 - protein, 428 aa, Zea mays subsp. mays
  misc_feature (1)..(428): Ceres Seq. ID no. 12373378
MSRPRPVYLIDFACYKPADELKVSKAEFIDLARKSGKFDEDSLAFQSRLLAKSGIGDESYMPRCVFEPNASCATMKEGRAEASTAMFAALDELFDKCRVRPKDVGVLVVNCSLFNPTPSLSAMIVNHYKMRGNILSYNLGGHGLQRRASSPSIWPATCSRPAARAWPWWSARRPSPSRGTPGSGAPCSSRTPSSGPAARRCCCPTGAATSTAPSTSWSTWCARTRARTTAPSAPCTRRRTSSGSRACPSAATCWRWAATRSRPTSPRWGPWCCPSPSSCSSSRACCSATCSRPRPPRRRRRPPQGTPRPPRPTSRTSSARSSTSACTRPAATCWSTCRATWACATPTWRPPAPRCTASATPQAAASGTSWRTWRPRAASAAATASGSSPSGRASSATARCGAPSAACAAPRAAPGWDCVDQYPARMDA

SEQ ID NO: 19504 - DNA, 1623 bp, Zea mays subsp. mays
  misc_feature (1)..(1623): Ceres Seq. ID no. 12373419
aatcgcttccccagaccccagtccccagtccccttttcccaacggccacactttcatcagttcccctttccacggcgccgccggaatccccacaaagccccaaaaccctacggccacctcgccacccccaacgaaaacccagaccacgagatggcccccggtggagagggcaagccaagcacgggcggcggcggcggcggcgggaggaagcgcaagttccttccccacgggaagccggtgcggaagggggcctacccgctgcgccccggcgtgcagggcttcttcatcacctgcgacggcggccgcgagcaccaggccacccgcgaggcgctctccctcctcgactccttctatgaagacctggtggatgggaaaggatcggatgagaagcctaaaaacattccagagaagccactgaacaaaaagataaagtttgaggactctgattcctcagatgatgaggatgaagacaactctggtgaggaagccgacaatgggaatgtgaatgatgtggagaaaggtgaaaccgctccatctgagaagcaacaggaggtgcttgatacctctaataccgcaagcaaggacaatactgctctatctgagaagaaagaggaggtgcttgatacctctgataccgtgagtaaggacaatgaggaacaagcagtcactgctgatgaaccaagagaaaagaagcaacgagtggaagatcctccagtttttgagcaggccgtgcaaaaagagactgctgatgaaccaaaggagtccactgataaaccaaaggagtccagtgaaaaaaatattgacgatttaattgatgaggacctgaaagaaataggggacaggaaaaagaggctctttgcaagcctcgagacaggctgcaatggatgcatattcattcaaatgcataaaagagcaggagaccctggtccagttgagattgtacaaaacatgatgtcatctgctgcattgactcgtaaacatatgtcaagatttattctgcgagttttgcctgttgaggtggcatgctatgcatctgaagaggaaataacaaaggcaattagtccccttattgaaaagtacttcccaaaagaatgctcctcaggtcataagtttgcagtgttatatgaagcaaggtcaaacacaggaattgatagaatgaaaatcataaacgcagcagcgaaatctgtaccacaacctcataaagttgacctgaagaacccagacaagactattgttgtccagattgcaaagaccatatgcatgattggagttgtggaaaggtacaaagagctctcgaagttcaacctaaggcagctgacctcaccggagtcggagaagtaagcctatgagtgacaaaatcttccaggcaaaacgtggaccaacttaaatcagcagcagcgtcaggtggttaggcgctagcgaattaaattatggccggccgaacctcactgtcttgaaagattcagatgttctaatgtttaatgctttaccaccagtggttagtggttgctggttcatgcttcccaggttagattcacggtttttttttgaggctgtagaaagatctgacgatacttcatgtgtgctttctctctgacgatggttccatacaggggcttaccg

SEQ ID NO: 19505 - protein, 446 aa, Zea mays subsp. mays
  misc_feature (1)..(446): Ceres Seq. ID no. 12373420
NRFPRPQSPVPFSQRPHFHQFPFPRRRRNPHKAPKPYGHLATPNENPDHEMAPGGEGKPSTGGGGGGGRKRKFLPHGKPVRKGAYPLRPGVQGFFITCDGGREHQATREALSLLDSFYEDLVDGKGSDEKPKNIPEKPLNKKIKFEDSDSSDDEDEDNSGEEADNGNVNDVEKGETAPSEKQQEVLDTSNTASKDNTALSEKKEEVLDTSDTVSKDNEEQAVTADEPREKKQRVEDPPVFEQAVQKETADEPKESTDKPKESSEKNIDDLIDEDLKEIGDRKKRLFASLETGCNGCIFIQMHKRAGDPGPVEIVQNMMSSAALTRKHMSRFILRVLPVEVACYASEEEITKAISPLIEKYFPKECSSGHKFAVLYEARSNTGIDRMKIINAAAKSVPQPHKVDLKNPDKTIVVQIAKTICMIGVVERYKELSKFNLRQLTSPESEK

SEQ ID NO: 19506 - protein, 396 aa, Zea mays subsp. mays
  misc_feature (1)..(396): Ceres Seq. ID no. 12373421
MAPGGEGKPSTGGGGGGGRKRKFLPHGKPVRKGAYPLRPGVQGFFITCDGGREHQATREALSLLDSFYEDLVDGKGSDEKPKNIPEKPLNKKIKFEDSDSSDDEDEDNSGEEADNGNVNDVEKGETAPSEKQQEVLDTSNTASKDNTALSEKKEEVLDTSDTVSKDNEEQAVTADEPREKKQRVEDPPVFEQAVQKETADEPKESTDKPKESSEKNIDDLIDEDLKEIGDRKKRLFASLETGCNGCIFIQMHKRAGDPGPVEIVQNMMSSAALTRKHMSRFILRVLPVEVACYASEEEITKAISPLIEKYFPKECSSGHKFAVLYEARSNTGIDRMKIINAAAKSVPQPHKVDLKNPDKTIVVQIAKTICMIGVVERYKELSKFNLRQLTSPESEK

SEQ ID NO: 19507 - DNA, 1372 bp, Zea mays subsp. mays
  misc_feature (1)..(1372): Ceres Seq. ID no. 12373449
agacgtcctctgtccatggcctcccatcctgagcacccggcggaaccgcgagcaccgcccgccccaacgaccataggcgatctctccgacgacctcctgcgcgagatcctcctccgcctcccttcccttccttcactcgtctgcgcctccctcagctgccgcgccttcctggccgccgtccgctcctcccgcgccttccgccgccgcttccgcgcgctgcacccgcctcctctcctcggcttcttcttcgaccccgacggcaacgaaaatcccaccttcatgcccattcgccgcggctccgaccggggccacgcggccgccgtccgcggcctggacgccttcctgacccgcgtcccgcacgaggacgacgtcttccccgggtggcagataatggagtgccgcggcggctgccttctcctcctcaactggagaaccaagcagctcgccgcctacaaccccctcacgggggccttggatctcgtccccaaactgcctgacgacatctgcaaagggcaccgcggcaagttcatctccggtgattttttcctggtagtccccgacgacgaggctcccgacaggcgttcgttccgcgtggtctcctcctgccacgacaagtaccgggtgcgcgtcgccgtcttctcgtctgccaccaggaagtggcagattctcccctggtcggagcctgtgccgacacagccggcgagcggtaagtactggcttctctcggggaggcaggtgagtgggttcctgtgctggtcacaccataagaatgcctacaaggtgttgctggacactgcgaccctgcaattctccgtcatcgatctgccgtatggcttgagtgggcaaggtcacctctacaggactggggataccaaggatgggaagctctgcatcgttgccgcaatcgatttctcgctgttcgtttggttccggacaccagacgccggtggcattgacaggtgggtgctccgacatgtattgcagctggaggatgaggttcttgaggccaccgagggctcacggaatgaacttgaacagcttaaagtgtttgcaattctggacggcatcgtgtacatgacgacatttgagacgtttagagatgctaccttgccttgttggtacctatccttctgcctggaaacaaggaagctggaaaaactcttctatgtaaaagctaatggccatgctcatccctacttcatgccatggcctactgctttagtaggtaacaatttgagcccctgactaggaggaggtgcttgttcaagtgaaactggttacagtaacatgtaagtttcttgttctgtctagactcaacagtttgttcacttatcctcttatatactagtaacgggtgcgcgctttgcgtggc

SEQ ID NO: 19508 - protein, 414 aa, Zea mays subsp. mays
  misc_feature (1)..(414): Ceres Seq. ID no. 12373450
RRPLSMASHPEHPAEPRAPPAPTTIGDLSDDLLREILLRLPSLPSLVCASLSCRAFLAAVRSSRAFRRRFRALHPPPLLGFFFDPDGNENPTFMPIRRGSDRGHAAAVRGLDAFLTRVPHEDDVFPGWQIMECRGGCLLLLNWRTKQLAAYNPLTGALDLVPKLPDDICKGHRGKFISGDFFLVVPDDEAPDRRSFRVVSSCHDKYRVRVAVFSSATRKWQILPWSEPVPTQPASGKYWLLSGRQVSGFLCWSHHKNAYKVLLDTATLQFSVIDLPYGLSGQGHLYRTGDTKDGKLCIVAAIDFSLFVWFRTPDAGGIDRWVLRHVLQLEDEVLEATEGSRNELEQLKVFAILDGIVYMTTFETFRDATLPCWYLSFCLETRKLEKLFYVKANGHAHPYFMPWPTALVGNNLSP

SEQ ID NO: 19509 - protein, 409 aa, Zea mays subsp. mays
  misc_feature (1)..(409): Ceres Seq. ID no. 12373451
MASHPEHPAEPRAPPAPTTIGDLSDDLLREILLRLPSLPSLVCASLSCRAFLAAVRSSRAFRRRFRALHPPPLLGFFFDPDGNENPTFMPIRRGSDRGHAAAVRGLDAFLTRVPHEDDVFPGWQIMECRGGCLLLLNWRTKQLAAYNPLTGALDLVPKLPDDICKGHRGKFISGDFFLVVPDDEAPDRRSFRVVSSCHDKYRVRVAVFSSATRKWQILPWSEPVPTQPASGKYWLLSGRQVSGFLCWSHHKNAYKVLLDTATLQFSVIDLPYGLSGQGHLYRTGDTKDGKLCIVAAIDFSLFVWFRTPDAGGIDRWVLRHVLQLEDEVLEATEGSRNELEQLKVFAILDGIVYMTTFETFRDATLPCWYLSFCLETRKLEKLFYVKANGHAHPYFMPWPTALVGNNLSP

SEQ ID NO: 19510 - protein, 321 aa, Zea mays subsp. mays
  misc_feature (1)..(321): Ceres Seq. ID no. 12373452
MPIRRGSDRGHAAAVRGLDAFLTRVPHEDDVFPGWQIMECRGGCLLLLNWRTKQLAAYNPLTGALDLVPKLPDDICKGHRGKFISGDFFLVVPDDEAPDRRSFRVVSSCHDKYRVRVAVFSSATRKWQILPWSEPVPTQPASGKYWLLSGRQVSGFLCWSHHKNAYKVLLDTATLQFSVIDLPYGLSGQGHLYRTGDTKDGKLCIVAAIDFSLFVWFRTPDAGGIDRWVLRHVLQLEDEVLEATEGSRNELEQLKVFAILDGIVYMTTFETFRDATLPCWYLSFCLETRKLEKLFYVKANGHAHPYFMPWPTALVGNNLSP

SEQ ID NO: 19511 - DNA, 1549 bp, Zea mays subsp. mays
  misc_feature (1)..(1549): Ceres Seq. ID no. 12373460
tccctcgtcttctgccgcagacgcttcccgtgatcagaatccaagaaatggcgggtccaggtccagcgcgcaccgcgcggagcgttgctctcctgtgtttcctggtttcctgcgctgcgctcgtggacagccgtggcggagccagccggccgagccggcaggacctcgatgtcggcctcggcggcgggggcgtcggcatcggcatcggcatcggcggcggcagcccttcgtcgccttctccgacgccgccgtcgtcgcagccgcagccgtgcgacttcgagaacgagcggctgtacagggcgtacctcgtgatccagcagttccggagcacggtgacgtgcgacccgatgggcgtcacgcagagctggagcggcaccgacgtgtgcagctacaagggcttcttctgcgagcggccgcccaacgtgacggaccgggccatcgcgtccgtcgacttcaacggctacatgctgcaggcggggtccctgcggggcttcgtcgacagcctgccggacctggcgctgttccacgccaactccaacgacttcggcggcgccgtgcccgcgctgggcggcctgcagtacttctacgagctggacctgagcaacaacaagctcgcgcccgccgcgttcccggcggacgtgctgggcctcaccaacgccaccttcgtcgacatccgcttcaacagcttctacggcgagctccccgccggcgtcttctgcaagctcccgcgggtgcaggccatcttcgtcaacaacaaccgcttctccggcgccctccccgacaacatcgggcagtcgccggtgaactacctctctctggccaacaacaggttcacgggggagatacccaggtccatcgcccgcaacgccggcacgctcctcgaggtgctcttcctcaacaacagcctcagcggctgcctcccccacgagctcggcctcctggagaaggccacggtcatcgacgccggcgctaaccgcctcacgggcaccatcccggcgtcgttcgcgtgcctgcgcaaggtggagcagctcaacctggcgggcaacctcttgtacggcgaggtgcccgacgcgctctgccggctcgcgttcagcaacctcaagaacctcacgctctccgacaactacttcacgtcgctcgggtcctgctgctgggacctgatcaaggaagggaggctcaacgtcgaccgcaactgcatccagtgggcgcccaaccagcgctcgcacgaggactgcgccaagttcctccgccagcccaagtcatgcccggtcaacaactacgttccgtgccgcagcaaataccaaagctccagcgagccggccgacgacgcggcggcggagtacaggtaccggacctactcggcgctgcatccttgaggtggagtggagtggagggcacttcactgattgataaagcgcattgtccgtttcgtgtgagcgtgaaacgactggtcactcgcctgggcctggccctggcccgtttgtgctcggtgggttgtgttgatgtgttgtgtcactgtgtagaaatgttgaatgttccccttcgctcg

SEQ ID NO: 19512 - protein, 457 aa, Zea mays subsp. mays
  misc_feature (1)..(457): Ceres Seq. ID no. 12373461
PRLLPQTLPVIRIQEMAGPGPARTARSVALLCFLVSCAALVDSRGGASRPSRQDLDVGLGGGGVGIGIGIGGGSPSSPSPTPPSSQPQPCDFENERLYRAYLVIQQFRSTVTCDPMGVTQSWSGTDVCSYKGFFCERPPNVTDRAIASVDFNGYMLQAGSLRGFVDSLPDLALFHANSNDFGGAVPALGGLQYFYELDLSNNKLAPAAFPADVLGLTNATFVDIRFNSFYGELPAGVFCKLPRVQAIFVNNNRFSGALPDNIGQSPVNYLSLANNRFTGEIPRSIARNAGTLLEVLFLNNSLSGCLPHELGLLEKATVIDAGANRLTGTIPASFACLRKVEQLNLAGNLLYGEVPDALCRLAFSNLKNLTLSDNYFTSLGSCCWDLIKEGRLNVDRNCIQWAPNQRSHEDCAKFLRQPKSCPVNNYVPCRSKYQSSSEPADDAAAEYRYRTYSALHP

SEQ ID NO: 19513 - protein, 442 aa, Zea mays subsp. mays
  misc_feature (1)..(442): Ceres Seq. ID no. 12373462
MAGPGPARTARSVALLCFLVSCAALVDSRGGASRPSRQDLDVGLGGGGVGIGIGIGGGSPSSPSPTPPSSQPQPCDFENERLYRAYLVIQQFRSTVTCDPMGVTQSWSGTDVCSYKGFFCERPPNVTDRAIASVDFNGYMLQAGSLRGFVDSLPDLALFHANSNDFGGAVPALGGLQYFYELDLSNNKLAPAAFPADVLGLTNATFVDIRFNSFYGELPAGVFCKLPRVQAIFVNNNRFSGALPDNIGQSPVNYLSLANNRFTGEIPRSIARNAGTLLEVLFLNNSLSGCLPHELGLLEKATVIDAGANRLTGTIPASFACLRKVEQLNLAGNLLYGEVPDALCRLAFSNLKNLTLSDNYFTSLGSCCWDLIKEGRLNVDRNCIQWAPNQRSHEDCAKFLRQPKSCPVNNYVPCRSKYQSSSEPADDAAAEYRYRTYSALHP

SEQ ID NO: 19514 - protein, 342 aa, Zea mays subsp. mays
  misc_feature (1)..(342): Ceres Seq. ID no. 12373463
MGVTQSWSGTDVCSYKGFFCERPPNVTDRAIASVDFNGYMLQAGSLRGFVDSLPDLALFHANSNDFGGAVPALGGLQYFYELDLSNNKLAPAAFPADVLGLTNATFVDIRFNSFYGELPAGVFCKLPRVQAIFVNNNRFSGALPDNIGQSPVNYLSLANNRFTGEIPRSIARNAGTLLEVLFLNNSLSGCLPHELGLLEKATVIDAGANRLTGTIPASFACLRKVEQLNLAGNLLYGEVPDALCRLAFSNLKNLTLSDNYFTSLGSCCWDLIKEGRLNVDRNCIQWAPNQRSHEDCAKFLRQPKSCPVNNYVPCRSKYQSSSEPADDAAAEYRYRTYSALHP

SEQ ID NO: 19515 - DNA, 1458 bp, Zea mays subsp. mays
  misc_feature (1)..(1458): Ceres Seq. ID no. 12373464
aggagtagtagcaaccaagctaccctatctataagtactacggctcgaatgtgtcggccgacggcaatcaccattacatttgatccgccgcgcgcggcccgatcgacgagcgagagcctcattcacaccccgatctagctagctagctagtttacgaaaaaaaaatctggccacagggatgcggtggcggctgcagccggcgccggcgccgacgctgctcctcgtcctgctggtggccaccgtcgccgccgtcgtcgtggtggtgcgggcggagccccaggtgccgtgctacttcgtgttcggggactcgctcgtggacaacggcaacaacaacgacatcgcgtcgctggcgcgggccaactacccgccctacggcatcgacttcgccgccggccccaccggccgtttcagcaatggcctcaccaccgtcgacgctatatctcggcttctgggcttcgacgattacatccccgcgtacgctggcgcgagcggcgatcagctcctcaccggcgtcaacttcgcttccgccgcagccgggatccgtgacgagaccggccagcaactggggcaacggatcagcttcggcgggcagctccagaactaccaggcggcggtgcagcagctggtgagcatcctgggcgacgaggactccgcggccagccacctgagccagtgcatcttcacggtgggcatgggcagcaacgactacctcaacaactacttcatgccggcggtctactccaccagccagcagtacacgccggagcagtacgccgacgtgctcatcaaccagtactcgcagcagctccggaccctgtacagctacggggccaggaaggtggcgctcatgggcgtggggcaggtcgggtgcagccccaacgagctggcgcagcgcagcaccgacggcaccacctgcgtgccgcagatcaacggcgccatcgacatcttcaaccggaagctcgtcgccctcgtcgaccagttcaacgcgctgccgggggcgcacttcacctacataaacgtgtatgggatcttccaggacatcctgagagccccagggtcgcacggtctgacggtgacgaaccaagggtgctgcggcgtcggacggaataacgggcaggtgacgtgcttgccgttccagacgccgtgcgccaacaggaacgagtacctcttctgggacgctttccaccccacggaggcggccaacatcctcgtcggtcggagggcgtacagcgcggcgctgccgtccgacgtccaccccatggatctgcgcacgctcgccaggatctagctgtatggatcatgtgaactcgtgaagagaagcaaagcttacagcgtcttccttttttttgttctttgtttcccctcgtgattgtattgcttaccactcgcaaagggacgtatggtccctccatctaaactatatatataaacatgatatatactccctcgctcccgccc

SEQ ID NO: 19516 - protein, 369 aa, Zea mays subsp. mays
  misc_feature (1)..(369): Ceres Seq. ID no. 12373465
MRWRLQPAPAPTLLLVLLVATVAAVVVVVRAEPQVPCYFVFGDSLVDNGNNNDIASLARANYPPYGIDFAAGPTGRFSNGLTTVDAISRLLGFDDYIPAYAGASGDQLLTGVNFASAAAGIRDETGQQLGQRISFGGQLQNYQAAVQQLVSILGDEDSAASHLSQCIFTVGMGSNDYLNNYFMPAVYSTSQQYTPEQYADVLINQYSQQLRTLYSYGARKVALMGVGQVGCSPNELAQRSTDGTTCVPQINGAIDIFNRKLVALVDQFNALPGAHFTYINVYGIFQDILRAPGSHGLTVTNQGCCGVGRNNGQVTCLPFQTPCANRNEYLFWDAFHPTEAANILVGRRAYSAALPSDVHPMDLRTLARI

SEQ ID NO: 19517 - protein, 198 aa, Zea mays subsp. mays
  misc_feature (1)..(198): Ceres Seq. ID no. 12373466
MGSNDYLNNYFMPAVYSTSQQYTPEQYADVLINQYSQQLRTLYSYGARKVALMGVGQVGCSPNELAQRSTDGTTCVPQINGAIDIFNRKLVALVDQFNALPGAHFTYINVYGIFQDILRAPGSHGLTVTNQGCCGVGRNNGQVTCLPFQTPCANRNEYLFWDAFHPTEAANILVGRRAYSAALPSDVHPMDLRTLARI

SEQ ID NO: 19518 - protein, 187 aa, Zea mays subsp. mays
  misc_feature (1)..(187): Ceres Seq. ID no. 12373467
MPAVYSTSQQYTPEQYADVLINQYSQQLRTLYSYGARKVALMGVGQVGCSPNELAQRSTDGTTCVPQINGAIDIFNRKLVALVDQFNALPGAHFTYINVYGIFQDILRAPGSHGLTVTNQGCCGVGRNNGQVTCLPFQTPCANRNEYLFWDAFHPTEAANILVGRRAYSAALPSDVHPMDLRTLARI

SEQ ID NO: 19519 - DNA, 1522 bp, Zea mays subsp. mays
  misc_feature (1)..(1522): Ceres Seq. ID no. 12373476
ctgggtcttctataccgtgcctcatctagtcatctcgtctcaggttgcggccgaaccagagccccgtcccaactccaccacctctcttctctacggcgcgagcaagggcggcgccggccgcggcgtcggcgggaaccgggcctcgctctccccatctctccgatcacttctgtcctgtgaaaatggcggatgaactacgctcaacgtctgtgggtcagaagttccatgggcagtccgtgctgttgagcagaatctcttcctattccgccatgaacaaccctgtattcaacaatgcctattctgcttacaatgtgccccagaggtcatatcatgggatgaatgcaactgctggactctcatctgtcatggcaccatctcctgtctttgcttctgccccaaaagagaaaggcttttctggatttatgatcgactttatgatgggtggagtttctgctgctgtctccaagacagctgcagctccgattgagcgtgtcaagcttttgattcagaaccaggatgaaatgctcaagactggcaggctttctgaaccgtacaagggtattggggactgctttggccggacaatcagagatgagggttttgtctcactgtggagaggaaacacagctaatgtcatccgttacttccccacacaggcattgaactttgcgttcaaggatcacttcaagcgcatgttcaactttaagaaggacaaggatgggtactggaagtggtttgctggaaatctggcttctggtggagctgctggtgcttgctctctattctttgtctattctctggactacgcccgtacgcgtttggccaatgatgccaaggctgcaaagaagggtggtgagaggcagttcaatggactcgttgatgtttaccgcaagacccttgccagtgatggtattcgtggcctctaccgtggattcaatatctcttgtgtggggatcattgtgtaccgaggtctttactttggtatgtatgattccctgaagccagtgcttcttgttggtaccctgcaggataacttcttggccagcttcttgctcgggtggggtataaccattggtgctggccttgcctcctaccccattgacactgttcgccgtcgcatgatgatgacatctggtgaggccgtcaagtacaacagctccttggacgctttcaagcagattgtcgcaaaggagggtaccaagtccctcttcaagggtgctggcgcaaacatcctccgcgctgtagctggtgctggtgtccttgctgggtacgacaagctccaggtggttgtcttcggcaagaagtacgggtctggtggtggctaaggatgtataatgatgatgacgacgaacaacaaacatgatgttttaggtgcctcctttaagtaaacatacgtacggaccctcgacaccattttaagttcgctctcgcagaggctggtgagtttgtagcgtggctgtgaccgcacctctttttatgtcagagattggaaataagtgacgttagaaattgctgtcttgct

SEQ ID NO: 19520 - protein, 380 aa, Zea mays subsp. mays
  misc_feature (1)..(380): Ceres Seq. ID no. 12373477
MADELRSTSVGQKFHGQSVLLSRISSYSAMNNPVFNNAYSAYNVPQRSYHGMNATAGLSSVMAPSPVFASAPKEKGFSGFMIDFMMGGVSAAVSKTAAAPIERVKLLIQNQDEMLKTGRLSEPYKGIGDCFGRTIRDEGFVSLWRGNTANVIRYFPTQALNFAFKDHFKRMFNFKKDKDGYWKWFAGNLASGGAAGACSLFFVYSLDYARTRLANDAKAAKKGGERQFNGLVDVYRKTLASDGIRGLYRGFNISCVGIIVYRGLYFGMYDSLKPVLLVGTLQDNFLASFLLGWGITIGAGLASYPIDTVRRRMMMTSGEAVKYNSSLDAFKQIVAKEGTKSLFKGAGANILRAVAGAGVLAGYDKLQVVVFGKKYGSGGG

SEQ ID NO: 19521 - protein, 351 aa, Zea mays subsp. mays
  misc_feature (1)..(351): Ceres Seq. ID no. 12373478
MNNPVFNNAYSAYNVPQRSYHGMNATAGLSSVMAPSPVFASAPKEKGFSGFMIDFMMGGVSAAVSKTAAAPIERVKLLIQNQDEMLKTGRLSEPYKGIGDCFGRTIRDEGFVSLWRGNTANVIRYFPTQALNFAFKDHFKRMFNFKKDKDGYWKWFAGNLASGGAAGACSLFFVYSLDYARTRLANDAKAAKKGGERQFNGLVDVYRKTLASDGIRGLYRGFNISCVGIIVYRGLYFGMYDSLKPVLLVGTLQDNFLASFLLGWGITIGAGLASYPIDTVRRRMMMTSGEAVKYNSSLDAFKQIVAKEGTKSLFKGAGANILRAVAGAGVLAGYDKLQVVVFGKKYGSGGG

SEQ ID NO: 19522 - protein, 329 aa, Zea mays subsp. mays
  misc_feature (1)..(329): Ceres Seq. ID no. 12373479
MNATAGLSSVMAPSPVFASAPKEKGFSGFMIDFMMGGVSAAVSKTAAAPIERVKLLIQNQDEMLKTGRLSEPYKGIGDCFGRTIRDEGFVSLWRGNTANVIRYFPTQALNFAFKDHFKRMFNFKKDKDGYWKWFAGNLASGGAAGACSLFFVYSLDYARTRLANDAKAAKKGGERQFNGLVDVYRKTLASDGIRGLYRGFNISCVGIIVYRGLYFGMYDSLKPVLLVGTLQDNFLASFLLGWGITIGAGLASYPIDTVRRRMMMTSGEAVKYNSSLDAFKQIVAKEGTKSLFKGAGANILRAVAGAGVLAGYDKLQVVVFGKKYGSGGG

SEQ ID NO: 19523 - DNA, 831 bp, Zea mays subsp. mays
  misc_feature (1)..(831): Ceres Seq. ID no. 12373480
aagatcagatcacactcgtagagagaaggaaaaatatccccaaaccctagctcccgatctcgatggcgaaccctcgcgtcttcttcgacatgaccgtcggcggcgccccggcgggccggatcgtgatggagctgtacgccaacgaggtgcccaagaccgcggagaacttccgcgcgctgtgcacgggcgagaagggcgtgggcaagtccgggaagccgctccactacaagggctccaccttccaccgcgtcatccccgagttcatgtgccagggcggcgacttcacccgcggcaacggcaccggcggcgagtccatctacggcgagaagttccccgacgagaagttcgtgcgcaagcacaccgctcccggtgtgctctccatggccaacgccgggcccaacaccaacggctcccagttcttcatctgcaccgtcgcgaccccttggctcgacggcaagcacgtcgtcttcggccaggtcgtcgagggcatggacgtcgtcaaggccatcgagaaggtgggcacccgcaacggctccacctccaaggtggtcaaggtcgctgactgcggacagctctcctagatctctctgatctggtctgttcggccgccctccctccgtcatcgtcgactccccctgcgtccgttcctttggatctgaataagatggtggtgatctgagtggtggtcttagtttatcatgtatcgctcgcagtttaatttagcggtttaggtgtggatctgtgaaccccatggcgcctctgcttgattcgtgtttcacctgttatgttctgagattcatgataatgctatgagaactgaaattcccgttt

SEQ ID NO: 19524 - protein, 186 aa, Zea mays subsp. mays
  misc_feature (1)..(186): Ceres Seq. ID no. 12373481
RSDHTRREKEKYPQTLAPDLDGEPSRLLRHDRRRRPGGPDRDGAVRQRGAQDRGELPRAVHGREGRGQVREAAPLQGLHLPPRHPRVHVPGRRLHPRQRHRRRVHLRREVPRREVRAQAHRSRCALHGQRRAQHQRLPVLHLHRRDPLARRQARRLRPGRRGHGRRQGHREGGHPQRLHLQGGQGR

SEQ ID NO: 19525 - protein, 172 aa, Zea mays subsp. mays
  misc_feature (1)..(172): Ceres Seq. ID no. 12373482
MANPRVFFDMTVGGAPAGRIVMELYANEVPKTAENFRALCTGEKGVGKSGKPLHYKGSTFHRVIPEFMCQGGDFTRGNGTGGESIYGEKFPDEKFVRKHTAPGVLSMANAGPNTNGSQFFICTVATPWLDGKHVVFGQVVEGMDVVKAIEKVGTRNGSTSKVVKVADCGQLS

SEQ ID NO: 19526 - protein, 163 aa, Zea mays subsp. mays
  misc_feature (1)..(163): Ceres Seq. ID no. 12373483
MTVGGAPAGRIVMELYANEVPKTAENFRALCTGEKGVGKSGKPLHYKGSTFHRVIPEFMCQGGDFTRGNGTGGESIYGEKFPDEKFVRKHTAPGVLSMANAGPNTNGSQFFICTVATPWLDGKHVVFGQVVEGMDVVKAIEKVGTRNGSTSKVVKVADCGQLS

SEQ ID NO: 19527 - DNA, 1732 bp, Zea mays subsp. mays
  misc_feature (1)..(1732): Ceres Seq. ID no. 12373520
aaaatcaaacagaaccggagtgtcagattcagaaacaataggcagcagctagagcaagcagcatcgcagcatcgcagcagacgccaccgtcacgccaccgcgccgagagagaaaagccgagcggtggcaggcgaggggacgcctgccgcggtgggttggtgggtgccgcctccgcatccggtgccgctgctctgttcctcagtccgcccccatttacctcgcatggattcctgcttgcttctccccaactccacgcgccgatcctccaacctccaggagagcgcgacgcgatccaattgaggtccaggaggtggagggtgcctgcgctgtccgtgtgttcccctttgtttccatcccaagcctggccgcgccgccgctggacgccatcgcgcgcctgcacagcgtcttggtgaggtggtcgaagcagcggcggcggccgcagctcgggagacccggcgcgaggaagcggtggccgagccggcggagcgcgatgctgtgggtggcgcgcctgtccggcttgttatccgccgccatggtggtggtggtgctgtcgccgtcgctccagtccttcccgcccgccgaggccatccggtcgtcgcagttcgacggcagcgtccgcttcccgggacagatcgcagggggcgccaggggggtcgccttccgccgcgccccgccgttccgcaatgccgccgactgcggcgccggcgcggacaacggcaccggcgccaatgtctgctacccatggctcgtccacatcgcgattacgctcgacaacgaatacctgaggggctccgtcgccgcggtccactcggtggtgcagcacgccaggtgccccgagagcgtcttcttccacttcctcgtctccgacccggggctcggggacctcgtccgcgcggtgttcccgcagctccggttcaaggtctactacctggaccccgggcgcgtccgcgggctcatctccacgtcggtgcggcaggcgctggagcagccgctgaactacgcgcgcaactacctggccgagctcctggagccgtgcgtgcgccgcgccatctacctggactccgacctcgtcgtcgtggacgacgtcgccaagctgtggcgcaccgacctcggcgggcgcaccgtgggcgcgcccgagtactgccacgccaacttcaccaagtacttcacggggcggttctggtcggaccagcggttcgccgggacgttcgcggggcggcggccgtgctacttcaacacgggcgtcatggtggtcgacctggagcggtggcggcaggcgggctacacgcagcgcatcgagcggtggatggaggtacagaagtcggcggcggggcgcatctacgagctggggtcgctgccgcccttcctgctggtgttcgcggggcacgtggcgccgatcgagcaccggtggaaccagcacggcctcggcggcgacaatgtcctgggcagctgccgcgacctgcacccggggcccgtgagcctgctgcattggtccgggtccggcaagccgtgggcgcggctgggcgccgggcggccgtgcccgctcgatgcgctctgggcacccttcgacctgtacggccccggccccggcggcggcgccgaggaggacctacatgtttttttattcgcaaaaaacaaactatatgttctccatcttttttttcttcttcttttcccctttgggctgttggattaaatgttttgtgttagattgttcatgttcgttctcggc

SEQ ID NO: 19528 - protein, 401 aa, Zea mays subsp. mays
  misc_feature (1)..(401): Ceres Seq. ID no. 12373521
MLWVARLSGLLSAAMVVVVLSPSLQSFPPAEAIRSSQFDGSVRFPGQIAGGARGVAFRRAPPFRNAADCGAGADNGTGANVCYPWLVHIAITLDNEYLRGSVAAVHSVVQHARCPESVFFHFLVSDPGLGDLVRAVFPQLRFKVYYLDPGRVRGLISTSVRQALEQPLNYARNYLAELLEPCVRRAIYLDSDLVVVDDVAKLWRTDLGGRTVGAPEYCHANFTKYFTGRFWSDQRFAGTFAGRRPCYFNTGVMVVDLERWRQAGYTQRIERWMEVQKSAAGRIYELGSLPPFLLVFAGHVAPIEHRWNQHGLGGDNVLGSCRDLHPGPVSLLHWSGSGKPWARLGAGRPCPLDALWAPFDLYGPGPGGGAEEDLHVFLFAKNKLYVLHLFFLLLFPFGLLD

SEQ ID NO: 19529 - protein, 387 aa, Zea mays subsp. mays
  misc_feature (1)..(387): Ceres Seq. ID no. 12373522
MVVVVLSPSLQSFPPAEAIRSSQFDGSVRFPGQIAGGARGVAFRRAPPFRNAADCGAGADNGTGANVCYPWLVHIAITLDNEYLRGSVAAVHSVVQHARCPESVFFHFLVSDPGLGDLVRAVFPQLRFKVYYLDPGRVRGLISTSVRQALEQPLNYARNYLAELLEPCVRRAIYLDSDLVVVDDVAKLWRTDLGGRTVGAPEYCHANFTKYFTGRFWSDQRFAGTFAGRRPCYFNTGVMVVDLERWRQAGYTQRIERWMEVQKSAAGRIYELGSLPPFLLVFAGHVAPIEHRWNQHGLGGDNVLGSCRDLHPGPVSLLHWSGSGKPWARLGAGRPCPLDALWAPFDLYGPGPGGGAEEDLHVFLFAKNKLYVLHLFFLLLFPFGLLD

SEQ ID NO: 19530 - protein, 322 aa, Zea mays subsp. mays
  misc_feature (1)..(322): Ceres Seq. ID no. 12373523
MARPHRDYARQRIPEGLRRRGPLGGAARQVPRERLLPLPRLRPGARGPRPRGVPAAPVQGLLPGPRARPRAHLHVGAAGAGAAAELRAQLPGRAPGAVRAPRHLPGLRPRRRGRRRQAVAHRPRRAHRGRARVLPRQLHQVLHGAVLVGPAVRRDVRGAAAVLLQHGRHGGRPGAVAAGGLHAAHRAVDGGTEVGGGAHLRAGVAAALPAGVRGARGADRAPVEPARPRRRQCPGQLPRPAPGAREPAALVRVRQAVGAAGRRAAVPARCALGTLRPVRPRPRRRRRGGPTCFFIRKKQTICSPSFFSSSFPLWAVGLNVLC

SEQ ID NO: 19531 - DNA, 1650 bp, Zea mays subsp. mays
  misc_feature (1)..(1650): Ceres Seq. ID no. 12373548
aaagaaaaattagaaaccctagcgatgctgcagatccgcctgagcaagattggctcgtcggactccggcgctgccgccaccggctcggcagccgccgccggtgccgccgccgctgtggggtcggctgcggcgctgggcggcggcatcccggaatcggtcaccgtggcatgccccgaccacctggtgatcgcggacctacccgtcgcgaagagcctcggtgccgtcacgacctccgctgccgccgccacgcgcgccatcggccgtcgctcccgtcgcccgctcggggagcgcgtccacatctgctcccgctgcgagttccccatcgccatctacggccgcctcatcccttgtgaacatgccttttgtttaacctgtgcaagaagtgattccagctgctatctttgtgatgagcgcattcagaagatacaaagtgtgaaaatgatggaggggattttcatctgtgctgcaccgatgtgtctcaagtcattccttaagaaagcagattttgagtttcatgttcccgatgtccatgccaacctcctgcaaactaatctagagaaggaagaagaacgcaatgagccagatgctcctaacatctcccgtgcttctgcaggggatacacaaagacaatctcaaatgcctgaaatgtctactgcacgggctccttcaaggccaggtgtttcacaagatcgtgatgaacgctctcgctaccaccagtccagggagcaaacaccactgaggcccccaaccctttcaaaaccaccttcattccatggtcggcattcgtacccaccaggggatactcaggccgagaacaatccacctcaaggattcgaccgggcctacaactgggcttctcaatcacggcaagagagcccaggtgcggcgactccacttcgccaagaatctgaccaaagtattcaggacaagcagcaattgatggctaatgcaccttttatgtttccgccgattcctcctcaccagggaaactttatgatgcctatgaatatgaatcagcctttgattcctaatgcaccattcaattatcctctccagcaagatggaaaccctcagtacttctctgcccctttccagatgcagctaccagatactggatcagaacaaggttccatgtcaaatgtcccagcctccagctggtcctatgagtttccctgaggggcctcagcgcccatggggtatgaggctgatgagtaatccatttcaatcgatggcccttggtcagggaatgattgatggtgcgggtgatcctcaaggtggtggtggccttgccttcatgcaagctggttttgggggcatgcctgatggctccatgaatacaggcatgcccgatagaggtgatggaaggggtattctagcacagatgcatatgcaaatgcagatgtcacttcccccacctccgcctacacaacctcctccaggttcacagcaaacgtttaacaggacttgatatttttttttgtacgaattgatggcaactcccagaattgcatgtcaattcattgagcaaattgtaattttgtcgtttttggcatgtaacctgtggactagatggctcagttctgttccctggttggataggagcctgtattatgctataactcctgtttgaatgaaatgttccgaaatttc

SEQ ID NO: 19532 - protein, 391 aa, Zea mays subsp. mays
  misc_feature (1)..(391): Ceres Seq. ID no. 12373549
KEKLETLAMLQIRLSKIGSSDSGAAATGSAAAAGAAAAVGSAAALGGGIPESVTVACPDHLVIADLPVAKSLGAVTTSAAAATRAIGRRSRRPLGERVHICSRCEFPIAIYGRLIPCEHAFCLTCARSDSSCYLCDERIQKIQSVKMMEGIFICAAPMCLKSFLKKADFEFHVPDVHANLLQTNLEKEEERNEPDAPNISRASAGDTQRQSQMPEMSTARAPSRPGVSQDRDERSRYHQSREQTPLRPPTLSKPPSFHGRHSYPPGDTQAENNPPQGFDRAYNWASQSRQESPGAATPLRQESDQSIQDKQQLMANAPFMFPPIPPHQGNFMMPMNMNQPLIPNAPFNYPLQQDGNPQYFSAPFQMQLPDTGSEQGSMSNVPASSWSYEFP

SEQ ID NO: 19533 - protein, 383 aa, Zea mays subsp. mays
  misc_feature (1)..(383): Ceres Seq. ID no. 12373550
MLQIRLSKIGSSDSGAAATGSAAAAGAAAAVGSAAALGGGIPESVTVACPDHLVIADLPVAKSLGAVTTSAAAATRAIGRRSRRPLGERVHICSRCEFPIAIYGRLIPCEHAFCLTCARSDSSCYLCDERIQKIQSVKMMEGIFICAAPMCLKSFLKKADFEFHVPDVHANLLQTNLEKEEERNEPDAPNISRASAGDTQRQSQMPEMSTARAPSRPGVSQDRDERSRYHQSREQTPLRPPTLSKPPSFHGRHSYPPGDTQAENNPPQGFDRAYNWASQSRQESPGAATPLRQESDQSIQDKQQLMANAPFMFPPIPPHQGNFMMPMNMNQPLIPNAPFNYPLQQDGNPQYFSAPFQMQLPDTGSEQGSMSNVPASSWSYEFP

SEQ ID NO: 19534 - protein, 245 aa, Zea mays subsp. mays
  misc_feature (1)..(245): Ceres Seq. ID no. 12373551
MMEGIFICAAPMCLKSFLKKADFEFHVPDVHANLLQTNLEKEEERNEPDAPNISRASAGDTQRQSQMPEMSTARAPSRPGVSQDRDERSRYHQSREQTPLRPPTLSKPPSFHGRHSYPPGDTQAENNPPQGFDRAYNWASQSRQESPGAATPLRQESDQSIQDKQQLMANAPFMFPPIPPHQGNFMMPMNMNQPLIPNAPFNYPLQQDGNPQYFSAPFQMQLPDTGSEQGSMSNVPASSWSYEFP

SEQ ID NO: 19535 - DNA, 1471 bp, Zea mays subsp. mays
  misc_feature (1)..(1471): Ceres Seq. ID no. 12373562
acggacatgcgatgctttatggatggtctagatcacgcgcttctactgacccgactcactctctctgaaaagtgaaaactaggaaccccactccccctcccgaaactaccgccgccgccgctgccgctgccgccgcgatccaggtctcccgcttcgcctgagctctcgacctcttcactcctcgccgccgctgctcgccctcccgcgtatcctcgtctcagctctcaggttttcagcctgatcaaaccggtgtaaccagccgtgcatgactgcattggttcggctcgccggaagagcagcttcgcggagtagggtcggcatagcggcggcggcggcaccccctcctgtcggcttgtccgtgcagcgccggagggcgttccagggcgtgagaatggagacggggggaagcaagggcggccgtggcgctctggtggtcctggaaggcctggaccggagcgggaaaacttcgcagtgtgcccggctgctgtccttcctcaaaggcaaaggctacaatgccgaaggatggagtttccccgatagggccaccagtgtggggcagatgatctcttcctacctcgcgaacgattcgcagcttgatgacaggacgattcatctgctcttcagcgccaaccgctgggagaaaagagctttgatggagagcaagctacttagtggaactactctcattgtagaccgctactcctattcgggagtggccttttcagctgctaagggccttgacattgagtggtgcaaggctccagaaaatggacttattgctccagaccttgtaatatatcttgatgtacagccagagaaagcggctgaaagaggaggctatggggatgagcgatatgaaaagatagagttccaaaagaaagttgcagagcattaccattcactctgtgattcgacatggaaggtggttgatggtttccttcccatggagactgttgaagaaagactgagagatttagctacgagctgtattcaggactgccaagggaacccacttaccaatctggcctggtgaagtgccttatgcacaaagtaatggcggccacacatcgtcttgtgtgatcaaccatggtcgggatagaattaggcatccggaagcattggcctttccatttgctctatcagtattccttgtgcttatttataatttcaaagcgtgttttttctttcctaaagttaggccccggttaaaacctctagagctaattgttagctaactaataagttgttagttggttttagctgggttgagacagctacaactaatgactatttgagaggtatagctaacaattagtcagtctattatctgatctgatccgtttaaaacctttcagttaattttagatgccaactattagttttagaggtttggaacaggacctagtctgtctgccggtgtacggattttgtgtaacgtgaaacatgtgagagtgcaaaacacttaaattgc

SEQ ID NO: 19536 - protein, 255 aa, Zea mays subsp. mays
  misc_feature (1)..(255): Ceres Seq. ID no. 12373563
MTALVRLAGRAASRSRVGIAAAAAPPPVGLSVQRRRAFQGVRMETGGSKGGRGALVVLEGLDRSGKTSQCARLLSFLKGKGYNAEGWSFPDRATSVGQMISSYLANDSQLDDRTIHLLFSANRWEKRALMESKLLSGTTLIVDRYSYSGVAFSAAKGLDIEWCKAPENGLIAPDLVIYLDVQPEKAAERGGYGDERYEKIEFQKKVAEHYHSLCDSTWKVVDGFLPMETVEERLRDLATSCIQDCQGNPLTNLAW

SEQ ID NO: 19537 - protein, 213 aa, Zea mays subsp. mays
  misc_feature (1)..(213): Ceres Seq. ID no. 12373564
METGGSKGGRGALVVLEGLDRSGKTSQCARLLSFLKGKGYNAEGWSFPDRATSVGQMISSYLANDSQLDDRTIHLLFSANRWEKRALMESKLLSGTTLIVDRYSYSGVAFSAAKGLDIEWCKAPENGLIAPDLVIYLDVQPEKAAERGGYGDERYEKIEFQKKVAEHYHSLCDSTWKVVDGFLPMETVEERLRDLATSCIQDCQGNPLTNLAW

SEQ ID NO: 19538 - protein, 157 aa, Zea mays subsp. mays
  misc_feature (1)..(157): Ceres Seq. ID no. 12373565
MISSYLANDSQLDDRTIHLLFSANRWEKRALMESKLLSGTTLIVDRYSYSGVAFSAAKGLDIEWCKAPENGLIAPDLVIYLDVQPEKAAERGGYGDERYEKIEFQKKVAEHYHSLCDSTWKVVDGFLPMETVEERLRDLATSCIQDCQGNPLTNLAW

SEQ ID NO: 19539 - DNA, 1959 bp, Zea mays subsp. mays
  misc_feature (1)..(1959): Ceres Seq. ID no. 12373566
aaataataatcacattgtcctcgtcgtcctatcctccttcgcctgctcgctagtcgctagccgctccccccaacaaacaaccctaatccgtgaccgtggacacgccgcaagctccatcgcgcgaatagattggggggattcaatagaggctacgcggggattggtcgcgctcgagatctcagcaccctcgcgcctgaaatctttctattgttgtcgtggttcaggtgatgagatcttggggagcgcgactcgctcggtcctgagatgctggcgggctacggcggcggtggccgcagcgtccatctctcctcccacaaggacctcctcctcggccgctgcggccggagcttcctcttcggcaacacgtggtttctcctctccacttacccggcgcgcctcctgcacaccacggaccgtcgcgctccctccgctttcgtcgccgccatcaaccgggtcccctgcgtgcggtcgcactgcacggggcagggcctgctgcagagaggcagcattgtcatggctgcctgcggctatgttcttaggcgaactgagctgggtgctgccaagcgccagcagccggataaggacccatctggcggaacacgcgcctcccgtattgcagccatggggtcactgggcagtgctgcgcggccagaggtgtctttcaggtacagggggctggagcattgtaagaagattggtgcaagcttgaaatgccgtgagccatgggggaatagtgcgttctggacaaatgccactgggccgggttggaagttgagctttacagttgagccatggactaaggactttagtacggcgtgtgcagcgccgtattctgctggagccacagaggatcaattgccgctcaatgagaagatgaatagctccactgttggaatgtccccagtttctgaaaaattgaagttgctctctggttcatgttacttgcctcaccctgctaaggaggcaactggtggtgaggatgcacatttcattagcattgatgagcatgtgataggcgtagcagatggtgttggtggttgggcagatctcggtgtcgatgctggactatatgctaaggagctaatgagaaattcaatgagcgctatcaaagatgagccagaagggaccattgatccaaccagagttttggaaaaggcttatattagtacgaaagcaagggggtcatctaccgcgtgtatcatcactcttaaagatcagggtatccatgctgtaaatcttggggatagtggtttcgtagtagtccgagatggccgcactgttctcaggtcaccctcacagcagcatgatttcaattttacttatcagcttgagagtggaggtggcagtgatcttcctagttccgcacaagtatttcactttccggttgccccgggtgatgttatcgttgctggcacggatggactatttgacaatttatacaacaatgagataagtggtgttattgttgaagctctccgggttggacttgagcctcagattgcagcacaaaaaattgccgccctggctcgacaaagagctacggacaaaaataggcagtcaccttttgcatcagctgctcaagaagctgggtaccggtattatggtgggaagcttgatgacataacagtcgtggtctcatatgtgaaaagcgctggagccccatgatctgagcctttcttttattagatgtaatgtacataaatcattgtcccgaactggcggcgtatgtatgcaccagggcatagaagcttattctcaaggtgtggaatcccctgatcctagaagcaccctgtgctgggttcagtatggttgtgctttagccctggaacatgttagcaaaccattgcaccattttacttgtttgccactgtgagaaatcattttctctaattatctgaactcctgaagccagggtgggtttgtttccccccttggagttggaggataatgaccagctgg

SEQ ID NO: 19540 - protein, 466 aa, Zea mays subsp. mays
  misc_feature (1)..(466): Ceres Seq. ID no. 12373567
MLAGYGGGGRSVHLSSHKDLLLGRCGRSFLFGNTWFLLSTYPARLLHTTDRRAPSAFVAAINRVPCVRSHCTGQGLLQRGSIVMAACGYVLRRTELGAAKRQQPDKDPSGGTRASRIAAMGSLGSAARPEVSFRYRGLEHCKKIGASLKCREPWGNSAFWTNATGPGWKLSFTVEPWTKDFSTACAAPYSAGATEDQLPLNEKMNSSTVGMSPVSEKLKLLSGSCYLPHPAKEATGGEDAHFISIDEHVIGVADGVGGWADLGVDAGLYAKELMRNSMSAIKDEPEGTIDPTRVLEKAYISTKARGSSTACIITLKDQGIHAVNLGDSGFVVVRDGRTVLRSPSQQHDFNFTYQLESGGGSDLPSSAQVFHFPVAPGDVIVAGTDGLFDNLYNNEISGVIVEALRVGLEPQIAAQKIAALARQRATDKNRQSPFASAAQEAGYRYYGGKLDDITVVVSYVKSAGAP

SEQ ID NO: 19541 - protein, 383 aa, Zea mays subsp. mays
  misc_feature (1)..(383): Ceres Seq. ID no. 12373568
MAACGYVLRRTELGAAKRQQPDKDPSGGTRASRIAAMGSLGSAARPEVSFRYRGLEHCKKIGASLKCREPWGNSAFWTNATGPGWKLSFTVEPWTKDFSTACAAPYSAGATEDQLPLNEKMNSSTVGMSPVSEKLKLLSGSCYLPHPAKEATGGEDAHFISIDEHVIGVADGVGGWADLGVDAGLYAKELMRNSMSAIKDEPEGTIDPTRVLEKAYISTKARGSSTACIITLKDQGIHAVNLGDSGFVVVRDGRTVLRSPSQQHDFNFTYQLESGGGSDLPSSAQVFHFPVAPGDVIVAGTDGLFDNLYNNEISGVIVEALRVGLEPQIAAQKIAALARQRATDKNRQSPFASAAQEAGYRYYGGKLDDITVVVSYVKSAGAP

SEQ ID NO: 19542 - protein, 347 aa, Zea mays subsp. mays
  misc_feature (1)..(347): Ceres Seq. ID no. 12373569
MGSLGSAARPEVSFRYRGLEHCKKIGASLKCREPWGNSAFWTNATGPGWKLSFTVEPWTKDFSTACAAPYSAGATEDQLPLNEKMNSSTVGMSPVSEKLKLLSGSCYLPHPAKEATGGEDAHFISIDEHVIGVADGVGGWADLGVDAGLYAKELMRNSMSAIKDEPEGTIDPTRVLEKAYISTKARGSSTACIITLKDQGIHAVNLGDSGFVVVRDGRTVLRSPSQQHDFNFTYQLESGGGSDLPSSAQVFHFPVAPGDVIVAGTDGLFDNLYNNEISGVIVEALRVGLEPQIAAQKIAALARQRATDKNRQSPFASAAQEAGYRYYGGKLDDITVVVSYVKSAGAP

SEQ ID NO: 19543 - DNA, 1488 bp, Zea mays subsp. mays
  misc_feature (1)..(1488): Ceres Seq. ID no. 12373586
gcccttctcccctcccctcgtgcgttgacaaaaaagaaagtgaagtgaagaatcaaccaacaatggccggcggaatccaccgaccacaatgctgattttgtttgagccatctggactggactggaccctataaaaaacagatcagatctcccccaccctcgcttccccagcctgcaggttgtcgtcgccctcttcctcctccttcgctgttgctgttgctgttgcttccgcttccgccgccgccgccgcggaaatcaaactaatctgatcgagaccacaccgttccagagagatcccccaaacaaaaaaagagcacgggatcgaaatggagctcgacggcaagtacagcaaggaccagagcctcaaatgcgaatgcctcctcttcgacctcgatgacacactatacccgttcaactccggcattgctgccgacataaagaagaacatccaagactatatggtgcacaagctcggcgttgacgaggccataagcttggacctatgcgtcctcctctacaagcagtacggaaccaccatggctggcttgagggctgttgggtaccagtttgattacgatgactaccacagctttgttcatgggaggttgtcttatgacaaaatcaagcctgatcctgtgcttaggaacatcctcctcagcttacccattcgcaaacttgtgttcacaaacggtgacagaacacatgcttcaagggccctcaagaggcttggcattgaggattgtttcgaaggagtcgtgtgctttgagacactgaacccgacatctcctcctcctcctgtcccagctcaggaacttgaaatctttgatctaatgaagcatctggctcatccacagcccgcggtgcagctaccaaaatcacctatcctatgcaaaccgtcaagggaggccatgctgcaggctctcaaggtcgcctccattaatccacagacaactatattgttcgatgacagcttcaggaacattgaagctgcaaagcaaattggaatgtgtactgtcctggttggaacatctgagcggaaaaagggtgctgaccatgccttggaaagcctccacaacatgaaggaagcactgccggagctgtgggaggaagctgagaaggatgaagatgtgaggaattcgagcaaagccggaatcgagacatctgtgatcgcgtaatcttttttgttccttggttacaaatgtagccccttctgttttccttggaggacaacacgaggtggtggtgtatgaaaaaagaggagacctcctcaaggggtgggggggactgactgatactacgaccactgatgttacaccccgtaaactattactatccaataagaatgttttcttcttcaactatctaggatggtcattttgttggtgtttagttaaagcagctatccaatatttttttggatccaaatgtgtatgtcctcgctacttggttcttcatgcttatgaatgtggagtgatgatgtcctgttgcc

SEQ ID NO: 19544 - protein, 282 aa, Zea mays subsp. mays
  misc_feature (1)..(282): Ceres Seq. ID no. 12373587
MELDGKYSKDQSLKCECLLFDLDDTLYPFNSGIAADIKKNIQDYMVHKLGVDEAISLDLCVLLYKQYGTTMAGLRAVGYQFDYDDYHSFVHGRLSYDKIKPDPVLRNILLSLPIRKLVFTNGDRTHASRALKRLGIEDCFEGVVCFETLNPTSPPPPVPAQELEIFDLMKHLAHPQPAVQLPKSPILCKPSREAMLQALKVASINPQTTILFDDSFRNIEAAKQIGMCTVLVGTSERKKGADHALESLHNMKEALPELWEEAEKDEDVRNSSKAGIETSVIA

SEQ ID NO: 19545 - protein, 238 aa, Zea mays subsp. mays
  misc_feature (1)..(238): Ceres Seq. ID no. 12373588
MVHKLGVDEAISLDLCVLLYKQYGTTMAGLRAVGYQFDYDDYHSFVHGRLSYDKIKPDPVLRNILLSLPIRKLVFTNGDRTHASRALKRLGIEDCFEGVVCFETLNPTSPPPPVPAQELEIFDLMKHLAHPQPAVQLPKSPILCKPSREAMLQALKVASINPQTTILFDDSFRNIEAAKQIGMCTVLVGTSERKKGADHALESLHNMKEALPELWEEAEKDEDVRNSSKAGIETSVIA

SEQ ID NO: 19546 - protein, 212 aa, Zea mays subsp. mays
  misc_feature (1)..(212): Ceres Seq. ID no. 12373589
MAGLRAVGYQFDYDDYHSFVHGRLSYDKIKPDPVLRNILLSLPIRKLVFTNGDRTHASRALKRLGIEDCFEGVVCFETLNPTSPPPPVPAQELEIFDLMKHLAHPQPAVQLPKSPILCKPSREAMLQALKVASINPQTTILFDDSFRNIEAAKQIGMCTVLVGTSERKKGADHALESLHNMKEALPELWEEAEKDEDVRNSSKAGIETSVIA

SEQ ID NO: 19547 - DNA, 1776 bp, Zea mays subsp. mays
  misc_feature (1)..(1776): Ceres Seq. ID no. 12373590
aaagaaaaacggtccaccacaccttgtatgtgccctccggcgggcgggtcagagctcgcaactcgcaccagcacagcagcaccggcagcaccaccaaccccagggcagccgcgccgccagccacgacaagcttagcagcccctcgcactcgctagggtatttattggtacaatcgggtgatctgcgtgccgcatcgcgccgggacacgggagacaatggcgttcacgacgctcggcggctgtggggcgcaggcttcagtgcggttggctccccagaatggaatccttggatctaattcgaagccattcgcgggcatcatactcaagaaacctcagcaggttggatccctgcccctccgtgcaaggggatccattttttcttcaccacgcaggcttttctcccctaaggcagcagcccctaaatcaggggattccatacgcattgcagtgctaggggccagcggttatactggagctgagattgttcggattctagcgaaccaccctcagtttcatataaaagtgatgactgcagatagaaaagctggcgagcaatttggatcagtatttcctcacttgataacacaggacctgccgagactggtcgcaataaaagacgctgacttttcagatgttgatgctgttttttgctgcttgccacatggtacaacccaggaaattatcaaaagcttaccccgacacttaaagattgttgatctctcagcggacttccgactacgcgacattaatgagtatgctgagtggtatggacattcccacagggcaccggaacttcagggggaagctgtgtatggtttgaccgaacttaaacgagatgacataagaaatgcacgcctggtagcaaatccagggtgttatcccacatctattcaacttccgctcgttcctttggtaaaggcaaaactgatcaagctaaccaacattattattgatgcaaaatctggagtcagtggtgcaggacgtggggctaaggaagcaaatctttacactgaaatcgctgagggtatccatgcttatgggataacaagccatcggcatgtgcctgagattgagcaaggacttacagatgctgctgaatcaaaagttactatcagctttactccacatttgatgtgtatgaaacgtgggatgcaatctactgtgtatgttgaattggcatctggagtgactcccagggatttgtatgaacacctaaagtctacttacgagaatgaagaatttgtcaagctgttacatggtagcaatgttccttgcacaagccatgttgtgggatcaaattactgcttcatgaatgtctatgaggatagaatacctggaagggccatcatcatctctgtcatagataatcttgtgaagggagcatctggtcaggctttgcaaaatcttaatctgatgatgggactgcctgagaatatggggctgcaataccagcccctgttcccttgatcttttgtgtcattatctattattacattatttaggagtccagaaaccaaattatcattactgtcaagaggtggcaaggagcctgacatcagaattcagtcaagtcgaagttagacagttagtgtagcttggtctgtgttgttttagctttattaaaccattaagagaataatgatgatggcaatttagcagtacaatggtagtattatgtgggcagcttggttccaataaaatcataagcctatacacatcttgtgcccgcaatgttgtttgctattttgatcacgaaatcaatattgagcttgaatcc

SEQ ID NO: 19548 - protein, 416 aa, Zea mays subsp. mays
  misc_feature (1)..(416): Ceres Seq. ID no. 12373591
MAFTTLGGCGAQASVRLAPQNGILGSNSKPFAGIILKKPQQVGSLPLRARGSIFSSPRRLFSPKAAAPKSGDSIRIAVLGASGYTGAEIVRILANHPQFHIKVMTADRKAGEQFGSVFPHLITQDLPRLVAIKDADFSDVDAVFCCLPHGTTQEIIKSLPRHLKIVDLSADFRLRDINEYAEWYGHSHRAPELQGEAVYGLTELKRDDIRNARLVANPGCYPTSIQLPLVPLVKAKLIKLTNIIIDAKSGVSGAGRGAKEANLYTEIAEGIHAYGITSHRHVPEIEQGLTDAAESKVTISFTPHLMCMKRGMQSTVYVELASGVTPRDLYEHLKSTYENEEFVKLLHGSNVPCTSHVVGSNYCFMNVYEDRIPGRAIIISVIDNLVKGASGQALQNLNLMMGLPENMGLQYQPLFP

SEQ ID NO: 19549 - protein, 313 aa, Zea mays subsp. mays
  misc_feature (1)..(313): Ceres Seq. ID no. 12373592
MTADRKAGEQFGSVFPHLITQDLPRLVAIKDADFSDVDAVFCCLPHGTTQEIIKSLPRHLKIVDLSADFRLRDINEYAEWYGHSHRAPELQGEAVYGLTELKRDDIRNARLVANPGCYPTSIQLPLVPLVKAKLIKLTNIIIDAKSGVSGAGRGAKEANLYTEIAEGIHAYGITSHRHVPEIEQGLTDAAESKVTISFTPHLMCMKRGMQSTVYVELASGVTPRDLYEHLKSTYENEEFVKLLHGSNVPCTSHVVGSNYCFMNVYEDRIPGRAIIISVIDNLVKGASGQALQNLNLMMGLPENMGLQYQPLFP

SEQ ID NO: 19550 - DNA, 1509 bp, Zea mays subsp. mays
  misc_feature (1)..(1509): Ceres Seq. ID no. 12373608
gcacgagaccattacctagaacatcctaatcgaaaattttgcaatccgtatcatcatcttggcctcgtcaatccaccaccaccgtcgtcgctgagctcctcctccggcttcgcttcgcttcgctgtcttgcctcctcctcggtcgaagaagaagaagaaaacatgtgtccgggatccgtggagtcgtcgtcggcggcggcggcgggcaagagcgtgtgcgtgatggacgccgcggggccgctgggccacgcgctcgtggaccgcctcctccggcgcgggtacacagtccacgccgccacgtacgcccgcgacggggaggagggcgcggctgccgccgcgctgctcggccacctgtcgcgcgccgccgacgcgtgcaggcaccggctgaagctgttccgcgccgacccgttcgactaccacgccatcgccgacgccgtgcggggctgcgccggcgtcttctgcatgttcaacacgcccgaggatcaggcccaatgcgatgagtcgacggtggagacggaggtgcgcgcggcgcacaacgtgctggaggcgtgcgcgcagacggacgccatggagcgggtcgtcttcacctcctccgtcaccgccgtcgtctggagcggcgccggcgccggcgtcggcgcccacagggaggaggtcgccgacgagaggagctggagcgacctcgccttctgcaggaagttcaagctgtggcacgccctggccaagacgctgtcggagaagacggcgtgggcgctggccatggaccggggcgtcgacatggtggccatcaacgccggcctgctgctgtccgcccccgggcccgggctcgggctcaccgccgcgcacccctacctcaagggcgcccccgacatgtacgacggcggcgtcctcgccaccgtcgacgtcggcttcctggccgacgcgcacgtcgccgcctacgagtcccccaccgcctacggccgctacctctgcttcagcgacgccgtctgccgtcccgaggacgccgtcaagctcgcccagatgctctcgccggccgcgccacgctcgccgccgccaagcgacgaactgaaggtgataccacagaggatccagggcaagaaactgaacaagctcatgctggagttcgccagcggggtatacggggagctggactaggaaggaactgccaggccacagatgatgcgatgcgactagggctgttgtattcttttgtacgtagtactatttgtagttttcgcccccctcacaaaaaaaaggagggaaatctgtttggttggccaaaatgtgccatacgctcgctgtacatggccaaacacgccacgtgtgtagcccctgccagcagcaggggtgggtggggagagcatttcagtgatcggttgccaaagaaataccatatcgtatctaggttcgtgagttacatcccatgcatgtgttacgtgacgcttatattgaactctgacaaacttgtagcgcacaattacaaacatgattacggaagaatcgtttcagggt

SEQ ID NO: 19551 - protein, 383 aa, Zea mays subsp. mays
  misc_feature (1)..(383): Ceres Seq. ID no. 12373609
ARDHYLEHPNRKFCNPYHHLGLVNPPPPSSLSSSSGFASLRCLASSSVEEEEENMCPGSVESSSAAAAGKSVCVMDAAGPLGHALVDRLLRRGYTVHAATYARDGEEGAAAAALLGHLSRAADACRHRLKLFRADPFDYHAIADAVRGCAGVFCMFNTPEDQAQCDESTVETEVRAAHNVLEACAQTDAMERVVFTSSVTAVVWSGAGAGVGAHREEVADERSWSDLAFCRKFKLWHALAKTLSEKTAWALAMDRGVDMVAINAGLLLSAPGPGLGLTAAHPYLKGAPDMYDGGVLATVDVGFLADAHVAAYESPTAYGRYLCFSDAVCRPEDAVKLAQMLSPAAPRSPPPSDELKVIPQRIQGKKLNKLMLEFASGVYGELD

SEQ ID NO: 19552 - protein, 329 aa, Zea mays subsp. mays
  misc_feature (1)..(329): Ceres Seq. ID no. 12373610
MCPGSVESSSAAAAGKSVCVMDAAGPLGHALVDRLLRRGYTVHAATYARDGEEGAAAAALLGHLSRAADACRHRLKLFRADPFDYHAIADAVRGCAGVFCMFNTPEDQAQCDESTVETEVRAAHNVLEACAQTDAMERVVFTSSVTAVVWSGAGAGVGAHREEVADERSWSDLAFCRKFKLWHALAKTLSEKTAWALAMDRGVDMVAINAGLLLSAPGPGLGLTAAHPYLKGAPDMYDGGVLATVDVGFLADAHVAAYESPTAYGRYLCFSDAVCRPEDAVKLAQMLSPAAPRSPPPSDELKVIPQRIQGKKLNKLMLEFASGVYGELD

SEQ ID NO: 19553 - protein, 309 aa, Zea mays subsp. mays
  misc_feature (1)..(309): Ceres Seq. ID no. 12373611
MDAAGPLGHALVDRLLRRGYTVHAATYARDGEEGAAAAALLGHLSRAADACRHRLKLFRADPFDYHAIADAVRGCAGVFCMFNTPEDQAQCDESTVETEVRAAHNVLEACAQTDAMERVVFTSSVTAVVWSGAGAGVGAHREEVADERSWSDLAFCRKFKLWHALAKTLSEKTAWALAMDRGVDMVAINAGLLLSAPGPGLGLTAAHPYLKGAPDMYDGGVLATVDVGFLADAHVAAYESPTAYGRYLCFSDAVCRPEDAVKLAQMLSPAAPRSPPPSDELKVIPQRIQGKKLNKLMLEFASGVYGELD

SEQ ID NO: 19554 - DNA, 1371 bp, Zea mays subsp. mays
  misc_feature (1)..(1371): Ceres Seq. ID no. 12373612
tccgccttctgctctctctcgcctctggtgcgcagagctagctctcttgaagcctcgagactcgtctcgccgctgctctgctctgctccccagctctgccgctgcgtgcctgcgtcagttgttgcattgcagccagcgagccttgagctgctagctctctcttcaccacagttcacaggcatggagttcgaggatcgctgccacaaggtccaggagcccaagttcgactgcctgctcttcgacctcgacgacaccctgtatccgctgagctccgggatcgcgggccatgtcaagaagaacattgaagattacatggtcgagaagctgggtattgacgagagcaagatcgagaacctgggaaatctgctgtacaagaactacggcaccacgatggctggcctcagggcgatcggctacagcttcgattacgatgagtaccacgccttcgtccatggaaggctgccgtacgacaacatcaagcccgaccctgttctcaagcacattctcaagaacctgcccatccgcaaactcatattcaccaacggcgacaaggtccacgccgtgagagccctggagaggctgggcctggaggactgcttcgaggggatcatctgcttcgagaccctgaacccgccgtgcccgcctcagggagaccgggaggccgagatcttcgacatcgccggccacttcgcccgctccggcgccgccgccgagctgcccaagacccccgtcctgtgcaagcccaacgtcgacgccatggaggaggcgctcaggatcgccaacgtcaacccgcacaaggcgattttcttcgacgacagcgtacgcaacatccaggccgggaagcagatcggccttcacacagtgctggtgggcaagtcgcagcgggtgaaaggcgcggaccacgcgctggagagcatccacaacgtcagggaggcgctgccggggctgtgggaggaggccgagaaggcggaggacgtgctctacgccgagcgcgtcgccatggagacctcggtcaccgcgtaaacccctctctcgaatcctccggtgcaccgtcagcccaaccttctcgacatccaggaccgggacgatcgcataccactctctccccgagccagggctggtggtttcacgctggaactgaatccagccatggccgggccgagaatttccgacagcaagaaggggtgcagcatgtaaaggggggagcagatgatatcatgtttgggatgctcccagatatgtatagttatgtatcagccagttgtttgtaaattaccaataaatattagaagtaataagaaaaaatggagtttacttgtacgtttcttgtgctctgtcatctgaagtaataaaagcggttagcaagaatgg

SEQ ID NO: 19555 - protein, 340 aa, Zea mays subsp. mays
  misc_feature (1)..(340): Ceres Seq. ID no. 12373613
SAFCSLSPLVRRASSLEASRLVSPLLCSAPQLCRCVPASVVALQPASLELLALSSPQFTGMEFEDRCHKVQEPKFDCLLFDLDDTLYPLSSGIAGHVKKNIEDYMVEKLGIDESKIENLGNLLYKNYGTTMAGLRAIGYSFDYDEYHAFVHGRLPYDNIKPDPVLKHILKNLPIRKLIFTNGDKVHAVRALERLGLEDCFEGIICFETLNPPCPPQGDREAEIFDIAGHFARSGAAAELPKTPVLCKPNVDAMEEALRIANVNPHKAIFFDDSVRNIQAGKQIGLHTVLVGKSQRVKGADHALESIHNVREALPGLWEEAEKAEDVLYAERVAMETSVTA

SEQ ID NO: 19556 - protein, 280 aa, Zea mays subsp. mays
  misc_feature (1)..(280): Ceres Seq. ID no. 12373614
MEFEDRCHKVQEPKFDCLLFDLDDTLYPLSSGIAGHVKKNIEDYMVEKLGIDESKIENLGNLLYKNYGTTMAGLRAIGYSFDYDEYHAFVHGRLPYDNIKPDPVLKHILKNLPIRKLIFTNGDKVHAVRALERLGLEDCFEGIICFETLNPPCPPQGDREAEIFDIAGHFARSGAAAELPKTPVLCKPNVDAMEEALRIANVNPHKAIFFDDSVRNIQAGKQIGLHTVLVGKSQRVKGADHALESIHNVREALPGLWEEAEKAEDVLYAERVAMETSVTA

SEQ ID NO: 19557 - protein, 236 aa, Zea mays subsp. mays
  misc_feature (1)..(236): Ceres Seq. ID no. 12373615
MVEKLGIDESKIENLGNLLYKNYGTTMAGLRAIGYSFDYDEYHAFVHGRLPYDNIKPDPVLKHILKNLPIRKLIFTNGDKVHAVRALERLGLEDCFEGIICFETLNPPCPPQGDREAEIFDIAGHFARSGAAAELPKTPVLCKPNVDAMEEALRIANVNPHKAIFFDDSVRNIQAGKQIGLHTVLVGKSQRVKGADHALESIHNVREALPGLWEEAEKAEDVLYAERVAMETSVTA

SEQ ID NO: 19558 - DNA, 1198 bp, Zea mays subsp. mays
  misc_feature (1)..(1198): Ceres Seq. ID no. 12373616
gaagcagtcgtacttgtacactccttgtctccttcgctttggcacactggacacgtccaccacgtgaacacgtcaacagaagtgacccatcaaggggcccacaggtccacgagcccgagtgacgactgacgacagatcgcttgtgcgtcgctaacccgccgctagtcggctagtgggtgggaaatccgcagattcccgtcgctacttcggccacatggctgcagcggcggcgtggaccggcgccgcatcccccaactcgctgctgctctcgcgctcgcctccccacgccgccgcgctcgcgccttcgccgggaagctccatgcggaggcggctcctcctcggcgtcggcaccccggccgtggcggcgctggcggccgcggcgccgccagcggtgctgcaggacggagcggtcactgtgctcatcaccgccggcgcctactctcttgtgcgcgtcttcgacgagctcaccgagcggcggctcatcgaaaagagcttgagcaggaaggttgtgcacgtgctatccggcgtcctgttcatgtcatcttggcccctgttcagcaattcgacagaagcacggtatttcgccgcggttgtcccgttcctgaactccatgaggcttctgatatatggactccgtctctacactgatgaagctctggtaaaatcagtgacacgtgaaggaaaaccagaggaattgctgagaggtccactctattatgtcctggtgctgctgttcagcgttttagtcttctggcgtgagtcccccatcgggatcgtctccttgtcgatgatgagcggtggcgatggttttgctgacattgttgggaggaggtatggctcagcgaagctgccattcaatcggaagaagagctgggccgggagcatctcgatgttcatttctggtttcctgctgtccgcgatgatgatgctctacttctcaagcctgggttacattgatgttatctgggaagaggcacttggtaagctggcgcttgttgcactagcagcgacagtagtggagtgcgttcctgtgactgaagttgtagatgacaacatatctgttcctttggccaccatgctggtagcttttctcttgtttagctccaaccgcacaatagttaattaaaatactactagtgcattatttaagacatgtgatgagttcttcagtgatgagttgtgcttacttttgcttcct

SEQ ID NO: 19559 - protein, 303 aa, Zea mays subsp. mays
  misc_feature (1)..(303): Ceres Seq. ID no. 12373617
MAAAAAWTGAASPNSLLLSRSPPHAAALAPSPGSSMRRRLLLGVGTPAVAALAAAAPPAVLQDGAVTVLITAGAYSLVRVFDELTERRLIEKSLSRKVVHVLSGVLFMSSWPLFSNSTEARYFAAVVPFLNSMRLLIYGLRLYTDEALVKSVTREGKPEELLRGPLYYVLVLLFSVLVFWRESPIGIVSLSMMSGGDGFADIVGRRYGSAKLPFNRKKSWAGSISMFISGFLLSAMMMLYFSSLGYIDVIWEEALGKLALVALAATVVECVPVTEVVDDNISVPLATMLVAFLLFSSNRTIVN

SEQ ID NO: 19560 - protein, 268 aa, Zea mays subsp. mays
  misc_feature (1)..(268): Ceres Seq. ID no. 12373618
MRRRLLLGVGTPAVAALAAAAPPAVLQDGAVTVLITAGAYSLVRVFDELTERRLIEKSLSRKVVHVLSGVLFMSSWPLFSNSTEARYFAAVVPFLNSMRLLIYGLRLYTDEALVKSVTREGKPEELLRGPLYYVLVLLFSVLVFWRESPIGIVSLSMMSGGDGFADIVGRRYGSAKLPFNRKKSWAGSISMFISGFLLSAMMMLYFSSLGYIDVIWEEALGKLALVALAATVVECVPVTEVVDDNISVPLATMLVAFLLFSSNRTIVN

SEQ ID NO: 19561 - protein, 196 aa, Zea mays subsp. mays
  misc_feature (1)..(196): Ceres Seq. ID no. 12373619
MSSWPLFSNSTEARYFAAVVPFLNSMRLLIYGLRLYTDEALVKSVTREGKPEELLRGPLYYVLVLLFSVLVFWRESPIGIVSLSMMSGGDGFADIVGRRYGSAKLPFNRKKSWAGSISMFISGFLLSAMMMLYFSSLGYIDVIWEEALGKLALVALAATVVECVPVTEVVDDNISVPLATMLVAFLLFSSNRTIVN

SEQ ID NO: 19562 - DNA, 1420 bp, Zea mays subsp. mays
  misc_feature (1)..(1420): Ceres Seq. ID no. 12373624
ctctctcgtgcggcaactgggctattggcgaccgccaacgccgacgattacatttacaccaagtgcccaagccgtcttcgactacaccaggtgccaagttttcttcgcgtccttcacccgcgacgagcacccaccaggcatagagagagatggcaagtctaaccggcctcaccgcgaaccctaatccgaacaagtcattcgagatactgccgaacccaggtgactctgtctccagcctcagctttagtcccaagagtaatctgcttgtggcaacctcctgggataaccaggtgaggtgctgggagattgttggtggtaacagtcagccaaaggcgtccatttctcatgatcagccggttctctgctcggcttggaaggatgatggaactactgtcttctctggaggctgtgacaagcaggtcaaaatgtggcctcttctgtcaggtgggcagcctcagacggttgctatgcatgatgcccctgtcaaggaggtcgcctggattcctcagatgaatcttcttgtatccggaagctgggataagactttaaggtactgggatacaaggcaatcaaatcctgtgcatattcagcaacttcctgaacgttgctatgctcttactgtgaattatccccttatgattgttggaactgctgaccgtcatcttgttgtcttcaatttgcagaatcctcagacggagttcaagcgaatccaatcaccactaaaataccagacacggtgccttgctgcattccctgatcaacaagggtttttggttggttcaatagaaggaagagttggcgttcatcatatcgatgacgcacagcaaagcaaaaacttcacattcaaatgccacagggaaggaaatgatatattctctgtcaattcactcaacttccaccctgtccatcacacatttgcaactgctggatctgacggtgctttcaacttctgggataaggatagcaagcagaggctaaaggcttttagtagatgcccccttcccattccttgcagtaccttcaacagtgatggttccatatttgcttatgcggtttgctatgactggagccgtggggccgaaaatcacaaccctgcagctgcaaagacatccatctatctccacagtccacaggaaaccgaggtcaaaggaaagccgcgcattgcaacaggcaggaagtgattgcattgaaggtgttgcaaggaaccatgatgtcatccagcagttttgtcatgcctccctcctgtcttggaagtctggtagagtgtaaatttcagctaacttatgcgccgattatagggtttctgtagtacctggtgtttgtggtgtcttcaaaatagattctgtcgacgttctgtgatgatctccttactgcttatttctggcagtaaaatcagtgtatcttaaaaaggttgtgatgt

SEQ ID NO: 19563 - protein, 343 aa, Zea mays subsp. mays
  misc_feature (1)..(343): Ceres Seq. ID no. 12373625
MASLTGLTANPNPNKSFEILPNPGDSVSSLSFSPKSNLLVATSWDNQVRCWEIVGGNSQPKASISHDQPVLCSAWKDDGTTVFSGGCDKQVKMWPLLSGGQPQTVAMHDAPVKEVAWIPQMNLLVSGSWDKTLRYWDTRQSNPVHIQQLPERCYALTVNYPLMIVGTADRHLVVFNLQNPQTEFKRIQSPLKYQTRCLAAFPDQQGFLVGSIEGRVGVHHIDDAQQSKNFTFKCHREGNDIFSVNSLNFHPVHHTFATAGSDGAFNFWDKDSKQRLKAFSRCPLPIPCSTFNSDGSIFAYAVCYDWSRGAENHNPAAAKTSIYLHSPQETEVKGKPRIATGRK

SEQ ID NO: 19564 - protein, 251 aa, Zea mays subsp. mays
  misc_feature (1)..(251): Ceres Seq. ID no. 12373626
MWPLLSGGQPQTVAMHDAPVKEVAWIPQMNLLVSGSWDKTLRYWDTRQSNPVHIQQLPERCYALTVNYPLMIVGTADRHLVVFNLQNPQTEFKRIQSPLKYQTRCLAAFPDQQGFLVGSIEGRVGVHHIDDAQQSKNFTFKCHREGNDIFSVNSLNFHPVHHTFATAGSDGAFNFWDKDSKQRLKAFSRCPLPIPCSTFNSDGSIFAYAVCYDWSRGAENHNPAAAKTSIYLHSPQETEVKGKPRIATGRK

SEQ ID NO: 19565 - protein, 237 aa, Zea mays subsp. mays
  misc_feature (1)..(237): Ceres Seq. ID no. 12373627
MHDAPVKEVAWIPQMNLLVSGSWDKTLRYWDTRQSNPVHIQQLPERCYALTVNYPLMIVGTADRHLVVFNLQNPQTEFKRIQSPLKYQTRCLAAFPDQQGFLVGSIEGRVGVHHIDDAQQSKNFTFKCHREGNDIFSVNSLNFHPVHHTFATAGSDGAFNFWDKDSKQRLKAFSRCPLPIPCSTFNSDGSIFAYAVCYDWSRGAENHNPAAAKTSIYLHSPQETEVKGKPRIATGRK

SEQ ID NO: 19566 - DNA, 1425 bp, Zea mays subsp. mays
  misc_feature (1)..(1425): Ceres Seq. ID no. 12373632
ctctctccccaccatcagcagaccaccaccaatcacacacaccggccggccagctctctagctcttcctccaacacttgttgctccgctcccatcccctcaagcctctcttcactgaattttctggtcgccatgcacagctactacagagccatgcacccgtacgctcacccgtaccagcaccatgccgccgccgttgcccccaccaccaagcacggacactgccatgatgccgaggaggaggacgaccatcagtccatgctgctcctctccctgtggcctcccggccaccaccaccacagcgtcgccgccgccgcttcctcggcgtgctcgtctcctcccaccatatgcgccaccaccagcaccacctccatggccgcctccgccgcttcttcttacccttgttgcctcacccaccaaagccattacaatggcggcggatctgcagggagcagcagccacagtagctgcttcttgttccaccacgagcaccagcagcagcaggagcccgatgtgagcatatcgctgtccatagccccgccgcgcagcaacaacgacgcagcttcctgtggtggccgtggcttcgctgccccgtcgacggtgacgacgccggaggtgcccaccagccagtactggatcccctccgcctccgagatcctggtcggctccacgcagttctcctgcgccgtctgcaacaagaccttcaaccgcttcaacaacatgcagatgcacatgtggggccacggttcgcagtaccgcaagggctccgagtccctgctacgcggcgccattatcacggtgggcacggcggcggcggcgtcgtcgtcgctgacgcgcctgccgtgctactgctgcgcggaggggtgccggaacaacatcgagcacccgcgggcgcggccgctcaaggacttccgcacgctgcagacgcactaccggcgcaagcacggcgcccggccctacgcgtgccgccgctgcggcaagcgcttcgccgtgcgcggcgactggcgcacgcacgagaagaactgcggcaggctctggttctgcgcctgcggctccgacttcaagcacaagcggtcgctcaaggaccacgtccgatccttcggcggcggccacgcgccgcgcgtcgtcgagtccgtcgccgtcgaggacgaggaggaggaggaggacgtcgacgacgctgatgacgatggcgacctgcagactttcgacgacaacggcgccagcggagaacgacccagcgacatggtcgtcgtctagaggcttgcttcttcattaattagatcgatgtggtactatagtatgctagctactctactccaccgatggacataagtagttctaatgtgctgctcatgcatctcttagcccgatcgcgcggtcttattagctatatatatatatatatatagatttcatttcagtagtt

SEQ ID NO: 19567 - protein, 417 aa, Zea mays subsp. mays
  misc_feature (1)..(417): Ceres Seq. ID no. 12373633
LSPPSADHHQSHTPAGQLSSSSSNTCCSAPIPSSLSSLNFLVAMHSYYRAMHPYAHPYQHHAAAVAPTTKHGHCHDAEEEDDHQSMLLLSLWPPGHHHHSVAAAASSACSSPPTICATTSTTSMAASAASSYPCCLTHQSHYNGGGSAGSSSHSSCFLFHHEHQQQQEPDVSISLSIAPPRSNNDAASCGGRGFAAPSTVTTPEVPTSQYWIPSASEILVGSTQFSCAVCNKTFNRFNNMQMHMWGHGSQYRKGSESLLRGAIITVGTAAAASSSLTRLPCYCCAEGCRNNIEHPRARPLKDFRTLQTHYRRKHGARPYACRRCGKRFAVRGDWRTHEKNCGRLWFCACGSDFKHKRSLKDHVRSFGGGHAPRVVESVAVEDEEEEEDVDDADDDGDLQTFDDNGASGERPSDMVVV

SEQ ID NO: 19568 - protein, 374 aa, Zea mays subsp. mays
  misc_feature (1)..(374): Ceres Seq. ID no. 12373634
MHSYYRAMHPYAHPYQHHAAAVAPTTKHGHCHDAEEEDDHQSMLLLSLWPPGHHHHSVAAAASSACSSPPTICATTSTTSMAASAASSYPCCLTHQSHYNGGGSAGSSSHSSCFLFHHEHQQQQEPDVSISLSIAPPRSNNDAASCGGRGFAAPSTVTTPEVPTSQYWIPSASEILVGSTQFSCAVCNKTFNRFNNMQMHMWGHGSQYRKGSESLLRGAIITVGTAAAASSSLTRLPCYCCAEGCRNNIEHPRARPLKDFRTLQTHYRRKHGARPYACRRCGKRFAVRGDWRTHEKNCGRLWFCACGSDFKHKRSLKDHVRSFGGGHAPRVVESVAVEDEEEEEDVDDADDDGDLQTFDDNGASGERPSDMVVV

SEQ ID NO: 19569 - protein, 367 aa, Zea mays subsp. mays
  misc_feature (1)..(367): Ceres Seq. ID no. 12373635
MHPYAHPYQHHAAAVAPTTKHGHCHDAEEEDDHQSMLLLSLWPPGHHHHSVAAAASSACSSPPTICATTSTTSMAASAASSYPCCLTHQSHYNGGGSAGSSSHSSCFLFHHEHQQQQEPDVSISLSIAPPRSNNDAASCGGRGFAAPSTVTTPEVPTSQYWIPSASEILVGSTQFSCAVCNKTFNRFNNMQMHMWGHGSQYRKGSESLLRGAIITVGTAAAASSSLTRLPCYCCAEGCRNNIEHPRARPLKDFRTLQTHYRRKHGARPYACRRCGKRFAVRGDWRTHEKNCGRLWFCACGSDFKHKRSLKDHVRSFGGGHAPRVVESVAVEDEEEEEDVDDADDDGDLQTFDDNGASGERPSDMVVV

SEQ ID NO: 19570 - DNA, 1288 bp, Zea mays subsp. mays
  misc_feature (1)..(1288): Ceres Seq. ID no. 12373648
ccattcgtttctcccctccagcgccgaggccgagtacctcactgtggctaatggcgtcgctgaggcggcatggcttcgtcagctgctccaggagctgcacagtccgttgacatggagcacacttgtctactgtgataacgtcagtgccatgtatctctccaccaatcctgttcagcaccagcgcacaaatcatgttgagctcgacctctacttcgtccgcgagcgtgtcgccgtcggggatgtgcgagttctctatgtcccgaccacttctcagtttgtcgacatcttcaccaagggcctaactacatcgttatttgaggaggtttggtccagtcttaacatctgtcgtggctagaatttcgaccacgagagtgttagagttatttgtggctttgtattgtaatggggtgttttctatgtaatgggcttagggccaacaactctattataaatatagctcccccaaccctggttaggggttagggtttccagcccactaacagattgaactatgactagattagtcatgcgaagattttaaatatttgtggattgatatgtctacaggtccttccgtgactatggagaatccgtcttgagacatttagagaatgcaatcagcaaagacccaaatctccgtaaagccccggtgaaccatgagggcgtatgtacatattctttgctttgttctttcgaaacttgaatatagatcttgatgcataatttttcttctccgagaaagctggatttctgcttattttatggcataccatacacaggtaagggtttcaggatatggtgggtggttcttgctgaggctctctctgcatgatcctgttcttcccctaaacattgaggcacagagtaacgatgatgcgattaagctggggcttgcggttcttgctgctgtgaatgaatttccagcactggatgtgacggcactgaacaaattcgtgcatcagtgaatataagggacggacattggcatcataatgtgatcagcttcgcatggtgtcgtgttcgccccggtcgaacatgttctacatgtggcacgagtatcatacagaaatataccagtttattacttgcacaggctttttagtttggaaagacaagggagatttcagtgttgagatgattcttgtgtgtgtttataccagctatcagagtaagaatatgcgtgcgtactgttgaggctgatctttacttgagaataaggtttgagttacctgagtatttttttaaaaggatcaggaggcttgctgtgatgtgaggccacgaatttgcc

SEQ ID NO: 19571 - protein, 117 aa, Zea mays subsp. mays
  misc_feature (1)..(117): Ceres Seq. ID no. 12373649
HSFLPSSAEAEYLTVANGVAEAAWLRQLLQELHSPLTWSTLVYCDNVSAMYLSTNPVQHQRTNHVELDLYFVRERVAVGDVRVLYVPTTSQFVDIFTKGLTTSLFEEVWSSLNICRG

SEQ ID NO: 19572 - protein, 68 aa, Zea mays subsp. mays
  misc_feature (1)..(68): Ceres Seq. ID no. 12373650
MYLSTNPVQHQRTNHVELDLYFVRERVAVGDVRVLYVPTTSQFVDIFTKGLTTSLFEEVWSSLNICRG

SEQ ID NO: 19573 - protein, 67 aa, Zea mays subsp. mays
  misc_feature (1)..(67): Ceres Seq. ID no. 12373651
MAYHTQVRVSGYGGWFLLRLSLHDPVLPLNIEAQSNDDAIKLGLAVLAAVNEFPALDVTALNKFVHQ

SEQ ID NO: 19574 - DNA, 1632 bp, Zea mays subsp. mays
  misc_feature (1)..(1632): Ceres Seq. ID no. 12373653
ccactctccgtcctgctccggcaagaggcggcacaccgcgcaaggatgccacctagggctgctccggcgctgcgggtgctcccgctcgcgctcgcagcggccatcttctcggggctcaccgccatcctcttctacctctccggcgtctcctcctcacatagcggctctcggctctcggaggcggacctggcggcgctcgccgcgctgcggggtggcttcagcaagtgcgtggatgcaaatgggctaggactgaaagccgtgaccggggaggactactgtcgtgttgtgatacaatacccaagtgacacagtttctaagtggagagatccaatcacccataaggctgaaagtctgtcgtttgagttcaatctgtgtgaagctgtggcctcatgggagcacgtccggaacagtacaacagtactcacaaaggagtacattgatgctttgccaaatggctgggaggaatatgcatggagaagaatcaacaaaggaatccttctgaataagtgccagaacagaagcctctgcatggaaaagctctcactagttctacctgagacatcaccatacgttcctcgccactttggtcgatgtgctgttgttgggaactcaggtgatcttctcaaaactaaatttggggatgaaattgattcttatgatgctgtcttcagagaaaatggtgcacccacccagaattacactgaatatgttggtagaaagagtacatttcgccttctgaatagaggatccgcaaaggcactagataaagttgttgagttagatgaaacaaaaaaagaggcactgatcgttaagacgacaatacatgatatcatgaaccaaatgattcgggaacttccaataaccaatccagtatacctcatgctaggcacatcatttggttcctcagctaaaggaaccgggcttaaagctcttgaatttgccctctccatctgtgacagtgttgatatgtatggcttcaccgtagacccaggttacaaggaatggacaaggtacttctcagaggtaagaaagggacacactccactacatggtagagcatattatcagatgatggaatgtcttggtctggtgaaaatccattcaccgatgcgaggagatcctggcaggacagtgaggtggctgcctaccaaggctaccatcgaggctgctagagttgcttccgagaagttgttgaagagacctggtgctggaagtgatgatcctctggggacttgcaccatgataaagaagcgcaggaaagggaaggcgccaaacagatctggtctacgagatgctgccatgaagcacctcgaggacatgaaaggtgccgctaggtatcccttggagcggaatgcagggggtggttacctctgcatgatcaatgatagataggaccgcggctgattatggcatcagttgccccctcccccctcccctccacttgagtcgaagaaaggaatgcagtttgagggaacgaaaaggccgattctttgatttatgcagctggtgtacaacgtttgagtgtagagaaagttaggtgtaatgttttgagtgtagagaaagttatatgttgtggatggatacaaatggtcaaattgtagcacttttggtgcttataatactaatttccgc

SEQ ID NO: 19575 - protein, 463 aa, Zea mays subsp. mays
  misc_feature (1)..(463): Ceres Seq. ID no. 12373654
PLSVLLRQEAAHRARMPPRAAPALRVLPLALAAAIFSGLTAILFYLSGVSSSHSGSRLSEADLAALAALRGGFSKCVDANGLGLKAVTGEDYCRVVIQYPSDTVSKWRDPITHKAESLSFEFNLCEAVASWEHVRNSTTVLTKEYIDALPNGWEEYAWRRINKGILLNKCQNRSLCMEKLSLVLPETSPYVPRHFGRCAVVGNSGDLLKTKFGDEIDSYDAVFRENGAPTQNYTEYVGRKSTFRLLNRGSAKALDKVVELDETKKEALIVKTTIHDIMNQMIRELPITNPVYLMLGTSFGSSAKGTGLKALEFALSICDSVDMYGFTVDPGYKEWTRYFSEVRKGHTPLHGRAYYQMMECLGLVKIHSPMRGDPGRTVRWLPTKATIEAARVASEKLLKRPGAGSDDPLGTCTMIKKRRKGKAPNRSGLRDAAMKHLEDMKGAARYPLERNAGGGYLCMINDR

SEQ ID NO: 19576 - protein, 448 aa, Zea mays subsp. mays
  misc_feature (1)..(448): Ceres Seq. ID no. 12373655
MPPRAAPALRVLPLALAAAIFSGLTAILFYLSGVSSSHSGSRLSEADLAALAALRGGFSKCVDANGLGLKAVTGEDYCRVVIQYPSDTVSKWRDPITHKAESLSFEFNLCEAVASWEHVRNSTTVLTKEYIDALPNGWEEYAWRRINKGILLNKCQNRSLCMEKLSLVLPETSPYVPRHFGRCAVVGNSGDLLKTKFGDEIDSYDAVFRENGAPTQNYTEYVGRKSTFRLLNRGSAKALDKVVELDETKKEALIVKTTIHDIMNQMIRELPITNPVYLMLGTSFGSSAKGTGLKALEFALSICDSVDMYGFTVDPGYKEWTRYFSEVRKGHTPLHGRAYYQMMECLGLVKIHSPMRGDPGRTVRWLPTKATIEAARVASEKLLKRPGAGSDDPLGTCTMIKKRRKGKAPNRSGLRDAAMKHLEDMKGAARYPLERNAGGGYLCMINDR

SEQ ID NO: 19577 - protein, 287 aa, Zea mays subsp. mays
  misc_feature (1)..(287): Ceres Seq. ID no. 12373656
MEKLSLVLPETSPYVPRHFGRCAVVGNSGDLLKTKFGDEIDSYDAVFRENGAPTQNYTEYVGRKSTFRLLNRGSAKALDKVVELDETKKEALIVKTTIHDIMNQMIRELPITNPVYLMLGTSFGSSAKGTGLKALEFALSICDSVDMYGFTVDPGYKEWTRYFSEVRKGHTPLHGRAYYQMMECLGLVKIHSPMRGDPGRTVRWLPTKATIEAARVASEKLLKRPGAGSDDPLGTCTMIKKRRKGKAPNRSGLRDAAMKHLEDMKGAARYPLERNAGGGYLCMINDR

SEQ ID NO: 19578 - DNA, 1450 bp, Zea mays subsp. mays
  misc_feature (1)..(1450): Ceres Seq. ID no. 12373657
gcacgagaccattacctagaacatcctaatcgaaaactcactccaaagccaacaaacagagctccaactcagaaagcatccgtcccttggcagcagcaacaagctactagctatgtgtgtttacagcgagcgaggggaaaaaaaagaaaacatctaagatatactccatcatcttcgtttgattaacccgcccagtaaagccatgggtactaatgatagagcggtcatttctctagtactcctcgtgtgcatcgctagccgctcgtccttgggtgccgctgaaactgacgttgagcagaagcgctcgtcagtcccgttgatgtttgtgttcggtgattcgctggtcgatgtcggaaacaataacttcctgccgccgcctgcaccccgtgctgcatctccgtacggcatcgacttccctgctggcacccccggcgccgtctcaggacggttcacgaatggctacaaccttgccgatttagtcgcgcgacgtctggggttcaagatgagtccacctgcttacctctcgttgacaccgttatcaaagtttgacctgttcacgtgccgaattggtgccaattacgcgtctggcggatctggcattctcaacaccacgggaaacgggacactcacgctgcagaaacaaatcacgctgttctcgaaaactaaagcaagaatgtcgtggggccgctgcaagctcagctctatggtatcgaggtcgttgttccttatcagcgccggcggcaatgacttctccgccttcagtgaaatgggcatgggcgaacaagacgccccagcctacatcagtagcatggtctcaacctatgtccagcatatcgacgcgttgtacaagttgggagcacggaggttggggatcctagacgtgccagcgatcggctgtaccccaggctccagagtccccatggccaacggcggatgcaacgacgctgccaactctatggcgcagaacttcaacaaactcctaaggctcgaggtggcgaaagccgtcgcatcctccatgcccggcatgagatactccattgcaagcacctacaattttgtcaccgacttgatggacagccatctagtggctgggctccgggtggtcgacagggcatgctgcggatcgggaaaactgaacgccgcggtcatgtgcgcccagccaaacacgacttactgttcggatcgcgacgactacatgttctgggacatgctacatcctacgcaggcaacaaatgaacgtggggtggtcgccatcttctacggcccgcaggagtacgcggatcccatcaactttgcacagttggccgctgccacagcaaatgatgatgatgatataaatactgctatggccgcaggcgtctatgccgccatatgataaaccctatttatgtcgattggcatgcagctgcgacatgtcactacctgagtactatatacgtaattcagttgg

SEQ ID NO: 19579 - protein, 390 aa, Zea mays subsp. mays
  misc_feature (1)..(390): Ceres Seq. ID no. 12373658
MGTNDRAVISLVLLVCIASRSSLGAAETDVEQKRSSVPLMFVFGDSLVDVGNNNFLPPPAPRAASPYGIDFPAGTPGAVSGRFTNGYNLADLVARRLGFKMSPPAYLSLTPLSKFDLFTCRIGANYASGGSGILNTTGNGTLTLQKQITLFSKTKARMSWGRCKLSSMVSRSLFLISAGGNDFSAFSEMGMGEQDAPAYISSMVSTYVQHIDALYKLGARRLGILDVPAIGCTPGSRVPMANGGCNDAANSMAQNFNKLLRLEVAKAVASSMPGMRYSIASTYNFVTDLMDSHLVAGLRVVDRACCGSGKLNAAVMCAQPNTTYCSDRDDYMFWDMLHPTQATNERGVVAIFYGPQEYADPINFAQLAAATANDDDDINTAMAAGVYAAI

SEQ ID NO: 19580 - protein, 351 aa, Zea mays subsp. mays
  misc_feature (1)..(351): Ceres Seq. ID no. 12373659
MFVFGDSLVDVGNNNFLPPPAPRAASPYGIDFPAGTPGAVSGRFTNGYNLADLVARRLGFKMSPPAYLSLTPLSKFDLFTCRIGANYASGGSGILNTTGNGTLTLQKQITLFSKTKARMSWGRCKLSSMVSRSLFLISAGGNDFSAFSEMGMGEQDAPAYISSMVSTYVQHIDALYKLGARRLGILDVPAIGCTPGSRVPMANGGCNDAANSMAQNFNKLLRLEVAKAVASSMPGMRYSIASTYNFVTDLMDSHLVAGLRVVDRACCGSGKLNAAVMCAQPNTTYCSDRDDYMFWDMLHPTQATNERGVVAIFYGPQEYADPINFAQLAAATANDDDDINTAMAAGVYAAI

SEQ ID NO: 19581 - protein, 290 aa, Zea mays subsp. mays
  misc_feature (1)..(290): Ceres Seq. ID no. 12373660
MSPPAYLSLTPLSKFDLFTCRIGANYASGGSGILNTTGNGTLTLQKQITLFSKTKARMSWGRCKLSSMVSRSLFLISAGGNDFSAFSEMGMGEQDAPAYISSMVSTYVQHIDALYKLGARRLGILDVPAIGCTPGSRVPMANGGCNDAANSMAQNFNKLLRLEVAKAVASSMPGMRYSIASTYNFVTDLMDSHLVAGLRVVDRACCGSGKLNAAVMCAQPNTTYCSDRDDYMFWDMLHPTQATNERGVVAIFYGPQEYADPINFAQLAAATANDDDDINTAMAAGVYAAI

SEQ ID NO: 19582 - DNA, 1346 bp, Zea mays subsp. mays
  misc_feature (1)..(1346): Ceres Seq. ID no. 12373672
aaacatagaggcattccgcagtccgcagtccatccgcagtccgcagtccgcacgcacggacgcgccctcccagatctcccgcctccggcaaacaaaatgcccccactctcaccgcccgcatcgctgacccccgctgctggcggtcggcgacggtggaagtgccgcctcagtcccactatcgcacgtgaccgctgctacactcgctccttccgctccgcggggctccgcccggcggccattccgctccccgatggcgccgtctgtacacctgtggctcccgcctcctgccgccgaccccgccaagcccctataccctgttctgcttctccacggcttcggcgcacaagccacctggcagtgggcgcccttcctcggcccgctcctcgctgccggtctggccccctatgtcccggacctcgtcttctttggcgcctcatcctcccccgcagcagaccgctccccggtctatcaggctgcctgtgttgccgccgctatggccgcgcttcctggcgccccgcagcggtacgccgtcgtcggggtcagttacggcggcttcgtagcataccacctcgcccacgcgtttccggcagcggtggagcggcttgtactagtcgcggccggtgtttgcctcgaggaggccgatctggccgcggggctctttgccgttgaggatatcgccgaggctgcaagtcttttgctgccccagcggccggaggatctccggaggttggtggggctcaccttctgccgccctcagcggttcatgccgtcctgtttcatcagagattacatcagggttatgtgcacggaaaatgtaaaagagaagagggagttgctgtatgcattgatcaatggcaggaagctttcagaccttcctaaaattaaccagcaaaccttgataatttggggagagcaggaccgggtctttccattggaacttggattacggctgaaaaggcatctgggtgatacttccgaactaatcattgtcaagaatgccggtcatgccataaatcgcgaaaagccagcagaactttgcagactgataaagcactacatcgttgatccctcagtcaaatgtcgagatgaccgtaagggatcttggaagaatgcgataaagaggtttgttgggtcgagcctgaggaaggtggactcttctcgaccgctgctatagcaattgacgtatatatattgacttttacgtgcagcagatttgttatctgattgtgacacgcaattaagtaattaacgatgtgtaatgtccagtagccactattattgtgtaactagcattggcagacatctgttcaaaaaatacttgtgcaatatgtataatgcaaatgatt

SEQ ID NO: 19583 - protein, 307 aa, Zea mays subsp. mays
  misc_feature (1)..(307): Ceres Seq. ID no. 12373673
MAPSVHLWLPPPAADPAKPLYPVLLLHGFGAQATWQWAPFLGPLLAAGLAPYVPDLVFFGASSSPAADRSPVYQAACVAAAMAALPGAPQRYAVVGVSYGGFVAYHLAHAFPAAVERLVLVAAGVCLEEADLAAGLFAVEDIAEAASLLLPQRPEDLRRLVGLTFCRPQRFMPSCFIRDYIRVMCTENVKEKRELLYALINGRKLSDLPKINQQTLIIWGEQDRVFPLELGLRLKRHLGDTSELIIVKNAGHAINREKPAELCRLIKHYIVDPSVKCRDDRKGSWKNAIKRFVGSSLRKVDSSRPLL

SEQ ID NO: 19584 - protein, 226 aa, Zea mays subsp. mays
  misc_feature (1)..(226): Ceres Seq. ID no. 12373674
MAALPGAPQRYAVVGVSYGGFVAYHLAHAFPAAVERLVLVAAGVCLEEADLAAGLFAVEDIAEAASLLLPQRPEDLRRLVGLTFCRPQRFMPSCFIRDYIRVMCTENVKEKRELLYALINGRKLSDLPKINQQTLIIWGEQDRVFPLELGLRLKRHLGDTSELIIVKNAGHAINREKPAELCRLIKHYIVDPSVKCRDDRKGSWKNAIKRFVGSSLRKVDSSRPLL

SEQ ID NO: 19585 - protein, 222 aa, Zea mays subsp. mays
  misc_feature (1)..(222): Ceres Seq. ID no. 12373675
KHRGIPQSAVHPQSAVRTHGRALPDLPPPANKMPPLSPPASLTPAAGGRRRWKCRLSPTIARDRCYTRSFRSAGLRPAAIPLPDGAVCTPVAPASCRRPRQAPIPCSASPRLRRTSHLAVGALPRPAPRCRSGPLCPGPRLLWRLILPRSRPLPGLSGCLCCRRYGRASWRPAAVRRRRGQLRRLRSIPPRPRVSGSGGAACTSRGRCLPRGGRSGRGALCR

SEQ ID NO: 19586 - DNA, 1623 bp, Zea mays subsp. mays
  misc_feature (1)..(1623): Ceres Seq. ID no. 12373676
agcaggcggcccgggcagatagcaggcgtgttgctcgcgcctcggcacataaatcgtctccgatctccaggtgcccggccaccctggttcgtcgaagcaccctagtcgtcgtagcggcctacgggctcttgggcagagagagaagctgcatagccagtcgctcctgcatatgctccagctgctgcgcgcaatgatggcactgacggagcggcagccgcagctggagaagaagccggcgcgcgggagggcgccgctgtcggggaaggccgtcgcggcgctgtgcgtgacgagcttcgtcgtggggctgctgcttagcggcaacgtgtcgctcatgtcggcctcggcgtcgccgtcgtcctcgagcacggacagcgccgacagcgacaagagcattcgtgtttccggttgcgacaatgagcgtaaactcggagagaaccaccccaaggatctcctgaacgaggtgtcgagaactcatcaagcaatccagtcgctggacaaggcggtgtccaccctggagatggagatggccgtggaacgcgctaggggcggtggcggcggcggcggcgccgcgtccatggcgtccagcaggactcctcagaaggccttcgtcgtggtcggcatcaacacggccttcaccagcaagaagcggcgcgactcgctccgcgacacctgggtccccagaggggataagctgaggaagctggagcgggagaaggggatcgtggtccggttcgtgatcgggcacagcggcacgccgggcggcggcgcgctggaccgcgccctggacgcggaggaggccgagaccagggacttcatgcggctggaccacgccgagggctaccacgagctgtcgtccaagaccaggacctacttcaccaccgccgtcgccacctgggacgccgacttctacgtcaaggtcgacgacgacatccacctcaacctcgggatgctggcgagcaggctggcgaaacacaggacgcgcccgagggtgtacgtcggctgcatgaagtccgggcctgtcctgtcacagaaaggagtcaagtaccacgagccagagtactggaagttcggcgacgagggcaacaagtacttccgccacgccaccggccaaatctacgccatctccaaggacctcgccgcctacatctccatcaaccagccgatcctgcacaggttcgcgaacgaggacgtctcgctgggggcgtggctgatcgggctcgaggtcgagcacgtcgacgaccggagcatgtgctgcgcgacgcctccagactgcgagtggaagaagcgagccgggaacgtgtgcgtggcgtccttcgactggtcgtgcagcggcgtctgtaagtcggtggaccggatgcgccacatccacaaggcgtgcggcgaaggcgaaggcgccgtctggaacgccgccacatgagacgagattgccattctcgtcggaacacttgttgtatgcggagcttcacttgatgaaaacgcgaaggcgagagggaagcgcctgcgccactgtttggcatgacacattccgcatggcaagcgtggttgtttcacttgagacggcatgctatgatccacgtaaaagcgcatggattattattggtgtgtcaacgtgatcctttttgg

SEQ ID NO: 19587 - protein, 415 aa, Zea mays subsp. mays
  misc_feature (1)..(415): Ceres Seq. ID no. 12373677
MLQLLRAMMALTERQPQLEKKPARGRAPLSGKAVAALCVTSFVVGLLLSGNVSLMSASASPSSSSTDSADSDKSIRVSGCDNERKLGENHPKDLLNEVSRTHQAIQSLDKAVSTLEMEMAVERARGGGGGGGAASMASSRTPQKAFVVVGINTAFTSKKRRDSLRDTWVPRGDKLRKLEREKGIVVRFVIGHSGTPGGGALDRALDAEEAETRDFMRLDHAEGYHELSSKTRTYFTTAVATWDADFYVKVDDDIHLNLGMLASRLAKHRTRPRVYVGCMKSGPVLSQKGVKYHEPEYWKFGDEGNKYFRHATGQIYAISKDLAAYISINQPILHRFANEDVSLGAWLIGLEVEHVDDRSMCCATPPDCEWKKRAGNVCVASFDWSCSGVCKSVDRMRHIHKACGEGEGAVWNAAT

SEQ ID NO: 19588 - protein, 408 aa, Zea mays subsp. mays
  misc_feature (1)..(408): Ceres Seq. ID no. 12373678
MMALTERQPQLEKKPARGRAPLSGKAVAALCVTSFVVGLLLSGNVSLMSASASPSSSSTDSADSDKSIRVSGCDNERKLGENHPKDLLNEVSRTHQAIQSLDKAVSTLEMEMAVERARGGGGGGGAASMASSRTPQKAFVVVGINTAFTSKKRRDSLRDTWVPRGDKLRKLEREKGIVVRFVIGHSGTPGGGALDRALDAEEAETRDFMRLDHAEGYHELSSKTRTYFTTAVATWDADFYVKVDDDIHLNLGMLASRLAKHRTRPRVYVGCMKSGPVLSQKGVKYHEPEYWKFGDEGNKYFRHATGQIYAISKDLAAYISINQPILHRFANEDVSLGAWLIGLEVEHVDDRSMCCATPPDCEWKKRAGNVCVASFDWSCSGVCKSVDRMRHIHKACGEGEGAVWNAAT

SEQ ID NO: 19589 - protein, 407 aa, Zea mays subsp. mays
  misc_feature (1)..(407): Ceres Seq. ID no. 12373679
MALTERQPQLEKKPARGRAPLSGKAVAALCVTSFVVGLLLSGNVSLMSASASPSSSSTDSADSDKSIRVSGCDNERKLGENHPKDLLNEVSRTHQAIQSLDKAVSTLEMEMAVERARGGGGGGGAASMASSRTPQKAFVVVGINTAFTSKKRRDSLRDTWVPRGDKLRKLEREKGIVVRFVIGHSGTPGGGALDRALDAEEAETRDFMRLDHAEGYHELSSKTRTYFTTAVATWDADFYVKVDDDIHLNLGMLASRLAKHRTRPRVYVGCMKSGPVLSQKGVKYHEPEYWKFGDEGNKYFRHATGQIYAISKDLAAYISINQPILHRFANEDVSLGAWLIGLEVEHVDDRSMCCATPPDCEWKKRAGNVCVASFDWSCSGVCKSVDRMRHIHKACGEGEGAVWNAAT

SEQ ID NO: 19590 - DNA, 1567 bp, Zea mays subsp. mays
  misc_feature (1)..(1567): Ceres Seq. ID no. 12373692
accagttccgcagaataaacgagcgtgcaagcgctgctgggctggtgtcagtcacctgagcaaggaagagagatggccacgctgcctcgcgagggcgccgcggcggcggactccgaccagcttttggtagaagcacatggctctacacgaacgctgattttgaataggccaaagcagctcaatgcactctcctctgaaatgattaaaggtctcctatggtatttcacagcttttgagaaagatgatggagtcagattgttgattatgaaggggaatagaagagtattttgctctggaggtgatattgctcaatgtgcccggtgtttatataatggaaactggaaatgggtcgatgatttcttccaaaatgaatatttgctaaattacatcattgcgacttacataaaacctcaggtttccattcttagtggaattgtcatgggtggaggagctggtgtttcaatacatggaagatttcgagttgccactgataacacgatttttgcaatgccagaaacagctctaggcctctttccagatgtaggggcctcttattttctatctcggctaccagggttctatggagaatatgttggtctaactggtgccagattggatggtgcggaaatgcttgcctgtggcctggcaactcattttgtcccgtcaaagaggttgccattgcttgaggaatcgcttaaaaagctggacacgtccagtacttttgctgtgtcgggtattatcgaccagttttcacagaggccattagtgaaagatagcagctctttaaataggatggaaaccatcaacaaatgcttctccaaaaggacagttgaagaaatcatagatgctcttgaacaagaaatctcaaatgtttcagacaaatgggttgctgcaacaatcaagtccctgaaaaaggcttcccccaccagcctaaaaatttctctgagatcgataagagaagggagaacacaaactcttggggagtgcctgcgtcgggaatatagagtggtttgccatgtcctgcgtggcaccttcagccgagacttgtctgagggatttagggctgtgctactagaaaaagacaacaagccagagtggattcctccaaggttggaacaagttcctgacgaggcagttgagcaatatttcttgagaattgatgatccccagtgcaagatctgaacctgcctgcgagacttccccaccgaagaaatattgagtccaagatttgattgaggtcttggacgaagagtgagcctcggtcaggataactcgtcaactcatgtttgaagttgtgtgcggaatgttgacgacgattgataaataataaacgcggactgaatatatgtcttataagttcacatttatcgctaaataatttttgttgcttttgtgtgaagttgtacctgttagccttgttcggttacagggatgaaattctaccatagatataattcgggtctagattggatgaatcgatacctcacccaatcatatggtaagattaaatccatcatttaatacatacacctcccaaaactagttattcttttcatttatggattcc

SEQ ID NO: 19591 - protein, 369 aa, Zea mays subsp. mays
  misc_feature (1)..(369): Ceres Seq. ID no. 12373693
MATLPREGAAAADSDQLLVEAHGSTRTLILNRPKQLNALSSEMIKGLLWYFTAFEKDDGVRLLIMKGNRRVFCSGGDIAQCARCLYNGNWKWVDDFFQNEYLLNYIIATYIKPQVSILSGIVMGGGAGVSIHGRFRVATDNTIFAMPETALGLFPDVGASYFLSRLPGFYGEYVGLTGARLDGAEMLACGLATHFVPSKRLPLLEESLKKLDTSSTFAVSGIIDQFSQRPLVKDSSSLNRMETINKCFSKRTVEEIIDALEQEISNVSDKWVAATIKSLKKASPTSLKISLRSIREGRTQTLGECLRREYRVVCHVLRGTFSRDLSEGFRAVLLEKDNKPEWIPPRLEQVPDEAVEQYFLRIDDPQCKI

SEQ ID NO: 19592 - protein, 327 aa, Zea mays subsp. mays
  misc_feature (1)..(327): Ceres Seq. ID no. 12373694
MIKGLLWYFTAFEKDDGVRLLIMKGNRRVFCSGGDIAQCARCLYNGNWKWVDDFFQNEYLLNYIIATYIKPQVSILSGIVMGGGAGVSIHGRFRVATDNTIFAMPETALGLFPDVGASYFLSRLPGFYGEYVGLTGARLDGAEMLACGLATHFVPSKRLPLLEESLKKLDTSSTFAVSGIIDQFSQRPLVKDSSSLNRMETINKCFSKRTVEEIIDALEQEISNVSDKWVAATIKSLKKASPTSLKISLRSIREGRTQTLGECLRREYRVVCHVLRGTFSRDLSEGFRAVLLEKDNKPEWIPPRLEQVPDEAVEQYFLRIDDPQCKI

SEQ ID NO: 19593 - protein, 305 aa, Zea mays subsp. mays
  misc_feature (1)..(305): Ceres Seq. ID no. 12373695
MKGNRRVFCSGGDIAQCARCLYNGNWKWVDDFFQNEYLLNYIIATYIKPQVSILSGIVMGGGAGVSIHGRFRVATDNTIFAMPETALGLFPDVGASYFLSRLPGFYGEYVGLTGARLDGAEMLACGLATHFVPSKRLPLLEESLKKLDTSSTFAVSGIIDQFSQRPLVKDSSSLNRMETINKCFSKRTVEEIIDALEQEISNVSDKWVAATIKSLKKASPTSLKISLRSIREGRTQTLGECLRREYRVVCHVLRGTFSRDLSEGFRAVLLEKDNKPEWIPPRLEQVPDEAVEQYFLRIDDPQCKI

SEQ ID NO: 19594 - DNA, 1445 bp, Zea mays subsp. mays
  misc_feature (1)..(1445): Ceres Seq. ID no. 12373700
aaggtatttctttttacttttgcgtttgcacaggccactccaccggttctcctattcttcctagcacaaaggggaggaagtaaagccttcccctcgccggagatgctgccgtcggcgaccgggtacactgccggcgacgtccactcggcacgcgagatgttccatcccttctacctctgacttcttgcgcacgcggcctctagtagatagtaattggacacttcatacttggattggatctctagatagcctagaaggtgagcggggcgtggaaggagaaatccgggaagcgatgagctttagcgccgcaagagtctcggagcatggcggcgagttcgaggaggcaagggggatgccggcagaggtgagctgggagatgctcgacaagtcgcggttttttgtactcgtcgccgcgctcttctctggcgtctccgcggcgctatatccggccgtcgtcctcaagacgcacctccaggttgctgcccccgcacaggccgcggcctcggcggcagcggcggcgattctccggcgcgacggtccccgagggttctaccgtggcttcggtgcgtccctcgcgggcacggtgcccgcgcgcgctctctatatggcggcgctcgaggccaccaagagcgtcgtgggctccgccgccctccgcctcggcgtcgcggaaccggccgcctcggctgccgcctcggccgcgggcggcgtctccgctgccgtagccgcgcaggtcgtctggaccccggtggacgtcgtcagccagcgtctcatgcttcagacggcgcccctcgctgccgcccgctaccgcggcggtaccgacgcgttccggaagatcctactcgcggacggcgtgcgcggcctgtaccgcggcttcggcatctcggtgctgacctacgcgccctccagtgccgcgtggtgggcctcctacgtgaccgcgcagcggctcctctggcgcgccgtcggccccgcggcgcacgacagccgcggcgccgcgatagccctgcagggtgcgagcgcggccgcggcgggaagcgcggcggcgctggtgacgatgccgctggacaccgtgaagacgcggctgcaggttatggacgctggggcgcaggcgccgacgctcgcggccgcggcgcgcgcgctagttcgggagggaggttggtctgcttgctaccgcgggttcgggccgcggtgggcgtccatgtcgctgtcttcggccaccatggtcaccgtctacgagttcttgaagcggctctcggccaaggaaggctccctctaagctctggatcaaagtgtatccatggatgatccttgtaagcatccatgtccaaatgcgaatatcctgcactgatctcttgatgggatgttaggaagcaagatttctgctgggtttgtctgttgatgacgatgatgatgaattttgtaaaataaagatttgtgtatatacttcg

SEQ ID NO: 19595 - protein, 326 aa, Zea mays subsp. mays
  misc_feature (1)..(326): Ceres Seq. ID no. 12373701
MSFSAARVSEHGGEFEEARGMPAEVSWEMLDKSRFFVLVAALFSGVSAALYPAVVLKTHLQVAAPAQAAASAAAAAILRRDGPRGFYRGFGASLAGTVPARALYMAALEATKSVVGSAALRLGVAEPAASAAASAAGGVSAAVAAQVVWTPVDVVSQRLMLQTAPLAAARYRGGTDAFRKILLADGVRGLYRGFGISVLTYAPSSAAWWASYVTAQRLLWRAVGPAAHDSRGAAIALQGASAAAAGSAAALVTMPLDTVKTRLQVMDAGAQAPTLAAAARALVREGGWSACYRGFGPRWASMSLSSATMVTVYEFLKRLSAKEGSL

SEQ ID NO: 19596 - protein, 306 aa, Zea mays subsp. mays
  misc_feature (1)..(306): Ceres Seq. ID no. 12373702
MPAEVSWEMLDKSRFFVLVAALFSGVSAALYPAVVLKTHLQVAAPAQAAASAAAAAILRRDGPRGFYRGFGASLAGTVPARALYMAALEATKSVVGSAALRLGVAEPAASAAASAAGGVSAAVAAQVVWTPVDVVSQRLMLQTAPLAAARYRGGTDAFRKILLADGVRGLYRGFGISVLTYAPSSAAWWASYVTAQRLLWRAVGPAAHDSRGAAIALQGASAAAAGSAAALVTMPLDTVKTRLQVMDAGAQAPTLAAAARALVREGGWSACYRGFGPRWASMSLSSATMVTVYEFLKRLSAKEGSL

SEQ ID NO: 19597 - protein, 298 aa, Zea mays subsp. mays
  misc_feature (1)..(298): Ceres Seq. ID no. 12373703
MLDKSRFFVLVAALFSGVSAALYPAVVLKTHLQVAAPAQAAASAAAAAILRRDGPRGFYRGFGASLAGTVPARALYMAALEATKSVVGSAALRLGVAEPAASAAASAAGGVSAAVAAQVVWTPVDVVSQRLMLQTAPLAAARYRGGTDAFRKILLADGVRGLYRGFGISVLTYAPSSAAWWASYVTAQRLLWRAVGPAAHDSRGAAIALQGASAAAAGSAAALVTMPLDTVKTRLQVMDAGAQAPTLAAAARALVREGGWSACYRGFGPRWASMSLSSATMVTVYEFLKRLSAKEGSL

SEQ ID NO: 19598 - DNA, 1481 bp, Zea mays subsp. mays
  misc_feature (1)..(1481): Ceres Seq. ID no. 12373728
aaaaagcgtgtgcgacagaggaagtccatgtgcccggctcggccctgccacggccacgcacagcagaggagcccgcaagcccgcgcgctccccgccaagatttgccaccaataccccggtcctccactcctcctctcctccgcgagctccgtctccccccctcgcgcgaacgccgggcgcacgcagccaggccaggtatccccccggccccaaccaaaccatcgcatgggagccgcgactggcccgacgaagcggagccgcgtccccagcaagaggcagcaggaggaggaggccatggcgcgcgctgcgggcgtggaggcgcaggcgcaggcgcggcggcggccacggctggtggggtacgaggagctgccggagtacctcaaggacaacgagtacatccgcgggcactaccgcgccgagtggcccgtccgcgacgcgctcctcagcgccttcgcctggcacaacgagactctcaacgtgtggacgcatctcggcgggttcctgtttttcctggcgctcgcggtcgccggagggtggacggaggccgccgacgaagccgctccggggatcatgaggttcgtggtgacaccaccagctaacgcttcgtgggacgtgctgcattcgggtctgccaagccacgacggcagggcgtcgcagtccggcgtgccgcggtggccgcggacggtgttcctggtgggcgccatgtcgtgcctggccatcagcgcgacggcccacctgctggcgtgccactcgcggcgcgccagcgtggtgttctggcagctcgactacgcgggcatctccgtgatgatcgtcgcctccttcgtgccgccggtgtactacgccttcctctgccacccgccggcgcgggcggccatacctgtccgccatcgcggcgctgggcgcgctcgtggtggccgcgctgctctccccgtcctgctcgtccccgcgctaccgccgcctccgcgcggcgctgttcctggccatgggcctgtcgggcgtcgtcccggcgctgcacgcgctgtggctcaactggggccacgccgcctgctacctggcgctcggcctcgaggtcgccatgggtctcgcctacgccacgggcgcatggttctacgtcagccgcgtgccggagaagtggaggcccggggtgttcgacgtcgtgggccacagccaccagatcttccacgtgctcgtgctcgtcggcgccgtcacgcactacgtcgccgtcgccgtgctcatccactggcgggagaaggtggctgccgcctgtggcgcggcgtcgtaggcgggcttgctgctcctggcttctgcagcaagccagctgaggtgtttgatcatccagagcttcaatgtgccagtgcgatggattcaacaagcgttcgaatcggcgaacgaagtagttgcagttgcagttgcagcatagatcggctctagagttcgacgatttgtaatttaattgatgggatgattgagtatggtggtcc

SEQ ID NO: 19599 - protein, 476 aa, Zea mays subsp. mays
  misc_feature (1)..(476): Ceres Seq. ID no. 12373729
KKRVRQRKSMCPARPCHGHAQQRSPQARALPAKICHQYPGPPLLLSSASSVSPPRANAGRTQPGQVSPRPQPNHRMGAATGPTKRSRVPSKRQQEEEAMARAAGVEAQAQARRRPRLVGYEELPEYLKDNEYIRGHYRAEWPVRDALLSAFAWHNETLNVWTHLGGFLFFLALAVAGGWTEAADEAAPGIMRFVVTPPANASWDVLHSGLPSHDGRASQSGVPRWPRTVFLVGAMSCLAISATAHLLACHSRRASVVFWQLDYAGISVMIVASFVPPVYYAFLCHPPARAAIPVRHRGAGRARGGRAALPVLLVPALPPPPRGAVPGHGPVGRRPGAARAVAQLGPRRLLPGARPRGRHGSRLRHGRMVLRQPRAGEVEARGVRRRGPQPPDLPRARARRRRHALRRRRRAHPLAGEGGCRLWRGVVGGLAAPGFCSKPAEVFDHPELQCASAMDSTSVRIGERSSCSCSCSIDRL

SEQ ID NO: 19600 - protein, 467 aa, Zea mays subsp. mays
  misc_feature (1)..(467): Ceres Seq. ID no. 12373730
MCPARPCHGHAQQRSPQARALPAKICHQYPGPPLLLSSASSVSPPRANAGRTQPGQVSPRPQPNHRMGAATGPTKRSRVPSKRQQEEEAMARAAGVEAQAQARRRPRLVGYEELPEYLKDNEYIRGHYRAEWPVRDALLSAFAWHNETLNVWTHLGGFLFFLALAVAGGWTEAADEAAPGIMRFVVTPPANASWDVLHSGLPSHDGRASQSGVPRWPRTVFLVGAMSCLAISATAHLLACHSRRASVVFWQLDYAGISVMIVASFVPPVYYAFLCHPPARAAIPVRHRGAGRARGGRAALPVLLVPALPPPPRGAVPGHGPVGRRPGAARAVAQLGPRRLLPGARPRGRHGSRLRHGRMVLRQPRAGEVEARGVRRRGPQPPDLPRARARRRRHALRRRRRAHPLAGEGGCRLWRGVVGGLAAPGFCSKPAEVFDHPELQCASAMDSTSVRIGERSSCSCSCSIDRL

SEQ ID NO: 19601 - protein, 401 aa, Zea mays subsp. mays
  misc_feature (1)..(401): Ceres Seq. ID no. 12373731
MGAATGPTKRSRVPSKRQQEEEAMARAAGVEAQAQARRRPRLVGYEELPEYLKDNEYIRGHYRAEWPVRDALLSAFAWHNETLNVWTHLGGFLFFLALAVAGGWTEAADEAAPGIMRFVVTPPANASWDVLHSGLPSHDGRASQSGVPRWPRTVFLVGAMSCLAISATAHLLACHSRRASVVFWQLDYAGISVMIVASFVPPVYYAFLCHPPARAAIPVRHRGAGRARGGRAALPVLLVPALPPPPRGAVPGHGPVGRRPGAARAVAQLGPRRLLPGARPRGRHGSRLRHGRMVLRQPRAGEVEARGVRRRGPQPPDLPRARARRRRHALRRRRRAHPLAGEGGCRLWRGVVGGLAAPGFCSKPAEVFDHPELQCASAMDSTSVRIGERSSCSCSCSIDRL

SEQ ID NO: 19602 - DNA, 1447 bp, Zea mays subsp. mays
  misc_feature (1)..(1447): Ceres Seq. ID no. 12373744
ctgtttcaatttgtactctctaggtatgggccattttggacatgcaccaccctgattttcgttgctgcatctattgctacttttgtcacctacctatcccacaaatggcacaagaaggaatggaactatgatatcaacttggttacctggtctgctgggttattctatggctacgtgacatttgttcctcttcttttatatgttattctcaagtacttctcagcacctgctggtttggtgcaattgtggtgcctatatggatattctctgttcatattcattccagcatcggtaaggttcttactaaaatgcatgcacatatacttgggaatttcagctctattagtctacaattttgtgccactggtctacagctaaagttgtttaaaatttggccttttctgtgggaaatgttcactcgattctaacacctgtaaaggcagcagcaaggttgagtttaaagaatttgcactgattttgtatgaaaactggaaccaattaattccaagagtcattattactaccacttaccaatataatttgtttgctaggtacccttttactgctacatattatagttacatgattttacaaggcatatagttgtgcagtatgttagtaggcttcatgattaaacctgtttcatatggtcaaatacttttctatggatcatttgtcaaaagaaaaaaaatctttactatttttacttccatataaccaatatcggtcatttactggtcctctattgacaaaatactactacctccatgccaaattatgagatgttttggcatttctaggtacataacttttattttacactatatctagatacatagtaataatgatgtatttgggaaaactaaaacgtcttataatttggaaatgagggactagtatattatctgttcaaatgatttggaatatttctacactgctttagcatttgaagttgactggaagttctttctcctttgtgttacagcttctgtctattgtgccaatagaaatattcagatgggtgattgctggtgttgctggtttcatgtctgctactttcgttgctgtaaatctccgcgcacacattgtaaattccggcgagcgatggttcctgatcgttgctgggatattcttgttgcagttggggcttgctttttgctgaaactatatttcttcacgataactgtatagggttatttacatctaatgatcgtactagtcaagaatacacaattttccatgtggaatcacttccatgttcattgaacattgatgtaatttttccatgtatacatctttcttacacgtagaattgagaagcccctgaaattgaattacagcagccaaacaagtactgtgattgatatgggtgaagagtctgatctgtagtctattctgtgttccgctgcttgaggtgaataatgaatgagaaatcgctgtgttctcc

SEQ ID NO: 19603 - protein, 125 aa, Zea mays subsp. mays
  misc_feature (1)..(125): Ceres Seq. ID no. 12373745
LFQFVLSRYGPFWTCTTLIFVAASIATFVTYLSHKWHKKEWNYDINLVTWSAGLFYGYVTFVPLLLYVILKYFSAPAGLVQLWCLYGYSLFIFIPASVRFLLKCMHIYLGISALLVYNFVPLVYS

SEQ ID NO: 19604 - DNA, 1751 bp, Zea mays subsp. mays
  misc_feature (1)..(1751): Ceres Seq. ID no. 12373770
acgaacccaacccagtcgaaccacctcgccagtgagcgcccccctcccgtcctctttccctgctggccagaactccgaatgaaatcgctgctccaccagctttctttaccttcagcaagcgagccggtagcatcaagctagatcgcggggaagctcctcgtttcccccatcggcgctgctctggcggggagaagcgtcctctcacggcggccgggaagaccaatccgcgccgccagtccctgcggcggcttccgtgaggtggtcttggctcctggggcggcgtgttcgtggcggccggcgagatgagcagccacgcggttggaacaagcaacggcggatccggtgatgcggccgccgggggcgcggccaggaggaacaccaggatgcccaaatattccaagttcacacagcaggagctgcccgcttgcaagccgattcttactccaaaatgggttgtctctgttttcttaatcgttggggtcatctttgttcctattggtgttgtttcactgctagctgcaagagatgttgttgagattattgatcggtatgatgaggcatgtgtgccagtcaacatgactgagaacaagcttgcttacatccagaatgagaccatatccaaagagtgcataaggaatcttacggttacaaaatatatgaagcagcctatttttgtgtattatgaacttgataacttctaccagaaccataggagatatgtaaagagccgaaatgatgcgcaactaagagatgctagtaaagctaaccagacatccgcttgtgaacctgagaagaccacagctaatgggcaaccaattgttccttgcggccttattgcttggagcttgtttaatgatacatataatttcactcgtggtaatgagaacttgacagtggacaagaaagatatctcctggaagagtgatagggagcataaatttggtaaagatgtctatccgagcaacttccagaatggtgcacttaaaggtggagcaacacttaacccaaagatcccgttgagtgagcaagaggacctcattgtttggatgcggaccgcagcacttccgacgttcagaaagttatatggcagactatactttgacctcaaggagaatgacacaataacagtgagattgaataacaactacaatacatatagctttggtggcaagaaaaagctggtcctctccactgcaacctggcttggagggaagaacgattttcttggctttgcataccttatagttggtgggctctgcattttcctggcatttgcattcaccttgctgtacttcgtaaaaccaaggaaactgggagaccacaactacttatcctggaacagacgctaggatgtttcggaacaccaagtgtccgtactactcgaaatgtagcttgtatgaaatgaaatgctcagaacaagaaatgtcgatgggcataagcaagtatggttcaggaaagaacttcatgtatattttttacgaaggggtctaggtggctacgtgatttttgtttcttgtgttctttagtgtagcactgaacaggagaataccaattgatctctaatagcttgcttcgtggtacaagcactcgaaatggttgactgtggtgttgacgctttggctgccgaagaataccaattaatgatgtaggttgactgtaatatcctcaagtgggaacagtaccaacttctgtacaaattgattaccgtgtgatgtttgtttctccactaccattatagtacacgggtgccg

SEQ ID NO: 19605 - protein, 348 aa, Zea mays subsp. mays
  misc_feature (1)..(348): Ceres Seq. ID no. 12373771
MSSHAVGTSNGGSGDAAAGGAARRNTRMPKYSKFTQQELPACKPILTPKWVVSVFLIVGVIFVPIGVVSLLAARDVVEIIDRYDEACVPVNMTENKLAYIQNETISKECIRNLTVTKYMKQPIFVYYELDNFYQNHRRYVKSRNDAQLRDASKANQTSACEPEKTTANGQPIVPCGLIAWSLFNDTYNFTRGNENLTVDKKDISWKSDREHKFGKDVYPSNFQNGALKGGATLNPKIPLSEQEDLIVWMRTAALPTFRKLYGRLYFDLKENDTITVRLNNNYNTYSFGGKKKLVLSTATWLGGKNDFLGFAYLIVGGLCIFLAFAFTLLYFVKPRKLGDHNYLSWNRR

SEQ ID NO: 19606 - protein, 321 aa, Zea mays subsp. mays
  misc_feature (1)..(321): Ceres Seq. ID no. 12373772
MPKYSKFTQQELPACKPILTPKWVVSVFLIVGVIFVPIGVVSLLAARDVVEIIDRYDEACVPVNMTENKLAYIQNETISKECIRNLTVTKYMKQPIFVYYELDNFYQNHRRYVKSRNDAQLRDASKANQTSACEPEKTTANGQPIVPCGLIAWSLFNDTYNFTRGNENLTVDKKDISWKSDREHKFGKDVYPSNFQNGALKGGATLNPKIPLSEQEDLIVWMRTAALPTFRKLYGRLYFDLKENDTITVRLNNNYNTYSFGGKKKLVLSTATWLGGKNDFLGFAYLIVGGLCIFLAFAFTLLYFVKPRKLGDHNYLSWNRR

SEQ ID NO: 19607 - protein, 257 aa, Zea mays subsp. mays
  misc_feature (1)..(257): Ceres Seq. ID no. 12373773
MTENKLAYIQNETISKECIRNLTVTKYMKQPIFVYYELDNFYQNHRRYVKSRNDAQLRDASKANQTSACEPEKTTANGQPIVPCGLIAWSLFNDTYNFTRGNENLTVDKKDISWKSDREHKFGKDVYPSNFQNGALKGGATLNPKIPLSEQEDLIVWMRTAALPTFRKLYGRLYFDLKENDTITVRLNNNYNTYSFGGKKKLVLSTATWLGGKNDFLGFAYLIVGGLCIFLAFAFTLLYFVKPRKLGDHNYLSWNRR

SEQ ID NO: 19608 - DNA, 1455 bp, Zea mays subsp. mays
  misc_feature (1)..(1455): Ceres Seq. ID no. 12373785
gaaatttccgatttctgccagatccaatcgcggctaccatcatggcagaagcggccggcggcggacccctgctccccgaggaactcattatctgggagatcctaacccgtctgccggcgaagcccctcctccgatgccgcgctgtctgcctctcctggtgccgccgactcacctccgacgccaaattcctcctcgcccaccaccgtcgccagccctcgctcccgctcctcactgaaggggacaggagcaccgaggagaggaggatcgacgccctggactaccgcaccggcgagcggcgccccatcgcgcggacaacaggccggaccgccgccaacggggacgacctgaacgtgctggcttcctgcgaaggcctcctcatcctcctcgccaacggcggcctccagatctgcaacccggcgacccgccagcgcgcgccactcactcttctccacggcgcctattgcatctccgcgctttaccctcacatcccgtccaggtcgtaccgtgtgctctgctgcttcgagagagccgaggacggccacgccgtgtaccacgtgcacaccgtcgggtcgcgcgagctcaggtgcgtcggagaacctcccgcgccgtgggcgtccggggatatggtaatggcgatgccgatgatggtgtaccttcacccgcacgtcgtggcagacagcaggatctactggcagccggtaaagctgcccgtcggcaacggcaaggtcaacaacatgctcgtgttcgacacaatgaccgagtccttccagcaactgctgtcgcccgtggagggcccctttcttgaactgtttcagatgaacagcggcgcccttggattgtaccactgccgcagcggcaaggttgatctttgggtgttacaggatcacgggagctggtcctggtcgatgaaccaccggatcaaattggacgtgatgtttttctccctgctgccggtgctggacccggaaggagatgtgctagtgctttctaaaagaggggaaacaggcatcctgtggcaacatctgcatcacatctctggtgtcaatggcagtttgctggccctgtatcaatggagcgcttatctgaagcttagcaggcataggctcaaagaaagtctagtccaccatgacttcttctcgatggaaggtaatgagggtggtgtggatgaaaaaccattgttcgatggcttgtcaactgtggcattgcttcgtgatgataattctgagccacattgagaaacaaaggtattactcaagctgtttcatctcatcaggatggagtcactcctgcctagtaataacagcactgcagattagtaataacctgaaactatacctcgagtctgatttttcccttttcacatgagtcataaacactgttatgactggtattttattttcccttttcacgtgagtcatgaacactgttattactggtattttattttccattttc

SEQ ID NO: 19609 - protein, 410 aa, Zea mays subsp. mays
  misc_feature (1)..(410): Ceres Seq. ID no. 12373786
NFRFLPDPIAATIMAEAAGGGPLLPEELIIWEILTRLPAKPLLRCRAVCLSWCRRLTSDAKFLLAHHRRQPSLPLLTEGDRSTEERRIDALDYRTGERRPIARTTGRTAANGDDLNVLASCEGLLILLANGGLQICNPATRQRAPLTLLHGAYCISALYPHIPSRSYRVLCCFERAEDGHAVYHVHTVGSRELRCVGEPPAPWASGDMVMAMPMMVYLHPHVVADSRIYWQPVKLPVGNGKVNNMLVFDTMTESFQQLLSPVEGPFLELFQMNSGALGLYHCRSGKVDLWVLQDHGSWSWSMNHRIKLDVMFFSLLPVLDPEGDVLVLSKRGETGILWQHLHHISGVNGSLLALYQWSAYLKLSRHRLKESLVHHDFFSMEGNEGGVDEKPLFDGLSTVALLRDDNSEPH

SEQ ID NO: 19610 - protein, 397 aa, Zea mays subsp. mays
  misc_feature (1)..(397): Ceres Seq. ID no. 12373787
MAEAAGGGPLLPEELIIWEILTRLPAKPLLRCRAVCLSWCRRLTSDAKFLLAHHRRQPSLPLLTEGDRSTEERRIDALDYRTGERRPIARTTGRTAANGDDLNVLASCEGLLILLANGGLQICNPATRQRAPLTLLHGAYCISALYPHIPSRSYRVLCCFERAEDGHAVYHVHTVGSRELRCVGEPPAPWASGDMVMAMPMMVYLHPHVVADSRIYWQPVKLPVGNGKVNNMLVFDTMTESFQQLLSPVEGPFLELFQMNSGALGLYHCRSGKVDLWVLQDHGSWSWSMNHRIKLDVMFFSLLPVLDPEGDVLVLSKRGETGILWQHLHHISGVNGSLLALYQWSAYLKLSRHRLKESLVHHDFFSMEGNEGGVDEKPLFDGLSTVALLRDDNSEPH

SEQ ID NO: 19611 - DNA, 1751 bp, Zea mays subsp. mays
  misc_feature (1)..(1751): Ceres Seq. ID no. 12373788
atccctccacgttctcagaaaagtcgtccacgcgtctataaaccacaccaatcttttggcccttcgcttctccgttctcccccaattcgccttcacctcgccgcttcctccttgaccgccaccgttgacgtcgtcttccggcgaggtagctcgccggaagacctcacctggacttttccgacgcaccctccacacactctttaaccctccggaatggccgcctgcttctagctcgtcgacgccccaatctccgcttgcttcctcgacagccccatccgcctcttctcggctctcgctacggctcctctgcctgttcgccatggcggatccgcatcaccgtctcctactccggctacgtggcgcagaacctcgccgcgtcgctcggccaccgcttctcctccgcctccgcctcgggcagccgcctcctccatgacggcgcctggcgccccttctgcatcttcacctccacccgccagcccgagcagcaccgcggcagcggcagcgaccgccatgacggaggcgactacaaccacccgaagccccaggccatcgccgccggagctcactcgttgctgctcacgcgtgcgtgcttatcgtccaagtcgccgccgccgtctcttgccgtggggctgctctcggtgcttgcgcagaggacgggaccgacgcctggaaccaccggatcggcggcttctctctcaggctcgtcgccgatttccctcggtttcaaccccacctccttcctcccgttcctgcagacagcgaggtggctcccgtgcagcgaccttgcccacctcgtcgtcttcggcaccctcttcccctccccgctcgctggcgccttcggctccccccaagaaggcgttgattggtgcttctactggttctaccggaattgcgacgagcagtggtgctggtgcagcgatgagcaggagcaactggctgtcgaggtgggtcagctcctgctccgatgacgccaagacggcgtttgcggctgtgaccgtgccacttctctacgggtcgtccctggccgagccgaagtccatcccgtccaagtccatgtacccgaccttcgatgtcggtgatcggatacttgctgagaaggtctcatacatattccgggatccagaaatttcggacatcgtgatcttccgggctcccccaggacttcaggtttatggctacagctcaggtgatgtgttcatcaagagagttgtggccaagggaggagactatgttgaagtgcgtgatggcaagctgtttgttaatggagtagttcaggatgaggattttgtgctggagccacacaactacgagatggaaccagtgcttgtgccggaaggttatgtgttcgtgttgggagacaaccgcaacaacagctttgattcccacaactggggtccacttccagtgaggaacattgtcgggagatctatcctccggtattggccaccatcgaagatcaatgatacaatttatgagcctgatgtgtcccgcctcacggtgccgtcctcgtagtagtcgctgcagtgatgctggatatccagtgtgtgtacaatgaccttatacttcgtggagcctcatttgatgagttgagctccagttccaattctctcagaatattgtctcctgagtgttccctgtaaattctctttgcctgactgatttgttttcgctgccggttggcagatgcttgttcaaagcacgggaaagtgcagtaccttgcatcttgcaatacaaactaattaaaccggttg

SEQ ID NO: 19612 - protein, 360 aa, Zea mays subsp. mays
  misc_feature (1)..(360): Ceres Seq. ID no. 12373789
MTAPGAPSASSPPPASPSSTAAAAATAMTEATTTTRSPRPSPPELTRCCSRVRAYRPSRRRRLLPWGCSRCLRRGRDRRLEPPDRRLLSQARRRFPSVSTPPPSSRSCRQRGGSRAATLPTSSSSAPSSPPRSLAPSAPPKKALIGASTGSTGIATSSGAGAAMSRSNWLSRWVSSCSDDAKTAFAAVTVPLLYGSSLAEPKSIPSKSMYPTFDVGDRILAEKVSYIFRDPEISDIVIFRAPPGLQVYGYSSGDVFIKRVVAKGGDYVEVRDGKLFVNGVVQDEDFVLEPHNYEMEPVLVPEGYVFVLGDNRNNSFDSHNWGPLPVRNIVGRSILRYWPPSKINDTIYEPDVSRLTVPSS

SEQ ID NO: 19613 - protein, 333 aa, Zea mays subsp. mays
  misc_feature (1)..(333): Ceres Seq. ID no. 12373790
MTEATTTTRSPRPSPPELTRCCSRVRAYRPSRRRRLLPWGCSRCLRRGRDRRLEPPDRRLLSQARRRFPSVSTPPPSSRSCRQRGGSRAATLPTSSSSAPSSPPRSLAPSAPPKKALIGASTGSTGIATSSGAGAAMSRSNWLSRWVSSCSDDAKTAFAAVTVPLLYGSSLAEPKSIPSKSMYPTFDVGDRILAEKVSYIFRDPEISDIVIFRAPPGLQVYGYSSGDVFIKRVVAKGGDYVEVRDGKLFVNGVVQDEDFVLEPHNYEMEPVLVPEGYVFVLGDNRNNSFDSHNWGPLPVRNIVGRSILRYWPPSKINDTIYEPDVSRLTVPSS

SEQ ID NO: 19614 - protein, 197 aa, Zea mays subsp. mays
  misc_feature (1)..(197): Ceres Seq. ID no. 12373791
MSRSNWLSRWVSSCSDDAKTAFAAVTVPLLYGSSLAEPKSIPSKSMYPTFDVGDRILAEKVSYIFRDPEISDIVIFRAPPGLQVYGYSSGDVFIKRVVAKGGDYVEVRDGKLFVNGVVQDEDFVLEPHNYEMEPVLVPEGYVFVLGDNRNNSFDSHNWGPLPVRNIVGRSILRYWPPSKINDTIYEPDVSRLTVPSS

SEQ ID NO: 19615 - DNA, 1481 bp, Zea mays subsp. mays
  misc_feature (1)..(1481): Ceres Seq. ID no. 12373824
aacaaaataccgatcgcccgaccccttcagtgccttgactcacgcccgcggcaaccggcgacgaggcggcacgaccctccagtccggagtccgccatgcctcacgccgccgccaccgccgctgcggcgctcccgcgtgcctctctgctcgttatctcggcgccgctccgcgactccctcgccgcggcgccgtacgagccccccgcgggcgcatccgcctccgtcaagtccctcctcgcctctctcctcccttcgccttcccctccccagccccagcttcaggagccggcgggtaaggagtctggggacctcctcctcttctgcgctgccgtactcgcggcctccccggagtaccccgcgctgcactgggtcccggcgagcctcgtgggcgcggccgccgccgcggtgaacgagctggcggcggcgggaggttggggcagcgttggggatatggtggtggccgtggcaccggaggtggtgcctcctctcaaggccgtggtgaaggactcgtgcgtcgatgctgacagcgacgagattggggctgtgaagccgcccaaggagcacgcagcagtcgccgcgcaccagttccggtggctggtgtctcaggtaagctaccctaagctcggggatttgtgttcgttagtcattccatgtgccctgacaaccttagatcattggtcaccagaagttaaggtacagggaatggtaagctttgtacacatagcgaagaatgtgaaagcaacggaattaagtttgtatgaagatgccatacttgatgcgtgctgtcagaacattcctgcagatgatgagttatggtaccaggttattgaggtatctgtgatgttgctgacattcacccagcggagcaatcctcgtagcccctggtatgatcgaatgcttagtgagatgttgggccacctggaacggcagccactaaataaagagcgtcgtgttgcatggttgacccttattgggccagtttttgatgctatgggcctcttcctgttggcacattttcgccgccttttctcactgtttttccaatggatgcacactgatgataataagacagttcttctgactttaaagcaaatacatgccattatcaagcttacctggatcaggaagtcaccttatactttgaggctggtggacgagcttgttctattatataaagaatcagccacaaggagcaaccgtgaaatcatgcgagatcatatcctggagatacttgtactgcttcagaactgcaagggacatcaatttgaggaagcttggaagaaacatgaactagacccagacttgacgatgctgctgtccactttcaataagctttgtataaaaaacagttcaccgtgatgttgagttcaactacatgtgttatcagtgtaaatatttcaccatcgcctatcctgtcactgaatatttcactactgcctattctgccactctcatctgctgaaggaaatcagccttgattct

SEQ ID NO: 19616 - protein, 420 aa, Zea mays subsp. mays
  misc_feature (1)..(420): Ceres Seq. ID no. 12373825
MPHAAATAAAALPRASLLVISAPLRDSLAAAPYEPPAGASASVKSLLASLLPSPSPPQPQLQEPAGKESGDLLLFCAAVLAASPEYPALHWVPASLVGAAAAAVNELAAAGGWGSVGDMVVAVAPEVVPPLKAVVKDSCVDADSDEIGAVKPPKEHAAVAAHQFRWLVSQVSYPKLGDLCSLVIPCALTTLDHWSPEVKVQGMVSFVHIAKNVKATELSLYEDAILDACCQNIPADDELWYQVIEVSVMLLTFTQRSNPRSPWYDRMLSEMLGHLERQPLNKERRVAWLTLIGPVFDAMGLFLLAHFRRLFSLFFQWMHTDDNKTVLLTLKQIHAIIKLTWIRKSPYTLRLVDELVLLYKESATRSNREIMRDHILEILVLLQNCKGHQFEEAWKKHELDPDLTMLLSTFNKLCIKNSSP

SEQ ID NO: 19617 - protein, 302 aa, Zea mays subsp. mays
  misc_feature (1)..(302): Ceres Seq. ID no. 12373826
MVVAVAPEVVPPLKAVVKDSCVDADSDEIGAVKPPKEHAAVAAHQFRWLVSQVSYPKLGDLCSLVIPCALTTLDHWSPEVKVQGMVSFVHIAKNVKATELSLYEDAILDACCQNIPADDELWYQVIEVSVMLLTFTQRSNPRSPWYDRMLSEMLGHLERQPLNKERRVAWLTLIGPVFDAMGLFLLAHFRRLFSLFFQWMHTDDNKTVLLTLKQIHAIIKLTWIRKSPYTLRLVDELVLLYKESATRSNREIMRDHILEILVLLQNCKGHQFEEAWKKHELDPDLTMLLSTFNKLCIKNSSP

SEQ ID NO: 19618 - protein, 218 aa, Zea mays subsp. mays
  misc_feature (1)..(218): Ceres Seq. ID no. 12373827
MVSFVHIAKNVKATELSLYEDAILDACCQNIPADDELWYQVIEVSVMLLTFTQRSNPRSPWYDRMLSEMLGHLERQPLNKERRVAWLTLIGPVFDAMGLFLLAHFRRLFSLFFQWMHTDDNKTVLLTLKQIHAIIKLTWIRKSPYTLRLVDELVLLYKESATRSNREIMRDHILEILVLLQNCKGHQFEEAWKKHELDPDLTMLLSTFNKLCIKNSSP

SEQ ID NO: 19619 - DNA, 1482 bp, Zea mays subsp. mays
  misc_feature (1)..(1482): Ceres Seq. ID no. 12373828
gcacgagaccattacctagaacatcctaatcaaaaaacggtctgctctctttctctctcttcccctattacgagtcccagcagctagaacaacacaaaccctctcctgtagctagatgtgtggtagtaagctctcgctgttaacctcggcaaagaacctactggaagtcggaagggaaaaagcaaagtaggagtagctagctagtatagcaaacaagctcccccgtgtgccgacgagccgccgactaggtcagccgccatggacttcgacgagcacgatgacggcgacgaggagatgacgccgatgcccgtgagctcgagctacgatgcgccgatgcagccggggctgggactgggcggaggaggcggcgagaccccgaagcacggggattctgctggagccgggagcttcaggacgccgccagcaggcggcttcgggggaggaggcgcaggcgcaggcgcaggcgcaggcggtggcggggccaccaggtaccgggagtgcctcaagaaccacgcggtcggcatcggcgggcacgcggtggacggctgcggcgaattcatggccgctggcgaggagggctccatcgacgcgctgcgctgcgcggcctgcggctgccaccgcaacttccaccgcaaggagtccgacaactcgccagcgggaggcgggggcgtcgcgccgcccgatcccgccgccgccctgtccccggccgccatcacagcctacggcgccgccgtggcggcgcaccaccaccagttctccccctactaccgcacccctgccgggtacttcctgcaccagcagctggcggccgccgccgggcacatgcagcgcccgctcgcgctgccgtccacctcccactcgctggggcgcgaagagggcgacgacgtgtccgggctgatcggccccatggtggtggcgcccatgatgggcatgtcgctgggcccgggcggcggcccgtcggggggctcgtccggcggctcggggtccggcaagaagcggttccgcaccaagttcacgcaggagcagaaggaccggatgctggcgttcgcggagcggctggggtggcgcatccagaagcacgacgaggccgccgtgcagcagttctgcgaggaggtctgcgtcaagcgccacgtgctcaaggtgtggatgcacaacaacaagcacaccctcggcaagaagccatgaccgaccgccggccanttcttcgcgccggcgcctgcactgtgtgctagctaggtacaccaccactgatcgcattgcatcatagatctcctcctctctttctcagcaccgtattgcttgctagccttttttttttgggggtactcctctccttgccttcctttttttagagttttagctagaaatgtaagctagctacttaggtcagtagcgagcagcagttcttggattttagctacgatggagaagacggccgttgttctcttgtcatcttcattattttattgtacttctttggcc

SEQ ID NO: 19620 - protein, 308 aa, Zea mays subsp. mays
  misc_feature (1)..(308): Ceres Seq. ID no. 12373829
MDFDEHDDGDEEMTPMPVSSSYDAPMQPGLGLGGGGGETPKHGDSAGAGSFRTPPAGGFGGGGAGAGAGAGGGGATRYRECLKNHAVGIGGHAVDGCGEFMAAGEEGSIDALRCAACGCHRNFHRKESDNSPAGGGGVAPPDPAAALSPAAITAYGAAVAAHHHQFSPYYRTPAGYFLHQQLAAAAGHMQRPLALPSTSHSLGREEGDDVSGLIGPMVVAPMMGMSLGPGGGPSGGSSGGSGSGKKRFRTKFTQEQKDRMLAFAERLGWRIQKHDEAAVQQFCEEVCVKRHVLKVWMHNNKHTLGKKP

SEQ ID NO: 19621 - protein, 296 aa, Zea mays subsp. mays
  misc_feature (1)..(296): Ceres Seq. ID no. 12373830
MTPMPVSSSYDAPMQPGLGLGGGGGETPKHGDSAGAGSFRTPPAGGFGGGGAGAGAGAGGGGATRYRECLKNHAVGIGGHAVDGCGEFMAAGEEGSIDALRCAACGCHRNFHRKESDNSPAGGGGVAPPDPAAALSPAAITAYGAAVAAHHHQFSPYYRTPAGYFLHQQLAAAAGHMQRPLALPSTSHSLGREEGDDVSGLIGPMVVAPMMGMSLGPGGGPSGGSSGGSGSGKKRFRTKFTQEQKDRMLAFAERLGWRIQKHDEAAVQQFCEEVCVKRHVLKVWMHNNKHTLGKKP

SEQ ID NO: 19622 - protein, 293 aa, Zea mays subsp. mays
  misc_feature (1)..(293): Ceres Seq. ID no. 12373831
MPVSSSYDAPMQPGLGLGGGGGETPKHGDSAGAGSFRTPPAGGFGGGGAGAGAGAGGGGATRYRECLKNHAVGIGGHAVDGCGEFMAAGEEGSIDALRCAACGCHRNFHRKESDNSPAGGGGVAPPDPAAALSPAAITAYGAAVAAHHHQFSPYYRTPAGYFLHQQLAAAAGHMQRPLALPSTSHSLGREEGDDVSGLIGPMVVAPMMGMSLGPGGGPSGGSSGGSGSGKKRFRTKFTQEQKDRMLAFAERLGWRIQKHDEAAVQQFCEEVCVKRHVLKVWMHNNKHTLGKKP

SEQ ID NO: 19623 - DNA, 1121 bp, Zea mays subsp. mays
  misc_feature (1)..(1121): Ceres Seq. ID no. 12373836
gttcggcttcggtcctaccgccgccgcgtcgtgggaggataatcgaactgcttcccttctcgtcttccctaacctttccgtccttcccggattatttccatcaccagagcgtatcgcgtcgtctcctctctatccgattccgcccgcggacccaggctcccgcatggacgctgccggcggggtggaggccgccgccaacggcgggatcgagggctccgccgacccctgcagctcaggcggtgccggcgggtacaggcgctccgtccaccagatcgccggcggcgggaaagctgctgatatcatcttatggaggcgagcgcgtgttacatttggtgttatatttggtgctactctggcatggtggttgtttgagaagtctggactatcattattaactatctgctctgatatacttctcatcttgatagttctgcagttcataagggttaaaatagctggactgctagataggcagcctaggccactacctgagttagttttatcagaggagatggttagcaatgctgcggcttcattccgtgtgaaagtgaacagcatgctgatgatagcgcatgacattactcttggcaaggacttcaggctatttttccaggtcgtgattgtcttgtggctgttatctgtcattggaaatttctgctcgtctatcactcttgcttacataggaaccgttgctttggtcacaatgcctgcattgtacaacaagtaccagaggcctgttgataggtatgctgggatggtctaccggaacatttcgaggcattacaagatagttgatgagaatgtgatcagtagactaccgagaaggtttatcagagataaagaggactgatactctgaaaaatgaactcgctaagctagtcaggtaatcttttacctacattgtcagaccttacatggtgtgaaactatagagctacgaaaacagagaacggcatggaacctacagtagataccgttgcagtgtactcttgggcaaaggtttgagacgaaattaaaatgtatagctttctgtgttagctctttgcaacgaactggctaaatgttgttaaaaataacaaaagcaattgtcatgggaagttgaaaatgaagtggttgtaactg

SEQ ID NO: 19624 - protein, 282 aa, Zea mays subsp. mays
  misc_feature (1)..(282): Ceres Seq. ID no. 12373837
FGFGPTAAASWEDNRTASLLVFPNLSVLPGLFPSPERIASSPLYPIPPADPGSRMDAAGGVEAAANGGIEGSADPCSSGGAGGYRRSVHQIAGGGKAADIILWRRARVTFGVIFGATLAWWLFEKSGLSLLTICSDILLILIVLQFIRVKIAGLLDRQPRPLPELVLSEEMVSNAAASFRVKVNSMLMIAHDITLGKDFRLFFQVVIVLWLLSVIGNFCSSITLAYIGTVALVTMPALYNKYQRPVDRYAGMVYRNISRHYKIVDENVISRLPRRFIRDKED

SEQ ID NO: 19625 - protein, 228 aa, Zea mays subsp. mays
  misc_feature (1)..(228): Ceres Seq. ID no. 12373838
MDAAGGVEAAANGGIEGSADPCSSGGAGGYRRSVHQIAGGGKAADIILWRRARVTFGVIFGATLAWWLFEKSGLSLLTICSDILLILIVLQFIRVKIAGLLDRQPRPLPELVLSEEMVSNAAASFRVKVNSMLMIAHDITLGKDFRLFFQVVIVLWLLSVIGNFCSSITLAYIGTVALVTMPALYNKYQRPVDRYAGMVYRNISRHYKIVDENVISRLPRRFIRDKED

SEQ ID NO: 19626 - DNA, 1520 bp, Zea mays subsp. mays
  misc_feature (1)..(1520): Ceres Seq. ID no. 12373839
attttcgtagtgcactctctagtctctccacacaccacagtcgagcgagcactcctctccatggcccacggcgagggacgacgccagcatttcctggtggtggccctcggcgtccaaagccacgtcaacccggggcgcgccctcgcccaccgcctcgcacggctacgcgccgacggctccatcacggccacgctctccgtgccggtaaccacctaccggcgcatgttccctcggtcggcggattccgccccagcgacggcggagaccagcgacggggtcatctcgtacgtggcgcactcagacggcctcgacgacggctcgtcgtcgtcctgggccgcggacgccgaggacagggcgcgcaggcgccgcgcgagcgccgacagcctctccgccgtggccgcccgcctggccggccgcggccgcccggtgacgtgcatcgcgtgcacgatggtgtcgcctccggcgctcgacgtcgcgcgggagcacgccatccctctcgccgtcttctggctccagccggccaccgtcctcgccctctgctaccactacttccacggccacggcgcgagcgtggccgcccacgccgcggacccggcgcacgaggtgcgcgtgcccgggctgcgccgccccctccgcatgcgctgcctcccgtcgttcctcaccgacacgtcgggcagcgacagggccacggccctcaccgacgtgttccgagagctgttcgagttcttggaccgctggcggcccacggtgctggtcaacacgttcgacgagctggagccggacccgctcgcggaggtgaggcgccacctggacgtggtcgccgttggccccatggtcgggcccgccacggacgccccgcatccacctgttcgaccacgacgacgacgccggcaagaagaggtacacggagtggcttcacgctcacccggacggctcggtggtgtacgcgtcgttcgggagcgtcacgaagctcgccaagcggcagatgcaggagatcgccggagggttgcgccagtgcgggcggccgtacttgctggtcgtgcgcagggacggggtcgacgacgacgaaggcggcatccatggcctggagaacgacaccgagatgcaggggatggtcgtggactggtgcgaccagctggaggtgctgtcgcacccggcggtcggctgcttcgtctcgcattgcgggtggaactcggcgacggaggccatggcgtccggcgtgcccatcgtcggtgtgcccaacatgttcgaccagccgacgaacatgtacttggtcgaggaagagtggggggtcggcgtcagaggagagcgagacgccgatggcgtgctgacaggggcggagctggcaaggtgcattgagctggtcatgggtgatggcgcaggagcagtggtgatcagggaaagggcaaaggccttgcaagagacagcgcaggcggcggccagtgcagcaggcgggcccgccgagagaaacctttgtcacctcgtcaagacgatgtcaaaataattatcaaagctgtcgt

SEQ ID NO: 19627 - protein, 452 aa, Zea mays subsp. mays
  misc_feature (1)..(452): Ceres Seq. ID no. 12373840
IFVVHSLVSPHTTVERALLSMAHGEGRRQHFLVVALGVQSHVNPGRALAHRLARLRADGSITATLSVPVTTYRRMFPRSADSAPATAETSDGVISYVAHSDGLDDGSSSSWAADAEDRARRRRASADSLSAVAARLAGRGRPVTCIACTMVSPPALDVAREHAIPLAVFWLQPATVLALCYHYFHGHGASVAAHAADPAHEVRVPGLRRPLRMRCLPSFLTDTSGSDRATALTDVFRELFEFLDRWRPTVLVNTFDELEPDPLAEVRRHLDVVAVGPMVGPATDAPHPPVRPRRRRRQEEVHGVASRSPGRLGGVRVVRERHEARQAADAGDRRRVAPVRAAVLAGRAQGRGRRRRRRHPWPGERHRDAGDGRGLVRPAGGAVAPGGRLLRLALRVELGDGGHGVRRAHRRCAQHVRPADEHVLGRGRVGGRRQRRARRRWRADRGGAGKVH

SEQ ID NO: 19628 - protein, 442 aa, Zea mays subsp. mays
  misc_feature (1)..(442): Ceres Seq. ID no. 12373841
FRSALSSLSTHHSRASTPLHGPRRGTTPAFPGGGPRRPKPRQPGARPRPPPRTATRRRLHHGHALRAGNHLPAHVPSVGGFRPSDGGDQRRGHLVRGALRRPRRRLVVVLGRGRRGQGAQAPRERRQPLRRGRPPGRPRPPGDVHRVHDGVASGARRRAGARHPSRRLLAPAGHRPRPLLPLLPRPRRERGRPRRGPGARGARARAAPPPPHALPPVVPHRHVGQRQGHGPHRRVPRAVRVLGPLAAHGAGQHVRRAGAGPARGGEAPPGRGRRWPHGRARHGRPASTCSTTTTTPARRGTRSGFTLTRTARWCTRRSGASRSSPSGRCRRSPEGCASAGGRTCWSCAGTGSTTTKAASMAWRTTPRCRGWSWTGATSWRCCRTRRSAASSRIAGGTRRRRPWRPACPSSVCPTCSTSRRTCTWSRKSGGSASEESETPMAC

SEQ ID NO: 19629 - protein, 432 aa, Zea mays subsp. mays
  misc_feature (1)..(432): Ceres Seq. ID no. 12373842
MAHGEGRRQHFLVVALGVQSHVNPGRALAHRLARLRADGSITATLSVPVTTYRRMFPRSADSAPATAETSDGVISYVAHSDGLDDGSSSSWAADAEDRARRRRASADSLSAVAARLAGRGRPVTCIACTMVSPPALDVAREHAIPLAVFWLQPATVLALCYHYFHGHGASVAAHAADPAHEVRVPGLRRPLRMRCLPSFLTDTSGSDRATALTDVFRELFEFLDRWRPTVLVNTFDELEPDPLAEVRRHLDVVAVGPMVGPATDAPHPPVRPRRRRRQEEVHGVASRSPGRLGGVRVVRERHEARQAADAGDRRRVAPVRAAVLAGRAQGRGRRRRRRHPWPGERHRDAGDGRGLVRPAGGAVAPGGRLLRLALRVELGDGGHGVRRAHRRCAQHVRPADEHVLGRGRVGGRRQRRARRRWRADRGGAGKVH

SEQ ID NO: 19630 - DNA, 1856 bp, Zea mays subsp. mays
  misc_feature (1)..(1856): Ceres Seq. ID no. 12373912
cttcttccgtctgtccgcttctccctctctccctccctcccccaccccgcgagaccgccggcgaatttgttgcagtgcactgaagccaacagctgcaggacaggaggaggaggaggagctgtttcaacaattatcccccgcgcgcccaggccagccccgcccccgcccgcccactctcccgaggtgagcaacccctttcctccagcggctgtctgtttaatttgggtctacagctcttccccccctcgtggtctcgtctatggaattcccggttcaatttggacttgggctcctcccttgtttactgtaaccgtgtgcttgctactgtatcgaagaaatcccagcgtcaatcatgctgctgcgcgaggtctctcgatgatggatgacagataatgatggttgttgtatgatgatgatggcgcatggcggctgccaacgcctgtttttccccgctgcagtacctttgcttcactgatattagcaacctctatccaggattccaggttctcaacacaacagacaacaccgctcaccgcatatatatatatatagatgggttccgaggggccttctcccgtcaccgtccacgtcaccggattcaagaggttccatggagtcgccgagaacccgacggagaggatcgtgcgcggtctccagccattcatggagacgagagggttgcccaagggccttgttctcgggagctgcaccgtccttgaggccgccgggcagggcgcgcttggcccgctgtatgaactgctggagtcgaccgtctccggccgggaacgtcaggagcgagtaattctgctccattttggcgccaacagtggttcacataggtttgctcttgagaatcaagctgttaatgaagctactttccgttgccctgatgagctaggatggaaaccacagaggacacctatcatatcgtcagatggaagcatcttacacgcaagacaggtatattttaacagttactacctcgataaatcattgagaatctctaagcatcctacttggaagactagtatttcatattatgctgcttacctactgacttactgtcctacatatcctccgttttaatgaacatgctgtcagtcgattgaatccttttcgtttccaacagtagaaacagagtatcgattttccatcattaaacttagatgtaatactttcgatacaccactctcattaaccactgtgcatacagattcgtcctccttaaaaggtcttcgagtaaggaggtttccccaaggaaatactgcgattgatctctaatgttctccagcttctagatcaatgattaatttgcacagctgcctgtattctgtcagttatcttgtcatgtgcatcatctgctgaactacgttttgtttcataataaccaagcagactacactgccagtggaggagataagcaagtctctccaacagatgggatacgacgtggtgccttcagacgacgctggtcgatttgtgtgcaactacgtctactaccactcactcaagtttgcagagaagcatgggatcgggtctctgtttgtccatttccccctcttcctggcaatcgacgaggaagtccagatgcagtttgtcgcttcccttctagaggtcctcgcttccttgaacttccagtgaacctagtggtagatctaccacttcccggtggtgtattgttcccagattatttgggaaaggtttaagttgttcccaacttacctgtggagaataagatcgaggaatcattcgtggaattatgtgtgtggttcaaaatgtgtaggggaacaaaaacaagtcttctcaaagaacatgtacatgcagtccagatgttaatatcccaagcggtttatatg

SEQ ID NO: 19631 - protein, 177 aa, Zea mays subsp. mays
  misc_feature (1)..(177): Ceres Seq. ID no. 12373913
MGSEGPSPVTVHVTGFKRFHGVAENPTERIVRGLQPFMETRGLPKGLVLGSCTVLEAAGQGALGPLYELLESTVSGRERQERVILLHFGANSGSHRFALENQAVNEATFRCPDELGWKPQRTPIISSDGSILHARQVYFNSYYLDKSLRISKHPTWKTSISYYAAYLLTYCPTYPPF

SEQ ID NO: 19632 - protein, 140 aa, Zea mays subsp. mays
  misc_feature (1)..(140): Ceres Seq. ID no. 12373914
METRGLPKGLVLGSCTVLEAAGQGALGPLYELLESTVSGRERQERVILLHFGANSGSHRFALENQAVNEATFRCPDELGWKPQRTPIISSDGSILHARQVYFNSYYLDKSLRISKHPTWKTSISYYAAYLLTYCPTYPPF

SEQ ID NO: 19633 - protein, 130 aa, Zea mays subsp. mays
  misc_feature (1)..(130): Ceres Seq. ID no. 12373915
LLPSVRFSLSPSLPHPARPPANLLQCTEANSCRTGGGGGAVSTIIPRAPRPAPPPPAHSPEVSNPFPPAAVCLIWVYSSSPPRGLVYGIPGSIWTWAPPLFTVTVCLLLYRRNPSVNHAAARGLSMMDDR

SEQ ID NO: 19634 - DNA, 1589 bp, Zea mays subsp. mays
  misc_feature (1)..(1589): Ceres Seq. ID no. 12373920
gcacgagaccattacctagaacatcctaatcgaaaaaatccaattcacaaacacacacgggcaatcaattagcagaacccgcgccaccccccttcctcggagtcggagcgagtcgaggaacggctcgtctgcctctcccgttctccttcctctcctccccagaagatccgatccatcatcgaggactcgccgggaagaatcaaggatatatagataatatacaaacaaaggttcctccagagcccagaggagggaagtcaccggccgtcggcggggaggagatgtcggacggcgcgggctcccggacgggcgtcgctggcgcgctgggcctctcggtcacctcgtcggtggccatcgtcatctgcaacaagtacctcatcagcactctaggcttcttcttcggtcacgacgacgctgacgagctggcacctcatggtgaccttcttcacgctgtacgttcgcgcagcggctgcgcttcttcgagccaaagccgatcgacgcgcgcaccgtcatctccttcggcctgctcaacggcatctccattggcctcctcaacctctgcctcgggttcaactctgttggcttctaccagatgaccaagctggccatcatacccttcaccatagtcttggaaaccctctttctgagcaagaagttcagagcatcaaggcctccctcatggttctgctgctgggagtcgggatcgcgtcggtcacggatctccagctcaacctcctcggctcgatcatcgccgtgctcaccatcgctgcgacatgcgtcgggcagattctgaccaaccaaatccagaggaggctgaaggtttcgtcgacgcagctgctgtaccagtcgtcgccgtaccagtccgcggtgctgctcgtcaccgggcctttcgtggacaagctcctcaccaagcgtgacgtcttcgcgttcagctacaccacccaagtcgtggtgttcatcctgctgtcgtgctcgatcgcggtgtgcgtaaacttcagcacgttcctggtgatcggcacgacgtcgcccgtgacgtaccaggtgctgggccacctcaagacgtgtttggtgctctccttcggctacatcatcctcaaagaccccttcagcgcgcgcaacgtggtgggcatcctcatcgccatcttcggcatgggcctctactcctactactccgtcgtcgagagcaggaagaagaccgaggacgctagctcgctgccggtcgccgcgcagatgagcgagaaggactcggcgccactcctcggcgccaagagctcgccgcggacagagaacaaggccgaggaaaccttcgactacatgccgaggacggccaagagcgcgttcaccggccggtgagcgcgtagcttgtaaggagtacgtatctttctagagttgtgggtagacgacgagcaacaaggcgggaatgtgttagtgaaagatgtaacggcggcaagtgacattccaattatcatttttgcgatttctcctctagggtggtctgcgtggtcatggtttaccagagcataaacagcagaatgtgtggtctactggtcttgaccgagcttgaaatagtagattggattggtgataat

SEQ ID NO: 19635 - protein, 306 aa, Zea mays subsp. mays
  misc_feature (1)..(306): Ceres Seq. ID no. 12373921
MVTFFTLYVRAAAALLRAKADRRAHRHLLRPAQRHLHWPPQPLPRVQLCWLLPDDQAGHHTLHHSLGNPLSEQEVQSIKASLMVLLLGVGIASVTDLQLNLLGSIIAVLTIAATCVGQILTNQIQRRLKVSSTQLLYQSSPYQSAVLLVTGPFVDKLLTKRDVFAFSYTTQVVVFILLSCSIAVCVNFSTFLVIGTTSPVTYQVLGHLKTCLVLSFGYIILKDPFSARNVVGILIAIFGMGLYSYYSVVESRKKTEDASSLPVAAQMSEKDSAPLLGAKSSPRTENKAEETFDYMPRTAKSAFTGR

SEQ ID NO: 19636 - protein, 224 aa, Zea mays subsp. mays
  misc_feature (1)..(224): Ceres Seq. ID no. 12373922
MVLLLGVGIASVTDLQLNLLGSIIAVLTIAATCVGQILTNQIQRRLKVSSTQLLYQSSPYQSAVLLVTGPFVDKLLTKRDVFAFSYTTQVVVFILLSCSIAVCVNFSTFLVIGTTSPVTYQVLGHLKTCLVLSFGYIILKDPFSARNVVGILIAIFGMGLYSYYSVVESRKKTEDASSLPVAAQMSEKDSAPLLGAKSSPRTENKAEETFDYMPRTAKSAFTGR

SEQ ID NO: 19637 - DNA, 1501 bp, Zea mays subsp. mays
  misc_feature (1)..(1501): Ceres Seq. ID no. 12373953
aaaagccttcgcctttttcctctcgtcttcctctctctcccccgctccaaatcccaccctctctctttctctctccacattctccctgctgtgcaccttgcagcagccttggctgtggatcggaaatggcaatcgacgatgaatcgccgctcagagtcaaccccagaggcggcgccatgggaggaggggagcgtgacggcgcggagaaccagcggtggccgccgtggctgaagccgctgctggggacgagcttcttcggccaatgcaagctgcacgcggacgcgcacaagagcgagtgcaacatgtactgcctcgactgcatgaacggcgcgctctgctcccagtgcctcgcctaccaccgcgaccaccacgccatccagatacggaggtcctcctaccacgacgtgatccgggtgtcggagatccagaaggtgctggacatcagcggcgtgcagacctacatcatcaacagcgcgcgcgtggtgttcctgaacgagcggccgcagccgaggcccggcaagggcgtcaccaacacctgcgaggtctgcgagcgcagcctcctcgacaccttccgcttctgctccctcggctgcaagatcgtcaggacctccggcgacttccgcatccggaagaagcacgccatcgtcgcaaagaagaagagggagaagaagcatgcgccgcagcagaagcagcacaggggcgcggcggactcggcggacgacgacgacgacgactcgtccaccagcaccagcggcggcagcgacaagagcagcgtggtgcagagcttcaccccgtcgaccccgccggcgacgaccgccaacagcttccgcgccgggaagcggcgcaagggcgtgccgcaccggtcgccgttcggcagcctcgtggtggagttctagacaaaaaaaaaggcgcgccgcccggtcccgatggacgcccaccaaaaaaaaaaacacagcggtacaccactgtagcatacgcacttcttctacataccatcatctataggcgctgccggatcgaccgggctacatacataagtacatagccagcccaaaaataggagcaagcaataaccagggccccacttgcacgccgcccgcgcttctggacggacgaggacgaggaggccggtgcaatgcggctcgtacggggcacggttacttccacttccatagcagttactgtgctggtaacaacggtttgggtttggtgcctcactgcctctctgaagggaaacgaggttgttatagcagttactcttgtcgtcgtcagcctcagccactactaagttttgcgagtttcacctataggtgtttgctagttttttttaccggtgcttggtatacgcgagtagaatgtacatgtacgtatactgtcagagatggggggaatggtggtaggggggtgtagctcccggtgttcatattcgtgtgttggcttgctgccctgtaataataataaaaataaaaagggataaggatgctgctcctggatggccttc

SEQ ID NO: 19638 - protein, 297 aa, Zea mays subsp. mays
  misc_feature (1)..(297): Ceres Seq. ID no. 12373954
KPSPFSSRLPLSPPLQIPPSLFLSPHSPCCAPCSSLGCGSEMAIDDESPLRVNPRGGAMGGGERDGAENQRWPPWLKPLLGTSFFGQCKLHADAHKSECNMYCLDCMNGALCSQCLAYHRDHHAIQIRRSSYHDVIRVSEIQKVLDISGVQTYIINSARVVFLNERPQPRPGKGVTNTCEVCERSLLDTFRFCSLGCKIVRTSGDFRIRKKHAIVAKKKREKKHAPQQKQHRGAADSADDDDDDSSTSTSGGSDKSSVVQSFTPSTPPATTANSFRAGKRRKGVPHRSPFGSLVVEF

SEQ ID NO: 19639 - protein, 260 aa, Zea mays subsp. mays
  misc_feature (1)..(260): Ceres Seq. ID no. 12373955
MQAARGRAQERVQHVLPRLHERRALLPVPRLPPRPPRHPDTEVLLPRRDPGVGDPEGAGHQRRADLHHQQRARGVPERAAAAEARQGRHQHLRGLRAQPPRHLPLLLPRLQDRQDLRRLPHPEEARHRRKEEEGEEACAAAEAAQGRGGLGGRRRRRLVHQHQRRQRQEQRGAELHPVDPAGDDRQQLPRREAAQGRAAPVAVRQPRGGVLDKKKGAPPGPDGRPPKKKTQRYTTVAYALLLHTIIYRRCRIDRATYIST

SEQ ID NO: 19640 - protein, 256 aa, Zea mays subsp. mays
  misc_feature (1)..(256): Ceres Seq. ID no. 12373956
MAIDDESPLRVNPRGGAMGGGERDGAENQRWPPWLKPLLGTSFFGQCKLHADAHKSECNMYCLDCMNGALCSQCLAYHRDHHAIQIRRSSYHDVIRVSEIQKVLDISGVQTYIINSARVVFLNERPQPRPGKGVTNTCEVCERSLLDTFRFCSLGCKIVRTSGDFRIRKKHAIVAKKKREKKHAPQQKQHRGAADSADDDDDDSSTSTSGGSDKSSVVQSFTPSTPPATTANSFRAGKRRKGVPHRSPFGSLVVEF

SEQ ID NO: 19641 - DNA, 1814 bp, Zea mays subsp. mays
  misc_feature (1)..(1814): Ceres Seq. ID no. 12373981
cccgtgatgttttaaatttcggatcctgtgttgcagctttgaagtgcatgaacgagacatgcagagccgcgtgacgtgagttctccccataccgcccgatctcggagatgtgcgcgtaccacatgaggctcaccggcggcgcggcctttgtgctccttatggttctcctcttgctgctgtatgcggtgcacaggtggaggaaccctcgatgcagcggccgcctgccgccgggctccatgggcctgccgctcgtcggagagacggctgcagttcttctcccctgaagcttccttggacgtcccgcgtttcgtccgacacagactgcaaaggtacggcccgatcttcaagacgagcctggtgggccacccggtcgtcgtctccgcggacgaggagctgaactacatggtgttccagcaggaggggcagctgttccagagctggtacccggactccttcgtggagatcctaggcagggacaacgtcggggagcagcagggcgccatgttcaagtacctcaagaacatggtgctccgctacttcggcccggagagcctcagggagtccatgctccgcgacgtcgagcacgccgtcagcagctcgctctgtacctggtcaaccttgccgtcggtcgagctgaaagaggccgtctccacgatggtgttcgatctttcagcgaacaagcttctcagcttggagccgtcgaggtccaagattctgaggaggagcttcttcgacttcgttcgagggctcatctcgttccctctgtatttgccaggaacagcatactactcatgcatgaagggccggcagagcgcaatggaggtgctgcaggaagtgctagcggagaggaagagactggtacaggtgcccggagcaggaggaggcgccatggaaacgatacgtcgccatggcggcgacttcttggacctcgtcatccaggaagtcacgaaggagaagccgctcgtgacggacagaatggcgctcgacctgatgttcgtgctcctgttcgccagcttccacacgacgtcgctagcgctcactctggctgtcaagctgcttgcagaccaccctcgcgtcctggaagagctcacggtggagcatgaagcgattctgaatgaacgtaacgcgcgccatggatctgatggaatcacatggatggagtacaagtctatgacgttcacatcccaggtcatcaacgagactgtccgattagccaatattgcgcctggcatcttcagaaaggcactgaaagatatacagttcagagggttcacaattccagcaggatggggagtgatggtctgtcctccagcagtgcacttgaacccagtcatttacccagatcccctcatctttaaccctacaaggttcaaggataaaccggagataaaccgtgggtcaagacacttcatggcattcggaggaggcctccgatcctgtgttggagcagacttcagcaagttgcaaatgtctattttcctccatttccttgtcactagatacaggtggagaagtcttgggggtggcaaggtagtccgaaatccggggctagaattccctgatggctaccacattcaaatacggcactggaattaattctgctaatactacagagtcaatctcgttgtgcattcaagccaagaaacggacggagggaaagaattactgttaggctctatttggatcttttgaattgaatttcattctaataattataattcaaacacagattaattagaataatataattttatgtgagatatatttttatagtactgttggtcaccatataaatttattataagcttatatcc

SEQ ID NO: 19642 - protein, 471 aa, Zea mays subsp. mays
  misc_feature (1)..(471): Ceres Seq. ID no. 12373982
MRCTGGGTLDAAAACRRAPWACRSSERRLQFFSPEASLDVPRFVRHRLQRYGPIFKTSLVGHPVVVSADEELNYMVFQQEGQLFQSWYPDSFVEILGRDNVGEQQGAMFKYLKNMVLRYFGPESLRESMLRDVEHAVSSSLCTWSTLPSVELKEAVSTMVFDLSANKLLSLEPSRSKILRRSFFDFVRGLISFPLYLPGTAYYSCMKGRQSAMEVLQEVLAERKRLVQVPGAGGGAMETIRRHGGDFLDLVIQEVTKEKPLVTDRMALDLMFVLLFASFHTTSLALTLAVKLLADHPRVLEELTVEHEAILNERNARHGSDGITWMEYKSMTFTSQVINETVRLANIAPGIFRKALKDIQFRGFTIPAGWGVMVCPPAVHLNPVIYPDPLIFNPTRFKDKPEINRGSRHFMAFGGGLRSCVGADFSKLQMSIFLHFLVTRYRWRSLGGGKVVRNPGLEFPDGYHIQIRHWN

SEQ ID NO: 19643 - protein, 397 aa, Zea mays subsp. mays
  misc_feature (1)..(397): Ceres Seq. ID no. 12373983
MVFQQEGQLFQSWYPDSFVEILGRDNVGEQQGAMFKYLKNMVLRYFGPESLRESMLRDVEHAVSSSLCTWSTLPSVELKEAVSTMVFDLSANKLLSLEPSRSKILRRSFFDFVRGLISFPLYLPGTAYYSCMKGRQSAMEVLQEVLAERKRLVQVPGAGGGAMETIRRHGGDFLDLVIQEVTKEKPLVTDRMALDLMFVLLFASFHTTSLALTLAVKLLADHPRVLEELTVEHEAILNERNARHGSDGITWMEYKSMTFTSQVINETVRLANIAPGIFRKALKDIQFRGFTIPAGWGVMVCPPAVHLNPVIYPDPLIFNPTRFKDKPEINRGSRHFMAFGGGLRSCVGADFSKLQMSIFLHFLVTRYRWRSLGGGKVVRNPGLEFPDGYHIQIRHWN

SEQ ID NO: 19644 - protein, 364 aa, Zea mays subsp. mays
  misc_feature (1)..(364): Ceres Seq. ID no. 12373984
MFKYLKNMVLRYFGPESLRESMLRDVEHAVSSSLCTWSTLPSVELKEAVSTMVFDLSANKLLSLEPSRSKILRRSFFDFVRGLISFPLYLPGTAYYSCMKGRQSAMEVLQEVLAERKRLVQVPGAGGGAMETIRRHGGDFLDLVIQEVTKEKPLVTDRMALDLMFVLLFASFHTTSLALTLAVKLLADHPRVLEELTVEHEAILNERNARHGSDGITWMEYKSMTFTSQVINETVRLANIAPGIFRKALKDIQFRGFTIPAGWGVMVCPPAVHLNPVIYPDPLIFNPTRFKDKPEINRGSRHFMAFGGGLRSCVGADFSKLQMSIFLHFLVTRYRWRSLGGGKVVRNPGLEFPDGYHIQIRHWN

SEQ ID NO: 19645 - DNA, 1299 bp, Zea mays subsp. mays
  misc_feature (1)..(1299): Ceres Seq. ID no. 12373989
agactggaaaagcatcggcacgggcggtaggataaagtagcatagcataccacaaaaggtgctgcttgacagatggcaagcttcccacacctcacgcagatggagcatggcctagccagtggtgcctcccatggcacgccgagcttcttcttctgccatggcacagccacggcggattcagcctcgctggagacctcgtctggtgttctcgacacctccccacgaggcacttcttctggcgacaacaaggcctgcaggaagcacaaggaagatagtggtgccagcttcagctctgctcgctccaaggactcaaactcaaaggaaagcagcaaaaggagcggaggaaaaagagacagaagcagcaagaaggtggacgaggaggagcccaaggggtacatacatgtcagggcgaggagaggacaagcaacggacaaccacagccttgcagagagggtgaggagggagagaatcagtgagaggatgagggtgttgcaggccctggtccctggctgtgataaggtcactggaaaagccctcattttggacgagatcatcaattatgtgcagtccttgcagaaccaagttgagttcctttccatgaggattgcttccctgagccctgtgctgtatggttttggcatggacagtagtgatgctttcagtgaccttataactcagaagatcgaagggatggcccaccatgaggcgttcgcgatgcctagcagctctgtcctgaacggcactccgtcggaagctctcgtggacacgcacacctccagctcctccccgtcctacgaggtccacggcgacggcggcaccgccagcgtctctttccctcaggacagtggcagctacatggtgcaaacagtaggtgagccaaggcaagagctgttcagccaagtggtgttcagtaaccacatgtgccctttccagtagggagagagcgagaggatggaaggacgacaggaagcaataatgttgagatcctatggaggtggaggccaccaccagacgagtttgtgatgttggacgcaatccatcccctcgtcggtggccgtaacgggaacccctgcggtagctagcattagcagtagtaataatagtaggctgttggttacatcatcctgttagatctcaaggtctctgtcggtaccgcatcatctagtaggcattgttgctgcttagcttttgggctctcttattaccaagggttgcatgcatgccattgtattgtactctccaattggaaaaaaaagaaaaaaaatatcatttgttcataaacacagtcaatttgtgctc

SEQ ID NO: 19646 - protein, 287 aa, Zea mays subsp. mays
  misc_feature (1)..(287): Ceres Seq. ID no. 12373990
MASFPHLTQMEHGLASGASHGTPSFFFCHGTATADSASLETSSGVLDTSPRGTSSGDNKACRKHKEDSGASFSSARSKDSNSKESSKRSGGKRDRSSKKVDEEEPKGYIHVRARRGQATDNHSLAERVRRERISERMRVLQALVPGCDKVTGKALILDEIINYVQSLQNQVEFLSMRIASLSPVLYGFGMDSSDAFSDLITQKIEGMAHHEAFAMPSSSVLNGTPSEALVDTHTSSSSPSYEVHGDGGTASVSFPQDSGSYMVQTVGEPRQELFSQVVFSNHMCPFQ

SEQ ID NO: 19647 - protein, 278 aa, Zea mays subsp. mays
  misc_feature (1)..(278): Ceres Seq. ID no. 12373991
MEHGLASGASHGTPSFFFCHGTATADSASLETSSGVLDTSPRGTSSGDNKACRKHKEDSGASFSSARSKDSNSKESSKRSGGKRDRSSKKVDEEEPKGYIHVRARRGQATDNHSLAERVRRERISERMRVLQALVPGCDKVTGKALILDEIINYVQSLQNQVEFLSMRIASLSPVLYGFGMDSSDAFSDLITQKIEGMAHHEAFAMPSSSVLNGTPSEALVDTHTSSSSPSYEVHGDGGTASVSFPQDSGSYMVQTVGEPRQELFSQVVFSNHMCPFQ

SEQ ID NO: 19648 - protein, 151 aa, Zea mays subsp. mays
  misc_feature (1)..(151): Ceres Seq. ID no. 12373992
MRVLQALVPGCDKVTGKALILDEIINYVQSLQNQVEFLSMRIASLSPVLYGFGMDSSDAFSDLITQKIEGMAHHEAFAMPSSSVLNGTPSEALVDTHTSSSSPSYEVHGDGGTASVSFPQDSGSYMVQTVGEPRQELFSQVVFSNHMCPFQ

SEQ ID NO: 19649 - DNA, 1407 bp, Zea mays subsp. mays
  misc_feature (1)..(1407): Ceres Seq. ID no. 12374005
aatcttctccccctctgcagtcttcagtcttcacttccattccaccggctccgatcccaactgccatggcgctctccatctacacgcccacctcctcctccctcgtcccgccctccattcaggaggtcaggttgacttcgcgaccgccaaagcccgcgactttcagcctacggaggccacatctggccgcgcgggccgccgctggcaacgcacccacgtccccggtccgcgaggtcgtcactgagctcgacgcggtcgccggcttcagcgagatcgtgccggacaccgtcgtgttcgatgatttcgagaggttcgcacccacggcggccacagtgagctcgtcgctgctgcttgggatcactgggctcccagacactaagttcaagagtgcgatagatactgcactggcagatggtgagtgcaacgcactggagaaggctgaggacaggatgtcctgttacctcaccaaggctcttgcaaatgttggcgctgaactggctcatcaagtccctgggagagtttcgacggaaatagatgcccggttagcttatgacacccagggcataatccacagggtacatgaactgttgaatctatacaaccaacatgatgtctcaactgaccgcctgttattcaaaattcctgctacatggcaaggcatagaggcctcaaggttgcttgaatctgaaggaattcaaacgcatctaacatttgtttacagtttcgcacaagcggcagcggcagcacaagctggtgcatctgtagtacaaatgtttgtgggccgattgcgggactgggcaaggcatcactctggtgacccagagatagatgaagctttgaagaatggagaagatgctgggctttctttggcgaagaaagtatatgcctatattcacaggaatgggtacaaaacaaagctgatggccgctgccatacggaacaagcaggacgtatttagccttctggggattgattacattattgcaccactgaagatattgcagtctctggaagaatctgtcaccgatcccgatgtgaagtacggctatgtcccgaagttgactcctgctattggcaagacgtacaacttcactgaagaggagcttgtgaagtgggaccagctgagcctgtcagctgccatggggccagctgtagaagaactgcttgcttcagggctagaggggtacgtgaaccaagcacgccgcgttgaggagctctttgggaagatctggccacctcccaatgtttaacaacggcgtcgagagcaatagcaatgtgatttgcctggcaggctcacaatgctgcgcggaagacgctttgcttcttctttttggataatacacgaagcactcccgtgtttacgttgacttgacttgcagtgtgcatttattctgtttttttttttgt

SEQ ID NO: 19650 - protein, 415 aa, Zea mays subsp. mays
  misc_feature (1)..(415): Ceres Seq. ID no. 12374006
SSPPLQSSVFTSIPPAPIPTAMALSIYTPTSSSLVPPSIQEVRLTSRPPKPATFSLRRPHLAARAAAGNAPTSPVREVVTELDAVAGFSEIVPDTVVFDDFERFAPTAATVSSSLLLGITGLPDTKFKSAIDTALADGECNALEKAEDRMSCYLTKALANVGAELAHQVPGRVSTEIDARLAYDTQGIIHRVHELLNLYNQHDVSTDRLLFKIPATWQGIEASRLLESEGIQTHLTFVYSFAQAAAAAQAGASVVQMFVGRLRDWARHHSGDPEIDEALKNGEDAGLSLAKKVYAYIHRNGYKTKLMAAAIRNKQDVFSLLGIDYIIAPLKILQSLEESVTDPDVKYGYVPKLTPAIGKTYNFTEEELVKWDQLSLSAAMGPAVEELLASGLEGYVNQARRVEELFGKIWPPPNV

SEQ ID NO: 19651 - protein, 394 aa, Zea mays subsp. mays
  misc_feature (1)..(394): Ceres Seq. ID no. 12374007
MALSIYTPTSSSLVPPSIQEVRLTSRPPKPATFSLRRPHLAARAAAGNAPTSPVREVVTELDAVAGFSEIVPDTVVFDDFERFAPTAATVSSSLLLGITGLPDTKFKSAIDTALADGECNALEKAEDRMSCYLTKALANVGAELAHQVPGRVSTEIDARLAYDTQGIIHRVHELLNLYNQHDVSTDRLLFKIPATWQGIEASRLLESEGIQTHLTFVYSFAQAAAAAQAGASVVQMFVGRLRDWARHHSGDPEIDEALKNGEDAGLSLAKKVYAYIHRNGYKTKLMAAAIRNKQDVFSLLGIDYIIAPLKILQSLEESVTDPDVKYGYVPKLTPAIGKTYNFTEEELVKWDQLSLSAAMGPAVEELLASGLEGYVNQARRVEELFGKIWPPPNV

SEQ ID NO: 19652 - protein, 266 aa, Zea mays subsp. mays
  misc_feature (1)..(266): Ceres Seq. ID no. 12374008
MSCYLTKALANVGAELAHQVPGRVSTEIDARLAYDTQGIIHRVHELLNLYNQHDVSTDRLLFKIPATWQGIEASRLLESEGIQTHLTFVYSFAQAAAAAQAGASVVQMFVGRLRDWARHHSGDPEIDEALKNGEDAGLSLAKKVYAYIHRNGYKTKLMAAAIRNKQDVFSLLGIDYIIAPLKILQSLEESVTDPDVKYGYVPKLTPAIGKTYNFTEEELVKWDQLSLSAAMGPAVEELLASGLEGYVNQARRVEELFGKIWPPPNV

SEQ ID NO: 19653 - DNA, 1558 bp, Zea mays subsp. mays
  misc_feature (1)..(1558): Ceres Seq. ID no. 12374009
aagctataggcgaaacttcgggggtcgtcgagggttctcgaccctcccttcccctctctcgcccgctcgctccctcaccgccggcgttctcgccgccagctacggacggggcacactgcgcagggtcccagccccgcctctcacccgaacgtcttcgctcccctcaccgggtaggcgtcgcgctctactggcaccaccccggccctcgcgctctactggcaccggaccggcgcggggtggcgcggagacctgtcccggccaggagaccgttccgtgctataccggtgaagatgctctttgcatagctcaagctccaaactgatggattctgatgacaagaagtttggaaatgggccaagggagcttactggtgctgttgatttgattaaccactacaaactgctgccacaccatgatttcttttgcaagaaacctttgccactggcaatatcagatacacattatcttcacaatattgtgggagacactgaaattcgaaaaggagaaggaatggagttagatcaacttgttcagaatgcatatatgagggataaacctgcttatattcagcccttcgatatggaaacactggggcaagcgttccaacttcgagaaacagctcctgtggttttgccctctactgaaaagggtataccgactatttcgggtaaaccaaaaagcgagtccaaggacaaagagaagaagcataaaaagcacaaagacagagagagggacaaagacaaggaacataagaagcacaaacatcggcataaggatcgaagtaaggacaaagataaagacaaagacaaggataagaaaaaagataagagtggtcatcatgattctgattcaaagaaacatcatgaaaagaagaggaagcacgagggaactgaagattcagcagatgtgcataagcacaagaagagtaagcacaagagttccaaaaccgatgagatggggaatggacttattagttaacacttcctagttctagcttcaatccttgtaatttgctgttaaaaggagactgatggtctctgccatcaaaaccctgtgcagaatagtgatgacaacataaaagttggagatcttgataagaacgcgataaagaagtatttttgcagagtccattccgaggaaaattaaattacttaatacaggactaatccttcgaactgtgcaaccttctgttcctccctgacgaattggttgtaggagcggttgaaaggatatgccatgagattgtttcgattgcagggccagcgcacttattgatactaggcttcttatttaactcctaatttcggatgtagcgtgcatgagtatcctgttgagtagctgtggatggttttacagttggtctagagatgtagttgagggcagggaattggaaagaatttcgtgttcccgtcgtactgaccttggttgatagagagtttaaccagtagctaaattaaatgttgctagtcagttccaagtttattctgcgtggaatgaattggagtcaaattagcacactgcttatttaaccatgataaagatcttgttattacaaagt

SEQ ID NO: 19654 - protein, 218 aa, Zea mays subsp. mays
  misc_feature (1)..(218): Ceres Seq. ID no. 12374010
MDSDDKKFGNGPRELTGAVDLINHYKLLPHHDFFCKKPLPLAISDTHYLHNIVGDTEIRKGEGMELDQLVQNAYMRDKPAYIQPFDMETLGQAFQLRETAPVVLPSTEKGIPTISGKPKSESKDKEKKHKKHKDRERDKDKEHKKHKHRHKDRSKDKDKDKDKDKKKDKSGHHDSDSKKHHEKKRKHEGTEDSADVHKHKKSKHKSSKTDEMGNGLIS

SEQ ID NO: 19655 - protein, 155 aa, Zea mays subsp. mays
  misc_feature (1)..(155): Ceres Seq. ID no. 12374011
MELDQLVQNAYMRDKPAYIQPFDMETLGQAFQLRETAPVVLPSTEKGIPTISGKPKSESKDKEKKHKKHKDRERDKDKEHKKHKHRHKDRSKDKDKDKDKDKKKDKSGHHDSDSKKHHEKKRKHEGTEDSADVHKHKKSKHKSSKTDEMGNGLIS

SEQ ID NO: 19656 - protein, 144 aa, Zea mays subsp. mays
  misc_feature (1)..(144): Ceres Seq. ID no. 12374012
MRDKPAYIQPFDMETLGQAFQLRETAPVVLPSTEKGIPTISGKPKSESKDKEKKHKKHKDRERDKDKEHKKHKHRHKDRSKDKDKDKDKDKKKDKSGHHDSDSKKHHEKKRKHEGTEDSADVHKHKKSKHKSSKTDEMGNGLIS

SEQ ID NO: 19657 - DNA, 1217 bp, Zea mays subsp. mays
  misc_feature (1)..(1217): Ceres Seq. ID no. 12374035
accgccaccacacagctcccacgctcaccgacgccacagcttgtgcgcgcgcaatggcactcgtgtccgcctcctcgtcctccaccaccgccgtcgcggcgctccccaggaatgggcagcagcgggcgtcgtcgtcgttgttctcctcctcctcctcttcctccttcctcgtcggcaagacgctgctgaggcaggccgaggcagcccggccgtcgttcgccgtgcgcgccgcggcggattccgacaggccgatctggttccccggcagcacccctccgccgtggctcgacggcagccttcccggcgacttcggctttgatccctggggcctcggatctgacccggagagcctgcggtggaacgtgcaggcggagctggtgcactgccggtgggcgatgctcggcgcggcgggtatcttcatcccggagttcctgaccaagatcggcgtcctcaacacgcccttctgggtacaccgccggcgagcagcagtacttcaccgacaccaccaccctcttcatcatcgagctcatcctcatcggctgggccgagggccgccgttgggctgacatcatcaagcccggaagcgtcaacaccgatcccatcttccccagcaacaagctcaccggcaccgacgtcgggtaccctggtggcctgtggtttgacccgctcggctggggctccggctcgccggagaagatcaaggagctgcgcaccaaggagatcaagaacggacgcctcgccatgctcgccgtcatgggcgcttggttccaggccgagtacaccggcaccggccccatcgacaacctcttcgcccacctcgccgaccctggccacgccaccatcttccaggccttcacccccaaatgaggagctctgatgaacttggcagttcgaggagtgctaccacacatgcatgcattgttaggtttgatggccgatatggaactttttctttttgttgggggcggactactgggtagactgtcaacgatgatgatgatgatgatgaaatgttcgtggtgcgatgcatggtgtacttgtactatgttgtaactaatgtaaaaatgcgatggtcgttagatgctatgtcctcttaattaaggcggacctacatgcaagtaaggatgcaaataagggtattcagtatttaattgaatactcattattttttgcaaaaaaatatgtatacatgtatatgttactagccagttgttcgg

SEQ ID NO: 19658 - protein, 187 aa, Zea mays subsp. mays
  misc_feature (1)..(187): Ceres Seq. ID no. 12374036
RHHTAPTLTDATACARAMALVSASSSSTTAVAALPRNGQQRASSSLFSSSSSSSFLVGKTLLRQAEAARPSFAVRAAADSDRPIWFPGSTPPPWLDGSLPGDFGFDPWGLGSDPESLRWNVQAELVHCRWAMLGAAGIFIPEFLTKIGVLNTPFWVHRRRAAVLHRHHHPLHHRAHPHRLGRGPPLG

SEQ ID NO: 19659 - protein, 170 aa, Zea mays subsp. mays
  misc_feature (1)..(170): Ceres Seq. ID no. 12374037
MALVSASSSSTTAVAALPRNGQQRASSSLFSSSSSSSFLVGKTLLRQAEAARPSFAVRAAADSDRPIWFPGSTPPPWLDGSLPGDFGFDPWGLGSDPESLRWNVQAELVHCRWAMLGAAGIFIPEFLTKIGVLNTPFWVHRRRAAVLHRHHHPLHHRAHPHRLGRGPPLG

SEQ ID NO: 19660 - protein, 105 aa, Zea mays subsp. mays
  misc_feature (1)..(105): Ceres Seq. ID no. 12374038
PPPHSSHAHRRHSLCARNGTRVRLLVLHHRRRGAPQEWAAAGVVVVVLLLLLFLLPRRQDAAEAGRGSPAVVRRARRGGFRQADLVPRQHPSAVARRQPSRRLRL

SEQ ID NO: 19661 - DNA, 1153 bp, Zea mays subsp. mays
  misc_feature (1)..(1153): Ceres Seq. ID no. 12374047
agggtgattggggagcttgtcaaggtgctgaagattacacctgtacctgttgtgtttgcgtcgttttcgggagggccaaaagggtgcacatacaaggttttcagctgatcgagagaagatgtgaagggcaactaagcatggatgagtaccagctcgtacaagattgtctatgcggacaaatgtatgattcaagccctgtggattttgtcagtgacttgggcactcgcttcctcctcgatccaagtgtcctgaagatgtctgaacctcctcgtgtcttgtcatggatgactaagggcattgcctcaggtcttgatgttcttttcataaacaaatttgaagaacaacgtaaagattattgggaaacactatactcatcggtgcattttggtccaatactaatactctgctcagaggatgatcaacttgctacatattcagttgttcaaaattttggccagcatctgctagagcttggtggtgatgtgagcctaattaaatggcatagttctccgcatgtcggccactacaagcaccatcctgaggaatacagagctgctgtgacggagctcctaaagaaagcctcgacgctctacgcgagcagacgacaactcaacggacacgccgtgggcacaagcgagcacaccgacgcgcctgcatccacctccaagtccaacccacacagagatgccgcgagttctgtcggtcgtagcaggctgattcaagcaccggccgatccagccggccagtttccttccataccgagctccatggagtaccacgagagcagcagccaaggtccgccgcagccggagctgttcagcatgcccggcgtggagagctcgggcctgcgttgtgcggtgctggggcaggcgctgtacggtgtctgtgttccgaaggacgtagaagacggctgggacctcgcgccgccttccgcgtcgtcggatgcgttgtggggtgctgctgctgctgccgcgccgcctcgccgtggtagcttccgtccgatgagatgtgtacggcgctcgagattgtgatattgtgcgtgcgttttagtttaaaaattaaggtgagcaacaaatattgagaacggagggagtagtacgtattctctatacaaatcaatataaatatggtgatcgtaatggtctattcctct

SEQ ID NO: 19662 - protein, 342 aa, Zea mays subsp. mays
  misc_feature (1)..(342): Ceres Seq. ID no. 12374048
GDWGACQGAEDYTCTCCVCVVFGRAKRVHIQGFQLIERRCEGQLSMDEYQLVQDCLCGQMYDSSPVDFVSDLGTRFLLDPSVLKMSEPPRVLSWMTKGIASGLDVLFINKFEEQRKDYWETLYSSVHFGPILILCSEDDQLATYSVVQNFGQHLLELGGDVSLIKWHSSPHVGHYKHHPEEYRAAVTELLKKASTLYASRRQLNGHAVGTSEHTDAPASTSKSNPHRDAASSVGRSRLIQAPADPAGQFPSIPSSMEYHESSSQGPPQPELFSMPGVESSGLRCAVLGQALYGVCVPKDVEDGWDLAPPSASSDALWGAAAAAAPPRRGSFRPMRCVRRSRL

SEQ ID NO: 19663 - protein, 297 aa, Zea mays subsp. mays
  misc_feature (1)..(297): Ceres Seq. ID no. 12374049
MDEYQLVQDCLCGQMYDSSPVDFVSDLGTRFLLDPSVLKMSEPPRVLSWMTKGIASGLDVLFINKFEEQRKDYWETLYSSVHFGPILILCSEDDQLATYSVVQNFGQHLLELGGDVSLIKWHSSPHVGHYKHHPEEYRAAVTELLKKASTLYASRRQLNGHAVGTSEHTDAPASTSKSNPHRDAASSVGRSRLIQAPADPAGQFPSIPSSMEYHESSSQGPPQPELFSMPGVESSGLRCAVLGQALYGVCVPKDVEDGWDLAPPSASSDALWGAAAAAAPPRRGSFRPMRCVRRSRL

SEQ ID NO: 19664 - protein, 283 aa, Zea mays subsp. mays
  misc_feature (1)..(283): Ceres Seq. ID no. 12374050
MYDSSPVDFVSDLGTRFLLDPSVLKMSEPPRVLSWMTKGIASGLDVLFINKFEEQRKDYWETLYSSVHFGPILILCSEDDQLATYSVVQNFGQHLLELGGDVSLIKWHSSPHVGHYKHHPEEYRAAVTELLKKASTLYASRRQLNGHAVGTSEHTDAPASTSKSNPHRDAASSVGRSRLIQAPADPAGQFPSIPSSMEYHESSSQGPPQPELFSMPGVESSGLRCAVLGQALYGVCVPKDVEDGWDLAPPSASSDALWGAAAAAAPPRRGSFRPMRCVRRSRL

SEQ ID NO: 19665 - DNA, 1312 bp, Zea mays subsp. mays
  misc_feature (1)..(1312): Ceres Seq. ID no. 12374092
gactctcgagagatagagcgaggcaccaagaaggggaaaaagagggacaggaaaaaaaaatcattctcgtttcgcgctgtccgctagaccccgcccgaatcaatggagattagggctccgccgacgagcctgaggctcgcgccgccgcccgcctccgccagcttccgccgaaccccgcttaggacctccttccttcgcggcagcgtgtcacttaaagttgtgcaagtacggcagtcaaatgtcaacagatttaagtgcaatagcatacgaagtaacctctttgataggctaacaagggttgtcaggtcctacgcaaatgcagttctaagttcgtttgaagaccctgagaagattctagaccaggcagttctggagatgaatgatgacttgacaaagatgcggcaggccactgcacaggtcttggcatctcaaaagcggcttgagaataaatctaaagctgcagaacaagcttctgctgattggtatcggagggctcaacttgctcttcaaaagggtgacgaggatcttgctcgtgaagcccttaagcggcgtaaatcatatgctgacaatgcaagctccttaagatcccagcttgatcagcagaagggtgtagttgaaaatctgatttcaaatacccggcttcttgagagcaagatatcagaggccaagcagaaaaaggataccctaaaagctcgtgctcaatcagcaaagactgctacaaaagtgagtgaaatgttgggcaacgtgaatacaagtagcgccctttctgcatttgagaaaatggaggaaaaagttatggcgatggaatcccaagcagaggcactcggccagttagcaactgatgatttagaaggaaagtttgcactgcttgagacttcatctgttgatgatgatctttcacaactgaaaaaggaattgtctggaagctctttgaaaggagagcttcctccaggcagaacagcggtcagcaactcaggtgctgggcgccctttccccgacctagagattgaaagcgagctaaacgagctgcggaggaaagccaaggaatattaggctcattccttgtcgattcagcaggcctgacggaatctcacttccaagaaaatatagtgcagctgcagattgctccattgcgcgtttcgaaagttgaaacacaagtgcgcattgactgtttgttaaagagtatggaatcggctaatttctcggcattttcccccctcgagtgacatttgtacagctatccataaaattgttgtaaatcactactctctctacagcctttttttgcatatatatatatagtcaaagttcg

SEQ ID NO: 19666 - protein, 316 aa, Zea mays subsp. mays
  misc_feature (1)..(316): Ceres Seq. ID no. 12374093
MEIRAPPTSLRLAPPPASASFRRTPLRTSFLRGSVSLKVVQVRQSNVNRFKCNSIRSNLFDRLTRVVRSYANAVLSSFEDPEKILDQAVLEMNDDLTKMRQATAQVLASQKRLENKSKAAEQASADWYRRAQLALQKGDEDLAREALKRRKSYADNASSLRSQLDQQKGVVENLISNTRLLESKISEAKQKKDTLKARAQSAKTATKVSEMLGNVNTSSALSAFEKMEEKVMAMESQAEALGQLATDDLEGKFALLETSSVDDDLSQLKKELSGSSLKGELPPGRTAVSNSGAGRPFPDLEIESELNELRRKAKEY

SEQ ID NO: 19667 - protein, 225 aa, Zea mays subsp. mays
  misc_feature (1)..(225): Ceres Seq. ID no. 12374094
MNDDLTKMRQATAQVLASQKRLENKSKAAEQASADWYRRAQLALQKGDEDLAREALKRRKSYADNASSLRSQLDQQKGVVENLISNTRLLESKISEAKQKKDTLKARAQSAKTATKVSEMLGNVNTSSALSAFEKMEEKVMAMESQAEALGQLATDDLEGKFALLETSSVDDDLSQLKKELSGSSLKGELPPGRTAVSNSGAGRPFPDLEIESELNELRRKAKEY

SEQ ID NO: 19668 - protein, 218 aa, Zea mays subsp. mays
  misc_feature (1)..(218): Ceres Seq. ID no. 12374095
MRQATAQVLASQKRLENKSKAAEQASADWYRRAQLALQKGDEDLAREALKRRKSYADNASSLRSQLDQQKGVVENLISNTRLLESKISEAKQKKDTLKARAQSAKTATKVSEMLGNVNTSSALSAFEKMEEKVMAMESQAEALGQLATDDLEGKFALLETSSVDDDLSQLKKELSGSSLKGELPPGRTAVSNSGAGRPFPDLEIESELNELRRKAKEY

SEQ ID NO: 19669 - DNA, 1477 bp, Zea mays subsp. mays
  misc_feature (1)..(1477): Ceres Seq. ID no. 12374112
aagccacttggcgcacgcgctgacgcgcacccgcaccagcctctagtcggccagtcgggacgaagcctctcgaacgagcgaggccacgaggtgcccgccgcgcccagccggcctcgccgaccgggcccgccggcccctatataggcaggcgccacttcctcctcgcaaccaccagacgccagtccaccaccgcttcccgtgcagcgccctccctctacgttcccccatttcctgtgttggcggcgatggcgcggcacttcgtgctcaacaccggcgccaagatcccctccgtggggctcggcacctggcagtctgaccccggcgtcgttggcaacgctgtctacgccgccgtcaaggcgggttaccgacatatcgattgtgccagagtttacggcaacgaaaaggagattggtttggcgctgaagaagctatttgaagagggtgtagtgaagcgagaagatctgtttatcacctctaagctatggaatgatcatcatgctcctgaagatgtgcctgaggcactaaatgacagcctgaatgatttgcagcttgagtacctggatctttatcttatccattggccatttagagtcaagaagggaacaaataccagccctgaaaattttgttacacctgacttccctgctacttggggggcaatggaaaagttatatgatgctggcaaagctcgcgctattggtgtgagtaacttctcctcaaagaaattgggtgacttgcttgctgtagctcgtgtacctccagctgttgatcaggtggaatgtcatcctggttggcagcaaactaagctccatagcttttgtcagtcaactggtgttcatctaactgcttactcaccactaggttcacctggtacaacttggatgaatggtaatgtccttaaagaaccaataatcatctcaatagctgagaaactcgggaaaacttctgcacaagtggctctgcgctggaacattcagatgggtcacagtgttcttccaaagagcacgaatgaagaaaggataaagcaaaaccttgatgtttatgattggtcaattccagatgacttgcttgcaaagttctctgagattaagcaggctaggctacttagaggcaacttcattgtgaatccagagagcgtttacaagacccatgaggagctctgggatggtgaactttaggaaggacgccgttgtccgtcctgactcctgagcagggagcaagcagcgttccattagggcccgtcagatcatttcacctccaaagttgctcttttgaaatgaaggttcagtgctcggaagctctggtgccatcctgtatcacgaactattgagaaatttatcggtgattttactttgtgctacgggatgtgctgctgcagtctatcctagtgtcagttgatttttctggtaaaactgtgaccaaataagttaattcgccaggcatcattactattggaatttcatcgttttatctccgc

SEQ ID NO: 19670 - protein, 310 aa, Zea mays subsp. mays
  misc_feature (1)..(310): Ceres Seq. ID no. 12374113
MARHFVLNTGAKIPSVGLGTWQSDPGVVGNAVYAAVKAGYRHIDCARVYGNEKEIGLALKKLFEEGVVKREDLFITSKLWNDHHAPEDVPEALNDSLNDLQLEYLDLYLIHWPFRVKKGTNTSPENFVTPDFPATWGAMEKLYDAGKARAIGVSNFSSKKLGDLLAVARVPPAVDQVECHPGWQQTKLHSFCQSTGVHLTAYSPLGSPGTTWMNGNVLKEPIIISIAEKLGKTSAQVALRWNIQMGHSVLPKSTNEERIKQNLDVYDWSIPDDLLAKFSEIKQARLLRGNFIVNPESVYKTHEELWDGEL

SEQ ID NO: 19671 - protein, 172 aa, Zea mays subsp. mays
  misc_feature (1)..(172): Ceres Seq. ID no. 12374114
MEKLYDAGKARAIGVSNFSSKKLGDLLAVARVPPAVDQVECHPGWQQTKLHSFCQSTGVHLTAYSPLGSPGTTWMNGNVLKEPIIISIAEKLGKTSAQVALRWNIQMGHSVLPKSTNEERIKQNLDVYDWSIPDDLLAKFSEIKQARLLRGNFIVNPESVYKTHEELWDGEL

SEQ ID NO: 19672 - DNA, 1913 bp, Zea mays subsp. mays
  misc_feature (1)..(1913): Ceres Seq. ID no. 12374119
aattccgtccacagaagaagaatccttctcgacgccgcccccattcattcttggagggcaagaagaacgcgcagtccaaaagcgaaacaaggggaaggggcgaggcagccaaacgaatcccagcacctgcctctcctttgcttgcgcagatctagcgatggcggcgggcggtgagttggcgtggggggaggagcccgtggcgcggcgccggcctaagaccaagatcgtctgcacgctcggcccggcgtcgcgatccgtcgagatgatctcgcgcctgctgcgcgccgggatgtgcgtcgcgcgcttcaacttctcccatggctcccacgagtaccaccaggagacgctcgacaacctgcacgccgccatggagctcaccgggatcctctgcgccgttatgctcgacaccaagggtccagagattagaactggatttttgaaagatgggaatcctattcaattgataaaaggccaagaaatcacaatttctacagactatagcattcagggtgatgagaaaatgatatcaatgagctacaagaagcttgctgttgatctgaagccaggcagtgtcatattgtgtgctgatggtaccatcactcttactgttcttcactgtgataaagaacaaggcttggttcgctgccgctgtgagaacactttcaagcttggcgagaggaagaatgttaatcttccaggagttattgttgatctccccacactcacagacaaggacaaggaggacatccttaaatggggtgttccaaacaagattgacatgattgccttgtcatttgttcggaagggttcggatcttgtggaggttaggaaggtacttggtgagcatgccaagtccataatgctgatgtcaaaggttgagaatcaagagggagtagctaactttgatgatatcctggcaaactctgatgcttttatggtggcaagaggtgatttaggaatggaaattcctatagagaagattttctttgcacagaaggtgatgattttcaagtgcaatattcaaggcaagcctgttgtgactgcaacccagatgttggaatctatgatcaagtctcctcgccctactcgggcagaagcaacggatgttgcaaacgcagttcttgatggcacagactgtgttatgctcagtggtgagactgctgctggggcttatccagagttggcggtgcagactatggctaagatctgcctgcaagcagagtcttgcgtagaccatgctgctattttcaaatcaatcatggcttcagctccaattccaatgagtccattggagagccttgcatcatcagctgttcgcacagcaaactctgccagggcagcacttatcttggtcctgaccaggggaggaactactgctaggcttgtagccaagtataggccatccatgccgattctgtccgttgtggttcctgagctgaagacagactcgttcgactgggcctgcagtgacgagggtccggcaaggcacagcctcattgtgaggggtgtcatcccaatgctgagtgccgccactgccaaggcctttgacaacgaagccactgacgaagctattggttttgccattgaaaatgcgaagacgatggggctatgcaacaccggtcaatccgttgtggccctgcaccgcatcgggatttcatccgtcatcaagcttcttactgtgaagtaggggtccaagggtgagggacaccattttgcttggtgaatttttgtgaggctgcttacgcacatcagcgtatccacagcttttctgttgccaaagatacagactttgcgttctggtacaccttggtgttacaagggttgtgggaatttgtcgtttagatattagcgatttaaacagtttatcaactgctatagctaattaatttgcagctgtgctgcaactttatcgt

SEQ ID NO: 19673 - protein, 561 aa, Zea mays subsp. mays
  misc_feature (1)..(561): Ceres Seq. ID no. 12374120
IPSTEEESFSTPPPFILGGQEERAVQKRNKGKGRGSQTNPSTCLSFACADLAMAAGGELAWGEEPVARRRPKTKIVCTLGPASRSVEMISRLLRAGMCVARFNFSHGSHEYHQETLDNLHAAMELTGILCAVMLDTKGPEIRTGFLKDGNPIQLIKGQEITISTDYSIQGDEKMISMSYKKLAVDLKPGSVILCADGTITLTVLHCDKEQGLVRCRCENTFKLGERKNVNLPGVIVDLPTLTDKDKEDILKWGVPNKIDMIALSFVRKGSDLVEVRKVLGEHAKSIMLMSKVENQEGVANFDDILANSDAFMVARGDLGMEIPIEKIFFAQKVMIFKCNIQGKPVVTATQMLESMIKSPRPTRAEATDVANAVLDGTDCVMLSGETAAGAYPELAVQTMAKICLQAESCVDHAAIFKSIMASAPIPMSPLESLASSAVRTANSARAALILVLTRGGTTARLVAKYRPSMPILSVVVPELKTDSFDWACSDEGPARHSLIVRGVIPMLSAATAKAFDNEATDEAIGFAIENAKTMGLCNTGQSVVALHRIGISSVIKLLTVK

SEQ ID NO: 19674 - protein, 509 aa, Zea mays subsp. mays
  misc_feature (1)..(509): Ceres Seq. ID no. 12374121
MAAGGELAWGEEPVARRRPKTKIVCTLGPASRSVEMISRLLRAGMCVARFNFSHGSHEYHQETLDNLHAAMELTGILCAVMLDTKGPEIRTGFLKDGNPIQLIKGQEITISTDYSIQGDEKMISMSYKKLAVDLKPGSVILCADGTITLTVLHCDKEQGLVRCRCENTFKLGERKNVNLPGVIVDLPTLTDKDKEDILKWGVPNKIDMIALSFVRKGSDLVEVRKVLGEHAKSIMLMSKVENQEGVANFDDILANSDAFMVARGDLGMEIPIEKIFFAQKVMIFKCNIQGKPVVTATQMLESMIKSPRPTRAEATDVANAVLDGTDCVMLSGETAAGAYPELAVQTMAKICLQAESCVDHAAIFKSIMASAPIPMSPLESLASSAVRTANSARAALILVLTRGGTTARLVAKYRPSMPILSVVVPELKTDSFDWACSDEGPARHSLIVRGVIPMLSAATAKAFDNEATDEAIGFAIENAKTMGLCNTGQSVVALHRIGISSVIKLLTVK

SEQ ID NO: 19675 - protein, 474 aa, Zea mays subsp. mays
  misc_feature (1)..(474): Ceres Seq. ID no. 12374122
MISRLLRAGMCVARFNFSHGSHEYHQETLDNLHAAMELTGILCAVMLDTKGPEIRTGFLKDGNPIQLIKGQEITISTDYSIQGDEKMISMSYKKLAVDLKPGSVILCADGTITLTVLHCDKEQGLVRCRCENTFKLGERKNVNLPGVIVDLPTLTDKDKEDILKWGVPNKIDMIALSFVRKGSDLVEVRKVLGEHAKSIMLMSKVENQEGVANFDDILANSDAFMVARGDLGMEIPIEKIFFAQKVMIFKCNIQGKPVVTATQMLESMIKSPRPTRAEATDVANAVLDGTDCVMLSGETAAGAYPELAVQTMAKICLQAESCVDHAAIFKSIMASAPIPMSPLESLASSAVRTANSARAALILVLTRGGTTARLVAKYRPSMPILSVVVPELKTDSFDWACSDEGPARHSLIVRGVIPMLSAATAKAFDNEATDEAIGFAIENAKTMGLCNTGQSVVALHRIGISSVIKLLTVK

SEQ ID NO: 19676 - DNA, 1710 bp, Zea mays subsp. mays
  misc_feature (1)..(1710): Ceres Seq. ID no. 12374127
atatggcgacaatggcagggcgtcttgttgcccggacgtcgtcctcctcggccaagcgccagcggttcagctccgctgttctcctcctcgctctcttccagagctcgtggtgctacgacgacgcggcggcgacgacgacggtggattacggttacaacaacgagcacgaggccgaccgggtggcgttcctccccgggcagccgaggagccctccggtgtcgcagttcgccgggtacgtcaccgtgaacgagcgcaacgggagggcgctcttctactggttcttcgaggcccagacgtcgccggcgcacaagcctctcctactctggctcaatggaggacctggttgctcgtccgttgggtacggagctgcttctgagttggggcctctcagagtcaacagacacggggcagggcttgagttcaacaattttgcgtggaacaaagaggccaacttgctcttcctagagtctcctgctggggttggcttctcctacaccaacacatcatccgacctcaccaaactggatgatgctttcgtagctgaagatgcatacagcttcctagtaaattggctcaaaaggtttccgcagtataggagccacgaattttatatctccggggagagctacgcaggtcactatgtgccacaacttgctgaacttgtctatgacaggaacaagggcaacaccaacacacacatcaaccttaaaggtttcatggtcggtaatccactaactgacgactactacgactcaaaggggctggctgaatatgcttggagccactcagtagtgtcagacgaagtttacgagcgcatcaagaaggtctgcgacttcagggtctcaaactggaccgatgactgcgatacagcgatgagcgccgtgttcagccagtaccaggagatcgacatctacaacatctacgcgcccagatgcaacctccctccgtcgtcagctgcacttgcacttgctgttgacaaggcagtcgtagccaacagacaggaacatttcaggcgaaggatcaggatgttctccggatatgacccgtgctactcttcgaacgcggaaaagtacttcaacgatgcaggtgtgcagacggcattccatgcgaatgccagtggagctcggaaatgggaagtttgcagtgattcaattttgaggtcatacaatttctcggtgctttctgtcttaccaatctactctaagctcatcaaagcaggactgagagtgtggctctacagtggggatgcagatggtagggtcccggtgatcggatcgcggtattgcgtggaagccctaggcctgcctgtcaagacgcagtggcaaccatggtacctgaacaaacaggttgcgggcagatttgtggagtaccatggcatgacgatggtgacgatcagaggagcagggcatttggtgcctctcaacaaacctgcagaagggctcgcactcatcgacacattccttcagggcaaacagcttcccacacacagatgacaagagtacttagggttgtgattgtgatgagggttattgttttcaaaaaaaaaatcaaggattggacaaactatgtgccccacacacacgggctaatcagtaaggatttcatttccagtttctgcataaattgggttggctacaaatagagctgcggtctgaaatacaattttcagcttacataaaaaatattaaatgaataagtatgataaaacct

SEQ ID NO: 19677 - protein, 496 aa, Zea mays subsp. mays
  misc_feature (1)..(496): Ceres Seq. ID no. 12374128
MATMAGRLVARTSSSSAKRQRFSSAVLLLALFQSSWCYDDAAATTTVDYGYNNEHEADRVAFLPGQPRSPPVSQFAGYVTVNERNGRALFYWFFEAQTSPAHKPLLLWLNGGPGCSSVGYGAASELGPLRVNRHGAGLEFNNFAWNKEANLLFLESPAGVGFSYTNTSSDLTKLDDAFVAEDAYSFLVNWLKRFPQYRSHEFYISGESYAGHYVPQLAELVYDRNKGNTNTHINLKGFMVGNPLTDDYYDSKGLAEYAWSHSVVSDEVYERIKKVCDFRVSNWTDDCDTAMSAVFSQYQEIDIYNIYAPRCNLPPSSAALALAVDKAVVANRQEHFRRRIRMFSGYDPCYSSNAEKYFNDAGVQTAFHANASGARKWEVCSDSILRSYNFSVLSVLPIYSKLIKAGLRVWLYSGDADGRVPVIGSRYCVEALGLPVKTQWQPWYLNKQVAGRFVEYHGMTMVTIRGAGHLVPLNKPAEGLALIDTFLQGKQLPTHR

SEQ ID NO: 19678 - protein, 493 aa, Zea mays subsp. mays
  misc_feature (1)..(493): Ceres Seq. ID no. 12374129
MAGRLVARTSSSSAKRQRFSSAVLLLALFQSSWCYDDAAATTTVDYGYNNEHEADRVAFLPGQPRSPPVSQFAGYVTVNERNGRALFYWFFEAQTSPAHKPLLLWLNGGPGCSSVGYGAASELGPLRVNRHGAGLEFNNFAWNKEANLLFLESPAGVGFSYTNTSSDLTKLDDAFVAEDAYSFLVNWLKRFPQYRSHEFYISGESYAGHYVPQLAELVYDRNKGNTNTHINLKGFMVGNPLTDDYYDSKGLAEYAWSHSVVSDEVYERIKKVCDFRVSNWTDDCDTAMSAVFSQYQEIDIYNIYAPRCNLPPSSAALALAVDKAVVANRQEHFRRRIRMFSGYDPCYSSNAEKYFNDAGVQTAFHANASGARKWEVCSDSILRSYNFSVLSVLPIYSKLIKAGLRVWLYSGDADGRVPVIGSRYCVEALGLPVKTQWQPWYLNKQVAGRFVEYHGMTMVTIRGAGHLVPLNKPAEGLALIDTFLQGKQLPTHR

SEQ ID NO: 19679 - protein, 258 aa, Zea mays subsp. mays
  misc_feature (1)..(258): Ceres Seq. ID no. 12374130
MVGNPLTDDYYDSKGLAEYAWSHSVVSDEVYERIKKVCDFRVSNWTDDCDTAMSAVFSQYQEIDIYNIYAPRCNLPPSSAALALAVDKAVVANRQEHFRRRIRMFSGYDPCYSSNAEKYFNDAGVQTAFHANASGARKWEVCSDSILRSYNFSVLSVLPIYSKLIKAGLRVWLYSGDADGRVPVIGSRYCVEALGLPVKTQWQPWYLNKQVAGRFVEYHGMTMVTIRGAGHLVPLNKPAEGLALIDTFLQGKQLPTHR

SEQ ID NO: 19680 - DNA, 1514 bp, Zea mays subsp. mays
  misc_feature (1)..(1514): Ceres Seq. ID no. 12374131
aatcgcaagctcaagcaaaaacacaaagcgcttaaaccacactcaaaccaaccgccaacaaacaggcctcctagtcccgaccagaacttgctcgtagccccgcccccgagaacccgacagcgcgagatggctcccgagctgatgacagccaagatgaccgccaaggccgcggcggcggcggcggcggtgaagcctgccacgagggcgtacgtgacgttccttgcgggcgncggcgactactggaagggcgtggtggggctggccaagggcctgcgcaaggtccgctcggcctaccccctggtggtggcggtgctgcccgacgtgcccgagtcccaccgccgcatcctcgtctcgcagggctgcgtcgtccgcgagatcgagcccgtgtacccgcctgagaaccagacgcagttcgccatggcgtactacgtcatcaactactccaagctccgcatctgggagttcgtggagtacgagaggatggtgtacctggacgcggacatccaggtgttcgagaacatcgacggcctgttcgagctcgagaaggggtacttctacgcggtgatggactgcttctgcgagaagacgtggagccacaccccgcagtacaggatcggctactgccagcagtgcccggacaaggtggcgtggccagcggcgaccgccgagctgggccctccgccgtcgctctacttcaacgccggcatgttcgtgcacgagcccagcgtggccaccgccaaggcgctcctcgacaccctccgcgtgactccgcccacccccttcgcagagcaggacttcctgaacatgttcttcagggatcagtacaggccgatccccaacgtgtacaacctcgtgctggccatgctctggaggcaccccgagaacgtgcagctggagaaggtgaaggtcgtgcactactgcgcggcggggtccaagccgtggaggttcacgggcaaggaggcgaacatggacagggaggacatcaacgccctggtgaacaagtggtgggacatctacaacgacgagacgctggacttgaagggcctgccctcgctctcgcccgacgacgacgacgaggtggaggcggtggccaagaagccgcttcgcgcggccctggcggaggccggcacggtcaagtacgtcaccgcgccctcggccgcgtgatcccgtgctctggccttcccccaccgcgcaccgtaccggtggccgcgcgctatagcttgtgtgtgtgtggccatcgcggaacataagaagaatctctcactataaaggccttcgttctgtgtttgcattttggttttggattagggtgtctaatttttcaccagttccttttccccttgtgtaagtgtggagcttactatatagctagcgcccatttcaaggtgctgcaagcgttggtcaggaattgggctagagtgtttgtcctgtaccgagggattatgtgtatttttgctatttcgctcggtaaattaatacaataataaaaaatagggagccgcaaaattatggcc

SEQ ID NO: 19681 - protein, 387 aa, Zea mays subsp. mays
  misc_feature (1)..(387): Ceres Seq. ID no. 12374132
  misc_feature (77)..(77): Xaa is any aa, unknown or other
NRKLKQKHKALKPHSNQPPTNRPPSPDQNLLVAPPPRTRQREMAPELMTAKMTAKAAAAAAAVKPATRAYVTFLAGXGDYWKGVVGLAKGLRKVRSAYPLVVAVLPDVPESHRRILVSQGCVVREIEPVYPPENQTQFAMAYYVINYSKLRIWEFVEYERMVYLDADIQVFENIDGLFELEKGYFYAVMDCFCEKTWSHTPQYRIGYCQQCPDKVAWPAATAELGPPPSLYFNAGMFVHEPSVATAKALLDTLRVTPPTPFAEQDFLNMFFRDQYRPIPNVYNLVLAMLWRHPENVQLEKVKVVHYCAAGSKPWRFTGKEANMDREDINALVNKWWDIYNDETLDLKGLPSLSPDDDDEVEAVAKKPLRAALAEAGTVKYVTAPSAA

SEQ ID NO: 19682 - protein, 345 aa, Zea mays subsp. mays
  misc_feature (1)..(345): Ceres Seq. ID no. 12374133
  misc_feature (35)..(35): Xaa is any aa, unknown or other
MAPELMTAKMTAKAAAAAAAVKPATRAYVTFLAGXGDYWKGVVGLAKGLRKVRSAYPLVVAVLPDVPESHRRILVSQGCVVREIEPVYPPENQTQFAMAYYVINYSKLRIWEFVEYERMVYLDADIQVFENIDGLFELEKGYFYAVMDCFCEKTWSHTPQYRIGYCQQCPDKVAWPAATAELGPPPSLYFNAGMFVHEPSVATAKALLDTLRVTPPTPFAEQDFLNMFFRDQYRPIPNVYNLVLAMLWRHPENVQLEKVKVVHYCAAGSKPWRFTGKEANMDREDINALVNKWWDIYNDETLDLKGLPSLSPDDDDEVEAVAKKPLRAALAEAGTVKYVTAPSAA

SEQ ID NO: 19683 - protein, 340 aa, Zea mays subsp. mays
  misc_feature (1)..(340): Ceres Seq. ID no. 12374134
  misc_feature (30)..(30): Xaa is any aa, unknown or other
MTAKMTAKAAAAAAAVKPATRAYVTFLAGXGDYWKGVVGLAKGLRKVRSAYPLVVAVLPDVPESHRRILVSQGCVVREIEPVYPPENQTQFAMAYYVINYSKLRIWEFVEYERMVYLDADIQVFENIDGLFELEKGYFYAVMDCFCEKTWSHTPQYRIGYCQQCPDKVAWPAATAELGPPPSLYFNAGMFVHEPSVATAKALLDTLRVTPPTPFAEQDFLNMFFRDQYRPIPNVYNLVLAMLWRHPENVQLEKVKVVHYCAAGSKPWRFTGKEANMDREDINALVNKWWDIYNDETLDLKGLPSLSPDDDDEVEAVAKKPLRAALAEAGTVKYVTAPSAA

SEQ ID NO: 19684 - DNA, 1362 bp, Zea mays subsp. mays
  misc_feature (1)..(1362): Ceres Seq. ID no. 12374139
gatcctatcgcatcgaatcgaaactgttccgctcccactccgatcggattcggtgggacggtggcatctatgcgcccgtcgcaccgtcgctcaaactgtataaacctgcgcccgaacacttcgagctcacccgcaacctcctccgggaagcgcgatcgccgtctcgaaggagctgaaatccaagattccaagctcttctgtcacaggttgagggaagttgaagcaaaagtctaagcaaaaatgttttacgggggatatgcttaccatggcaactcgtttgagcaaacataccgttgttatccagcatcgttttttgataagccacacctggaaggcggtgataaagtaataatgccaccttctgcccttgatcgtcttgcttccttgcacatcgagtaccctatgctatttgagctgcacaatgatgcaacccagcggatttcacactgtggtgttttggagtttgttgcagaagaaggcatgatcatcatgccctattggatgatgcaaaacatgctgcttcaagagggtgacactgtccatgtaaaaaatgcgactcttcccaagggcacatatgtgaaattgcaacctcacacaactgattttctggatatttcaaacccgaaagccatcttggaaaaaactttaagaaatttctcctgcttaaccacgggagacagcatcatggtagcctacaacaacaaacaatattatattgatattgttgaaacaaagcctgcttctgcggttagcattattgagacagactgtgaagtggactttgcgcctcctcttgattataaagaacctgagaaaccacgacaaccaacagttcctgcaagcaaggcacctgctgaagatggcaacactgcagtggaggatgaaccaaaattcaaaccatttactggttttggaaagcggttggatggaaaagcctcaaaactgcaagcatcagaggttccttccactgcactttctgcaccttcagattcaaacaaaagagcaaatcagcaaatctcagcacccgcagcttcaggagctagcaattacagtcgacagaaaactgggaaacttgtttttggttcaagtgcaagcaacaataaggaaccacaaaaggctcctgctaaagaggagcaacccgcaaagaaggacgacgagctgaggttccaagcgttcagcgggaagagctactcattgaaacgttagctgcttcagttaaccttcaaattcgccgctactctttcgtttcgtgcatggtgggtgttctggcacctggtcaccaccatgtagatatgaattgaagtatgtatatgcttatcttgatggaaacatgacagtctgtttatttaagcccaaaagttc

SEQ ID NO: 19685 - protein, 321 aa, Zea mays subsp. mays
  misc_feature (1)..(321): Ceres Seq. ID no. 12374140
MFYGGYAYHGNSFEQTYRCYPASFFDKPHLEGGDKVIMPPSALDRLASLHIEYPMLFELHNDATQRISHCGVLEFVAEEGMIIMPYWMMQNMLLQEGDTVHVKNATLPKGTYVKLQPHTTDFLDISNPKAILEKTLRNFSCLTTGDSIMVAYNNKQYYIDIVETKPASAVSIIETDCEVDFAPPLDYKEPEKPRQPTVPASKAPAEDGNTAVEDEPKFKPFTGFGKRLDGKASKLQASEVPSTALSAPSDSNKRANQQISAPAASGASNYSRQKTGKLVFGSSASNNKEPQKAPAKEEQPAKKDDELRFQAFSGKSYSLKR

SEQ ID NO: 19686 - protein, 284 aa, Zea mays subsp. mays
  misc_feature (1)..(284): Ceres Seq. ID no. 12374141
MPPSALDRLASLHIEYPMLFELHNDATQRISHCGVLEFVAEEGMIIMPYWMMQNMLLQEGDTVHVKNATLPKGTYVKLQPHTTDFLDISNPKAILEKTLRNFSCLTTGDSIMVAYNNKQYYIDIVETKPASAVSIIETDCEVDFAPPLDYKEPEKPRQPTVPASKAPAEDGNTAVEDEPKFKPFTGFGKRLDGKASKLQASEVPSTALSAPSDSNKRANQQISAPAASGASNYSRQKTGKLVFGSSASNNKEPQKAPAKEEQPAKKDDELRFQAFSGKSYSLKR

SEQ ID NO: 19687 - protein, 267 aa, Zea mays subsp. mays
  misc_feature (1)..(267): Ceres Seq. ID no. 12374142
MLFELHNDATQRISHCGVLEFVAEEGMIIMPYWMMQNMLLQEGDTVHVKNATLPKGTYVKLQPHTTDFLDISNPKAILEKTLRNFSCLTTGDSIMVAYNNKQYYIDIVETKPASAVSIIETDCEVDFAPPLDYKEPEKPRQPTVPASKAPAEDGNTAVEDEPKFKPFTGFGKRLDGKASKLQASEVPSTALSAPSDSNKRANQQISAPAASGASNYSRQKTGKLVFGSSASNNKEPQKAPAKEEQPAKKDDELRFQAFSGKSYSLKR

SEQ ID NO: 19688 - DNA, 1177 bp, Zea mays subsp. mays
  misc_feature (1)..(1177): Ceres Seq. ID no. 12374151
atcagatctccagctagcttccttgctacttactcccctacccgctgcaccctcgccatggatccgccgagctccgatatcgtagtcgacactccatacttccgcatctacagtgaccggcgcatcgaccgcttggtcggcaccgataccgtgccggcgggctttgatcccaccaccggcgtcacctccaaagacgtcgttgtagacagcgacgccggcgtctacgttcgcctgtacctcccggacacggctacggggtccgatgattccaagaagctcccggtgctagtctacttccacggcggcggctttgtcacccactcggcagcgtctccgccctatcagtccttcctcaacaccctggccgcgaaggccggcctgctcatcgtctccgtgaactaccgcctcgcgccagagcacccgctgcctgcaggctacgaggactccttccgcgcgctcaggtggacggcctctggtagcggggacccctggctgtcacatcacggcgacctgggccgcatcttcctggccggcgacagcgccggtgggaacttcgtccacaacatcgctgtgatggcagccgcgtcggaggtgccagtgcgaatcaggggtgcggtcctcctgcacgcggggttcggtggcagggagcgcatcgacggagagacgccggagactgtggcgctgatggagaagctgtggggggtcgtgtgcctcgaggcgacggacggcctgaacgacccgcggataaatccgttggctgccgccgcggcgccgagcctgcggaacctgccgtgtgagagggtgctcgtctgcgcggcagagttggacttcctgcggccgaggaacagggcgtactacgaggccctcgcagcaagctggcggggcggcacggtggagtggttcgagtcgaagggcaaggagcacgtcttcttcctctacaaccccggctgcggcgaggccgtggagctcatggatcgtctggtcgcgttctttgctgggaactgaaattcgtcatgtgtggatgtgaccgcgaccacatccacatgcagtgagacggatggatcaaacgaagatgcagctcatcgccgaatcgaatggttgagctgtgtccaggaaaagaaaactaaaagtgactagaataattgagctcggagccttggattgatcagtttgtgct

SEQ ID NO: 19689 - protein, 334 aa, Zea mays subsp. mays
  misc_feature (1)..(334): Ceres Seq. ID no. 12374152
IRSPASFLATYSPTRCTLAMDPPSSDIVVDTPYFRIYSDRRIDRLVGTDTVPAGFDPTTGVTSKDVVVDSDAGVYVRLYLPDTATGSDDSKKLPVLVYFHGGGFVTHSAASPPYQSFLNTLAAKAGLLIVSVNYRLAPEHPLPAGYEDSFRALRWTASGSGDPWLSHHGDLGRIFLAGDSAGGNFVHNIAVMAAASEVPVRIRGAVLLHAGFGGRERIDGETPETVALMEKLWGVVCLEATDGLNDPRINPLAAAAAPSLRNLPCERVLVCAAELDFLRPRNRAYYEALAASWRGGTVEWFESKGKEHVFFLYNPGCGEAVELMDRLVAFFAGN

SEQ ID NO: 19690 - protein, 315 aa, Zea mays subsp. mays
  misc_feature (1)..(315): Ceres Seq. ID no. 12374153
MDPPSSDIVVDTPYFRIYSDRRIDRLVGTDTVPAGFDPTTGVTSKDVVVDSDAGVYVRLYLPDTATGSDDSKKLPVLVYFHGGGFVTHSAASPPYQSFLNTLAAKAGLLIVSVNYRLAPEHPLPAGYEDSFRALRWTASGSGDPWLSHHGDLGRIFLAGDSAGGNFVHNIAVMAAASEVPVRIRGAVLLHAGFGGRERIDGETPETVALMEKLWGVVCLEATDGLNDPRINPLAAAAAPSLRNLPCERVLVCAAELDFLRPRNRAYYEALAASWRGGTVEWFESKGKEHVFFLYNPGCGEAVELMDRLVAFFAGN

SEQ ID NO: 19691 - DNA, 1612 bp, Zea mays subsp. mays
  misc_feature (1)..(1612): Ceres Seq. ID no. 12374154
gcactgttcaaacaaaccctccactgccctccccactctccccttcaccgcgccgcactcccaagtcccaacaggcctaaatggcggcggccggaacaattcccggcgccgccgcagccattggcgcttctgtgtcccaacgccaacgtcgcgtcggcgctccttctttcgtagctgcctacgtctccgagggcacccgcctcgtctgccggaggcagctccgtccggctccggtcctcgcttcttccttcatctccctttctcatccagcgaggcggcggttcctctgcgatgctgcggccggagcctcctcaggtcccgctggagaagccaagccccagggatttgcagagagatacccagctcttgtcacaggtttcttcttcttcttgtggtattttctgaatgtaatatttaacatcctcaacaagaagatcttcgactacttcccctatccatattttgtgtcagtgagccatctttttattggagtactatactgccttattggctggagcttcggcatcccaaagcgcgcgccaatcaactcaacacttctgaagcagcttgttccagttgcggtttgcccatgccattggccatgtaacaagcactgtgtcatttgctgctgtagctgtgtcatttgcccacactattaaagctctcgagccattcttcaatgcggctgcttcccagtttatccttggacaaccagttccattgacactctggctgtctcttgttccagtggtgattggtgtctcggtagcatccctcactgaactctcatttaattggactggcttcattaatgccatgatctcaaatatttctttcacctaccgaagcatctattctaagaaggctatgactgacatggatagtaccaacttgtatgcatacatatcaataattgctctctttgtctgcatcccccctgcaattattattgaaggacctcaattagtgcagcatggttttaaagatgcaattgccaaagttggattaacaaagttgatttctaatttttttgtggtgggcttattctatcacctttataaccaggttgctacaaacacattggagcgggtagcccctttaacacatgccatcggcaatgtgttgaaacgtgttttcgtcattggcttttccatcatcgcattcggcaacaagatcaccacacagactggaattggcacttccattgctgtttctggtgttgccctctactcatttataaaggctaagattgaggagaaaaagcaaataaagagtgcataaggtgttggctgatgtggatgcggttggtttgtcgctttgatggacctctattctctcggtgaacgaacaaacttgcaagatggataaaatcttgctatctcctagtacatttgattgttattcccagtctggtactgaggtgtgcggttgttgttggctaacttgtttatttgaagcaaatttgagcaatgctcagtggcatggaatttccatttctgttttccttcgctcatttattctgacttgacatggtgctattgtaatcttaagcagtagtgtctctagaatgttttccccaaggagatttcagtaccaaatttgaacaatcctc

SEQ ID NO: 19692 - protein, 192 aa, Zea mays subsp. mays
  misc_feature (1)..(192): Ceres Seq. ID no. 12374155
MAAAGTIPGAAAAIGASVSQRQRRVGAPSFVAAYVSEGTRLVCRRQLRPAPVLASSFISLSHPARRRFLCDAAAGASSGPAGEAKPQGFAERYPALVTGFFFFLWYFLNVIFNILNKKIFDYFPYPYFVSVSHLFIGVLYCLIGWSFGIPKRAPINSTLLKQLVPVAVCPCHWPCNKHCVICCCSCVICPHY

SEQ ID NO: 19693 - protein, 154 aa, Zea mays subsp. mays
  misc_feature (1)..(154): Ceres Seq. ID no. 12374156
MISNISFTYRSIYSKKAMTDMDSTNLYAYISIIALFVCIPPAIIIEGPQLVQHGFKDAIAKVGLTKLISNFFVVGLFYHLYNQVATNTLERVAPLTHAIGNVLKRVFVIGFSIIAFGNKITTQTGIGTSIAVSGVALYSFIKAKIEEKKQIKSA

SEQ ID NO: 19694 - protein, 138 aa, Zea mays subsp. mays
  misc_feature (1)..(138): Ceres Seq. ID no. 12374157
HCSNKPSTALPTLPFTAPHSQVPTGLNGGGRNNSRRRRSHWRFCVPTPTSRRRSFFRSCLRLRGHPPRLPEAAPSGSGPRFFLHLPFSSSEAAVPLRCCGRSLLRSRWRSQAPGICREIPSSCHRFLLLLVVFSECNI

SEQ ID NO: 19695 - DNA, 1385 bp, Zea mays subsp. mays
  misc_feature (1)..(1385): Ceres Seq. ID no. 12374161
accgaaacgaaatcctcaaaccccaaacctctctcggaagttcctctcgcgtggccggtttcctcaacctccgtgtcggctcgatagtttcgcaagcgggcggggcgggggtctgagctcgatggccacttctggcgagcaatcggctggcggtgggtctgcggcgagggcgtcgaagctgcgctacccgctgcggtcggcgagcaaggggaaggccgcggccgttttctcggcggcggatgcgcctcccaccaccatatctgcaccgcgtcgggcaaaaccatcttcagatgtcagcaagagcatgtgtttaggcctttctgtgaaggataagtttgtcaagcctccacggaggcactcaatacaaaccaagccaggagctagcccaaggccaataccttctggaactgtgactccggtgtctggggttcggtcaaagagatcggacagccaggggaggtttgatactccgacatcagaagtgtccatgtccatgtcaaggcgcaagttcagcacgctttcttcaatctcgtactggatgacacagatcaggcttgcagaggctgcttccaaacactcagtttctctgggcttctttaagcttgctcttgaatcagaatgtgagcctttggaccggatgagggaagaactcaagtcctatgtagcccgccattgcctagcgacagaattggaggacccagtcaaggacattcttcaggtttatgatattgtggacgattttgagaagctgaagatctctgcagagccctcagagcaaccaaaaaagtctgacaaggctgctcgtactgtctccaatgtgtcagccaattgtgatctgaagccaaggtcactaaactctggtgctactgaaagtaaggaagctgggaagaaagagggcattcagaaagcgaaacctgatgcaagggtcagaggctccaataacaggaatccagtaaaatgcaccaccgcaaaggaagtagttgctaagaacactggtaagaaaaccaagaaagaggccaagggtcaggaggaagttagcaatggagatagcgatgcatcctcagcccttccagatcaggaatctgttgatgttgtgaaggagatcacccatgaagataaagagaacatgggcgacaatgaaatggctatggatgttgccatagcgcaaggtatctagaacagccggaccaacttcagattcaatcgttttttattgctgaagatgaagtattagtgtgtggttgcttattttggttttcattgttaatatgatagtagagcttgtctgtgtgattgctgaaccatatacgctcctgaagagtgagtgtgtcataagttgatgattgcctgtattcctttttcaagtttgcagctttgcatgtggt

SEQ ID NO: 19696 - protein, 391 aa, Zea mays subsp. mays
  misc_feature (1)..(391): Ceres Seq. ID no. 12374162
PKRNPQTPNLSRKFLSRGRFPQPPCRLDSFASGRGGGLSSMATSGEQSAGGGSAARASKLRYPLRSASKGKAAAVFSAADAPPTTISAPRRAKPSSDVSKSMCLGLSVKDKFVKPPRRHSIQTKPGASPRPIPSGTVTPVSGVRSKRSDSQGRFDTPTSEVSMSMSRRKFSTLSSISYWMTQIRLAEAASKHSVSLGFFKLALESECEPLDRMREELKSYVARHCLATELEDPVKDILQVYDIVDDFEKLKISAEPSEQPKKSDKAARTVSNVSANCDLKPRSLNSGATESKEAGKKEGIQKAKPDARVRGSNNRNPVKCTTAKEVVAKNTGKKTKKEAKGQEEVSNGDSDASSALPDQESVDVVKEITHEDKENMGDNEMAMDVAIAQGI

SEQ ID NO: 19697 - protein, 351 aa, Zea mays subsp. mays
  misc_feature (1)..(351): Ceres Seq. ID no. 12374163
MATSGEQSAGGGSAARASKLRYPLRSASKGKAAAVFSAADAPPTTISAPRRAKPSSDVSKSMCLGLSVKDKFVKPPRRHSIQTKPGASPRPIPSGTVTPVSGVRSKRSDSQGRFDTPTSEVSMSMSRRKFSTLSSISYWMTQIRLAEAASKHSVSLGFFKLALESECEPLDRMREELKSYVARHCLATELEDPVKDILQVYDIVDDFEKLKISAEPSEQPKKSDKAARTVSNVSANCDLKPRSLNSGATESKEAGKKEGIQKAKPDARVRGSNNRNPVKCTTAKEVVAKNTGKKTKKEAKGQEEVSNGDSDASSALPDQESVDVVKEITHEDKENMGDNEMAMDVAIAQGI

SEQ ID NO: 19698 - protein, 290 aa, Zea mays subsp. mays
  misc_feature (1)..(290): Ceres Seq. ID no. 12374164
MCLGLSVKDKFVKPPRRHSIQTKPGASPRPIPSGTVTPVSGVRSKRSDSQGRFDTPTSEVSMSMSRRKFSTLSSISYWMTQIRLAEAASKHSVSLGFFKLALESECEPLDRMREELKSYVARHCLATELEDPVKDILQVYDIVDDFEKLKISAEPSEQPKKSDKAARTVSNVSANCDLKPRSLNSGATESKEAGKKEGIQKAKPDARVRGSNNRNPVKCTTAKEVVAKNTGKKTKKEAKGQEEVSNGDSDASSALPDQESVDVVKEITHEDKENMGDNEMAMDVAIAQGI

SEQ ID NO: 19699 - DNA, 1733 bp, Zea mays subsp. mays
  misc_feature (1)..(1733): Ceres Seq. ID no. 12374173
gatacaaaccctaatccccaccgccgcccgaccccgcagcctcattccaggcgcatcgacagcgacggcacgcgctggtccatccacggtccaccagtcgacctcgctcacccgcgagccgcgggccttgtcctcgtcgtcgttcataggcagtgcagcctcattcaccggtcgtcctcgtccaccagcgaattgaagttcctcgcccatcagccaacgacgtcgacgcggcctcgttctcgtccagcccacagcccagcgtgctgcacgtcgccttgctgttgctgtgctgctgctgcctatgtttcaaatgtcccaactggacctagccctcggacggaagtgcccaggacctgtcaatatatgccagctgtgcggcgagccagagctgagcggcgtacagatttcttgcccttgatttgatcaagggcaaaagtgtccggccactagctgccaatataataaaataagtcccgccgccattcaccaaatcggccgccagggctccgtcctctagctgctccgtccggtggtccagccagctgcctagctccctccgacggtccggccagcaccgcctcctgctcgtggccttgcccagctcctccgctctccggtgagacgtagatcttggtgcggcagggcgctacggagggggggtggtgctgttgtgcgtgtgctggtggcctggtgctagcaaccaagcctattatgaaatctggtgctagttaactgctgaaaggtacagtactatggatcacgaatgatgtattgtatgcaattcggcccggagcgtcactaaatcctggatccgcattggccgcagcgccagtggccagtgtccagcctgccagctcagcccggcggcaagcgcccagcggctggctcgggcagcggccagtgaccagcagccgactcgtttcttcggcgttctccgccactgccccccagctatgcaccctgttccagtcccctcccagccctttaccgcaactcctgcaaaaaaacttgtttcaaggagcactgctgtgaggaaggccatccattttgtcaacctgcggacagctggaaggtctagtggaaacctggctatgaactccgtaccaaaacccgcccctgggtccgaaacatctgggagggaggattttgctgtgggggataaggatgctgtggtcattgttgatcatgggtcaagacgccaagaatccaatctcatgctaaatgactttgttgagatgttccgggcgaagactagctataggattgttgagcctgctcatatggagctagcggagcctactataaaggatgcttttggaaaatgtgtgcaacaaggagcatctcgagttattattagtccatatttcctttcccctggacgacactggaagcaagacattcctgctttagcagcagaggcatcaaaggagcactcaaatataccctatattgtcactgcccctcttgggctgcatgagcttatggtggatatcatgaatgatcgcatcaagtactgcctgcgacatgttgcgggtgatgtcgatgagtgtacagtgtgtgccggaactggaaagtgccgcatgtactcctgatggagcatacctggtaattgtttcttggtattaccatttattgtgagatctggagaatacgagatctgacgagtgtatagttcattttgtaatcttggactgtccatattctgagcagattgtcagaattagacaagtgcc

SEQ ID NO: 19700 - protein, 212 aa, Zea mays subsp. mays
  misc_feature (1)..(212): Ceres Seq. ID no. 12374174
MHPVPVPSQPFTATPAKKLVSRSTAVRKAIHFVNLRTAGRSSGNLAMNSVPKPAPGSETSGREDFAVGDKDAVVIVDHGSRRQESNLMLNDFVEMFRAKTSYRIVEPAHMELAEPTIKDAFGKCVQQGASRVIISPYFLSPGRHWKQDIPALAAEASKEHSNIPYIVTAPLGLHELMVDIMNDRIKYCLRHVAGDVDECTVCAGTGKCRMYS

SEQ ID NO: 19701 - protein, 166 aa, Zea mays subsp. mays
  misc_feature (1)..(166): Ceres Seq. ID no. 12374175
MNSVPKPAPGSETSGREDFAVGDKDAVVIVDHGSRRQESNLMLNDFVEMFRAKTSYRIVEPAHMELAEPTIKDAFGKCVQQGASRVIISPYFLSPGRHWKQDIPALAAEASKEHSNIPYIVTAPLGLHELMVDIMNDRIKYCLRHVAGDVDECTVCAGTGKCRMYS

SEQ ID NO: 19702 - protein, 140 aa, Zea mays subsp. mays
  misc_feature (1)..(140): Ceres Seq. ID no. 12374176
DTNPNPHRRPTPQPHSRRIDSDGTRWSIHGPPVDLAHPRAAGLVLVVVHRQCSLIHRSSSSTSELKFLAHQPTTSTRPRSRPAHSPACCTSPCCCCAAAAYVSNVPTGPSPRTEVPRTCQYMPAVRRARAERRTDFLPLI

SEQ ID NO: 19703 - DNA, 1466 bp, Zea mays subsp. mays
  misc_feature (1)..(1466): Ceres Seq. ID no. 12374177
ctctcgctctaggcccctacccataagaaacttcgtcacggtctactctttctccgtcctagcaaaatcctccccgtactgagagccaaagaaacaacaaaggcaggaggccggcgaactacgcgaggaaaatttcgtttcccgggaggaagtcgggagtcgagacacgcgcgggtcaaaatcgcctccgtcgctgctgttgctgtcggaggcgagcaggaaggggaaagaacgagcttggaaccttggacagctcaagaagaggggacggggaggcggcagcctgtgagaaggcacgtgacacgtgaaggagcccgagggtagggaggaaccgaatcgagacatggactcggagcactggatctcgcgccctggccgccgccaagcgttactacgcggcgcagctcggccacgtcgacgatgtgcccgggatagggacggaggaggtggagatggagattgaggacgacgggggcttggagatggagatggagatggcgctggggctcggggacgcgacgtggccggaggtcgcctgcccctactgctacgaggaccatgacgtcgcgtccctctgcgtccacctcgaggaggaccacccctatgagccccacgccgcgccctgccccatttgctcccaaagggttacaagagatatgcttaaccatatgaccatgcagcatggttacctgttcaagaacggtcacaggtctcgcagatacattattcccgagagccatgcaatttctgcattgagccgagatctacggggtactcatttacgggctcttctagggggtggtcatggccacagatcaagcaatgcagtgactacaaacatttccagcgatcctcttctttcgtcgtttggcctgggcttctcaccatcagatgcaccagaaccatcaaaatcggcgtcttctattccagatggcgcctcaatacgtaaggagacaccggttcagccttgggagtcgagtattgattcatctctcacaagcgaggaaagggagcaaaagcggaaacaggccaccggcagagcaacctttgtgcaaggcctagtgctctccactctatttggagactgatcgttcgaaacagctctaggttcttgcacatgctagttcggcgcttactcctgcctggtccgcatagtcagatagtgctccacccggtttggtgcatctaactctgatggcgggaaagttcgcctcaggaaacttagccgcgttcttctttgtttcagaaaagcgcgcagttgattctatcgtgatatagcttgatttaagctagctgttgtaccgttgtctttaccaatttatcagccagtaattcttatctgttagctcactggcagatcgtgtttgcaccaacatacataatagcctgtaacatgtacttacacaaagcaagaaaggcgcttgtttgagcgcacattcttcttgttgtaagaccagttaaggcct

SEQ ID NO: 19704 - protein, 211 aa, Zea mays subsp. mays
  misc_feature (1)..(211): Ceres Seq. ID no. 12374178
MEIEDDGGLEMEMEMALGLGDATWPEVACPYCYEDHDVASLCVHLEEDHPYEPHAAPCPICSQRVTRDMLNHMTMQHGYLFKNGHRSRRYIIPESHAISALSRDLRGTHLRALLGGGHGHRSSNAVTTNISSDPLLSSFGLGFSPSDAPEPSKSASSIPDGASIRKETPVQPWESSIDSSLTSEEREQKRKQATGRATFVQGLVLSTLFGD

SEQ ID NO: 19705 - protein, 201 aa, Zea mays subsp. mays
  misc_feature (1)..(201): Ceres Seq. ID no. 12374179
MEMEMALGLGDATWPEVACPYCYEDHDVASLCVHLEEDHPYEPHAAPCPICSQRVTRDMLNHMTMQHGYLFKNGHRSRRYIIPESHAISALSRDLRGTHLRALLGGGHGHRSSNAVTTNISSDPLLSSFGLGFSPSDAPEPSKSASSIPDGASIRKETPVQPWESSIDSSLTSEEREQKRKQATGRATFVQGLVLSTLFGD

SEQ ID NO: 19706 - protein, 199 aa, Zea mays subsp. mays
  misc_feature (1)..(199): Ceres Seq. ID no. 12374180
MEMALGLGDATWPEVACPYCYEDHDVASLCVHLEEDHPYEPHAAPCPICSQRVTRDMLNHMTMQHGYLFKNGHRSRRYIIPESHAISALSRDLRGTHLRALLGGGHGHRSSNAVTTNISSDPLLSSFGLGFSPSDAPEPSKSASSIPDGASIRKETPVQPWESSIDSSLTSEEREQKRKQATGRATFVQGLVLSTLFGD

SEQ ID NO: 19707 - DNA, 1805 bp, Zea mays subsp. mays
  misc_feature (1)..(1805): Ceres Seq. ID no. 12374215
atcgattgttgtccgctgttctccttcctcctcgtcctccttcaggccagcgggcaagaagaagaagaagaaaaatcaaggcttgcggcgagaggctgtgcccggccgaccggcgagcgaacttcgtacgcgcgtcatgggtggcggcagcaacagaggcggcgccggcgccggcgaggagagcggcagcgaccacgacggtgtgctgcggaggccgctgctcaacacggggagctggtaccggatgagctcgcggcagtccagctttgccccggggacctcctccatggccgtcctgcgcgagtcccacgtctccgccttcctctgcacgctcatcgtcgcgctcggccccatccagttcggcttcaccagcggcttctcctccccgacccaggacgccatggttcgggacctcaacctctctatctccgagttctcggcgttcggatcgctgtccaacgtcggcggcatggtcggggcgatcgccagcgggcagatggccgagtacattggccgtaaagggtcgttgatgattgctgcaatcccaaatatcatcggttggcttgcgatctcctttgcaaaagatgcctcatttctatatatgggacgattgcttgaagggtttggtgtcgggatcatatcctacacggtaccggtatacatagcagagatatctcctcagaacatgaggggagctcttggttctgtgaaccagttgtctgtgacctttggcatattcttggcctatttgctcggcatgtttattccttggagacttcttgctgtgattggagccttgccctgcacaatgttgattcctgggctattcttcattccagaatctcccagatggctggcaaagatgaatttgatggaagattgtgagacgtccctacaagtgctgagggggtttgagactgacatcacaacagaagtgaatgatataaagagggcagtggcatcatcaagtaagaggaccacaatcagttttcaagaattaaaccaaaagaaataccgcacgccactacttctagggattggcctacttgtactgcaaaatcttagtggaatcaacggtgtactgttttatgcaagtagcatcttcaaagctgcaggggttacaaacagcgacttggccacctgttcacttggtgctattcaggtccttgctactggagttacaacatggctgttagacagagctggacgacgcatccttctcattatttctacctctggcatgactctatgccttcttgctgtttctgttgtattttttctcaaggataacatttcacaggattctaactcgtactacatcttaacaatgatctcccttgttggtattgtgtctttcgtcattaccttctcgtttggtatgggtgccattccatggctcatgatgtctgagatcctcccggttagcatcaagagccttggcggaagcatcgcaacactggccaactggctgacatccttcgccataacaatgacgacgaacttgatgctcacgtggagtgttggaggcacttttctctcgtacatggttgtgagcgccttcaccatcgtttttgttgtcctttgggtgccggagacgaaggggagaactctagaggagatacaattttcgtttcgctgagcattcagcgttagctgcaatggttgcccgagtgtttatcttagggcctgtttagatctcatgagctaaagcaaaaaggagctaaaatttagtcactttataaactaaagttccaatcaagaggagctaaaagtgaataaaattgtaaaagaatatccttttagcc

SEQ ID NO: 19708 - protein, 545 aa, Zea mays subsp. mays
  misc_feature (1)..(545): Ceres Seq. ID no. 12374216
SIVVRCSPSSSSSFRPAGKKKKKKNQGLRREAVPGRPASELRTRVMGGGSNRGGAGAGEESGSDHDGVLRRPLLNTGSWYRMSSRQSSFAPGTSSMAVLRESHVSAFLCTLIVALGPIQFGFTSGFSSPTQDAMVRDLNLSISEFSAFGSLSNVGGMVGAIASGQMAEYIGRKGSLMIAAIPNIIGWLAISFAKDASFLYMGRLLEGFGVGIISYTVPVYIAEISPQNMRGALGSVNQLSVTFGIFLAYLLGMFIPWRLLAVIGALPCTMLIPGLFFIPESPRWLAKMNLMEDCETSLQVLRGFETDITTEVNDIKRAVASSSKRTTISFQELNQKKYRTPLLLGIGLLVLQNLSGINGVLFYASSIFKAAGVTNSDLATCSLGAIQVLATGVTTWLLDRAGRRILLIISTSGMTLCLLAVSVVFFLKDNISQDSNSYYILTMISLVGIVSFVITFSFGMGAIPWLMMSEILPVSIKSLGGSIATLANWLTSFAITMTTNLMLTWSVGGTFLSYMVVSAFTIVFVVLWVPETKGRTLEEIQFSFR

SEQ ID NO: 19709 - protein, 500 aa, Zea mays subsp. mays
  misc_feature (1)..(500): Ceres Seq. ID no. 12374217
MGGGSNRGGAGAGEESGSDHDGVLRRPLLNTGSWYRMSSRQSSFAPGTSSMAVLRESHVSAFLCTLIVALGPIQFGFTSGFSSPTQDAMVRDLNLSISEFSAFGSLSNVGGMVGAIASGQMAEYIGRKGSLMIAAIPNIIGWLAISFAKDASFLYMGRLLEGFGVGIISYTVPVYIAEISPQNMRGALGSVNQLSVTFGIFLAYLLGMFIPWRLLAVIGALPCTMLIPGLFFIPESPRWLAKMNLMEDCETSLQVLRGFETDITTEVNDIKRAVASSSKRTTISFQELNQKKYRTPLLLGIGLLVLQNLSGINGVLFYASSIFKAAGVTNSDLATCSLGAIQVLATGVTTWLLDRAGRRILLIISTSGMTLCLLAVSVVFFLKDNISQDSNSYYILTMISLVGIVSFVITFSFGMGAIPWLMMSEILPVSIKSLGGSIATLANWLTSFAITMTTNLMLTWSVGGTFLSYMVVSAFTIVFVVLWVPETKGRTLEEIQFSFR

SEQ ID NO: 19710 - protein, 464 aa, Zea mays subsp. mays
  misc_feature (1)..(464): Ceres Seq. ID no. 12374218
MSSRQSSFAPGTSSMAVLRESHVSAFLCTLIVALGPIQFGFTSGFSSPTQDAMVRDLNLSISEFSAFGSLSNVGGMVGAIASGQMAEYIGRKGSLMIAAIPNIIGWLAISFAKDASFLYMGRLLEGFGVGIISYTVPVYIAEISPQNMRGALGSVNQLSVTFGIFLAYLLGMFIPWRLLAVIGALPCTMLIPGLFFIPESPRWLAKMNLMEDCETSLQVLRGFETDITTEVNDIKRAVASSSKRTTISFQELNQKKYRTPLLLGIGLLVLQNLSGINGVLFYASSIFKAAGVTNSDLATCSLGAIQVLATGVTTWLLDRAGRRILLIISTSGMTLCLLAVSVVFFLKDNISQDSNSYYILTMISLVGIVSFVITFSFGMGAIPWLMMSEILPVSIKSLGGSIATLANWLTSFAITMTTNLMLTWSVGGTFLSYMVVSAFTIVFVVLWVPETKGRTLEEIQFSFR

SEQ ID NO: 19711 - DNA, 1756 bp, Zea mays subsp. mays
  misc_feature (1)..(1756): Ceres Seq. ID no. 12374223
gcacgagaccattacctagaacatcctaatcgaaaaaactgcaggtttatttgcgtggcgtccagtgcagaggccagccggagccggcgctgtacaacggaggcattctcaagttcggcagcagcagcagcggcggcggcgatccggacgggtaccgcacgacggagaccggcgtcttctccccggcgttcgtggtgtacaacctcaacaagaccaccatgtacaccttctcatgctgggtgaagctggaaggcgcgtactcggctctgatcaccgcgaggctggcgccggacaacaccggcgccaggtgcatcgccacggtggttgccaggagcgactgctgggccttcgtcaagggcggattcgtcctggactggccgacgcagacctcggtcatcttctttcagaatgctgacaagacgcccatgaagatcaccgtggcgagcgggtcgctgcagccgttcaccacggaccagtgggcgatgcaccagcaggataccatccggaagaggaggaagcgcgtggcgaccatccacgtggccgacccgcagggcgcccgcgtggtgggcgcgtccgtgtcggtgcagcagacggccaaggacttcccgatcggttcggcgatcgcgtccaccatccttgggaaccaggcgtaccagcagtggttcgtggaccggttcaacgcggcggtgttcgaggacgagctcaagtggtactcgacggagcccatgtcgggtcagctgcgcttcgacgtgccggaccagatgctggcgttcgtgcggtcgcaccgggtgatggtgcgcggccacaacatcttctgggagaaccaggacgcgacgccccggtgggtgaagaacctgacggcggacgacctccgcgccgccgtcaacacgcgcatccagagcctcatgacccgctaccgcggcgagttcgcgcactgggacgtgaacaacgagatgctgcactacaacttctacgagcagcggctggggcccaacgcgtccgcggagttcttcagcgtcgcgcaggacgccgacccgctggccacgctcttcatgaacgagtacaacgtcatcgagacctgcgacgaccccttctccaccgtcgacacgtacgtggccaagctcaaggacctccgcaccgccggcgccatcctggaagggatcggcctggagggacacttctccaagcccaacatcccgctcatgagggccatactcgacaagctcgccaccctggggctgcccatctggttcaccgagatcgacatcagcaacaagttcgacgcgcagacgcaggccgcctacctggaacaggtgctgcgggaggcatactcgcacccggccgtcagcggcgtcatgctgtggacggcgctgcaccccagcggctgctaccagatgtgcctcaccgactggaacctcagcaacctgcccacgggggacgtggtcgaccgcctgctcaacgagtggcggacgctgcaggcggccggccagaccgacgcgcacggcgcctacagcttcaccggctacctgggggagtacgtcctcactgtcagctacaacaacaggaccacgcagtccaccttctcgctgtcgccgggagacgagaccaggcacatcaacgttcagatgtgacgcgccaacattatatttagggctcctctcctcacggtccgatccatacctggatcggactacttattactagctaatgtagtgactgttgtggaagaagattgcacagtcaatctatgtttctc

SEQ ID NO: 19712 - protein, 470 aa, Zea mays subsp. mays
  misc_feature (1)..(470): Ceres Seq. ID no. 12374224
MYTFSCWVKLEGAYSALITARLAPDNTGARCIATVVARSDCWAFVKGGFVLDWPTQTSVIFFQNADKTPMKITVASGSLQPFTTDQWAMHQQDTIRKRRKRVATIHVADPQGARVVGASVSVQQTAKDFPIGSAIASTILGNQAYQQWFVDRFNAAVFEDELKWYSTEPMSGQLRFDVPDQMLAFVRSHRVMVRGHNIFWENQDATPRWVKNLTADDLRAAVNTRIQSLMTRYRGEFAHWDVNNEMLHYNFYEQRLGPNASAEFFSVAQDADPLATLFMNEYNVIETCDDPFSTVDTYVAKLKDLRTAGAILEGIGLEGHFSKPNIPLMRAILDKLATLGLPIWFTEIDISNKFDAQTQAAYLEQVLREAYSHPAVSGVMLWTALHPSGCYQMCLTDWNLSNLPTGDVVDRLLNEWRTLQAAGQTDAHGAYSFTGYLGEYVLTVSYNNRTTQSTFSLSPGDETRHINVQM

SEQ ID NO: 19713 - protein, 401 aa, Zea mays subsp. mays
  misc_feature (1)..(401): Ceres Seq. ID no. 12374225
MKITVASGSLQPFTTDQWAMHQQDTIRKRRKRVATIHVADPQGARVVGASVSVQQTAKDFPIGSAIASTILGNQAYQQWFVDRFNAAVFEDELKWYSTEPMSGQLRFDVPDQMLAFVRSHRVMVRGHNIFWENQDATPRWVKNLTADDLRAAVNTRIQSLMTRYRGEFAHWDVNNEMLHYNFYEQRLGPNASAEFFSVAQDADPLATLFMNEYNVIETCDDPFSTVDTYVAKLKDLRTAGAILEGIGLEGHFSKPNIPLMRAILDKLATLGLPIWFTEIDISNKFDAQTQAAYLEQVLREAYSHPAVSGVMLWTALHPSGCYQMCLTDWNLSNLPTGDVVDRLLNEWRTLQAAGQTDAHGAYSFTGYLGEYVLTVSYNNRTTQSTFSLSPGDETRHINVQM

SEQ ID NO: 19714 - protein, 382 aa, Zea mays subsp. mays
  misc_feature (1)..(382): Ceres Seq. ID no. 12374226
MHQQDTIRKRRKRVATIHVADPQGARVVGASVSVQQTAKDFPIGSAIASTILGNQAYQQWFVDRFNAAVFEDELKWYSTEPMSGQLRFDVPDQMLAFVRSHRVMVRGHNIFWENQDATPRWVKNLTADDLRAAVNTRIQSLMTRYRGEFAHWDVNNEMLHYNFYEQRLGPNASAEFFSVAQDADPLATLFMNEYNVIETCDDPFSTVDTYVAKLKDLRTAGAILEGIGLEGHFSKPNIPLMRAILDKLATLGLPIWFTEIDISNKFDAQTQAAYLEQVLREAYSHPAVSGVMLWTALHPSGCYQMCLTDWNLSNLPTGDVVDRLLNEWRTLQAAGQTDAHGAYSFTGYLGEYVLTVSYNNRTTQSTFSLSPGDETRHINVQM

SEQ ID NO: 19715 - DNA, 1524 bp, Zea mays subsp. mays
  misc_feature (1)..(1524): Ceres Seq. ID no. 12374227
taaaatcattgcagccctggtcctcacaacactctgtatatttgttctgaagcaatctcctggttttggtggcaatagtgtgttttctcgccatgaacatggggttacccacgtcttagtaacaggaggagctggttatattggttcacatgctgctttaaggctcttaaaggataactatcgagttactatcgtggataatctatctagaggaaacatgggagcagtaaaggttctgcagggcttatttccgcagcctgggagactacaattcatctttgctgatctggggaaccagaaatctgtatcctcatttatgcttctaaagctgctttgcttgtgccttttctgcttatggagagttacatccaaagtcttcttttcacttaactggctgccaggtcaacaagatatttgctgaaaatgcatttgatgctgtgatgcactttgcagctgttgcttatgtgggagagagcacattggaaccccttaggtactatcacaatattacatcgaacacactactgattttggaggctatggcatctcatggagtccaaacccttatttactccagtacatgtgctacctacggagaaccagataagatgcctattacagaagccacacctcagttccctatcaatccatatggaaaagctaagaaaatggcagaggatatcataatagatttctcaaactcaaagggagctgacatggctgtcatgattttaagatatttcaatgttattggatctgaccctgagggaagattaggtgaggctcctaggccagaacttcgagagcatggtcggatatctggggcttgctttgatgcagcattaggagtcattccaggattaaaggttaaaggaacagattatcccacagctgatggaacctgcataagagattatattgatgtcacagatttagttgatgctcatgtgaaagcactcaacaaggcagagcctagaaaagtcggcatttacaatgttggaacaggaagaggtcgctcagttaatgagtttgttgatgcctgcaagaaggcaactggggtcaacatcaaaattgagtacctcaacagaaggccaggagattatgcagaagtatacagcgacccaacaaagataaacaaggagctcaactggacagctcattataccgatctcaaagagagcctatcagtcgcatggaggtggcaaaagtcgcatccgcgtggctacgggccaaactaaatatagcctgctgatctataattcacttaatcgtcaatacatattagttctttagttagagatacaagatcttgctgcgatactcctcaaaatcagtccttcgtattcttctttctctcgtcctttttatttcaaaagtttgcatttttggctagcagaaacatgaatggtgatttggatgaaaaaaaggacctgtgatgacaatttcattgtttctgacacattgttggtaaaaaaaatgtaaattgcttcagccaatgagctgcaagattgattgaattgagtt

SEQ ID NO: 19716 - protein, 265 aa, Zea mays subsp. mays
  misc_feature (1)..(265): Ceres Seq. ID no. 12374228
MHFAAVAYVGESTLEPLRYYHNITSNTLLILEAMASHGVQTLIYSSTCATYGEPDKMPITEATPQFPINPYGKAKKMAEDIIIDFSNSKGADMAVMILRYFNVIGSDPEGRLGEAPRPELREHGRISGACFDAALGVIPGLKVKGTDYPTADGTCIRDYIDVTDLVDAHVKALNKAEPRKVGIYNVGTGRGRSVNEFVDACKKATGVNIKIEYLNRRPGDYAEVYSDPTKINKELNWTAHYTDLKESLSVAWRWQKSHPRGYGPN

SEQ ID NO: 19717 - protein, 232 aa, Zea mays subsp. mays
  misc_feature (1)..(232): Ceres Seq. ID no. 12374229
MASHGVQTLIYSSTCATYGEPDKMPITEATPQFPINPYGKAKKMAEDIIIDFSNSKGADMAVMILRYFNVIGSDPEGRLGEAPRPELREHGRISGACFDAALGVIPGLKVKGTDYPTADGTCIRDYIDVTDLVDAHVKALNKAEPRKVGIYNVGTGRGRSVNEFVDACKKATGVNIKIEYLNRRPGDYAEVYSDPTKINKELNWTAHYTDLKESLSVAWRWQKSHPRGYGPN

SEQ ID NO: 19718 - protein, 209 aa, Zea mays subsp. mays
  misc_feature (1)..(209): Ceres Seq. ID no. 12374230
MPITEATPQFPINPYGKAKKMAEDIIIDFSNSKGADMAVMILRYFNVIGSDPEGRLGEAPRPELREHGRISGACFDAALGVIPGLKVKGTDYPTADGTCIRDYIDVTDLVDAHVKALNKAEPRKVGIYNVGTGRGRSVNEFVDACKKATGVNIKIEYLNRRPGDYAEVYSDPTKINKELNWTAHYTDLKESLSVAWRWQKSHPRGYGPN

SEQ ID NO: 19719 - DNA, 1269 bp, Zea mays subsp. mays
  misc_feature (1)..(1269): Ceres Seq. ID no. 12374235
gacggccacagagagaaacgttgagacagggagagagagagagagagcgagctccacgcctccacgctccactacaccagccaggcagcagcccccaacgactggctcgccgctcgcgagaacccgagtctatttctgcacgcgcttccaggttttagctgcagcggcatcagggcagggagagagcgatagttctgttctactgcaggaagagcagggagcaagatggggtccggatctttcctcaaggtgctggccaataacttcgatgtccttgccgggccactcatatcacttgcttatcctctatatgcttctgttagagctatagagacaaaaaatcctgtagatgatcagcagtggctcacttactgggtgttgtactcatttatcactttgtttgagctaacttttgctccaattatcgagtggcttccattttggtcgtatgcaaagctgttctttaactgctggttggtcttgccttggttcaatggtgctgcctatgtttacgaccattttgtgcggccaatgtttgtgaaccgccaaatagtgaacatatggtatattccaagaaatgagaagctaggtaaatctgatgatgttctgtcagctgcagagagatatattgaacaaaacggaccagaagcatttgagaagctcatcagcaagtctacgaagtcttcgaagtcaaggaacacaaagcggttgaacttggaggatggagaggctgaaaatcgagctaaagccgagagagaatcgtggggcgaaaatcccttctacgacaaaaactacagatactaaaccagttcaaaatccactcagcagtttgaagatgaccttgctcacgagcctcatgcaagctttagttgcgtcggaccgaagacgacattcccatatttctgactctgaatattgtaccttgttacatccactgctactacataatgatgagttctagagcaattgtggactgtgtaaatggaggtagatgctagcgttaatcgtttatgtgctttttggatggtgtccttatcacccgttttactacatctttagcaaggagcgagccttgattttcagtttggctttcgtatttttgtaattgaatgctacttttagataactgaaatatgagggagttcgagcttctaggaagaaacttaacatgtgctattgcatcgagtgccaacaacgttatcatcgtcacaatttttgtacagggctcttctacaataacttgagtaacccgttcatttcggctggttt

SEQ ID NO: 19720 - protein, 192 aa, Zea mays subsp. mays
  misc_feature (1)..(192): Ceres Seq. ID no. 12374236
MGSGSFLKVLANNFDVLAGPLISLAYPLYASVRAIETKNPVDDQQWLTYWVLYSFITLFELTFAPIIEWLPFWSYAKLFFNCWLVLPWFNGAAYVYDHFVRPMFVNRQIVNIWYIPRNEKLGKSDDVLSAAERYIEQNGPEAFEKLISKSTKSSKSRNTKRLNLEDGEAENRAKAERESWGENPFYDKNYRY

SEQ ID NO: 19721 - protein, 109 aa, Zea mays subsp. mays
  misc_feature (1)..(109): Ceres Seq. ID no. 12374237
TATERNVETGRERERASSTPPRSTTPARQQPPTTGSPLARTRVYFCTRFQVLAAAASGQGESDSSVLLQEEQGARWGPDLSSRCWPITSMSLPGHSYHLLILYMLLLEL

SEQ ID NO: 19722 - DNA, 1659 bp, Zea mays subsp. mays
  misc_feature (1)..(1659): Ceres Seq. ID no. 12374238
tccggcagcgaagctcccccctccctgcctccttccccggcgccccgctcttcctccttccgctccggcgatgggcactggccgccgcggcggcggcggcggcggcgtgttccaccgcctcctcgccctctcgtcgctgctgctcctcgcttccggcgaggtcgtcttcgaggagcgcttcgaagatggttgggagactcggtgggtggaatccgactggaaaaggagtgaagggaaagcaggaaggttcaagcacacagcggggagatactctgcagatcctgatgacaaaggaatacaaacaacaatagatgccagacattttgctatctcagccaagttcccggaattcagtaacaagaaccggacgcttgtggtccagtactccattaagtttgagcaggatattgaatgtggcggtggctatattaagcttatgtccggttatgtcaaccagaaaaaatttagtggggacactccgtacagcttgatgtttggaccagatatatgtggtactcaaacaaagaagctccatcttatactctcttaccaggggcagaactatcccatcaaaaaagatctagaatgtgagacggacaagttaacacacgtgtatactttcattcttaggcctgatgcatcttatagcctgcttgttgataaccgtgaaagagaatctgggagcatgtacactgattgggatattctccctcctcgtaaaattaaggatgttcacgccaaaaggcctaaggattgggatgacagagaatatattgaagatcctgatgaagttaagccagagggctatgattctatcccaaaacagattcctgatccgaaggacaaaaagcctgacacatgggatgaagatgaggatggaatatggaagcccagaatggtatcaaatccagcatacaagggaccttggaaacgcaagagaattaaaaatcctaactacaagggtaaatggaagaccccatggatcgataatccagagtttgaggatgatccagatctttatgtgctgaagcctttgaagtatattggaattgaagtttggcaggtaaaagctggttcagttttcgacaacattctgatttgtgatgaccctgagtatgcaagaaaggttgttgaggaaacttggggtgcaaatagggaggctgaaaaggaagcttttgaagaagctgaaaaggagaggaaagctagggaggatagggaaggtcaaaaggcaaaggacgatggtggccggcatcgaatacacaggcgtcataaaaaaacactacagagatcactgggacgactaccatgatgagctataaaagtccccaaatattgcattcctcaaaagcataagctggaagttgcttcggacattgtgggtgcttttcaataataataattgattcgcctggtcagaacaacctgaagtgtttcttgctatgcgccaacaaattattgaactacaggatttgatatgtaatggacaaccgaagatctgcagggcattccagcgaaaacttggctctggtactgaaatagaggggacgagagactgtagtttgtgtctgtacaacggtgccggccatgtgctagctttgtaatctcaaaacattgtctttgcatgaataatgtaagttacccaaaaattactgcataccg

SEQ ID NO: 19723 - protein, 435 aa, Zea mays subsp. mays
  misc_feature (1)..(435): Ceres Seq. ID no. 12374239
PAAKLPPPCLLPRRPALPPSAPAMGTGRRGGGGGGVFHRLLALSSLLLLASGEVVFEERFEDGWETRWVESDWKRSEGKAGRFKHTAGRYSADPDDKGIQTTIDARHFAISAKFPEFSNKNRTLVVQYSIKFEQDIECGGGYIKLMSGYVNQKKFSGDTPYSLMFGPDICGTQTKKLHLILSYQGQNYPIKKDLECETDKLTHVYTFILRPDASYSLLVDNRERESGSMYTDWDILPPRKIKDVHAKRPKDWDDREYIEDPDEVKPEGYDSIPKQIPDPKDKKPDTWDEDEDGIWKPRMVSNPAYKGPWKRKRIKNPNYKGKWKTPWIDNPEFEDDPDLYVLKPLKYIGIEVWQVKAGSVFDNILICDDPEYARKVVEETWGANREAEKEAFEEAEKERKAREDREGQKAKDDGGRHRIHRRHKKTLQRSLGRLP

SEQ ID NO: 19724 - protein, 412 aa, Zea mays subsp. mays
  misc_feature (1)..(412): Ceres Seq. ID no. 12374240
MGTGRRGGGGGGVFHRLLALSSLLLLASGEVVFEERFEDGWETRWVESDWKRSEGKAGRFKHTAGRYSADPDDKGIQTTIDARHFAISAKFPEFSNKNRTLVVQYSIKFEQDIECGGGYIKLMSGYVNQKKFSGDTPYSLMFGPDICGTQTKKLHLILSYQGQNYPIKKDLECETDKLTHVYTFILRPDASYSLLVDNRERESGSMYTDWDILPPRKIKDVHAKRPKDWDDREYIEDPDEVKPEGYDSIPKQIPDPKDKKPDTWDEDEDGIWKPRMVSNPAYKGPWKRKRIKNPNYKGKWKTPWIDNPEFEDDPDLYVLKPLKYIGIEVWQVKAGSVFDNILICDDPEYARKVVEETWGANREAEKEAFEEAEKERKAREDREGQKAKDDGGRHRIHRRHKKTLQRSLGRLP

SEQ ID NO: 19725 - protein, 290 aa, Zea mays subsp. mays
  misc_feature (1)..(290): Ceres Seq. ID no. 12374241
MSGYVNQKKFSGDTPYSLMFGPDICGTQTKKLHLILSYQGQNYPIKKDLECETDKLTHVYTFILRPDASYSLLVDNRERESGSMYTDWDILPPRKIKDVHAKRPKDWDDREYIEDPDEVKPEGYDSIPKQIPDPKDKKPDTWDEDEDGIWKPRMVSNPAYKGPWKRKRIKNPNYKGKWKTPWIDNPEFEDDPDLYVLKPLKYIGIEVWQVKAGSVFDNILICDDPEYARKVVEETWGANREAEKEAFEEAEKERKAREDREGQKAKDDGGRHRIHRRHKKTLQRSLGRLP

SEQ ID NO: 19726 - DNA, 1052 bp, Zea mays subsp. mays
  misc_feature (1)..(1052): Ceres Seq. ID no. 12374289
aatgatagcccatttcttaggtttcggcgccttggcctgccgcctcagtgggacgaaactcactggctccctctccttcccccagtccgcggcgctcgctccgttcacctcggccgcggcgaccttcgaggcgacgagacgatgctgcggctctcccgcttcctcccctccgcctgcaggaggggttttgatctaaaagaatctctttggtgtggttcattgacattccaacaagctgtttccactgcagcaacaaatcttgatgggaacttgtctggcaaaaagtttgcaagttatacggtgttcaagggaaaggctgcactttctatacatcctatactgccaagtttcagcaaattagaatccggaggatctcgagtgagcaaaaatggatcagtaatgctgaccttctttcctgctgttggacaaaggaagtatgactatacaaagaaacagctctttgctctgtcacctactgaagttggaagcttgataagtcttgggcctgctgaatcctgtgaatttttccatgacccatccatgaaatcaagtaatgaaggaacggtgaaaaaatcgctgtcgatcactccacttggcagtgacagtggatactttgttaatataaccgttgtgaacagtgcagagaggactaatgatcgtctttcagtccctatcacaaaagctgagtttgctgtgatccgcacaactctgagttttgcattgccacatattatgggttgggaccaggctttaaccaatcaccatccagctcctccagctagcagcaggcccacggtagagcgtccacacccggattccgaatgggagaggtgaagctcccttttagcggctagacgatggaggcctttgggcaccagtacaagttgctgctgcaaagtatgtgtgcttgaacaatctcttagaacactgtctgccgaccgcattagatttctggaacttaaggctagatgaagcacgatgaaccattgtgtttgttcagtgcatgtataactatatcacgcctactaaaggcatatttgatatttctagtc

SEQ ID NO: 19727 - protein, 277 aa, Zea mays subsp. mays
  misc_feature (1)..(277): Ceres Seq. ID no. 12374290
NDSPFLRFRRLGLPPQWDETHWLPLLPPVRGARSVHLGRGDLRGDETMLRLSRFLPSACRRGFDLKESLWCGSLTFQQAVSTAATNLDGNLSGKKFASYTVFKGKAALSIHPILPSFSKLESGGSRVSKNGSVMLTFFPAVGQRKYDYTKKQLFALSPTEVGSLISLGPAESCEFFHDPSMKSSNEGTVKKSLSITPLGSDSGYFVNITVVNSAERTNDRLSVPITKAEFAVIRTTLSFALPHIMGWDQALTNHHPAPPASSRPTVERPHPDSEWER

SEQ ID NO: 19728 - protein, 230 aa, Zea mays subsp. mays
  misc_feature (1)..(230): Ceres Seq. ID no. 12374291
MLRLSRFLPSACRRGFDLKESLWCGSLTFQQAVSTAATNLDGNLSGKKFASYTVFKGKAALSIHPILPSFSKLESGGSRVSKNGSVMLTFFPAVGQRKYDYTKKQLFALSPTEVGSLISLGPAESCEFFHDPSMKSSNEGTVKKSLSITPLGSDSGYFVNITVVNSAERTNDRLSVPITKAEFAVIRTTLSFALPHIMGWDQALTNHHPAPPASSRPTVERPHPDSEWER

SEQ ID NO: 19729 - protein, 144 aa, Zea mays subsp. mays
  misc_feature (1)..(144): Ceres Seq. ID no. 12374292
MLTFFPAVGQRKYDYTKKQLFALSPTEVGSLISLGPAESCEFFHDPSMKSSNEGTVKKSLSITPLGSDSGYFVNITVVNSAERTNDRLSVPITKAEFAVIRTTLSFALPHIMGWDQALTNHHPAPPASSRPTVERPHPDSEWER

SEQ ID NO: 19730 - DNA, 1322 bp, Zea mays subsp. mays
  misc_feature (1)..(1322): Ceres Seq. ID no. 12374300
agataatgtagagtgcgccgcgccgtgacggcgcggatgagaaagcctccaaacctctctgtttcgggctctccgtccccggcgtccaacacccatactctccccaggttgtgtgccacacccacactcaactatatacgaaaaccgccggcgcctggcccctaggccctagtcacagacccttgttctttcttcgacgcgcccccgggcatggcgaaccgcagtgttgccatgggcgtggccctcgcgttcgtggccatgaccgcgctctgttgcgcgccgggcgccgcggagttgcccaggctggaccacccggccaggagcgacggatcgctgaagctgctcgtcgtcggggactggggacgcaaggggactcacaaccagtcccgggtcgccgaccagatgggaagggtcggggagaagctcgatatcgactttgttatatccaccggggacaacttctacaaggacggcctcaagggcgtgcgcgaccaggcatttgaagaatcgttcgtggatatctacacagctcaaagcttacagaagccatggtactcagttctaggaaatcatgattacaggggcaatgcgctcgcacagcttagcccagtcttgaggaagatcgacgaccgattcatttgcatgagatcgttcatcgttaacgcagaacttgtggacttcttctttgtcgacaccactccgttccaactggagtattggactcaccctggcaaggatcgttatgactggagaggggtggcgcctcgaggcaagtacatagccaatttgctgaaggatctggatgtggctatgaagaaatcaactgcaaggtggaagattgtggctgggcatcacaccatgaggagtgtgagtgagcacggggacactaaggagcttctggaattactacttccagtcctcaaggacaatggcgtcgacttctacatcaatggacacgatcactgcctggagcacattagcagcagagacagtccactccagtatttcacgagcggaggcggttccaaggcatggagaggagtcttccatccaaacaaggacaaactccggttcttctacgacgggcaagggttcatgtccctccagctgaaccaagaccaggcgcacttcatcttttacgacgttttcgggaacatactgtaccgatggagctcgagacatccccagccctccacctatctcgatgaggaataaattggattgattttgcgccattgatatgtacaaaacaccgcctgccaactgtcatgtatgtgaaatgatgagtgttagacgcaaagaaggttatacaccagttaggg

SEQ ID NO: 19731 - protein, 334 aa, Zea mays subsp. mays
  misc_feature (1)..(334): Ceres Seq. ID no. 12374301
MANRSVAMGVALAFVAMTALCCAPGAAELPRLDHPARSDGSLKLLVVGDWGRKGTHNQSRVADQMGRVGEKLDIDFVISTGDNFYKDGLKGVRDQAFEESFVDIYTAQSLQKPWYSVLGNHDYRGNALAQLSPVLRKIDDRFICMRSFIVNAELVDFFFVDTTPFQLEYWTHPGKDRYDWRGVAPRGKYIANLLKDLDVAMKKSTARWKIVAGHHTMRSVSEHGDTKELLELLLPVLKDNGVDFYINGHDHCLEHISSRDSPLQYFTSGGGSKAWRGVFHPNKDKLRFFYDGQGFMSLQLNQDQAHFIFYDVFGNILYRWSSRHPQPSTYLDEE

SEQ ID NO: 19732 - protein, 327 aa, Zea mays subsp. mays
  misc_feature (1)..(327): Ceres Seq. ID no. 12374302
MGVALAFVAMTALCCAPGAAELPRLDHPARSDGSLKLLVVGDWGRKGTHNQSRVADQMGRVGEKLDIDFVISTGDNFYKDGLKGVRDQAFEESFVDIYTAQSLQKPWYSVLGNHDYRGNALAQLSPVLRKIDDRFICMRSFIVNAELVDFFFVDTTPFQLEYWTHPGKDRYDWRGVAPRGKYIANLLKDLDVAMKKSTARWKIVAGHHTMRSVSEHGDTKELLELLLPVLKDNGVDFYINGHDHCLEHISSRDSPLQYFTSGGGSKAWRGVFHPNKDKLRFFYDGQGFMSLQLNQDQAHFIFYDVFGNILYRWSSRHPQPSTYLDEE

SEQ ID NO: 19733 - protein, 318 aa, Zea mays subsp. mays
  misc_feature (1)..(318): Ceres Seq. ID no. 12374303
MTALCCAPGAAELPRLDHPARSDGSLKLLVVGDWGRKGTHNQSRVADQMGRVGEKLDIDFVISTGDNFYKDGLKGVRDQAFEESFVDIYTAQSLQKPWYSVLGNHDYRGNALAQLSPVLRKIDDRFICMRSFIVNAELVDFFFVDTTPFQLEYWTHPGKDRYDWRGVAPRGKYIANLLKDLDVAMKKSTARWKIVAGHHTMRSVSEHGDTKELLELLLPVLKDNGVDFYINGHDHCLEHISSRDSPLQYFTSGGGSKAWRGVFHPNKDKLRFFYDGQGFMSLQLNQDQAHFIFYDVFGNILYRWSSRHPQPSTYLDEE

SEQ ID NO: 19734 - DNA, 1414 bp, Zea mays subsp. mays
  misc_feature (1)..(1414): Ceres Seq. ID no. 12374326
aagcgacatgttcacgcctgttggttcggttcggtttcggcatggaggtagctgagagaccgatggcctcgtcccacctggcagctctcgtctccctgctgatcccctgcctccttgcgcttctgctgctccgcctcgccgccgtgctggacccggaccccgacgccgccgtgccccgcatcaaggcggccgcgcccctccctctccggttccgccacgatggcgccttcaagatcctccaggtggcggacatgcacttcggcaacggcgccaccacgcgctgccgggacgtgggccccgaaggcggcggcgcgcgctgctccgacctcaacaccacgcggttcctgcgccgtgtcatcgaggccgagaagcccgacctcatcgccttcaccggggacaacatatttgggggcagtgcaactgacgcagcagaatcactactcagagcaatcagccctgctatcgaatacagggtgccatgggctgccatcttaggtaatcatgaccaagagtcgacaatgacccgggaggagctgatgaccttcatgtctctaatggactactcggtatctcaagtaaacccacctggttttttggtacatgggtttgggaattatcatgttggcatccatgggccattcggatccgagctggtcaatactagcctgcttaacctttacttcctggatagcggtgatcgtgaaatggtgaatggagttaaaacatatggatggatcagagagtctcaactcgcctggcttcgttctacttccctggagcttcagaaaaaaatacatgccccagcattagcgttcttccacataccaatcccagaggtccgagggctctggtactcaggcttcaagggtcagtaccaggaaggggtggcttgctcatctgtacattctggtgtccttgggacccttgtctccatgggagatgtaaaatctgtctttttgggtcacgaccatcttaatgatttttgtggcaatctcaatgggatctggttctgttatggtggtggctttggttatcatgcctatggaagaccccattggccaaggagagctcggataatttacagtgaactcaaaaaggggcagaggtcgtggttggaagttgactcgatctcgacttggaagctgctagatgatgaaaagctcacaaaaattgatgaacaggttatctggagacatagcacaggtgattctgaccacagagtctacttgtgaagaccatgaacctaaaactacttcctgtatgtgtcatgtgtataatgtttgtcgcaaagattcctccaattttataggtcgattgattattggtagtatggtgtggcacggacctattttagatttcacatttggttcaatgttgatatgctaaccctggtttgggtcgctgacctgttttc

SEQ ID NO: 19735 - protein, 409 aa, Zea mays subsp. mays
  misc_feature (1)..(409): Ceres Seq. ID no. 12374327
ATCSRLLVRFGFGMEVAERPMASSHLAALVSLLIPCLLALLLLRLAAVLDPDPDAAVPRIKAAAPLPLRFRHDGAFKILQVADMHFGNGATTRCRDVGPEGGGARCSDLNTTRFLRRVIEAEKPDLIAFTGDNIFGGSATDAAESLLRAISPAIEYRVPWAAILGNHDQESTMTREELMTFMSLMDYSVSQVNPPGFLVHGFGNYHVGIHGPFGSELVNTSLLNLYFLDSGDREMVNGVKTYGWIRESQLAWLRSTSLELQKKIHAPALAFFHIPIPEVRGLWYSGFKGQYQEGVACSSVHSGVLGTLVSMGDVKSVFLGHDHLNDFCGNLNGIWFCYGGGFGYHAYGRPHWPRRARIIYSELKKGQRSWLEVDSISTWKLLDDEKLTKIDEQVIWRHSTGDSDHRVYL

SEQ ID NO: 19736 - protein, 396 aa, Zea mays subsp. mays
  misc_feature (1)..(396): Ceres Seq. ID no. 12374328
MEVAERPMASSHLAALVSLLIPCLLALLLLRLAAVLDPDPDAAVPRIKAAAPLPLRFRHDGAFKILQVADMHFGNGATTRCRDVGPEGGGARCSDLNTTRFLRRVIEAEKPDLIAFTGDNIFGGSATDAAESLLRAISPAIEYRVPWAAILGNHDQESTMTREELMTFMSLMDYSVSQVNPPGFLVHGFGNYHVGIHGPFGSELVNTSLLNLYFLDSGDREMVNGVKTYGWIRESQLAWLRSTSLELQKKIHAPALAFFHIPIPEVRGLWYSGFKGQYQEGVACSSVHSGVLGTLVSMGDVKSVFLGHDHLNDFCGNLNGIWFCYGGGFGYHAYGRPHWPRRARIIYSELKKGQRSWLEVDSISTWKLLDDEKLTKIDEQVIWRHSTGDSDHRVYL

SEQ ID NO: 19737 - protein, 389 aa, Zea mays subsp. mays
  misc_feature (1)..(389): Ceres Seq. ID no. 12374329
MASSHLAALVSLLIPCLLALLLLRLAAVLDPDPDAAVPRIKAAAPLPLRFRHDGAFKILQVADMHFGNGATTRCRDVGPEGGGARCSDLNTTRFLRRVIEAEKPDLIAFTGDNIFGGSATDAAESLLRAISPAIEYRVPWAAILGNHDQESTMTREELMTFMSLMDYSVSQVNPPGFLVHGFGNYHVGIHGPFGSELVNTSLLNLYFLDSGDREMVNGVKTYGWIRESQLAWLRSTSLELQKKIHAPALAFFHIPIPEVRGLWYSGFKGQYQEGVACSSVHSGVLGTLVSMGDVKSVFLGHDHLNDFCGNLNGIWFCYGGGFGYHAYGRPHWPRRARIIYSELKKGQRSWLEVDSISTWKLLDDEKLTKIDEQVIWRHSTGDSDHRVYL

SEQ ID NO: 19738 - DNA, 1720 bp, Zea mays subsp. mays
  misc_feature (1)..(1720): Ceres Seq. ID no. 12374340
gcacgagaccattacctagaacatcctaatcgaaaaataccttgctgggtcgttgccaaatgccaacgcaggcgccgggcagtgcacgcacatggctgcgcgcgtgggcctgctcccgcacgcgatcctcgtctcctcccgagctctacccacgccccgagctcgcgtcccttatcctcttccacccgtcccttcctacctccgccacgcctcctcctccgcctcccgctcctgccgcgcgtcgccgcgttttgtcgcagtccgcgccatggcttcggggaacccctacgccgccgagctcgccgccgccaagaaggccgttaccctcgccgccaaactctgccagacagttcaacaggatattatgcattctggcgttcaggctaaggcagacaaaagtcctgtcacagttgctgattatggatctcaaatattggtcggtttttccttaaagatggatgtatcatctggaccattttcattggtggctgaagaggactcagatgaattgagaaaagatggcgctgaagaaattttggaagatattactgaccttgtcaatgaaaccatctttgatgatggttcatataacatttcgtttacaaaggaaggtatactctctgcaattgatgatgggaagtctgagggaggtccatctggacgacattgggtgcttgatccgattgacggtactaaaggtttcttgaggggcgaccaatatgccattgcattggctctgcttgatgaaggtaaagttgttttgggtgtattggcttgtccaaatcttccattgtcatcaataaacaacatcaatggtaactcttcgggagataaagttggtgccctgttttctgctacaattggttgtggggctgaagtagagtccttagatggctctccaccacaaaagattagtgtttgctccatcgacaatcctgtcaatgcatcattttttgaatcctatgaaagtgcacactccatgcatgatttgactggctctattgcagagaaacttggtgtccaagctcctccagttagaatcgacagccaagcaaaatatggtgctctggcccgaggtgatggcgccatttacttgcgctttccacacaaaggttatagagagaaaatatgggaccatgcagcaggatcaattgtcgtgacagaagctggaggcatagtaacagatgctgcgggaaacgacttggatttctccaaagggagatttctcgatctcgacacaggcatcatcgcaaccaacaaggagttgatgccgtcgctcctgaaagctgtccaagaggctattaaagagacgaaccaggctgcctccctcttatagctgttgtagtggtcgacaaaaaagtagttgcaaaattttcgtactggcaaacagcattgctagaagtggacaacatgaataatttgagcatcatcaagacaggcgagcgcttggtgccggtgctcctaaaggccatccaagaggttatcaaggagaaagttgagcagtcgtaatgatgaacagaaattttagttgcacgtgacttacatatttcagctgtaccacttttgatcagacacgttcccagtgggtgcttagcagataacagttcttttactgaatactgtaaaagccttttttttcaaaaataaactaggtttcctccgttttcaaaaaaaaaaaaaaaaaaaaaaaaaaaaaaaaaaaagaaaaaaaaaaaaaaaa

SEQ ID NO: 19739 - protein, 414 aa, Zea mays subsp. mays
  misc_feature (1)..(414): Ceres Seq. ID no. 12374341
MAARVGLLPHAILVSSRALPTPRARVPYPLPPVPSYLRHASSSASRSCRASPRFVAVRAMASGNPYAAELAAAKKAVTLAAKLCQTVQQDIMHSGVQAKADKSPVTVADYGSQILVGFSLKMDVSSGPFSLVAEEDSDELRKDGAEEILEDITDLVNETIFDDGSYNISFTKEGILSAIDDGKSEGGPSGRHWVLDPIDGTKGFLRGDQYAIALALLDEGKVVLGVLACPNLPLSSINNINGNSSGDKVGALFSATIGCGAEVESLDGSPPQKISVCSIDNPVNASFFESYESAHSMHDLTGSIAEKLGVQAPPVRIDSQAKYGALARGDGAIYLRFPHKGYREKIWDHAAGSIVVTEAGGIVTDAAGNDLDFSKGRFLDLDTGIIATNKELMPSLLKAVQEAIKETNQAASLL

SEQ ID NO: 19740 - protein, 355 aa, Zea mays subsp. mays
  misc_feature (1)..(355): Ceres Seq. ID no. 12374342
MASGNPYAAELAAAKKAVTLAAKLCQTVQQDIMHSGVQAKADKSPVTVADYGSQILVGFSLKMDVSSGPFSLVAEEDSDELRKDGAEEILEDITDLVNETIFDDGSYNISFTKEGILSAIDDGKSEGGPSGRHWVLDPIDGTKGFLRGDQYAIALALLDEGKVVLGVLACPNLPLSSINNINGNSSGDKVGALFSATIGCGAEVESLDGSPPQKISVCSIDNPVNASFFESYESAHSMHDLTGSIAEKLGVQAPPVRIDSQAKYGALARGDGAIYLRFPHKGYREKIWDHAAGSIVVTEAGGIVTDAAGNDLDFSKGRFLDLDTGIIATNKELMPSLLKAVQEAIKETNQAASLL

SEQ ID NO: 19741 - protein, 323 aa, Zea mays subsp. mays
  misc_feature (1)..(323): Ceres Seq. ID no. 12374343
MHSGVQAKADKSPVTVADYGSQILVGFSLKMDVSSGPFSLVAEEDSDELRKDGAEEILEDITDLVNETIFDDGSYNISFTKEGILSAIDDGKSEGGPSGRHWVLDPIDGTKGFLRGDQYAIALALLDEGKVVLGVLACPNLPLSSINNINGNSSGDKVGALFSATIGCGAEVESLDGSPPQKISVCSIDNPVNASFFESYESAHSMHDLTGSIAEKLGVQAPPVRIDSQAKYGALARGDGAIYLRFPHKGYREKIWDHAAGSIVVTEAGGIVTDAAGNDLDFSKGRFLDLDTGIIATNKELMPSLLKAVQEAIKETNQAASLL

SEQ ID NO: 19742 - DNA, 1496 bp, Zea mays subsp. mays
  misc_feature (1)..(1496): Ceres Seq. ID no. 12374344
aacccaaacaccacaatccccttcaacaaacgcaccgcactccacggcagccagaaaacacaatccacagagtctccgtgaggtctgagcgaggtaggactagctctgagcgagttcttccgtcttccaggtataatcctagcaactctcactatcctcttcgcatcgctcgtctctttttgagaccagttggatttctcttatttttccttggatcctactacctaatagaacagagctccggagccttttagtttctggtctctgatctactcattttcttttcttccccttttggtgacataggtaggtctagttaagatctgtcgtgcctgttctttgattttagctaagaaccaggcgatttagtcttcttcttccttacaaaaaaaatccccagaaaaaaaaagttgtgagtagtatattcttgtaccatttgatggccgctgctataaatctccccgggcccagcgaggatctgatgcgagcgatggagtccttcatgcaagacgacgccccatcccctctggccatgccgccggcgccgtctttcccagcggccgcagcccacggggcccagtacccggcgacccacctgagcccggcgcagatgcagttcatccaggcccagctccacctgcagcggaacccggggctgggcccgcgggcgcagcccatgaagcccgccgtcccagtgccgccggcgccggcgccgcagcggcctgtgaagctgtaccgcggcgtgcggcagcgtcactggggcaagtgggtggccgagatccggctcccccggaaccgcacccgcctgtggctcgggaccttcgacaccgccgagcaggcggcgctggcctacgaccaggcggcgtaccgcctccgcggggacgcggcgcggctcaacttccccgacaacgcggagtccagggcgccgctcgaccccgccgtggacgccaagctgcaggccatctgcgccaccatcgccgccgcgtcgtcgtcatccaagaattccaaggccaagagcaaggcgatgccaatcaacgcgtccgttctggaagcggcagcggcgtctccgagcaacagctcctccgacgaaggttccggctccgggttcgggtcggacgacgagatgtcctcgtcctccccgacgccggtggtggcgccgccggtggcggacatgggacagctggatttcagcgaggttccgtgggacgaggacgagagcttcgtgctccgcaagtacccgtcctacgagatcgactgggacgcgctgctctccaactagtcgcccttcgccgacagatgtgctgttgtagttcagtagtggcagtatctctggccgccgcagatgaggttttaggcaatctgcaggccgccggcccatgtgtattaagtaggttttgctcagttgttggccctggacttcgccggcgtttttgtgaccggcgtccccgagtgcactgcattggtgtactggtctgtctgtaaaaaaaatggatctg

SEQ ID NO: 19743 - protein, 279 aa, Zea mays subsp. mays
  misc_feature (1)..(279): Ceres Seq. ID no. 12374345
MAAAINLPGPSEDLMRAMESFMQDDAPSPLAMPPAPSFPAAAAHGAQYPATHLSPAQMQFIQAQLHLQRNPGLGPRAQPMKPAVPVPPAPAPQRPVKLYRGVRQRHWGKWVAEIRLPRNRTRLWLGTFDTAEQAALAYDQAAYRLRGDAARLNFPDNAESRAPLDPAVDAKLQAICATIAAASSSSKNSKAKSKAMPINASVLEAAAASPSNSSSDEGSGSGFGSDDEMSSSSPTPVVAPPVADMGQLDFSEVPWDEDESFVLRKYPSYEIDWDALLSN

SEQ ID NO: 19744 - protein, 265 aa, Zea mays subsp. mays
  misc_feature (1)..(265): Ceres Seq. ID no. 12374346
MRAMESFMQDDAPSPLAMPPAPSFPAAAAHGAQYPATHLSPAQMQFIQAQLHLQRNPGLGPRAQPMKPAVPVPPAPAPQRPVKLYRGVRQRHWGKWVAEIRLPRNRTRLWLGTFDTAEQAALAYDQAAYRLRGDAARLNFPDNAESRAPLDPAVDAKLQAICATIAAASSSSKNSKAKSKAMPINASVLEAAAASPSNSSSDEGSGSGFGSDDEMSSSSPTPVVAPPVADMGQLDFSEVPWDEDESFVLRKYPSYEIDWDALLSN

SEQ ID NO: 19745 - protein, 262 aa, Zea mays subsp. mays
  misc_feature (1)..(262): Ceres Seq. ID no. 12374347
MESFMQDDAPSPLAMPPAPSFPAAAAHGAQYPATHLSPAQMQFIQAQLHLQRNPGLGPRAQPMKPAVPVPPAPAPQRPVKLYRGVRQRHWGKWVAEIRLPRNRTRLWLGTFDTAEQAALAYDQAAYRLRGDAARLNFPDNAESRAPLDPAVDAKLQAICATIAAASSSSKNSKAKSKAMPINASVLEAAAASPSNSSSDEGSGSGFGSDDEMSSSSPTPVVAPPVADMGQLDFSEVPWDEDESFVLRKYPSYEIDWDALLSN

SEQ ID NO: 19746 - DNA, 1405 bp, Zea mays subsp. mays
  misc_feature (1)..(1405): Ceres Seq. ID no. 12374348
gattattctgtttgctctcgttcaagtcatcgtctggtcgcgtcggcagcagacacccagagccggagggagcgccatggccgcgtcggatctggagagcaaagccaaggaggccttcgtcgacgacgacttcgagctggccgccgaactctacacccaggccatcgacgccgggcccgccactgccgatctctacgccgaccgcgcccaggcgcacatcaagctcggcaactacactgaggctgtggcagatgctaacaaagcaattggtcttgatcctacaatgcataaagcctactaccggaaaggtgctgcatgcattaatcttgaagaataccaaactgcaaaggctgctcttgagttaggttcttcctatgcaccaggcgattcaaggtttacccgtctattgaaggaatgtgatgagcgcattgctgaggaatctagccaggcaccagcaaagaatgtcgatgctcctgtagctgctactgttgaggacaaggaggatgtcgcaaatatggataatacaccgccagtggtagaacccccaagcaaacctaaatataggcatgactactacaacagtgccacagaagtggtcctcacaatatatgctaagggtgttcctgctgatagtgtagtcattgattttggtgaacagatgttaagtgtatccattgaagtacctggtgaagaaccgtaccattttcagccccgtctgttttctaaggttatccctgagaaatgcaagtatcaagttttgtccaccaaggtcgaaatacgccttgcaaaagctgagcaggtgacatggacaaccctggattatagtggaagaccaaaggctattccccagaagataagcacaccagctgaaacagccccaagaccttcatacccatcttcaaagtcaaaaaaggactgggataaactggaagctgaagtaaaaaaggaggagaaggaagaaaaacttgaaggtgatgctgcattgaacaagttcttccgtgatatctacaaggatgctgatgaagatatgcggagggccatggacaagtcattcagggaatctaatggtaccgttctctcaaccaattggaaagatgttggatcaaagacggtggaagcgagccctcctgatggtatggagctcaagaagtgggaaatttgaagtttggactgcccctcttgtaaatccaggtcttggaagttatgacctagttctgtccacccatttggtgtcgtaagtttggttaagtgtgtgtgtgtttttggttcagctgtcgttcgaggaaaagctactgtaagttgtggactgtgtaaaagctgcaatagattgtgggttgtgaaaaaggtgtatgctgtttaatttaaacaagcataaaacttacacgtatctctattttttcttttt

SEQ ID NO: 19747 - protein, 386 aa, Zea mays subsp. mays
  misc_feature (1)..(386): Ceres Seq. ID no. 12374349
IILFALVQVIVWSRRQQTPRAGGSAMAASDLESKAKEAFVDDDFELAAELYTQAIDAGPATADLYADRAQAHIKLGNYTEAVADANKAIGLDPTMHKAYYRKGAACINLEEYQTAKAALELGSSYAPGDSRFTRLLKECDERIAEESSQAPAKNVDAPVAATVEDKEDVANMDNTPPVVEPPSKPKYRHDYYNSATEVVLTIYAKGVPADSVVIDFGEQMLSVSIEVPGEEPYHFQPRLFSKVIPEKCKYQVLSTKVEIRLAKAEQVTWTTLDYSGRPKAIPQKISTPAETAPRPSYPSSKSKKDWDKLEAEVKKEEKEEKLEGDAALNKFFRDIYKDADEDMRRAMDKSFRESNGTVLSTNWKDVGSKTVEASPPDGMELKKWEI

SEQ ID NO: 19748 - protein, 361 aa, Zea mays subsp. mays
  misc_feature (1)..(361): Ceres Seq. ID no. 12374350
MAASDLESKAKEAFVDDDFELAAELYTQAIDAGPATADLYADRAQAHIKLGNYTEAVADANKAIGLDPTMHKAYYRKGAACINLEEYQTAKAALELGSSYAPGDSRFTRLLKECDERIAEESSQAPAKNVDAPVAATVEDKEDVANMDNTPPVVEPPSKPKYRHDYYNSATEVVLTIYAKGVPADSVVIDFGEQMLSVSIEVPGEEPYHFQPRLFSKVIPEKCKYQVLSTKVEIRLAKAEQVTWTTLDYSGRPKAIPQKISTPAETAPRPSYPSSKSKKDWDKLEAEVKKEEKEEKLEGDAALNKFFRDIYKDADEDMRRAMDKSFRESNGTVLSTNWKDVGSKTVEASPPDGMELKKWEI

SEQ ID NO: 19749 - protein, 292 aa, Zea mays subsp. mays
  misc_feature (1)..(292): Ceres Seq. ID no. 12374351
MHKAYYRKGAACINLEEYQTAKAALELGSSYAPGDSRFTRLLKECDERIAEESSQAPAKNVDAPVAATVEDKEDVANMDNTPPVVEPPSKPKYRHDYYNSATEVVLTIYAKGVPADSVVIDFGEQMLSVSIEVPGEEPYHFQPRLFSKVIPEKCKYQVLSTKVEIRLAKAEQVTWTTLDYSGRPKAIPQKISTPAETAPRPSYPSSKSKKDWDKLEAEVKKEEKEEKLEGDAALNKFFRDIYKDADEDMRRAMDKSFRESNGTVLSTNWKDVGSKTVEASPPDGMELKKWEI

SEQ ID NO: 19750 - DNA, 1828 bp, Zea mays subsp. mays
  misc_feature (1)..(1828): Ceres Seq. ID no. 12374352
acgcgaatccgcatctccagactccaaccagcgctcgtccctccccgttctttcctcctcccttcagccatcgcagtcgcagcgcaggttcttggctggttgctggtgtcgacagcaaagtccgcaactccaatcctgcctgcgctcctcccgtcctcactcagcacccgcgcacgccgcctgcctgtcgattgagatctctttcacgcccctttctgccatcgcacaactgaggtacggttctttgcttattgcagagtatagtatggatgcccgcagtgagtcgtcgtgtcgtgccttcagtaggagccgcagctagtaacatccattttgctggtcaataagtcgtgggaggaagaagatggattatttgaaggtgcaggtggtagagtcatcatttgtagtgccgagcgagccgacggccaacgaaggcgctctggctctcttgcttggacatggttcagtccaacaaagcccacaccccaacgatccacttgtacagctccaacgatgctgcggcggctgattttttcgacctgggcagactcaagaaggctacggccaaagccttggtggccttctaccccctcgccggacgcctcgtcgacagcgacgatggtaggaaggagatcagctgcaacggcgaaggtgcactctttgttgtcgctcgcgcggatggtgatctcactatcgatgaagtcaagaaattcaagccatcaccagagttgaggaggctgtttattccactcatcgagccatcgtccatcataatggccatacaggtgactttcttgaagtgtggaggtgtggtgttaggaacagctatccaccacgccgccacagacgtttcaagcgcgttccacttttttcagacatggtcggcgttctgcaagcatggtgacagtgctgccgtggagctcccgtgccacgaccgcaccctactccgcgcacggtccccgcccacagtccaccccgacgcgctctccacattgcagcctcggctcgtcctcactgaacccgaggggcctcttgccatcgaaatcttcaccatttccagggatcatgtcgcctccctgaagcagctctgcggtggcacgagcaccttttgcgccgtcagcgctctcatctggcagtgcgcgtgcgttgcacgacggatcccaccggactctcaggtgcgcgtgatgttcccggccgacgtccgccgccggatgaggccgcccctcccgacccactacttcggcaacgcagtgatcaggctatacgccgctggcccggcaggggacattggcacggcggcgttggcatccgtcgctgcccgcatcaagggcgccgtcgagcggatggatgacgagctggtgcggtccgcgattgactactacgagatggccgagacgaacaagagacggactgggacaggcatcttaccaccgacggacctgaatattaccagctggttgggtaggccacagcacgacgcagattttggctggggaaagccgcaatccatgtcgcgggcggagtctgtccgcggcggctctatgcacttgatgaacgacgacggtggtaccggcaacgtccgcgtgctcgtgtgcttggaggctgaaaatataaaggagctaggacggctgctttatgcaaagctctagcaagctgctagtgctatgcactaaaaataatattaataataataaggtttgttactttgcttaaggggaaccatactttttccctcgcgatttattattattaattatggcagtttgaataatgaaaaccatttgtaattcctgtgacaattagtttatgcgtccacactagaaataaaaac

SEQ ID NO: 19751 - protein, 396 aa, Zea mays subsp. mays
  misc_feature (1)..(396): Ceres Seq. ID no. 12374353
MVQSNKAHTPTIHLYSSNDAAAADFFDLGRLKKATAKALVAFYPLAGRLVDSDDGRKEISCNGEGALFVVARADGDLTIDEVKKFKPSPELRRLFIPLIEPSSIIMAIQVTFLKCGGVVLGTAIHHAATDVSSAFHFFQTWSAFCKHGDSAAVELPCHDRTLLRARSPPTVHPDALSTLQPRLVLTEPEGPLAIEIFTISRDHVASLKQLCGGTSTFCAVSALIWQCACVARRIPPDSQVRVMFPADVRRRMRPPLPTHYFGNAVIRLYAAGPAGDIGTAALASVAARIKGAVERMDDELVRSAIDYYEMAETNKRRTGTGILPPTDLNITSWLGRPQHDADFGWGKPQSMSRAESVRGGSMHLMNDDGGTGNVRVLVCLEAENIKELGRLLYAKL

SEQ ID NO: 19752 - protein, 291 aa, Zea mays subsp. mays
  misc_feature (1)..(291): Ceres Seq. ID no. 12374354
MAIQVTFLKCGGVVLGTAIHHAATDVSSAFHFFQTWSAFCKHGDSAAVELPCHDRTLLRARSPPTVHPDALSTLQPRLVLTEPEGPLAIEIFTISRDHVASLKQLCGGTSTFCAVSALIWQCACVARRIPPDSQVRVMFPADVRRRMRPPLPTHYFGNAVIRLYAAGPAGDIGTAALASVAARIKGAVERMDDELVRSAIDYYEMAETNKRRTGTGILPPTDLNITSWLGRPQHDADFGWGKPQSMSRAESVRGGSMHLMNDDGGTGNVRVLVCLEAENIKELGRLLYAKL

SEQ ID NO: 19753 - DNA, 915 bp, Zea mays subsp. mays
  misc_feature (1)..(915): Ceres Seq. ID no. 12374370
acaccacactcccgaaacgccgaaaccccaccccgcaccactcatggacgccgccggcgcgcgtccatcggcaccgtcggccgctgctgccgcagtcgccggggcctccgtcgcggacgagccccgggacgcgcgggtggtgcgggagctcctgcgctcgatgggtctcggtgagggcgagtacgaaccccgcgtcgtgcaccagttcctggacctggcctaccgatacgtcggagacgtgctaggggacgcccaagtctacgccgaccacgccgggaaggctcagatcgacgccgacgacgtccgcctcgccatccaggccaaggtcaatttctccttctcccagccgccgccgcgtgaggttctccttgagctggcccgcagccgaaacagaatgccgctgcccaaatcaattgctcctcctggctcaattcccctcccgcctgagcaggacacactgttggcccagaactaccaactcctgcctccgttgaagccgccacctcaatatgaggaaaacgaggatgagaatgaagaatccaacccaagtctgacaccgaacccggcaaattctaatccaaccttctcgcaggatcagcggagtaacgagcaacagcacactccccagcatggccagagggtttcatttcaactcaatgctgtggcagctgctgctgcaaagcgacctcggatgaccgtcgaccagctgaacatcggctaaccagttatcgttggttagactgtagtatcattttcccccatcttttagtgtggtgaatcatgtttcgaagagatttagtgttgtagtggtatgtagccagggcttgcatgcatatgtgtccaagttcgactttgggttgcttgtacttctccatttcataactgaaatcatatttcagatttgagttaaaaggt

SEQ ID NO: 19754 - protein, 239 aa, Zea mays subsp. mays
  misc_feature (1)..(239): Ceres Seq. ID no. 12374371
HHTPETPKPHPAPLMDAAGARPSAPSAAAAAVAGASVADEPRDARVVRELLRSMGLGEGEYEPRVVHQFLDLAYRYVGDVLGDAQVYADHAGKAQIDADDVRLAIQAKVNFSFSQPPPREVLLELARSRNRMPLPKSIAPPGSIPLPPEQDTLLAQNYQLLPPLKPPPQYEENEDENEESNPSLTPNPANSNPTFSQDQRSNEQQHTPQHGQRVSFQLNAVAAAAAKRPRMTVDQLNIG

SEQ ID NO: 19755 - protein, 225 aa, Zea mays subsp. mays
  misc_feature (1)..(225): Ceres Seq. ID no. 12374372
MDAAGARPSAPSAAAAAVAGASVADEPRDARVVRELLRSMGLGEGEYEPRVVHQFLDLAYRYVGDVLGDAQVYADHAGKAQIDADDVRLAIQAKVNFSFSQPPPREVLLELARSRNRMPLPKSIAPPGSIPLPPEQDTLLAQNYQLLPPLKPPPQYEENEDENEESNPSLTPNPANSNPTFSQDQRSNEQQHTPQHGQRVSFQLNAVAAAAAKRPRMTVDQLNIG

SEQ ID NO: 19756 - protein, 186 aa, Zea mays subsp. mays
  misc_feature (1)..(186): Ceres Seq. ID no. 12374373
MGLGEGEYEPRVVHQFLDLAYRYVGDVLGDAQVYADHAGKAQIDADDVRLAIQAKVNFSFSQPPPREVLLELARSRNRMPLPKSIAPPGSIPLPPEQDTLLAQNYQLLPPLKPPPQYEENEDENEESNPSLTPNPANSNPTFSQDQRSNEQQHTPQHGQRVSFQLNAVAAAAAKRPRMTVDQLNIG

SEQ ID NO: 19757 - DNA, 1472 bp, Zea mays subsp. mays
  misc_feature (1)..(1472): Ceres Seq. ID no. 12374378
gcacgagaccattacctagaacatcctaatcgaaaagtacttggcaatcctctctagctagctcagcatccgaggacgggacttgcattgcactatggatgctgctcttatgcctctgctcgtcgtctccctcgtcttctgcctgctggcggcttccccggcggcgtccgcggcgcgggccttcttcgtcttcggcgactccctcgtcgacaatggcaacaacaactacctgctgaccacggcgcgcgccgacgcgcccccctacggcatcgacttccccacgcaccaagccacgggccgcttctccaacgggctcaacatccccgacatcatcagcgagcacctcggggccgaacctgcgctgccgtacctgagccccgagctccgaggggagaagctgctcgtcggcgccaacttcgcgtcggccggcgtcgggatcctcaacgacacaggaatacaatttgtgaacattatcaggatcggcgaccagctgcagtacttccgggagtaccagcggaagctgcgagccctcgtcggcgagccgcaggcgacgcagctcgtgaaccaggccctcgtgctcatcacgctcggcggcaacgacttcgtgaacaactactacctggtgcccatgtccgtgcggtcgcgccagtacgcgctcccggactatgtccgcttcatcgtctccgagtacaggaagatcctctcgaggctgtacgagctgggcgcgcggcgcgtgatcgtgacggggacggggccgctggggtgcgtcccggccgagctggcgctgcacagccagaacggcgagtgcgcggcggagctgacgcgcgccgtgaacctcttcaacccgcagatggtggacatggtgcgcggcctcaaccgcgccatcggcaccgacntcttngtcgccgccaaccacctaccgcatgaacttcgagctacctcgcaaacccgcangacttcggggttcacgaacgtgcangtggcgtgctgcggccagggcccgtacaacggggatcgggctgtgcacggcggcgtcgaacgtgtgcgacaaccgcgacgtgttcgcgttctgggacgcgttccaccccacggagagggcaaaccgcatcatcgtcgcccagttcatgcacggcgacacggactacatgcaccccatgaacctcagcaccatcctcgccatggaccaggagggcctctagactatagcttgatcagccggacacgattatacgtacatgcgtgatgtgtctcacgtgcctagcacgttagtcatgttttggatgatggcagcccaatttgccaataatattcgtgcctcgatccaagtttcactaatgtgtcactcacgccttaaaaagaattagtgactggctatggttaatcgatccgtgttatatgtgctccgcgagcattcgtttgttggtggtgttggttcgttgtcaagcgaaatggccatttgcagccgtggcgtc

SEQ ID NO: 19758 - protein, 382 aa, Zea mays subsp. mays
  misc_feature (1)..(382): Ceres Seq. ID no. 12374379
  misc_feature (268)..(268): Xaa is any aa, unknown or other
  misc_feature (269)..(269): Xaa is any aa, unknown or other
  misc_feature (287)..(287): Xaa is any aa, unknown or other
  misc_feature (295)..(295): Xaa is any aa, unknown or other
MDAALMPLLVVSLVFCLLAASPAASAARAFFVFGDSLVDNGNNNYLLTTARADAPPYGIDFPTHQATGRFSNGLNIPDIISEHLGAEPALPYLSPELRGEKLLVGANFASAGVGILNDTGIQFVNIIRIGDQLQYFREYQRKLRALVGEPQATQLVNQALVLITLGGNDFVNNYYLVPMSVRSRQYALPDYVRFIVSEYRKILSRLYELGARRVIVTGTGPLGCVPAELALHSQNGECAAELTRAVNLFNPQMVDMVRGLNRAIGTDXXVAANHLPHELRATSQTRXTSGFTNVXVACCGQGPYNGDRAVHGGVERVRQPRRVRVLGRVPPHGEGKPHHRRPVHARRHGLHAPHEPQHHPRHGPGGPLDYSLISRTRLYVHA

SEQ ID NO: 19759 - protein, 377 aa, Zea mays subsp. mays
  misc_feature (1)..(377): Ceres Seq. ID no. 12374380
  misc_feature (263)..(263): Xaa is any aa, unknown or other
  misc_feature (264)..(264): Xaa is any aa, unknown or other
  misc_feature (282)..(282): Xaa is any aa, unknown or other
  misc_feature (290)..(290): Xaa is any aa, unknown or other
MPLLVVSLVFCLLAASPAASAARAFFVFGDSLVDNGNNNYLLTTARADAPPYGIDFPTHQATGRFSNGLNIPDIISEHLGAEPALPYLSPELRGEKLLVGANFASAGVGILNDTGIQFVNIIRIGDQLQYFREYQRKLRALVGEPQATQLVNQALVLITLGGNDFVNNYYLVPMSVRSRQYALPDYVRFIVSEYRKILSRLYELGARRVIVTGTGPLGCVPAELALHSQNGECAAELTRAVNLFNPQMVDMVRGLNRAIGTDXXVAANHLPHELRATSQTRXTSGFTNVXVACCGQGPYNGDRAVHGGVERVRQPRRVRVLGRVPPHGEGKPHHRRPVHARRHGLHAPHEPQHHPRHGPGGPLDYSLISRTRLYVHA

SEQ ID NO: 19760 - protein, 204 aa, Zea mays subsp. mays
  misc_feature (1)..(204): Ceres Seq. ID no. 12374381
  misc_feature (90)..(90): Xaa is any aa, unknown or other
  misc_feature (91)..(91): Xaa is any aa, unknown or other
  misc_feature (109)..(109): Xaa is any aa, unknown or other
  misc_feature (117)..(117): Xaa is any aa, unknown or other
MSVRSRQYALPDYVRFIVSEYRKILSRLYELGARRVIVTGTGPLGCVPAELALHSQNGECAAELTRAVNLFNPQMVDMVRGLNRAIGTDXXVAANHLPHELRATSQTRXTSGFTNVXVACCGQGPYNGDRAVHGGVERVRQPRRVRVLGRVPPHGEGKPHHRRPVHARRHGLHAPHEPQHHPRHGPGGPLDYSLISRTRLYVHA

SEQ ID NO: 19761 - DNA, 1265 bp, Zea mays subsp. mays
  misc_feature (1)..(1265): Ceres Seq. ID no. 12374386
gtctgccgagccgagtgttcctttctagccttcacttctcagcgcggcagccttcgatcccccgactgcagccgccagccgcaccatggagcaagccgccatgccgcaggttccccgcgtcaagctcggcatccaggggcttgaggtgtcgaagctggggttcgggtgcatggggctcacgggcacctacaacgcgccgctcggcgacgaggccgtcgccgccgtcgtcgcgcacgccttccgccgcgggatcaccttcttcgacacctccgatgcctacgggccccgcaccaacgagaccctcctggggaaggcgctcaagcagctgccgagggagcaggtgcaggtggccaccaagttcgggataggccagggcgccgctggcatgaccgtgtgcggcacgcccgagtacgtacgcgcctgctgcgaggccagcctgcgccgcctcgacgccggctacatcgacctctactaccagcaccgcgtcgacaccaccgtccccatcgaggatacgattggtgagctcaagaagttggtggaggaggggaaggtcaagtacatcggcttgtcagaggccagcccagacacaatccgccgtgcgcacgccgtgcatcccatcaccgccgtgcagatggagtggtcgctctggtcccgagacatcgagcccgagatcgtgccactctgcagagaattggggattggaattgtggcttacagtccaattggccgtggattttttggtggaagaggagtgacacagcaagtttcttctgaatctagtctgcaaaggcatccaagatttacaacagaaagcttggagaagaacaagcagatttacctgaaaatagaagatttggcgaagaagtaccagtgcagcccagctcagctagctctagcctgggttctgcatcaaggggatgatgtggttcctataccagggacaacaaaaacgaagaacctagatgccaacgttgactccttgaaggtgaagctcacagctgaggacctgaaggaaattggcagccagatacgtgcagaagatgtggctggtggaagacaatacaattcctatgcacatacctcctggaagtacgcagatacaccaaaaaagtgaagttctggtcctggaaaccttgtagcaatcacaggcgtatgcaaatgttgaactatttccctgcatttgagccggaatcgtacgatgatgcatcttgtgaacatgcggcactaataaatcgagacgaagaataatgtgttttccatcagtg

SEQ ID NO: 19762 - protein, 342 aa, Zea mays subsp. mays
  misc_feature (1)..(342): Ceres Seq. ID no. 12374387
MEQAAMPQVPRVKLGIQGLEVSKLGFGCMGLTGTYNAPLGDEAVAAVVAHAFRRGITFFDTSDAYGPRTNETLLGKALKQLPREQVQVATKFGIGQGAAGMTVCGTPEYVRACCEASLRRLDAGYIDLYYQHRVDTTVPIEDTIGELKKLVEEGKVKYIGLSEASPDTIRRAHAVHPITAVQMEWSLWSRDIEPEIVPLCRELGIGIVAYSPIGRGFFGGRGVTQQVSSESSLQRHPRFTTESLEKNKQIYLKIEDLAKKYQCSPAQLALAWVLHQGDDVVPIPGTTKTKNLDANVDSLKVKLTAEDLKEIGSQIRAEDVAGGRQYNSYAHTSWKYADTPKK

SEQ ID NO: 19763 - protein, 337 aa, Zea mays subsp. mays
  misc_feature (1)..(337): Ceres Seq. ID no. 12374388
MPQVPRVKLGIQGLEVSKLGFGCMGLTGTYNAPLGDEAVAAVVAHAFRRGITFFDTSDAYGPRTNETLLGKALKQLPREQVQVATKFGIGQGAAGMTVCGTPEYVRACCEASLRRLDAGYIDLYYQHRVDTTVPIEDTIGELKKLVEEGKVKYIGLSEASPDTIRRAHAVHPITAVQMEWSLWSRDIEPEIVPLCRELGIGIVAYSPIGRGFFGGRGVTQQVSSESSLQRHPRFTTESLEKNKQIYLKIEDLAKKYQCSPAQLALAWVLHQGDDVVPIPGTTKTKNLDANVDSLKVKLTAEDLKEIGSQIRAEDVAGGRQYNSYAHTSWKYADTPKK

SEQ ID NO: 19764 - protein, 314 aa, Zea mays subsp. mays
  misc_feature (1)..(314): Ceres Seq. ID no. 12374389
MGLTGTYNAPLGDEAVAAVVAHAFRRGITFFDTSDAYGPRTNETLLGKALKQLPREQVQVATKFGIGQGAAGMTVCGTPEYVRACCEASLRRLDAGYIDLYYQHRVDTTVPIEDTIGELKKLVEEGKVKYIGLSEASPDTIRRAHAVHPITAVQMEWSLWSRDIEPEIVPLCRELGIGIVAYSPIGRGFFGGRGVTQQVSSESSLQRHPRFTTESLEKNKQIYLKIEDLAKKYQCSPAQLALAWVLHQGDDVVPIPGTTKTKNLDANVDSLKVKLTAEDLKEIGSQIRAEDVAGGRQYNSYAHTSWKYADTPKK

SEQ ID NO: 19765 - DNA, 1353 bp, Zea mays subsp. mays
  misc_feature (1)..(1353): Ceres Seq. ID no. 12374404
ctcccgtccaggttcactccgccactccggccccctcatcttcttcccgtccccctcttcgttgcccccagatcccgcaaaccgcgaaaagaaaccgcatatcagcggacagcgggcgctgctcgttctcatcgcccccctctcgtctctcgcggagccgaccccgtccccattcggacctcagctagccaccaccaccatggcttcttcgaagaggagatttggtgctgccggcggcgcggacaagaaggatctattccatgtcgtccacaaggtgcccgccggcgacagcccgtacgtcgtagccaagcacctccagctcgtggagaagcaaccggatgtggcgatcgtgtggttctggaaggcaatcaactcaggggacagggtggacagcgccctgaaggacatggccatggtgatgaagcagcaggaccgttccgaggaggcaatcgaggccatcaggtccttcaggcacctctgctccaagcaggctcaggaatccctcgacaacctcctcattgacctctacaagaaatgcgggaaagttgaggagcagatcgagctcctgaaacagaagctcaagtcgatataccttggcgaggccttcaacgggaaggcgacgaagaaagcgcggtcccatggcaagaagtttcaggtctcgatccaacaagagacgtctcgtattctgggcaatcttggctgggcttacatgcagcagaacaacttcgaagccgccgagctggtgtaccgcaaggcgcaagctatcgagcccgatgccaacagggcgtgcaaccttgggctgtgcctgatcaagcagggcaggcacgaggaggcacggcaagcactcgaggacgtccgattgcgcagaatctatggatcagaagatgcaaaggtggttgcccgtgcggagcagcttctccgcgagctaaacccgttgcaatgcgtttcatcgccgttccaggttggcctcagcgtccatgaagggatcatgggtgaaccagacctagtagtgatgaacgagtggacgccgttcaggtcgaggaggctgcctgtgtttgaggagatagcaactttccgggaccaaatggcttgttgatgcattactttgcatggtttaatttatctgtcagtgtcacactcacatccctctagaagtttttgttcgtatactgggtgtgggggcgtgacggtgaggaatagagatcagtatatatcatatagctggggttgatgcaaagcgttgcctttaggatagtatttggttcatgttatatcactgtatggttcagatttcagtgaacaaatgttcgtgcgtgccctgatcttgtacaggatttacagttggctgttgtg

SEQ ID NO: 19766 - protein, 364 aa, Zea mays subsp. mays
  misc_feature (1)..(364): Ceres Seq. ID no. 12374405
SRPGSLRHSGPLIFFPSPSSLPPDPANREKKPHISGQRALLVLIAPLSSLAEPTPSPFGPQLATTTMASSKRRFGAAGGADKKDLFHVVHKVPAGDSPYVVAKHLQLVEKQPDVAIVWFWKAINSGDRVDSALKDMAMVMKQQDRSEEAIEAIRSFRHLCSKQAQESLDNLLIDLYKKCGKVEEQIELLKQKLKSIYLGEAFNGKATKKARSHGKKFQVSIQQETSRILGNLGWAYMQQNNFEAAELVYRKAQAIEPDANRACNLGLCLIKQGRHEEARQALEDVRLRRIYGSEDAKVVARAEQLLRELNPLQCVSSPFQVGLSVHEGIMGEPDLVVMNEWTPFRSRRLPVFEEIATFRDQMAC

SEQ ID NO: 19767 - protein, 298 aa, Zea mays subsp. mays
  misc_feature (1)..(298): Ceres Seq. ID no. 12374406
MASSKRRFGAAGGADKKDLFHVVHKVPAGDSPYVVAKHLQLVEKQPDVAIVWFWKAINSGDRVDSALKDMAMVMKQQDRSEEAIEAIRSFRHLCSKQAQESLDNLLIDLYKKCGKVEEQIELLKQKLKSIYLGEAFNGKATKKARSHGKKFQVSIQQETSRILGNLGWAYMQQNNFEAAELVYRKAQAIEPDANRACNLGLCLIKQGRHEEARQALEDVRLRRIYGSEDAKVVARAEQLLRELNPLQCVSSPFQVGLSVHEGIMGEPDLVVMNEWTPFRSRRLPVFEEIATFRDQMAC

SEQ ID NO: 19768 - protein, 229 aa, Zea mays subsp. mays
  misc_feature (1)..(229): Ceres Seq. ID no. 12374407
MAMVMKQQDRSEEAIEAIRSFRHLCSKQAQESLDNLLIDLYKKCGKVEEQIELLKQKLKSIYLGEAFNGKATKKARSHGKKFQVSIQQETSRILGNLGWAYMQQNNFEAAELVYRKAQAIEPDANRACNLGLCLIKQGRHEEARQALEDVRLRRIYGSEDAKVVARAEQLLRELNPLQCVSSPFQVGLSVHEGIMGEPDLVVMNEWTPFRSRRLPVFEEIATFRDQMAC

SEQ ID NO: 19769 - DNA, 1566 bp, Zea mays subsp. mays
  misc_feature (1)..(1566): Ceres Seq. ID no. 12374418
ggcactgccattcccgtttcctcgctcgaacacacaccgaagagagagacagagcgagagaggatggcgtccctggcgcagcacgtcgcgggcctaccgtgcccccctctatccggcgcgtcgcgccgtcgccccgcggcgcagaggcggcctccgtcggcgcttgtgtgcggtacctatgcgctgaccaaggacgagcgggagcgggagcggatgcgccaggtgttcgacgacgcctccgagcgctgccgcaccgcgcccatggagggcgtcgccttctcccccgacgacctcgacaccgccgtcgagtccaccgacatagacacggagatcggctcgctcattaaaggaacagtatttatgactacctcaaatggtgcatatatcgacatccaatccaagtctactgcttttttgcccttagatgaggcatgtcttcttgatatcgataatgttgaagaggctggcattcgtcctgggttagtagaagaattcatgataattgatgagaacccaggtgatgaaactttgattctaagtttgcaagcaattcagcaagaacttgcatgggaaaggtgccggcaacttcaggccgaagatgtcgttgtcacgggtaaagtaattggtggaaacaaaggaggtgtagtagctcttgtggatgggcttaagggtttcgttccattttcgcaagtgtcatcgaaaacaaccgccgaagagctgcttgagaaagaattgcctctgaagtttgtagaggtcgatgaggaacaaggcaggcttgtcctcagtaatcgcaaggcaatggcagatagtcaggcccagctaggtattggatcagttgtcttgggaactgtagagagcctaaaaccttatggcgccttcattgacatcggtggaatcaacggccttctccatgtgagccagattagtcatgaccgtgttgcagatatctcaacagttctgcaaccaggagataccctcaaggttatgatactgagccatgaccgtgaaagaggccgagtcagcctttctactaagaagcttgagccaacacctggtgacatgatccgcaatcccaagcttgtgtttgagaaggctgatgagatggctcagatattcaggcagagaatagctcaggcagaggctatggctcgtgctgacatgttgagattccagccagagagtggattgaccctcagttcagagggcatcttaggaccattgtcgtcggatgcaccttcggaggattctgaagaacccacagatgaatagaggcagttgacgaagtgcaccgggtttgagatatgtgatggcagttcatcatgctcattttccttggggtgggggaggcatgacgagagcatgttctgttcagatcgttttccccgttccacttattcttgtcttgtactaggaaatctgaaaatgtaacaaggttctgaagacaccgaaaagaaatgtaattaaatccctctgtgaagttatcccattctcgcaggaacctcaatgtgtagtctgatcgttgagtgtatattttgtaattttgaatgcattttgaatgcgtattcc

SEQ ID NO: 19770 - protein, 422 aa, Zea mays subsp. mays
  misc_feature (1)..(422): Ceres Seq. ID no. 12374419
GTAIPVSSLEHTPKRETERERMASLAQHVAGLPCPPLSGASRRRPAAQRRPPSALVCGTYALTKDERERERMRQVFDDASERCRTAPMEGVAFSPDDLDTAVESTDIDTEIGSLIKGTVFMTTSNGAYIDIQSKSTAFLPLDEACLLDIDNVEEAGIRPGLVEEFMIIDENPGDETLILSLQAIQQELAWERCRQLQAEDVVVTGKVIGGNKGGVVALVDGLKGFVPFSQVSSKTTAEELLEKELPLKFVEVDEEQGRLVLSNRKAMADSQAQLGIGSVVLGTVESLKPYGAFIDIGGINGLLHVSQISHDRVADISTVLQPGDTLKVMILSHDRERGRVSLSTKKLEPTPGDMIRNPKLVFEKADEMAQIFRQRIAQAEAMARADMLRFQPESGLTLSSEGILGPLSSDAPSEDSEEPTDE

SEQ ID NO: 19771 - protein, 401 aa, Zea mays subsp. mays
  misc_feature (1)..(401): Ceres Seq. ID no. 12374420
MASLAQHVAGLPCPPLSGASRRRPAAQRRPPSALVCGTYALTKDERERERMRQVFDDASERCRTAPMEGVAFSPDDLDTAVESTDIDTEIGSLIKGTVFMTTSNGAYIDIQSKSTAFLPLDEACLLDIDNVEEAGIRPGLVEEFMIIDENPGDETLILSLQAIQQELAWERCRQLQAEDVVVTGKVIGGNKGGVVALVDGLKGFVPFSQVSSKTTAEELLEKELPLKFVEVDEEQGRLVLSNRKAMADSQAQLGIGSVVLGTVESLKPYGAFIDIGGINGLLHVSQISHDRVADISTVLQPGDTLKVMILSHDRERGRVSLSTKKLEPTPGDMIRNPKLVFEKADEMAQIFRQRIAQAEAMARADMLRFQPESGLTLSSEGILGPLSSDAPSEDSEEPTDE

SEQ ID NO: 19772 - protein, 351 aa, Zea mays subsp. mays
  misc_feature (1)..(351): Ceres Seq. ID no. 12374421
MRQVFDDASERCRTAPMEGVAFSPDDLDTAVESTDIDTEIGSLIKGTVFMTTSNGAYIDIQSKSTAFLPLDEACLLDIDNVEEAGIRPGLVEEFMIIDENPGDETLILSLQAIQQELAWERCRQLQAEDVVVTGKVIGGNKGGVVALVDGLKGFVPFSQVSSKTTAEELLEKELPLKFVEVDEEQGRLVLSNRKAMADSQAQLGIGSVVLGTVESLKPYGAFIDIGGINGLLHVSQISHDRVADISTVLQPGDTLKVMILSHDRERGRVSLSTKKLEPTPGDMIRNPKLVFEKADEMAQIFRQRIAQAEAMARADMLRFQPESGLTLSSEGILGPLSSDAPSEDSEEPTDE

SEQ ID NO: 19773 - DNA, 1429 bp, Zea mays subsp. mays
  misc_feature (1)..(1429): Ceres Seq. ID no. 12374435
agtccaagtctccagctacgactgccaggtctccgcttgtcgccgtcacgcgcgcgcaggggcagggcgcaccatccccgcgccgccatgtccggcaccgggtgcctccccaccgacggcccggccctatcccgggtctgccgggacggcgcggccgccgcacggctcaagacggggtcgctgctggccattctcgtcgccagcgccgtcggcatctgcctccccgtcgcgctcacgcgggccttccgcggcagcccaaactacgcgcggggcctgctcctcgtcaagtgctacgcggctggggtcatcctctccacctcgctcgtccacgtgctccccgacgcgcacgccgccctcgccgactgcgccgtcgcctcgcgcaggccctggagggacttccccttcgcgggccttttcaccctcgtcggcgcgctgctcgcgctcctcgtcgacctctccgcctcctcccacctcgaggcccacgcccacgtcggcgcccaccacgaaactccctacgccccgatcccgaagaaggtacccgtgttcgagctcgccggcgaaatgagccccaagaaacgcgctttcttgggcgacgaccgagaagaggaccccgcgccgcacgccgccaccaacggcgcagacccggaccgcgacgacgtggcgctcttcggacccaagaagggcgcccgcagcgacgaggtcccggtcatcactgccgggtgccatgccgtcgcccatgaagtggtggaggtaggggaggggcccggtgaggacgaggaggaggccaggaggaagcagaagatggtgtccaaagtgctggagattgggatagtcttccactccgtcatcatcggagttacaatggggatgtcccaggatgtctgtgcaatccggccacttgtggttgcgctctccttccatcaggtgttcgaggggatgggcctgggcggatgcatcgcacaggctggttttgggatggcaacagttggctacatgtgcataatgttctcagtgacgacgccattgggaattcttcttggaatgctagtgttccacatgactggctacgacgatagcaatccaaatgccttaataatggaagggatccttggttcactttcggctggaattctcatctatatggcgctagtcgacctagtttctcttgattttttccacaacaagatgatgtcagcgtctttgaagctgaagaaggcgtgttacattgccttggtgcttggatctgcttctatgtcggtattagctctctgggcataggcattttgaagaaaagccttatttacgatcttcagaggtattgctccttgatgtaaaggaatggataatttgggggccaacagtacactagtccctcatgtaaatttgaacacaaaggaaactgaaaattcacgaccacagtttgtgagct

SEQ ID NO: 19774 - protein, 425 aa, Zea mays subsp. mays
  misc_feature (1)..(425): Ceres Seq. ID no. 12374436
SPSLQLRLPGLRLSPSRARRGRAHHPRAAMSGTGCLPTDGPALSRVCRDGAAAARLKTGSLLAILVASAVGICLPVALTRAFRGSPNYARGLLLVKCYAAGVILSTSLVHVLPDAHAALADCAVASRRPWRDFPFAGLFTLVGALLALLVDLSASSHLEAHAHVGAHHETPYAPIPKKVPVFELAGEMSPKKRAFLGDDREEDPAPHAATNGADPDRDDVALFGPKKGARSDEVPVITAGCHAVAHEVVEVGEGPGEDEEEARRKQKMVSKVLEIGIVFHSVIIGVTMGMSQDVCAIRPLVVALSFHQVFEGMGLGGCIAQAGFGMATVGYMCIMFSVTTPLGILLGMLVFHMTGYDDSNPNALIMEGILGSLSAGILIYMALVDLVSLDFFHNKMMSASLKLKKACYIALVLGSASMSVLALWA

SEQ ID NO: 19775 - protein, 396 aa, Zea mays subsp. mays
  misc_feature (1)..(396): Ceres Seq. ID no. 12374437
MSGTGCLPTDGPALSRVCRDGAAAARLKTGSLLAILVASAVGICLPVALTRAFRGSPNYARGLLLVKCYAAGVILSTSLVHVLPDAHAALADCAVASRRPWRDFPFAGLFTLVGALLALLVDLSASSHLEAHAHVGAHHETPYAPIPKKVPVFELAGEMSPKKRAFLGDDREEDPAPHAATNGADPDRDDVALFGPKKGARSDEVPVITAGCHAVAHEVVEVGEGPGEDEEEARRKQKMVSKVLEIGIVFHSVIIGVTMGMSQDVCAIRPLVVALSFHQVFEGMGLGGCIAQAGFGMATVGYMCIMFSVTTPLGILLGMLVFHMTGYDDSNPNALIMEGILGSLSAGILIYMALVDLVSLDFFHNKMMSASLKLKKACYIALVLGSASMSVLALWA

SEQ ID NO: 19776 - protein, 245 aa, Zea mays subsp. mays
  misc_feature (1)..(245): Ceres Seq. ID no. 12374438
SKSPATTARSPLVAVTRAQGQGAPSPRRHVRHRVPPHRRPGPIPGLPGRRGRRTAQDGVAAGHSRRQRRRHLPPRRAHAGLPRQPKLRAGPAPRQVLRGWGHPLHLARPRAPRRARRPRRLRRRLAQALEGLPLRGPFHPRRRAARAPRRPLRLLPPRGPRPRRRPPRNSLRPDPEEGTRVRARRRNEPQETRFLGRRPRRGPRAARRHQRRRPGPRRRGALRTQEGRPQRRGPGHHCRVPCRRP

SEQ ID NO: 19777 - DNA, 1282 bp, Zea mays subsp. mays
  misc_feature (1)..(1282): Ceres Seq. ID no. 12374443
tacctaccccctgcgcttgcacaaaatccttcttgatccgcacaggaaggtggaaggtcccggcagaagaacttggcgggcgaaaggcgaaaccgacgtgctcccgggcgggcggcgacagcggcatggagcgagagcggcaggcagtggcgaggaacaggaaggtggtgctgcgcgggtacatcgaccgcgcgcccagggaggaagacatggagctcgtcgacggcggcgccgtggagctgcgcgtccccgagggcggcggcggccccgcggtgctggtgaagaacctctacctatcctgcgacccttacatgcgcggcaggatgcgggacttccgcaactcctacatcccgcccttcaaacctggatcacctattgaagggtttggcgtggggagggtggtcgactccactcatccaggattcagtgccggtgacgttgtttccgggatgactggatgggaggactacagtctgatcaccaatcctgaacagctcaggaagatccagcaaagcgacataccactctcctatcatctgggccttcttggcatgcctggctttacagcttatgttggattctatgagatctgttcaccaaagaaaggggagtttgtttttgtttctgcggcatcgggagcagttgggcaaattgttggtcaacttgcgaagctccatggttgctatgttgttggaagcgctgggacagatcagaaggttgagctcttaaaggaaaaattcggatttgatgcgactttcaattataaggaagagcctgacttgactgctgccctgaaaaggcacttccctgaaggcatagacatctacttcgagaacgtaggcgggccgatgctcgatgctgtactactcaacatgcgagtacatggccgcattgcggtgtgtggcatggtttcccagcacggggtgactgcccctgccgggatccacaacctgttctccttgataagcaagaggatagcgatgaaggggttcatccagagcgattacgtgcacctgttcccgcagttcgtcgatgacatcaccaggcattacagagacgggaagatcgtgtatgtggaagacatgagcgttgggctggagagtgggccggcttccttcgtcggtctgttcagcggtaaaaatgttggcaagcaggtcgtctgtgtgtcgcgggattgaaaggcctggattttgttccctactggccagtacccttaaataaaatcaggaaaacattattttcaactccgagaaggaccccactagccagtaccacggtcgtg

SEQ ID NO: 19778 - protein, 391 aa, Zea mays subsp. mays
  misc_feature (1)..(391): Ceres Seq. ID no. 12374444
PTPCACTKSFLIRTGRWKVPAEELGGRKAKPTCSRAGGDSGMERERQAVARNRKVVLRGYIDRAPREEDMELVDGGAVELRVPEGGGGPAVLVKNLYLSCDPYMRGRMRDFRNSYIPPFKPGSPIEGFGVGRVVDSTHPGFSAGDVVSGMTGWEDYSLITNPEQLRKIQQSDIPLSYHLGLLGMPGFTAYVGFYEICSPKKGEFVFVSAASGAVGQIVGQLAKLHGCYVVGSAGTDQKVELLKEKFGFDATFNYKEEPDLTAALKRHFPEGIDIYFENVGGPMLDAVLLNMRVHGRIAVCGMVSQHGVTAPAGIHNLFSLISKRIAMKGFIQSDYVHLFPQFVDDITRHYRDGKIVYVEDMSVGLESGPASFVGLFSGKNVGKQVVCVSRD

SEQ ID NO: 19779 - protein, 350 aa, Zea mays subsp. mays
  misc_feature (1)..(350): Ceres Seq. ID no. 12374445
MERERQAVARNRKVVLRGYIDRAPREEDMELVDGGAVELRVPEGGGGPAVLVKNLYLSCDPYMRGRMRDFRNSYIPPFKPGSPIEGFGVGRVVDSTHPGFSAGDVVSGMTGWEDYSLITNPEQLRKIQQSDIPLSYHLGLLGMPGFTAYVGFYEICSPKKGEFVFVSAASGAVGQIVGQLAKLHGCYVVGSAGTDQKVELLKEKFGFDATFNYKEEPDLTAALKRHFPEGIDIYFENVGGPMLDAVLLNMRVHGRIAVCGMVSQHGVTAPAGIHNLFSLISKRIAMKGFIQSDYVHLFPQFVDDITRHYRDGKIVYVEDMSVGLESGPASFVGLFSGKNVGKQVVCVSRD

SEQ ID NO: 19780 - protein, 322 aa, Zea mays subsp. mays
  misc_feature (1)..(322): Ceres Seq. ID no. 12374446
MELVDGGAVELRVPEGGGGPAVLVKNLYLSCDPYMRGRMRDFRNSYIPPFKPGSPIEGFGVGRVVDSTHPGFSAGDVVSGMTGWEDYSLITNPEQLRKIQQSDIPLSYHLGLLGMPGFTAYVGFYEICSPKKGEFVFVSAASGAVGQIVGQLAKLHGCYVVGSAGTDQKVELLKEKFGFDATFNYKEEPDLTAALKRHFPEGIDIYFENVGGPMLDAVLLNMRVHGRIAVCGMVSQHGVTAPAGIHNLFSLISKRIAMKGFIQSDYVHLFPQFVDDITRHYRDGKIVYVEDMSVGLESGPASFVGLFSGKNVGKQVVCVSRD

SEQ ID NO: 19781 - DNA, 1736 bp, Zea mays subsp. mays
  misc_feature (1)..(1736): Ceres Seq. ID no. 12374455
gcatcggcggacatggtggtggccgtgcagctggccgctcttctcgcgctgctgctcgcgctgtggcgcctggtgtggcggccgcacgccgtggcgcggtcgttcgccaggcagggcatccggggcccgccctacacgttcctggcagggtccttgccggaggcgaagcggctgctgatggctggccggagagggacggcgcccctggacgccggctgccacgacatcatgcccgtactcctgccgcagtttctcagatgggtcgcggactatgggagaacgttgctgttctggatcgggccgattcccgctgtcttgtctactgatctacagctgattaagcaggttctgacagacaggacgggcctgtatcagaaggacttcatgatccccgtgctcaagttcctcttcggcaacggtgtcatattgataaacggagacgattggaagcggcaccgcaaagtggtcctccctgcgttcaaccatgagacgatcaagagcatgtcggcggtgacggcagaggtaacggagcagatgatgcagcaatggcgcggccagatacacggaagcgaagaggaatccgccgagatagacatgatccacgccttcaacgacctgacctccaaggtcaacggccgcgtcgccttcggcaccagccaccgggaagtcgaggaggtcatcgtactgatgcgggagatgcagaagctcgccactgcggccacgctcgatgctccaatactctggtatctgccaactcggcgtaacctgcacgtccggcgtctgaacaaacagctgagaagcaagatcatgtccatcatgcaggcgcggctggccgccgacggagctgataggcgtggtgggcgcggcggcgccgtttccggcggaggcgacctacttgggctgttgctagaggcgtggacgccgcagccgcagcagcacgggaacggcggcgagacgctgacaaccgacgaggtgatcgacgagtgcaagaccttcttcgccgcggggcaggaaaccacagctaccctcctggtctgggccatgttcctgctcgccgtgcacccggaatggcaggacaaagtcagggaggaggtcgtcagggaattctgcaccggcgacgacggcgaggttccccatgccgatgtcctcgccaagctcaagctgctatacatggtgttgctggagacgtcgcgcctctacccgccgatcgtgtacatacagcggagggctgcctgggacgccgtccttggaggcatcaaggtgccccagggcaccgtcatctccatccccattgccatgctgcaccgggacaagcaggtctggggccccgacgccgatgagttcaacccgatgaggttcgagcatggcctcacaaaggccgccaaggatcccaaggcgctgctgtctttctccctgggcccaagagtgtgcactggccagagcttcggcatcgtagaagtgcaggtcgtcatggcgatgatcctcaggaggttctccttctccctctccccaaagtatgttcacaagcccaagtatctcctgtccttgacacccaagcttgggatgcctctcatcgtcaggaatgtggatggctgagagagataatattgtaagagctcgttttgtgtgtgaaaatgaatacatgactagtgtgtgataaatggtactctctttgttttaaagtataaattgtttcaatttttctatgtatattgctttaacgactatacatttag

SEQ ID NO: 19782 - protein, 531 aa, Zea mays subsp. mays
  misc_feature (1)..(531): Ceres Seq. ID no. 12374456
ASADMVVAVQLAALLALLLALWRLVWRPHAVARSFARQGIRGPPYTFLAGSLPEAKRLLMAGRRGTAPLDAGCHDIMPVLLPQFLRWVADYGRTLLFWIGPIPAVLSTDLQLIKQVLTDRTGLYQKDFMIPVLKFLFGNGVILINGDDWKRHRKVVLPAFNHETIKSMSAVTAEVTEQMMQQWRGQIHGSEEESAEIDMIHAFNDLTSKVNGRVAFGTSHREVEEVIVLMREMQKLATAATLDAPILWYLPTRRNLHVRRLNKQLRSKIMSIMQARLAADGADRRGGRGGAVSGGGDLLGLLLEAWTPQPQQHGNGGETLTTDEVIDECKTFFAAGQETTATLLVWAMFLLAVHPEWQDKVREEVVREFCTGDDGEVPHADVLAKLKLLYMVLLETSRLYPPIVYIQRRAAWDAVLGGIKVPQGTVISIPIAMLHRDKQVWGPDADEFNPMRFEHGLTKAAKDPKALLSFSLGPRVCTGQSFGIVEVQVVMAMILRRFSFSLSPKYVHKPKYLLSLTPKLGMPLIVRNVDG

SEQ ID NO: 19783 - protein, 527 aa, Zea mays subsp. mays
  misc_feature (1)..(527): Ceres Seq. ID no. 12374457
MVVAVQLAALLALLLALWRLVWRPHAVARSFARQGIRGPPYTFLAGSLPEAKRLLMAGRRGTAPLDAGCHDIMPVLLPQFLRWVADYGRTLLFWIGPIPAVLSTDLQLIKQVLTDRTGLYQKDFMIPVLKFLFGNGVILINGDDWKRHRKVVLPAFNHETIKSMSAVTAEVTEQMMQQWRGQIHGSEEESAEIDMIHAFNDLTSKVNGRVAFGTSHREVEEVIVLMREMQKLATAATLDAPILWYLPTRRNLHVRRLNKQLRSKIMSIMQARLAADGADRRGGRGGAVSGGGDLLGLLLEAWTPQPQQHGNGGETLTTDEVIDECKTFFAAGQETTATLLVWAMFLLAVHPEWQDKVREEVVREFCTGDDGEVPHADVLAKLKLLYMVLLETSRLYPPIVYIQRRAAWDAVLGGIKVPQGTVISIPIAMLHRDKQVWGPDADEFNPMRFEHGLTKAAKDPKALLSFSLGPRVCTGQSFGIVEVQVVMAMILRRFSFSLSPKYVHKPKYLLSLTPKLGMPLIVRNVDG

SEQ ID NO: 19784 - protein, 472 aa, Zea mays subsp. mays
  misc_feature (1)..(472): Ceres Seq. ID no. 12374458
MAGRRGTAPLDAGCHDIMPVLLPQFLRWVADYGRTLLFWIGPIPAVLSTDLQLIKQVLTDRTGLYQKDFMIPVLKFLFGNGVILINGDDWKRHRKVVLPAFNHETIKSMSAVTAEVTEQMMQQWRGQIHGSEEESAEIDMIHAFNDLTSKVNGRVAFGTSHREVEEVIVLMREMQKLATAATLDAPILWYLPTRRNLHVRRLNKQLRSKIMSIMQARLAADGADRRGGRGGAVSGGGDLLGLLLEAWTPQPQQHGNGGETLTTDEVIDECKTFFAAGQETTATLLVWAMFLLAVHPEWQDKVREEVVREFCTGDDGEVPHADVLAKLKLLYMVLLETSRLYPPIVYIQRRAAWDAVLGGIKVPQGTVISIPIAMLHRDKQVWGPDADEFNPMRFEHGLTKAAKDPKALLSFSLGPRVCTGQSFGIVEVQVVMAMILRRFSFSLSPKYVHKPKYLLSLTPKLGMPLIVRNVDG

SEQ ID NO: 19785 - DNA, 1387 bp, Zea mays subsp. mays
  misc_feature (1)..(1387): Ceres Seq. ID no. 12374463
acccgtctggtggccggcctatctggtgcggtgcggcgcggctcgatccggcccgacgattccgatcccctcccgtcccgtccatcccgtctcgtctcgcctcgccctccacgccggcgaccggagaaggggccgtgcagcgcaggcgacgcccacaacgaatccgtccccccgcgccggcttcgcccagccccgcggcgacgcaccaggattgaaggaggcatgagaaggtggacatcattgctatagcgatttgattactggagatggtgttggtggtaaagcagcaccgctgcacacactctgcgagctgcgtttgcatcaagggccacctcagtgaggatgctctgttcctcgtcttccgccacatgaactggaacccgaggctgattgctatcttgtcgtgtgtgtgcaagtggtttgacgaggttgccaagcaggtgctgtggaaggagttctgtcatgcaagggctccaaagatgatgctggatttgcattcaggtggcagccacattgttgatgggaactggaaggcactggggaagctgctcatctattgcaatggctgcacaaaaggggggctgtttaataacattcacgttccaggccattttgtgttcaggacacgcttttctaggactgcgggcaggagtttcctgcctctgccatgtaagtcggatgtcctgtatgtgtcagatccatgcgagcatcttgatcagggggaagaaggcgacataggtttcttccgaggcatctttatgtcatttgccacttcaagggtaaagaagatgttgattgagaagcgggcgaggtttcatccaagggagttgtgcccttattgtaaggccaagctatggaacatgtttcaggaaaatatgatcccaaggagtgcttccgcaaggctgggtgcctatgatgactctgtggagtattttgtatgcctgaatggacatgttattggactcggtaccctactaccactctcagactcagaggaggcagcagatgagtgatcatcaagaacatgaatcaggtttagaagattgaagcccagggcttgtgaaatggtactgaatcttggttgtgactagcagataatgacattggttctgcaaactgttgcacgacaggaacctgtgatgggatctgcatcgaactgcagctgtgttcttcagggggtgccttgcatcagattgaaaaaaagagctactttatagtgcctctcctttatttattgatatgtcactacttgtttttgtaactgcaatcaagatactgggacgctacccgcttgcctgtttagacatgttcacatcatgtgtagtgaggtgttttatttaacgagatgttaaatttgtgctcatgatattcatgtgctgttatcttc

SEQ ID NO: 19786 - protein, 248 aa, Zea mays subsp. mays
  misc_feature (1)..(248): Ceres Seq. ID no. 12374464
MVLVVKQHRCTHSASCVCIKGHLSEDALFLVFRHMNWNPRLIAILSCVCKWFDEVAKQVLWKEFCHARAPKMMLDLHSGGSHIVDGNWKALGKLLIYCNGCTKGGLFNNIHVPGHFVFRTRFSRTAGRSFLPLPCKSDVLYVSDPCEHLDQGEEGDIGFFRGIFMSFATSRVKKMLIEKRARFHPRELCPYCKAKLWNMFQENMIPRSASARLGAYDDSVEYFVCLNGHVIGLGTLLPLSDSEEAADE

SEQ ID NO: 19787 - protein, 214 aa, Zea mays subsp. mays
  misc_feature (1)..(214): Ceres Seq. ID no. 12374465
MNWNPRLIAILSCVCKWFDEVAKQVLWKEFCHARAPKMMLDLHSGGSHIVDGNWKALGKLLIYCNGCTKGGLFNNIHVPGHFVFRTRFSRTAGRSFLPLPCKSDVLYVSDPCEHLDQGEEGDIGFFRGIFMSFATSRVKKMLIEKRARFHPRELCPYCKAKLWNMFQENMIPRSASARLGAYDDSVEYFVCLNGHVIGLGTLLPLSDSEEAADE

SEQ ID NO: 19788 - protein, 177 aa, Zea mays subsp. mays
  misc_feature (1)..(177): Ceres Seq. ID no. 12374466
MMLDLHSGGSHIVDGNWKALGKLLIYCNGCTKGGLFNNIHVPGHFVFRTRFSRTAGRSFLPLPCKSDVLYVSDPCEHLDQGEEGDIGFFRGIFMSFATSRVKKMLIEKRARFHPRELCPYCKAKLWNMFQENMIPRSASARLGAYDDSVEYFVCLNGHVIGLGTLLPLSDSEEAADE

SEQ ID NO: 19789 - DNA, 1705 bp, Zea mays subsp. mays
  misc_feature (1)..(1705): Ceres Seq. ID no. 12374558
gtacggttaaagttgtggcaggaggagtgggggcgcgggagagatgataaggatggcggcagcgtctcagccgccatcgtcagccttgcggatgcacgggtgcggcggcgcggcttctgcgtcgtccgcgcccgtgcgcctcttcacggagtcgcggggtagagtcgtggcgtcgattgggaggggcaggaggcggaggcgcgccatctcgtgctgctcgtctccagacgcagatggccctcgccccgccgcgccaccgacctccgcagcgccttccgacgggtcgatacagctctattcccagatcgagagggtaatcacggaggcggcaaagcagtcccgggaaggctggggttcgactggagattggaccgaagtcgagggatcatgggtgttgagaccgaagtccttggagccatcatttgttgtccactttgttggaggaatttttgttggagccgctccccagatcacataccgcttcttcctcgagtgtctcgcgaacaggggagctttggtgattgctacgccttatgcgagcggctttgaccatttcttcattgcagatgaagttcaatttaagtttgacaggtgtttgagaaacttggatgagcctgtaaatgatctcccaacgtttggtgttggacattcattgggatctgttatccacatgttgattggatcaagatatgctgtgcagcgaagtggaaatgtactgatgtcctttaacaacaaggaggcaagctctgcgatcccactattttcacctgtaattgttcctatgtcacagagttttggccctatattctcccaattggcatcgtatccaacaatccggtttggggcagaagcagctattaagcagcttgagaatctaagcccacctgttgttaagcaacttctacctttacttcaacaacttcctccgttgtatatggacctaataaaagggcgggaggacttcattccaaaaccagaagagacacgccgcctgataaaatcctactatggaatttctcggaatctcttaataaagtttaaagatgatcaaattgatgaaacctctacccttgcacaagtactaagctctgaagcagctattagctcattgcttgatatgtcaattcgatcacttcctggggatcatgggttaccattacaacaggttcttcctgatgttccaccagcaatggctgatgcagtgaaccgcggaggtgaacttctgacaaatctgacaacaggcacaccatgggaggctgttgctaaggaggttggcaccactttgggtactgactcaggcattctacgagcacagatctcaaaagacgttgaaactcttgttgatgtaattgcttcatggacatcttcaaattctggtccaagactacttcgcccatgatcacccagctgtctgcgtacagaaatgttagtaacagtgaagagcaacatgatttaatgatgcattgtgagtaacaaaaagttagattgcacttcagtgcggctgtcttagtattttagatccatactatagttcagaaaaaagtgaagatatgtatttatatggtgtatttttgaaccaagatattttgatagaaggaaactttataaggaatagaaatagaatgatagattctggatacggtaaagctgctaagctgtatgaaaggagtcttggcaattcaataattggcaattcagcatttcg

SEQ ID NO: 19790 - protein, 451 aa, Zea mays subsp. mays
  misc_feature (1)..(451): Ceres Seq. ID no. 12374559
MIRMAAASQPPSSALRMHGCGGAASASSAPVRLFTESRGRVVASIGRGRRRRRAISCCSSPDADGPRPAAPPTSAAPSDGSIQLYSQIERVITEAAKQSREGWGSTGDWTEVEGSWVLRPKSLEPSFVVHFVGGIFVGAAPQITYRFFLECLANRGALVIATPYASGFDHFFIADEVQFKFDRCLRNLDEPVNDLPTFGVGHSLGSVIHMLIGSRYAVQRSGNVLMSFNNKEASSAIPLFSPVIVPMSQSFGPIFSQLASYPTIRFGAEAAIKQLENLSPPVVKQLLPLLQQLPPLYMDLIKGREDFIPKPEETRRLIKSYYGISRNLLIKFKDDQIDETSTLAQVLSSEAAISSLLDMSIRSLPGDHGLPLQQVLPDVPPAMADAVNRGGELLTNLTTGTPWEAVAKEVGTTLGTDSGILRAQISKDVETLVDVIASWTSSNSGPRLLRP

SEQ ID NO: 19791 - protein, 448 aa, Zea mays subsp. mays
  misc_feature (1)..(448): Ceres Seq. ID no. 12374560
MAAASQPPSSALRMHGCGGAASASSAPVRLFTESRGRVVASIGRGRRRRRAISCCSSPDADGPRPAAPPTSAAPSDGSIQLYSQIERVITEAAKQSREGWGSTGDWTEVEGSWVLRPKSLEPSFVVHFVGGIFVGAAPQITYRFFLECLANRGALVIATPYASGFDHFFIADEVQFKFDRCLRNLDEPVNDLPTFGVGHSLGSVIHMLIGSRYAVQRSGNVLMSFNNKEASSAIPLFSPVIVPMSQSFGPIFSQLASYPTIRFGAEAAIKQLENLSPPVVKQLLPLLQQLPPLYMDLIKGREDFIPKPEETRRLIKSYYGISRNLLIKFKDDQIDETSTLAQVLSSEAAISSLLDMSIRSLPGDHGLPLQQVLPDVPPAMADAVNRGGELLTNLTTGTPWEAVAKEVGTTLGTDSGILRAQISKDVETLVDVIASWTSSNSGPRLLRP

SEQ ID NO: 19792 - protein, 435 aa, Zea mays subsp. mays
  misc_feature (1)..(435): Ceres Seq. ID no. 12374561
MHGCGGAASASSAPVRLFTESRGRVVASIGRGRRRRRAISCCSSPDADGPRPAAPPTSAAPSDGSIQLYSQIERVITEAAKQSREGWGSTGDWTEVEGSWVLRPKSLEPSFVVHFVGGIFVGAAPQITYRFFLECLANRGALVIATPYASGFDHFFIADEVQFKFDRCLRNLDEPVNDLPTFGVGHSLGSVIHMLIGSRYAVQRSGNVLMSFNNKEASSAIPLFSPVIVPMSQSFGPIFSQLASYPTIRFGAEAAIKQLENLSPPVVKQLLPLLQQLPPLYMDLIKGREDFIPKPEETRRLIKSYYGISRNLLIKFKDDQIDETSTLAQVLSSEAAISSLLDMSIRSLPGDHGLPLQQVLPDVPPAMADAVNRGGELLTNLTTGTPWEAVAKEVGTTLGTDSGILRAQISKDVETLVDVIASWTSSNSGPRLLRP

SEQ ID NO: 19793 - DNA, 1621 bp, Zea mays subsp. mays
  misc_feature (1)..(1621): Ceres Seq. ID no. 12374562
acacacaaacacatcagcattcagcaatagctaatcgagcatcgtcgccttagctcctctcctctcctcttctctccgtcgtcgtggaacttctctccgccggctgccatataaaggaggaagaagagaacagcaacgctagctagccggccggcctccgtcgtcgccggcgtcgtcgactagctagctaactctcgatctccagttcctgcccccgccccacgcccggccgtcgtcgatcgtcagcaatataatggcaggaggcctcttctccatggctcacccggccgtcaccctctccggcatcgcaggaaacatcatctccttcctggtgttccttgcaccagtggcgacgttcctgcaggtgtaccggaagaagtcgacgggcgggttcagctcggtgccgtacgtggtggcgctcttcagctcggtgctgtggatcttctacgcgctggtgaagaccaactcgaggccgctgctgaccatcaacgccttcggctgcggcgtggaggcggcctacatagtcctctacctggcgtacgcgccgcggcgggcgcgcctgcggactctggcctacttcttcctgctggacgtggcggccttcgcgctcgtcgtcgccgtcacgctcttcgccgtccgcgagccccaccgcgtcaagttcctcggcagcgtctgcctcgccttctccatggccgtcttcgtcgcgccgctcagcatcatcgtcaaggtggtcaagaccaagagcgtcgagttcctgcccatcagcctctccttctgcctcacgctcagcgccgtcgcctggttctgctacggcctcttcaccaaggacccctttgtcatgtaccccaacgtcggcggcttcttcttcagctgcgtccagatgggcctctacttctggtaccgcaagccccgcccggcggccaagaacaacgccgtgctgccgacgaccacggacggcggcaacgcggtgcaggtgcaggggcaggtcatcgagctggcgcccaacacggtggccatcctgtcggtgagccccatccccatcgtgggcgtgcacaagatcgaggtggtggagcagcagcacaaggaggccgccgtggccgccgagacccgccggatggccgccgcaaacccggacggcgccatgccggaggtcatcgagatcgtccccgccgccgccgcggtgtgacccaacgccaatcaccatgcaccgtacacaccctgctagcttcttattagctagctcggatgacgtacgacagtttggtggcaagtggctggcagctcaagcatgcagatgcaggcatcgtcgtctgctatagttggtcgtttagttggttaattgttggattattattgcgtatctctctcgtgtgcgtcgtagccttgtctcagttcagttcagtgtcgaatcaagtagtagtagctgttgtttgcattggatctgacaatgcatgcatgctaataattatggtggtgtgatggtcttggtcgatctggtgtatgtaatgtacgtacgcgcgcggtacgtacgtagtcgtctacgtacgccgtgtcaacgtcgtagatctctacgggaagatgataagactgtaacatgcagggcatgcatctatttatactt

SEQ ID NO: 19794 - protein, 310 aa, Zea mays subsp. mays
  misc_feature (1)..(310): Ceres Seq. ID no. 12374563
MAGGLFSMAHPAVTLSGIAGNIISFLVFLAPVATFLQVYRKKSTGGFSSVPYVVALFSSVLWIFYALVKTNSRPLLTINAFGCGVEAAYIVLYLAYAPRRARLRTLAYFFLLDVAAFALVVAVTLFAVREPHRVKFLGSVCLAFSMAVFVAPLSIIVKVVKTKSVEFLPISLSFCLTLSAVAWFCYGLFTKDPFVMYPNVGGFFFSCVQMGLYFWYRKPRPAAKNNAVLPTTTDGGNAVQVQGQVIELAPNTVAILSVSPIPIVGVHKIEVVEQQHKEAAVAAETRRMAAANPDGAMPEVIEIVPAAAAV

SEQ ID NO: 19795 - protein, 303 aa, Zea mays subsp. mays
  misc_feature (1)..(303): Ceres Seq. ID no. 12374564
MAHPAVTLSGIAGNIISFLVFLAPVATFLQVYRKKSTGGFSSVPYVVALFSSVLWIFYALVKTNSRPLLTINAFGCGVEAAYIVLYLAYAPRRARLRTLAYFFLLDVAAFALVVAVTLFAVREPHRVKFLGSVCLAFSMAVFVAPLSIIVKVVKTKSVEFLPISLSFCLTLSAVAWFCYGLFTKDPFVMYPNVGGFFFSCVQMGLYFWYRKPRPAAKNNAVLPTTTDGGNAVQVQGQVIELAPNTVAILSVSPIPIVGVHKIEVVEQQHKEAAVAAETRRMAAANPDGAMPEVIEIVPAAAAV

SEQ ID NO: 19796 - protein, 165 aa, Zea mays subsp. mays
  misc_feature (1)..(165): Ceres Seq. ID no. 12374565
MAVFVAPLSIIVKVVKTKSVEFLPISLSFCLTLSAVAWFCYGLFTKDPFVMYPNVGGFFFSCVQMGLYFWYRKPRPAAKNNAVLPTTTDGGNAVQVQGQVIELAPNTVAILSVSPIPIVGVHKIEVVEQQHKEAAVAAETRRMAAANPDGAMPEVIEIVPAAAAV

SEQ ID NO: 19797 - DNA, 1318 bp, Zea mays subsp. mays
  misc_feature (1)..(1318): Ceres Seq. ID no. 12374566
acacacacgaacccacgaacgcaggctcccgagaacgcagcccccattggatttggaagcttctccatgggacaccgagcctcgtagacgaagcagaggggaccagagaaaccgaggagcaagaagcagggagccatggcgttcctcctgcccaagctcacaacgccgtcctgcaagttgcccccgagccccctcctcaagccccagctcgtcccgccgggccacggcggcggcaagatccaaggctcctccgtctccggctctggcgcggcgcaggtcgcggccccgggccacctcagcctcctgctcctgctcagcgcctcgcagcaggcggccggccccgcggccaagtcgacggcgaccaagaaccggggcaagggcggcggggatccgcaaaggtcggatttttacctcaacctcggcaccgcggtgcgcacgctgcgggacgacctgcccgacgtcttcgtccgggaatccaactacgatatctaccgtgaagacatcacatttgtcgacccactaaacactttccacggcattgacaactacaagaccatcttctgggcactcagatttcacgggcgcctgctgttcagagaaatcgggctcgatgtatcacgcatctggcagctgacagagaactcgatcgttgtccggtgggagctgtggggcactccccgtgtcccatgggagtcatacggctgcttcagcgggacgtcgaggtacaaggtcgacaggaacgggaaaatctacgagcacagagtcgacaacttggcgctggacttcccacgatcagtagccagagtgggcagcatcgctgacatggtagtcgccacgccgagccccaatttgacgttttggaatgcggttgtgacaggcgatggttgctcgtggacaaagctttatgaagccgtggtggaagctgtggaacgggaagagcatagttccactggcattggccctgttggctgcagcttcggttgcggctgtggctgcagtttttgaaatgcaaactgctgtagcttgagctgcttgttcataggatggaacgagctccagggctagttgtttggttgttcctaggggaaatgtatagatcaatatatatgggcacacaaatcacggtatactgatatctctttgtatactgtagctataggacagcaaatttagataaaacacgtactagatggctatatttgattacccttgtgaccttgtgttatacagggccacaggggtagtgctttcactgctttctttcatatgcgatacacagatcttttgggtgtggtttgcccaatattagacacagttt

SEQ ID NO: 19798 - protein, 289 aa, Zea mays subsp. mays
  misc_feature (1)..(289): Ceres Seq. ID no. 12374567
MAFLLPKLTTPSCKLPPSPLLKPQLVPPGHGGGKIQGSSVSGSGAAQVAAPGHLSLLLLLSASQQAAGPAAKSTATKNRGKGGGDPQRSDFYLNLGTAVRTLRDDLPDVFVRESNYDIYREDITFVDPLNTFHGIDNYKTIFWALRFHGRLLFREIGLDVSRIWQLTENSIVVRWELWGTPRVPWESYGCFSGTSRYKVDRNGKIYEHRVDNLALDFPRSVARVGSIADMVVATPSPNLTFWNAVVTGDGCSWTKLYEAVVEAVEREEHSSTGIGPVGCSFGCGCGCSF

SEQ ID NO: 19799 - protein, 173 aa, Zea mays subsp. mays
  misc_feature (1)..(173): Ceres Seq. ID no. 12374568
HTRTHERRLPRTQPPLDLEASPWDTEPRRRSRGDQRNRGARSREPWRSSCPSSQRRPASCPRAPSSSPSSSRRATAAARSKAPPSPALARRRSRPRATSASCSCSAPRSRRPAPRPSRRRPRTGARAAGIRKGRIFTSTSAPRCARCGTTCPTSSSGNPTTISTVKTSHLSTH

SEQ ID NO: 19800 - protein, 164 aa, Zea mays subsp. mays
  misc_feature (1)..(164): Ceres Seq. ID no. 12374569
THEPTNAGSRERSPHWIWKLLHGTPSLVDEAEGTRETEEQEAGSHGVPPAQAHNAVLQVAPEPPPQAPARPAGPRRRQDPRLLRLRLWRGAGRGPGPPQPPAPAQRLAAGGRPRGQVDGDQEPGQGRRGSAKVGFLPQPRHRGAHAAGRPARRLRPGIQLRYLP

SEQ ID NO: 19801 - DNA, 2540 bp, Zea mays subsp. mays
  misc_feature (1)..(2540): Ceres Seq. ID no. 12374601
atgaaatgaaaccctagtgagtagtgaccctgtccggatcactgcgtggcgccgccatggcaccctccgctctggcctccctcccggcgccgctccggtcactgcggctcaagacgaagcagcaggagctactgctccgcgtctcggcgctggcgctcatctacgttctcgccttcgccgtccgcctcttctccgtcctccgctacgagtctatgatccacgagttcgacccctacttcaattaccgcaccacgctcttcctcaccgagaacggctttagcgagttctggaactggttcgattccgagagctggtacccgctcgggcgcgtcgtcggggggactctcttcccgggtctcatggtgaccgccgcgctgctccaccgcctcctccgcgcgctctccctcgctgtccacatccgcgaggtctgcgtcctcaccgcgcctttcttcgccgccaacaccactctcgtcgcctacgcctttggccgcgagatctgggactccggggcggggctcgtcgccgccgcgctcatcgccaccgtccctggctacatctcccgctccgtcgcggggtcctacgataacgagggcgtcgccatcttcgcgctgctgctcaccttctacttcttcgtgcgcgccgtcaacaccgggtcgctcgcctgggcgcttgcctcggcgttcggctacttctacatggtgtcggcatggggaggctacgtgttcatcatcaatctcgtcccgctctatgtgcttgtgctgcttgttaccgggaggtactcacaaaggctctacgtggcctacaattgcatgtatgtgcttgggatgttgcttgcgatgcagatccgttttgttggattccaacatgtgcagtccggagagcacatggctgctatgggagtcttcttccttttgcaggttttcttcttcttggactgggtaaaatacctgctaaacgatgccagactgtttaagtcattccttcgaattacccttacatgtgtgattactgttggcaccctggctcttggtattggcactgcatctggttacatctctccttggacaggacgattttactccctgctagatcctacctatgcaaaggaccatataccaatcatcgcatctgtttctgagcatcaaccaacagcatggtcatctttcatgtttgacttccacatcctcctttttctgttcccagctggcctttatttctgtttcaagcgcctgtcagatgccacaatatttattgttatgtatggcctcacaagtatgtactttgctggtgtgatggtccggttaattcttgtggcagcaccagccgtttgccttattagtgctattgctgcatctgctacaataaaaaacctaaccactttgatcaggacaaagagcagaagtccacagactacttctgggaaaacaactggctcaaagtcagctgctaagggtgtagttgatcaatctttaccattccaacacaatgctgctattggtcttcttctgggtgccttttacttgctcagtaggtatgccatacactgcacttgggtgacatctgaggcttactcttctccatctatagttttggccgcaaggggtcataatggtggaagagttatctttgatgattatcgtgaggcatactattggcttcgtcagaacactcctcctgatgctaagattatgtcttggtgggactatggataccaaattacagctatgggtaacagaactgtcattgttgataataatacatggaataacacacacatagctactgttggacgtgctatgtcatcttatgaagatgaagcatatgagatcatgcagtcacttgatgtgaactatgtgcttgttgtatttggaggtgttactggatattcttcagatgatatcaacaagttcttatggatggtacgtattggtggaggggttttccctgtaatcaaagagccagattaccttgttaacggggagtatcgtattgacaagggggcagcaccaaaaatgctgaactgcctaatgtacaagctttgttactaccgatttggagaacttaccacagaatatggaaaacctccagggtatgaccgtgtacgaggagtggagattggcaacaaagatataaagcttgaatacttggaagaggcatttacaacttcaaactggatagtgcgcatatacaaggtgaaacccccaaagaacaggtcctgaggcgtcatcgctagtgaagtggttggagagctattacctcagacaagtacatattgtcaaaaaatctgaatctgagtggcctcaggagagggcggggtcgttgttatgggcacctgctttggcgagagtgactattagcagccatagcatcagttcagctcgaagtcaagaacatctttcccctcattcggtttaggtgtaatcggtgaggaaccaattgtggcaacagcgagtaatttttaattgttgagcatccatggccgaactattaaagtttttgtaggcgcaatgacatatttgaatagaaacttgtctttgatc

SEQ ID NO: 19802 - protein, 720 aa, Zea mays subsp. mays
  misc_feature (1)..(720): Ceres Seq. ID no. 12374602
MAPSALASLPAPLRSLRLKTKQQELLLRVSALALIYVLAFAVRLFSVLRYESMIHEFDPYFNYRTTLFLTENGFSEFWNWFDSESWYPLGRVVGGTLFPGLMVTAALLHRLLRALSLAVHIREVCVLTAPFFAANTTLVAYAFGREIWDSGAGLVAAALIATVPGYISRSVAGSYDNEGVAIFALLLTFYFFVRAVNTGSLAWALASAFGYFYMVSAWGGYVFIINLVPLYVLVLLVTGRYSQRLYVAYNCMYVLGMLLAMQIRFVGFQHVQSGEHMAAMGVFFLLQVFFFLDWVKYLLNDARLFKSFLRITLTCVITVGTLALGIGTASGYISPWTGRFYSLLDPTYAKDHIPIIASVSEHQPTAWSSFMFDFHILLFLFPAGLYFCFKRLSDATIFIVMYGLTSMYFAGVMVRLILVAAPAVCLISAIAASATIKNLTTLIRTKSRSPQTTSGKTTGSKSAAKGVVDQSLPFQHNAAIGLLLGAFYLLSRYAIHCTWVTSEAYSSPSIVLAARGHNGGRVIFDDYREAYYWLRQNTPPDAKIMSWWDYGYQITAMGNRTVIVDNNTWNNTHIATVGRAMSSYEDEAYEIMQSLDVNYVLVVFGGVTGYSSDDINKFLWMVRIGGGVFPVIKEPDYLVNGEYRIDKGAAPKMLNCLMYKLCYYRFGELTTEYGKPPGYDRVRGVEIGNKDIKLEYLEEAFTTSNWIVRIYKVKPPKNRS

SEQ ID NO: 19803 - protein, 668 aa, Zea mays subsp. mays
  misc_feature (1)..(668): Ceres Seq. ID no. 12374603
MIHEFDPYFNYRTTLFLTENGFSEFWNWFDSESWYPLGRVVGGTLFPGLMVTAALLHRLLRALSLAVHIREVCVLTAPFFAANTTLVAYAFGREIWDSGAGLVAAALIATVPGYISRSVAGSYDNEGVAIFALLLTFYFFVRAVNTGSLAWALASAFGYFYMVSAWGGYVFIINLVPLYVLVLLVTGRYSQRLYVAYNCMYVLGMLLAMQIRFVGFQHVQSGEHMAAMGVFFLLQVFFFLDWVKYLLNDARLFKSFLRITLTCVITVGTLALGIGTASGYISPWTGRFYSLLDPTYAKDHIPIIASVSEHQPTAWSSFMFDFHILLFLFPAGLYFCFKRLSDATIFIVMYGLTSMYFAGVMVRLILVAAPAVCLISAIAASATIKNLTTLIRTKSRSPQTTSGKTTGSKSAAKGVVDQSLPFQHNAAIGLLLGAFYLLSRYAIHCTWVTSEAYSSPSIVLAARGHNGGRVIFDDYREAYYWLRQNTPPDAKIMSWWDYGYQITAMGNRTVIVDNNTWNNTHIATVGRAMSSYEDEAYEIMQSLDVNYVLVVFGGVTGYSSDDINKFLWMVRIGGGVFPVIKEPDYLVNGEYRIDKGAAPKMLNCLMYKLCYYRFGELTTEYGKPPGYDRVRGVEIGNKDIKLEYLEEAFTTSNWIVRIYKVKPPKNRS

SEQ ID NO: 19804 - protein, 619 aa, Zea mays subsp. mays
  misc_feature (1)..(619): Ceres Seq. ID no. 12374604
MVTAALLHRLLRALSLAVHIREVCVLTAPFFAANTTLVAYAFGREIWDSGAGLVAAALIATVPGYISRSVAGSYDNEGVAIFALLLTFYFFVRAVNTGSLAWALASAFGYFYMVSAWGGYVFIINLVPLYVLVLLVTGRYSQRLYVAYNCMYVLGMLLAMQIRFVGFQHVQSGEHMAAMGVFFLLQVFFFLDWVKYLLNDARLFKSFLRITLTCVITVGTLALGIGTASGYISPWTGRFYSLLDPTYAKDHIPIIASVSEHQPTAWSSFMFDFHILLFLFPAGLYFCFKRLSDATIFIVMYGLTSMYFAGVMVRLILVAAPAVCLISAIAASATIKNLTTLIRTKSRSPQTTSGKTTGSKSAAKGVVDQSLPFQHNAAIGLLLGAFYLLSRYAIHCTWVTSEAYSSPSIVLAARGHNGGRVIFDDYREAYYWLRQNTPPDAKIMSWWDYGYQITAMGNRTVIVDNNTWNNTHIATVGRAMSSYEDEAYEIMQSLDVNYVLVVFGGVTGYSSDDINKFLWMVRIGGGVFPVIKEPDYLVNGEYRIDKGAAPKMLNCLMYKLCYYRFGELTTEYGKPPGYDRVRGVEIGNKDIKLEYLEEAFTTSNWIVRIYKVKPPKNRS

SEQ ID NO: 19805 - DNA, 1480 bp, Zea mays subsp. mays
  misc_feature (1)..(1480): Ceres Seq. ID no. 12374638
gcacgagaccattacctagaacatcctaatcgaaaactcgagacgactcgtctccctctttcaataagttcggcagggtaggacggcttcttcctctgcgccttcaccttcgcctgcgctgccggggctcgtcgcatggtttttaaatcgggtttgtaagttttagatctttatgtcaactaccaatctgaggcggcgactccatcatggagacgttgatggaaggaaaaacgagcatgttgacatatccagtgctgattccctcaatgaacctctattagggaagtccaatgatgacaactttggatcagaggtgtatgatcctagaaaacaggatctgtgggatgatgatatgaagaaagaacaactacactggtcatttcttttctcaaacttgattacacaatgggcacaatggttagcaagcattattgtgagctcaggatctatctttggtagattatcccccttctcttcagagaaccaaataaatccagtatatcttagccctttacaggaacaaaggttggatactttaagacacagattgcaaatctcttttgatggctcccgtattgaacatcaagtgtgtattactgatgtagattggttttctaggttgacatcatctcatgaagtaaattaattaataatttatgggctttatcattattaggatgccttgaggcaactctggcgtttagcttatcccgctcgtgagattccaccactcaaatctgaattatggaaggagatgggttggcaaggcaacgatccatctactgatttcaggggtggtggactcatatcgttggagaacctcatcttttttgctaggaactaccctaattcatttcagatgcttctgaacaaagtacaagggcagagatcagattgggagtacccttttgcagttgctggtatcaacgtttcattcatgctggtccagatgttggatctgaagtcaagtgttccatcttctaagtatggaattcgtttccttgaattgcttggacgtgatgagaacgcctttgaccacctgtactgtgtggcctttcggttgcttgatgctcagtggcttgtgaaacgtgcctcctatatggaattcaatgaggtcttgaaatcaacaagaactcagctggagcgggaactggttctagatgatgtgctggaggtgaaggacctgccgtcctacactatgctggatgagtaagctaaagccgagctgttgaacttggacgctggagaattgactaagctggtctgatggctaatagttatctagcgtatgctgatgtctgatcctaaatgcttaggcggcccacatgccattttacattgccgcatattttttttcttgttgtatactgaggtcttatgaggtgtttatatatgattcctttgtaaatattgtgtttgttatatgttatccttttggacatgctggttccaaggaaataaagcaatcgatctcgtattc

SEQ ID NO: 19806 - protein, 157 aa, Zea mays subsp. mays
  misc_feature (1)..(157): Ceres Seq. ID no. 12374639
MSTTNLRRRLHHGDVDGRKNEHVDISSADSLNEPLLGKSNDDNFGSEVYDPRKQDLWDDDMKKEQLHWSFLFSNLITQWAQWLASIIVSSGSIFGRLSPFSSENQINPVYLSPLQEQRLDTLRHRLQISFDGSRIEHQVCITDVDWFSRLTSSHEVN

SEQ ID NO: 19807 - protein, 152 aa, Zea mays subsp. mays
  misc_feature (1)..(152): Ceres Seq. ID no. 12374640
MGWQGNDPSTDFRGGGLISLENLIFFARNYPNSFQMLLNKVQGQRSDWEYPFAVAGINVSFMLVQMLDLKSSVPSSKYGIRFLELLGRDENAFDHLYCVAFRLLDAQWLVKRASYMEFNEVLKSTRTQLERELVLDDVLEVKDLPSYTMLDE

SEQ ID NO: 19808 - protein, 117 aa, Zea mays subsp. mays
  misc_feature (1)..(117): Ceres Seq. ID no. 12374641
MLLNKVQGQRSDWEYPFAVAGINVSFMLVQMLDLKSSVPSSKYGIRFLELLGRDENAFDHLYCVAFRLLDAQWLVKRASYMEFNEVLKSTRTQLERELVLDDVLEVKDLPSYTMLDE

SEQ ID NO: 19809 - DNA, 1614 bp, Zea mays subsp. mays
  misc_feature (1)..(1614): Ceres Seq. ID no. 12374652
aaaggccacgggtgcgctgtccactttgcaggcaagctcacggcctcacgtgaggccgacgaagtcgtagcagagatccgatacatgggagaggaagagggcgcgcccaccgtggcagcagcggcagagagcgctccgccgcacctgctcctgatatgcttcccggggcagggccacgtgaacccgatgctccgcctggccaagcgcatcgcggccaagggcctcctggtgaccttctcctcgatctccagagtcggggcgatgctcgccgcgtccgtgggcgtgtcggccggcggtgacggcgtgcctgtgggccggggccgcgtccggttcgagttcatggacgatgaagaccccgggcctgacctggacgacctcttgcggcacctcgcgaaggacggcccgccggcgtttgccgagctgctggagcggcaggcggacgccgggcggcctgtggcgtgcgtggtggtaaacccgttcatgccgtgggcggtcgacgtggccgccgacgcggggatcccttcggcggtgctgtgggtgcagtcgtgcgcggtgttctccctctactaccaccacgtgcacggcctcgtggagttccctcccgaggacgacctggacgcgcggttcacgctgcctggcctccccgagatgtccgtcgccgacgttccgtcgttcctgctcccgtccaacccgtacaagctgctggtggacgcgatcatcgcccagttccacaccatcgaccgcgcgtcgtgggtgctcgtcaactccttcacggagctggaacccgacgtggcggcggcgctcccgggcgtgacgccgcggccgccagagctcatccccgtgggcccgctcatcgaggtcgacgagcagcacgacggcgacggcgacggcgcggggtcgggcgcggtgcgtggcgacctgatgaaggccgcggacgactgcgtggagtggctagacgcgcaggcgccgcgctccatggtgtacgcatcggtgggcagcgtggtacggctcaacgcggaggaggtgggcgagatggcgcacgggctcgcgtccacggggcggcccttcctgtgggttgtccgtcccgatacccgggccgctcctcccagagggattcctggactccgtggccgggcgcggcacggtggtgccgtggagcccccaggaccgcgtgctggcgcacccgtccatcgcctgcttcctgacgcactgcggctggaactctaccctggagaccatcgcagcgggcgtaccagtggtggccttcccgcagtggggcgaccagttgcactgacgccaagttcctggtggaggaactcaggattggggtccgcctccgcgggccgctgcggcgggacgccgtgcgggaggcggtagacgccgccgtggcggggcccgaggccgacgcgatgctcgccaacgccaggaggtggagcgcggcggcgcgggaggccgtggcgctcggcgggtcctcggacgcgcatatccaagcgttcgtggacgaggtggcccggcgagcatgtgtcgtgccgccgtcgtcagagattcctagtcctagttgaggtcgaggagcttcagcagtcaccctcaccggacaaagtgagtcgaaagctg

SEQ ID NO: 19810 - protein, 458 aa, Zea mays subsp. mays
  misc_feature (1)..(458): Ceres Seq. ID no. 12374653
KGHGCAVHFAGKLTASREADEVVAEIRYMGEEEGAPTVAAAAESAPPHLLLICFPGQGHVNPMLRLAKRIAAKGLLVTFSSISRVGAMLAASVGVSAGGDGVPVGRGRVRFEFMDDEDPGPDLDDLLRHLAKDGPPAFAELLERQADAGRPVACVVVNPFMPWAVDVAADAGIPSAVLWVQSCAVFSLYYHHVHGLVEFPPEDDLDARFTLPGLPEMSVADVPSFLLPSNPYKLLVDAIIAQFHTIDRASWVLVNSFTELEPDVAAALPGVTPRPPELIPVGPLIEVDEQHDGDGDGAGSGAVRGDLMKAADDCVEWLDAQAPRSMVYASVGSVVRLNAEEVGEMAHGLASTGRPFLWVVRPDTRAAPPRGIPGLRGRARHGGAVEPPGPRAGAPVHRLLPDALRLELYPGDHRSGRTSGGLPAVGRPVALTPSSWWRNSGLGSASAGRCGGTPCGRR

SEQ ID NO: 19811 - protein, 430 aa, Zea mays subsp. mays
  misc_feature (1)..(430): Ceres Seq. ID no. 12374654
MGEEEGAPTVAAAAESAPPHLLLICFPGQGHVNPMLRLAKRIAAKGLLVTFSSISRVGAMLAASVGVSAGGDGVPVGRGRVRFEFMDDEDPGPDLDDLLRHLAKDGPPAFAELLERQADAGRPVACVVVNPFMPWAVDVAADAGIPSAVLWVQSCAVFSLYYHHVHGLVEFPPEDDLDARFTLPGLPEMSVADVPSFLLPSNPYKLLVDAIIAQFHTIDRASWVLVNSFTELEPDVAAALPGVTPRPPELIPVGPLIEVDEQHDGDGDGAGSGAVRGDLMKAADDCVEWLDAQAPRSMVYASVGSVVRLNAEEVGEMAHGLASTGRPFLWVVRPDTRAAPPRGIPGLRGRARHGGAVEPPGPRAGAPVHRLLPDALRLELYPGDHRSGRTSGGLPAVGRPVALTPSSWWRNSGLGSASAGRCGGTPCGRR

SEQ ID NO: 19812 - protein, 396 aa, Zea mays subsp. mays
  misc_feature (1)..(396): Ceres Seq. ID no. 12374655
MLRLAKRIAAKGLLVTFSSISRVGAMLAASVGVSAGGDGVPVGRGRVRFEFMDDEDPGPDLDDLLRHLAKDGPPAFAELLERQADAGRPVACVVVNPFMPWAVDVAADAGIPSAVLWVQSCAVFSLYYHHVHGLVEFPPEDDLDARFTLPGLPEMSVADVPSFLLPSNPYKLLVDAIIAQFHTIDRASWVLVNSFTELEPDVAAALPGVTPRPPELIPVGPLIEVDEQHDGDGDGAGSGAVRGDLMKAADDCVEWLDAQAPRSMVYASVGSVVRLNAEEVGEMAHGLASTGRPFLWVVRPDTRAAPPRGIPGLRGRARHGGAVEPPGPRAGAPVHRLLPDALRLELYPGDHRSGRTSGGLPAVGRPVALTPSSWWRNSGLGSASAGRCGGTPCGRR

SEQ ID NO: 19813 - DNA, 1591 bp, Zea mays subsp. mays
  misc_feature (1)..(1591): Ceres Seq. ID no. 12374664
aaacgctcaacttgaaagtcacaggacagcacacaccccacccacaactaccaaccttctccggaaggccaaatccccccgggccaagggaaacgagggagagagaccctccgcccctctcctctccctctccttccggtgaggcggtgagctatggagtcggcagcggccgcgaagacggtggagcggctggcgcagcgcctggtgccgccggcggagcccacccccactgccccccaccgcctgtcgtggctggaccggtacccgacgcagatggcgctcatcgagtcgctgcacgtcttcaagcccgacccggcgcgtgacgggctcagccccgcggagaccatagagcgggccctcgcacgggcgctggtcgactactacccgctcgccggccgcctcgccgtgtccgagagcgccgggggcctgcacgtcgactgcagcgctgagggcgtctggttcatcgaggccgccgtacggtgccgccttgaggacgtcgactacctcgagtacccgctccagatccccaaggacgagctgctcccgcacccgctgccgaggcccagccacgaggaggagagcaagctcatcctgctcgtccaggtgacggcgttcgcgtgcggcggcttcgtggtgggcttccgcttcagccacgcggtggcggacgggctcggcgcggccaagttcatgggcgcggtgggggagctggcgcgcggggcggaccaggtgtccgtggcgcccacctgggcccgcgacgccatcccagacccgtcgggcgcgctggtcggcagcctccccgagcccacgggcgccaagcgcctcgagtacctggccatcgacatctccgccgactacatcgaccacttcaagtcccagttcgccgcggccacgggcgggggccgctgctcggccttcgaggtcctcatcgccaaggcgtggcagagccgcacccgcgccgcggggttcgaggaccccgacacccccgtgcagctctgcttcgccatgaacgcgcgcccgctcctcggcgcccgcctcccgcggggcggcgccggcttctacggcaactgctactacatcatgcgcgtggcgtccacggccgacaaggtgtcctcgtcgtccgtcaccgacgtggtgaagatcatcagggaggggaagaagcggctgccattggagtttgcgcggtgggcggcgggggaggagggcgccgacggcgtggacccctaccagatcacctccgactaccggacgctgctggtgtcggattggacgcgcctcggcttcgcggaggtggactacgggtggggcccgccagcccacgtggtaccgctgacgaacctggactacatcgccacgtgcatcctcgtcaagccatgggcccacaagccaggggcgaggctcatcacgcagtgcgtgacgcccgaccgcgtctcgcgcttccacgacgccatggtggacatgaactagcgccccgcctcgtcctgcgttcaccacggcctcccgtttgttcatgggtttcttgttttttttcctcctctcagttactgtggtaattattagttggtattataattactaatcacattgctgcctc

SEQ ID NO: 19814 - protein, 436 aa, Zea mays subsp. mays
  misc_feature (1)..(436): Ceres Seq. ID no. 12374665
MESAAAAKTVERLAQRLVPPAEPTPTAPHRLSWLDRYPTQMALIESLHVFKPDPARDGLSPAETIERALARALVDYYPLAGRLAVSESAGGLHVDCSAEGVWFIEAAVRCRLEDVDYLEYPLQIPKDELLPHPLPRPSHEEESKLILLVQVTAFACGGFVVGFRFSHAVADGLGAAKFMGAVGELARGADQVSVAPTWARDAIPDPSGALVGSLPEPTGAKRLEYLAIDISADYIDHFKSQFAAATGGGRCSAFEVLIAKAWQSRTRAAGFEDPDTPVQLCFAMNARPLLGARLPRGGAGFYGNCYYIMRVASTADKVSSSSVTDVVKIIREGKKRLPLEFARWAAGEEGADGVDPYQITSDYRTLLVSDWTRLGFAEVDYGWGPPAHVVPLTNLDYIATCILVKPWAHKPGARLITQCVTPDRVSRFHDAMVDMN

SEQ ID NO: 19815 - protein, 396 aa, Zea mays subsp. mays
  misc_feature (1)..(396): Ceres Seq. ID no. 12374666
MALIESLHVFKPDPARDGLSPAETIERALARALVDYYPLAGRLAVSESAGGLHVDCSAEGVWFIEAAVRCRLEDVDYLEYPLQIPKDELLPHPLPRPSHEEESKLILLVQVTAFACGGFVVGFRFSHAVADGLGAAKFMGAVGELARGADQVSVAPTWARDAIPDPSGALVGSLPEPTGAKRLEYLAIDISADYIDHFKSQFAAATGGGRCSAFEVLIAKAWQSRTRAAGFEDPDTPVQLCFAMNARPLLGARLPRGGAGFYGNCYYIMRVASTADKVSSSSVTDVVKIIREGKKRLPLEFARWAAGEEGADGVDPYQITSDYRTLLVSDWTRLGFAEVDYGWGPPAHVVPLTNLDYIATCILVKPWAHKPGARLITQCVTPDRVSRFHDAMVDMN

SEQ ID NO: 19816 - protein, 258 aa, Zea mays subsp. mays
  misc_feature (1)..(258): Ceres Seq. ID no. 12374667
MGAVGELARGADQVSVAPTWARDAIPDPSGALVGSLPEPTGAKRLEYLAIDISADYIDHFKSQFAAATGGGRCSAFEVLIAKAWQSRTRAAGFEDPDTPVQLCFAMNARPLLGARLPRGGAGFYGNCYYIMRVASTADKVSSSSVTDVVKIIREGKKRLPLEFARWAAGEEGADGVDPYQITSDYRTLLVSDWTRLGFAEVDYGWGPPAHVVPLTNLDYIATCILVKPWAHKPGARLITQCVTPDRVSRFHDAMVDMN

SEQ ID NO: 19817 - DNA, 1887 bp, Zea mays subsp. mays
  misc_feature (1)..(1887): Ceres Seq. ID no. 12374668
gcttgcaaacgccgcattctcgacagacgacagatgctttgcaacatagacgccgatgcacccgtcaccctgcaagaaaagaaatctacaggaagactctcagctcgccggtgatcgagtggcatggatgtgccaaacgcaagcgtggaggccgagccactgctcgtgccacgcagctccaccgaaggtggctcggcggcggcaaccgagtcgaagagactgctgcggctcgctgggccactggtcctgagcttcatcctgcggaacgccgtccagatggtgtccgtcatgtttgtcggccacctcgggaagctccccctcgccggtgcctccctggcctcgtcgctcgccaacgtcacgggcttcagcctggtcgccggcatggccggcgccctcgacacgctgtgcgggcaggcgttcggggcgcggcggtacgcgctgctgggcgtctacaagcagcgctccatgctggtgctagcgctcgccagcctccccgtcgtgctgacgtgggtgttcgtggagcagctcctcctgaccatcggcgaggacccggacatcgccgcggaggccggcgcgtacgcgcggtggctgatcccgtccctcgccgcgttcgtgcccctcacctgccacatgaggttcctgcagacgcagagcgtcgtggtgcccgtcatggccagctccggcgtcacggcgctcgcccacgtcctgctgtgctacacgctggtgtacaaggtgggcatggggagcaagggcgccgcgctcggcgccgccgtctcctacagcgtcaacttggccgtgctcgctctttacgtcaggctgtccagcgcttgcaaggcaacatggacagggttctccaccgaggccttctctttctctgggctgcgggagtacgcgaagctcgccgtcccgtcggcgatgatggtttgcttggagtggtggtcgtttgagctgctcgttcttctctctgggtttttgccaaaccctaaactcgagacttccgtcctgtcaatatgcgtcaacaccgctattctgctgtacatggtaccgctgggccttggcacatctgcaagtacacgcgtctccaatgagctcggcgcagggcagcctgaagcagcaaggctagcagcgcgagttgtggtctgcatgaccttgtgtggaggggtggtgttggcaaccatcatgattctcctgcgcaacatctggggatacgcatacagcagcgaggaggatgtggtggcatacattgccagaatgcttcccatccttgctgtttccttcttcgtcgacggccttaacggttctctttcaggggtaatcataggatgtggcaaacagaagattggagcacgcgtaaacctcggcgccttttacatggttggcattccaacagggctgttgcttgcgtttgtgttcaaactaaatggaatgggtctttggcttggcattgtgtgcggtagcatcagcaaactggcgttgctcctgtggattgcactgcgcatagattgggagagcgaagctatcaaggccaagaacagggtcctccgttcgtcagggcaaacataatgatgagggtctcctacctttgtcgcataaccatatgtcatatgtcagggatatttagtggtaaggatccgtttggcattgctgaaccacccaatctcagtctcagctctacttcaaagccttcatcatgaagttagagaaggggaaaaaaggcgtgcaactttgacgttaactccagctactgccggtcctgcttttaagggcatgcgtgtatttttatactatgttccagcaagtgtgtgtattttttatataccatctaatttttattgtctcctagtttacttttaaactacaacacgataaataaaaaagaattgagag

SEQ ID NO: 19818 - protein, 479 aa, Zea mays subsp. mays
  misc_feature (1)..(479): Ceres Seq. ID no. 12374669
MDVPNASVEAEPLLVPRSSTEGGSAAATESKRLLRLAGPLVLSFILRNAVQMVSVMFVGHLGKLPLAGASLASSLANVTGFSLVAGMAGALDTLCGQAFGARRYALLGVYKQRSMLVLALASLPVVLTWVFVEQLLLTIGEDPDIAAEAGAYARWLIPSLAAFVPLTCHMRFLQTQSVVVPVMASSGVTALAHVLLCYTLVYKVGMGSKGAALGAAVSYSVNLAVLALYVRLSSACKATWTGFSTEAFSFSGLREYAKLAVPSAMMVCLEWWSFELLVLLSGFLPNPKLETSVLSICVNTAILLYMVPLGLGTSASTRVSNELGAGQPEAARLAARVVVCMTLCGGVVLATIMILLRNIWGYAYSSEEDVVAYIARMLPILAVSFFVDGLNGSLSGVIIGCGKQKIGARVNLGAFYMVGIPTGLLLAFVFKLNGMGLWLGIVCGSISKLALLLWIALRIDWESEAIKAKNRVLRSSGQT

SEQ ID NO: 19819 - protein, 428 aa, Zea mays subsp. mays
  misc_feature (1)..(428): Ceres Seq. ID no. 12374670
MVSVMFVGHLGKLPLAGASLASSLANVTGFSLVAGMAGALDTLCGQAFGARRYALLGVYKQRSMLVLALASLPVVLTWVFVEQLLLTIGEDPDIAAEAGAYARWLIPSLAAFVPLTCHMRFLQTQSVVVPVMASSGVTALAHVLLCYTLVYKVGMGSKGAALGAAVSYSVNLAVLALYVRLSSACKATWTGFSTEAFSFSGLREYAKLAVPSAMMVCLEWWSFELLVLLSGFLPNPKLETSVLSICVNTAILLYMVPLGLGTSASTRVSNELGAGQPEAARLAARVVVCMTLCGGVVLATIMILLRNIWGYAYSSEEDVVAYIARMLPILAVSFFVDGLNGSLSGVIIGCGKQKIGARVNLGAFYMVGIPTGLLLAFVFKLNGMGLWLGIVCGSISKLALLLWIALRIDWESEAIKAKNRVLRSSGQT

SEQ ID NO: 19820 - protein, 424 aa, Zea mays subsp. mays
  misc_feature (1)..(424): Ceres Seq. ID no. 12374671
MFVGHLGKLPLAGASLASSLANVTGFSLVAGMAGALDTLCGQAFGARRYALLGVYKQRSMLVLALASLPVVLTWVFVEQLLLTIGEDPDIAAEAGAYARWLIPSLAAFVPLTCHMRFLQTQSVVVPVMASSGVTALAHVLLCYTLVYKVGMGSKGAALGAAVSYSVNLAVLALYVRLSSACKATWTGFSTEAFSFSGLREYAKLAVPSAMMVCLEWWSFELLVLLSGFLPNPKLETSVLSICVNTAILLYMVPLGLGTSASTRVSNELGAGQPEAARLAARVVVCMTLCGGVVLATIMILLRNIWGYAYSSEEDVVAYIARMLPILAVSFFVDGLNGSLSGVIIGCGKQKIGARVNLGAFYMVGIPTGLLLAFVFKLNGMGLWLGIVCGSISKLALLLWIALRIDWESEAIKAKNRVLRSSGQT

SEQ ID NO: 19821 - DNA, 1640 bp, Zea mays subsp. mays
  misc_feature (1)..(1640): Ceres Seq. ID no. 12374684
aaaaaaaaacaatttcaaacctcgcgtcggccgccgagcccatttcaaacccggacgccccctccccaagcgcaccgaggaagcagcaaggccagcggtggtccctttcccctccactgcagtctccagagtctagagacctccaccgtccactccaaagacgagcagcgggcaaacccaagcacccgcccaatccggttcgccttccttctcaccccgcccggactctgcggagagatctggcagcggtggctatgccattgggcgacgacgcggcggcggacttcgcgctgccggacgagctcctggcggcgctgccgcgggacccctacgagcagctggatctggcgcgccgcatcaccgcgctggcggtggcggggcgggtgtccgggctggagcgggaggcggggcgcctgcgcgcggaggccgcggggaaggaccgcgagagcgccgagctccgggagcggggtggcgctgctcgacgccgcgcttcaggagaccaacgccaggctccgcgccgcgctcgaggacaatattaagctcagcaaggagcgggactcgctggcgcagacgtccaagaagctggcacgcgacctgcacaagctggagtcattcaagaggcatctgatgcagtcattgcgtgatgatagttcatcaacacaggaaacagttgacattacaacgtgtgatcagccagtagcatcaaaagcatcatccagtgcagatggtggatctgtcagcaaccctgcaacgaatatatttactgagtcattggatgtgggaagcacaaaccgagatggtgctgcagcaaggcctccgatccagaaatactctctcacaacacacatcactccccgccttaccccagaggccactcctaaagtaatgtccacttctgcttctccaaggcgaatgtctaccacaggaacacccaagttgatgtctggttctacatcaccgtcaaaaactcgaatcgaatctcacatgtcaatgacaccatggtatccatcaagcaagcaatcctcggcggcaaactcgcctccacgaggacgttcaaacccaggtcgcactcctcgaatcgatggaaaggagttctttcgtcaggccaggagtcgtctatcctacgagcaatttggagcattcttagccaacatcaaagagctcaatgcccataagcagtcacgtgaggaaactctcaagaaagctgaagagatctttggtccagacaataaagatctgtacctgtctttccaaggcctgctgaaccgtagcatggtggcataaggcttcacaggtcgcttcgcaagtccaatggagttccctcttccgcaacgctaataggatacgcaagttgttgctggctttgcagagataatgaggttgctgcattggcaacttatctagctgtggatctgaaggcccagctgcaagttttggccccgtaataatccatatcggtggaacgagcggatctctctgaacgactgagtgtgcaaaccagcagtgtcgcttctgtaaaagtggtgtgtgtacttgccgaaagcggatgacaaattcattgcctaaatcagggtgcagtctgtcatgaagcgcgtccttgtaaaaccgtgaaaaaggtaaccatgagagtaacaaactcc

SEQ ID NO: 19822 - protein, 427 aa, Zea mays subsp. mays
  misc_feature (1)..(427): Ceres Seq. ID no. 12374685
KKKQFQTSRRPPSPFQTRTPPPQAHRGSSKASGGPFPLHCSLQSLETSTVHSKDEQRANPSTRPIRFAFLLTPPGLCGEIWQRWLCHWATTRRRTSRCRTSSWRRCRGTPTSSWIWRAASPRWRWRGGCPGWSGRRGACARRPRGRTARAPSSGSGVALLDAALQETNARLRAALEDNIKLSKERDSLAQTSKKLARDLHKLESFKRHLMQSLRDDSSSTQETVDITTCDQPVASKASSSADGGSVSNPATNIFTESLDVGSTNRDGAAARPPIQKYSLTTHITPRLTPEATPKVMSTSASPRRMSTTGTPKLMSGSTSPSKTRIESHMSMTPWYPSSKQSSAANSPPRGRSNPGRTPRIDGKEFFRQARSRLSYEQFGAFLANIKELNAHKQSREETLKKAEEIFGPDNKDLYLSFQGLLNRSMVA

SEQ ID NO: 19823 - protein, 218 aa, Zea mays subsp. mays
  misc_feature (1)..(218): Ceres Seq. ID no. 12374686
MQSLRDDSSSTQETVDITTCDQPVASKASSSADGGSVSNPATNIFTESLDVGSTNRDGAAARPPIQKYSLTTHITPRLTPEATPKVMSTSASPRRMSTTGTPKLMSGSTSPSKTRIESHMSMTPWYPSSKQSSAANSPPRGRSNPGRTPRIDGKEFFRQARSRLSYEQFGAFLANIKELNAHKQSREETLKKAEEIFGPDNKDLYLSFQGLLNRSMVA

SEQ ID NO: 19824 - DNA, 1209 bp, Zea mays subsp. mays
  misc_feature (1)..(1209): Ceres Seq. ID no. 12374731
ctcactgccaaccacacgttcccaagccagccattggttggtagcaagccaagctaatcaagttagctttagatacccgctcccgctcttcttccctccgacgaaggcagctgacgacacagcaggctagcttcggagttcggagcactcagccatggccattgccggcgctctcctcctcctgctcggactcctcgcgcgggaggccgctgccggcggggtggcagagcgcgcacgccacgttctacggcggcggggacgcgtccggcacaatgggcggcgcttgcgggtacggcaacctgtacagcacggggtacggcacgagcacggcggcgctgagcacggcgctgttcaacgacggcgcggcgtgcgggtcctgctacgagctgcggtgcgacaacgacgggcggtggtgcctgccgggcaccatcaccgtcacggccaccaacttctgcccgcccaactacggcctccccagcgacgacggcggctggtgcaacccgccgcgcccgcacttcgacatggccgagccggccttcctccgcatcgcgcagtaccgcgccggcatcgtgcccgtcgcgttcaggagagtgccgtgcgtgaagaagggcggcatccggttcaccatcaacgggcactcctacttcaacctggtgctggtgaccaacgtggcgggcgccggcgacgtgcgctccgtctccatccggggctcccgcacggggtggcagcccatgtcccggaactggggccagaactggcagagcaactcgtacctggacaggcaggcgctctcgttccaggtcaccgccagcgacggccgcaccgtcaccagcaacggcgccgtccccgctggctggcagttcagccagaccttcgagggcggccagttctgaggatgaacagctagcgcgcgcgcggctagctattggataattaattacggtactgtcgatttggtttttttgccttgttttttttttgcgcgacgacgacgaagaggaggatgaagacgaagatgaagacgaggcctctcttcgggtatattgaaggaaggagaaggcttttgcgcgcgctatgctgaggctgctaatctagcacccgcctagacgtttcccttttctctggtggattacggactggatcggaccaaagatcgatccagctcctagtactaataatatagttgtacttgagaaaatgaataattgc

SEQ ID NO: 19825 - protein, 250 aa, Zea mays subsp. mays
  misc_feature (1)..(250): Ceres Seq. ID no. 12374732
MAIAGALLLLLGLLAREAAAGGVAERARHVLRRRGRVRHNGRRLRVRQPVQHGVRHEHGGAEHGAVQRRRGVRVLLRAAVRQRRAVVPAGHHHRHGHQLLPAQLRPPQRRRRLVQPAAPALRHGRAGLPPHRAVPRRHRARRVQESAVREEGRHPVHHQRALLLQPGAGDQRGGRRRRALRLHPGLPHGVAAHVPELGPELAEQLVPGQAGALVPGHRQRRPHRHQQRRRPRWLAVQPDLRGRPVLRMNS

SEQ ID NO: 19826 - protein, 206 aa, Zea mays subsp. mays
  misc_feature (1)..(206): Ceres Seq. ID no. 12374733
MGGACGYGNLYSTGYGTSTAALSTALFNDGAACGSCYELRCDNDGRWCLPGTITVTATNFCPPNYGLPSDDGGWCNPPRPHFDMAEPAFLRIAQYRAGIVPVAFRRVPCVKKGGIRFTINGHSYFNLVLVTNVAGAGDVRSVSIRGSRTGWQPMSRNWGQNWQSNSYLDRQALSFQVTASDGRTVTSNGAVPAGWQFSQTFEGGQF

SEQ ID NO: 19827 - DNA, 1363 bp, Zea mays subsp. mays
  misc_feature (1)..(1363): Ceres Seq. ID no. 12374769
atccattcatcacccatcgtgtgcttcagctactatgatataatagtgcagctaattaattaagcgcggacgacgacgtacgtaacagtatggctgctgctgctgctactgtcgtcacaccatcctcgcctcgctccatggctgttgccgccgccattgccttcttcttcgcggtgaccgcggcggcagcgtcgccggtgcccgcgatctacgtgctcggggactccctggcggacgtcgggaacaacaaccacctggtgacgctgctcaaggccgacttcccgcacaacggcatcgactacccgggccagaaggccaccggccgcttcagcaacggcaagaactccgtcgacttcctcgccgaaaacctggggctggcgacctcgccgccgtacctcgccttgtcgagcagcaaccccaactacgccaacggtgtcaacttcgcttccggtggcgccggagtctccaacctcacaaacaaggaccaatgtatcagcttcgacaagcagatcgactacttcgcgacggtgtacgcgtcgctggtgcagagcctggggcaggcgcaggccacggctcacctggccaagtccctcttcgccatcaccatcggcagcaacgacatcatccactacgccaaatccaactccgccgccaataccaagcaggccagtgccagtggcgccgccgccgacccatcgcagcagttcgtggacgcgctgatccacacgctcaccgggcagctgcagcgcctctacgccctgggcgcgcgcaaggtgctgttcctgggcacggggcccgtgggtgctgcccgtcgctgcgggagctcagccccgccaaggactgcagcgccgaggccaacggcatctccgtgcgctacaacgccggcgcggcgtccctcctcggcaccatggccgcgcgctacgcggacatgcactacgcgctcttcgactcctccgccgcgctgctccagtacatcgaccacccggcggcgcacgggttcaccgaggccaaggccgcctgctgcgggctcggggacatgaacgccaagatcgggtgcaccccgctaagcttctactgcgacaacaggaccagccacgtcttctgggacttctaccatcccacggagaccaccgcccggatgctcaccagcacggcgttcgacggctcggcgccgctcatcttccccatgaacataaggcagctcagcgccatatagctaggccaccagaattagagtgctgtccttctaccttgtatatgttgttgtgtatcacatagtggccttggacgtatgtacgtcgtcctagaagaaatcaaacgatatagcaaacatcatagaagcttgcattatattggcaatgct

SEQ ID NO: 19828 - protein, 316 aa, Zea mays subsp. mays
  misc_feature (1)..(316): Ceres Seq. ID no. 12374770
MAAAAATVVTPSSPRSMAVAAAIAFFFAVTAAAASPVPAIYVLGDSLADVGNNNHLVTLLKADFPHNGIDYPGQKATGRFSNGKNSVDFLAENLGLATSPPYLALSSSNPNYANGVNFASGGAGVSNLTNKDQCISFDKQIDYFATVYASLVQSLGQAQATAHLAKSLFAITIGSNDIIHYAKSNSAANTKQASASGAAADPSQQFVDALIHTLTGQLQRLYALGARKVLFLGTGPVGAARRCGSSAPPRTAAPRPTASPCATTPARRPSSAPWPRATRTCTTRSSTPPPRCSSTSTTRRRTGSPRPRPPAAGSGT

SEQ ID NO: 19829 - protein, 300 aa, Zea mays subsp. mays
  misc_feature (1)..(300): Ceres Seq. ID no. 12374771
MAVAAAIAFFFAVTAAAASPVPAIYVLGDSLADVGNNNHLVTLLKADFPHNGIDYPGQKATGRFSNGKNSVDFLAENLGLATSPPYLALSSSNPNYANGVNFASGGAGVSNLTNKDQCISFDKQIDYFATVYASLVQSLGQAQATAHLAKSLFAITIGSNDIIHYAKSNSAANTKQASASGAAADPSQQFVDALIHTLTGQLQRLYALGARKVLFLGTGPVGAARRCGSSAPPRTAAPRPTASPCATTPARRPSSAPWPRATRTCTTRSSTPPPRCSSTSTTRRRTGSPRPRPPAAGSGT

SEQ ID NO: 19830 - protein, 242 aa, Zea mays subsp. mays
  misc_feature (1)..(242): Ceres Seq. ID no. 12374772
MYQLRQADRLLRDGVRVAGAEPGAGAGHGSPGQVPLRHHHRQQRHHPLRQIQLRRQYQAGQCQWRRRRPIAAVRGRADPHAHRAAAAPLRPGRAQGAVPGHGARGCCPSLRELSPAKDCSAEANGISVRYNAGAASLLGTMAARYADMHYALFDSSAALLQYIDHPAAHGFTEAKAACCGLGDMNAKIGCTPLSFYCDNRTSHVFWDFYHPTETTARMLTSTAFDGSAPLIFPMNIRQLSAI

SEQ ID NO: 19831 - DNA, 1867 bp, Zea mays subsp. mays
  misc_feature (1)..(1867): Ceres Seq. ID no. 12374910
gtccatggtatgcgcgggaacctcccgtctctcgccgcggccagtaatggcgtcgctctccctctgtccttcttccacacgaagcagctccacgcgcgcctcatcgtcgcatccccctcctccgcctctggccctgcctacctccgcctcctagtgctccgctcctatgctgcccgcggagacctttcctccgcccgccgcctgctggacgaggctccccgcccggcctcgccgcttctctacaacgccctaatccgcgcgcacgcccgccgtctcgaccttccagccgggctcgcgcttttcgcccgcatgcgctgctccgccactccgcccgacgcgcacaccttcgcctgcgtcctccgcgcctgcgctgaatcctcgcgcccggatgctgttaaggtcgttcatggtatcgctacaacatgcggtatgtgctcccgtccgattgtcctgagctcgcttgtcagtgcgtacgcgaagcttggcctcgtggacaatgctcgcagcttgttcgatggattgtgtgagccggacttggtcatttggaactccatgatgtccgcatatgggtaccaagggatgtggtatgatggtctacagatgttctccttaatgcggagagctgggcagcatccggatgggtattcaatggttagcttagtctcatgcttctggaatccggaaatacttgcatttggtcaagcagttcatggaatatgtgtcaagggaggttatgactctggacaccatgtgagaagcacacttgtgtcaatgtacatgaggtgtgggtgtgtggaatctggccaaagattgtttggtagcttgcctgatgtggatttgattacctggtcgtcactgattactgggctaatacaaacgggcaagtatgaggaatcatttgatttgttccggaaaatgtgctttacaggtaggaggcccgacagccatattgattgctagtgttctctcggtatttgcttctactgctgctattagctataccaaggaggtccactgttatgcagtcaagcttggagctgatatagacataagagtctcttcttcgctaatggatgcttatgcaaaatgtggtttcactgagctcggatactgggtgttccgccaagtacctaataagaactcagtcatgtacaacacggtcatatcaaaccttgaatctcacgggtttgcaactaaggctattgaagtcctagatgagatggttaatgataagctcaggcctgatagtgctaccttctcctctttacttgctgcttgttgtcatgtggggcacttggaggagggatggaagttgttcaggagaatgagggatgagttcaagatagttgttgaaatggagcactatgtgtacatggtgaggcttcttgcaacatttggccagctgaaggaggcatatgatcttatacagacaatgcaaatccaaccagattgtggtgtgtggggtgcattgctttggggttgttgtgtccatcgtgattctagcttcggcaggattgttgctgaaaagctatgtgaactcaattcagacaaagctgcttacagggttatgctctcaaacatgtatgcctcacaagagatgtggtgggatgctgaggaggttagggatgagttatcaaaagaaaatatgtacaagaacacagggacgagttgggttggtgaagtaaaaaaatgatggttggcatttgtcattgagaaagcatgtcagatatcaagtacatatgaactctatattgttatattctggtagagatgatatcttgtgaaactccaaacatgtactcgttggattttagcttaaccagttttgtactcagtctttccttataatcatgggaggttcatttgc

SEQ ID NO: 19832 - protein, 319 aa, Zea mays subsp. mays
  misc_feature (1)..(319): Ceres Seq. ID no. 12374911
VHGMRGNLPSLAAASNGVALPLSFFHTKQLHARLIVASPSSASGPAYLRLLVLRSYAARGDLSSARRLLDEAPRPASPLLYNALIRAHARRLDLPAGLALFARMRCSATPPDAHTFACVLRACAESSRPDAVKVVHGIATTCGMCSRPIVLSSLVSAYAKLGLVDNARSLFDGLCEPDLVIWNSMMSAYGYQGMWYDGLQMFSLMRRAGQHPDGYSMVSLVSCFWNPEILAFGQAVHGICVKGGYDSGHHVRSTLVSMYMRCGCVESGQRLFGSLPDVDLITWSSLITGLIQTGKYEESFDLFRKMCFTGRRPDSHIDC

SEQ ID NO: 19833 - protein, 316 aa, Zea mays subsp. mays
  misc_feature (1)..(316): Ceres Seq. ID no. 12374912
MRGNLPSLAAASNGVALPLSFFHTKQLHARLIVASPSSASGPAYLRLLVLRSYAARGDLSSARRLLDEAPRPASPLLYNALIRAHARRLDLPAGLALFARMRCSATPPDAHTFACVLRACAESSRPDAVKVVHGIATTCGMCSRPIVLSSLVSAYAKLGLVDNARSLFDGLCEPDLVIWNSMMSAYGYQGMWYDGLQMFSLMRRAGQHPDGYSMVSLVSCFWNPEILAFGQAVHGICVKGGYDSGHHVRSTLVSMYMRCGCVESGQRLFGSLPDVDLITWSSLITGLIQTGKYEESFDLFRKMCFTGRRPDSHIDC

SEQ ID NO: 19834 - protein, 268 aa, Zea mays subsp. mays
  misc_feature (1)..(268): Ceres Seq. ID no. 12374913
MRNHLICSGKCALQVGGPTAILIASVLSVFASTAAISYTKEVHCYAVKLGADIDIRVSSSLMDAYAKCGFTELGYWVFRQVPNKNSVMYNTVISNLESHGFATKAIEVLDEMVNDKLRPDSATFSSLLAACCHVGHLEEGWKLFRRMRDEFKIVVEMEHYVYMVRLLATFGQLKEAYDLIQTMQIQPDCGVWGALLWGCCVHRDSSFGRIVAEKLCELNSDKAAYRVMLSNMYASQEMWWDAEEVRDELSKENMYKNTGTSWVGEVKK

SEQ ID NO: 19835 - DNA, 1650 bp, Zea mays subsp. mays
  misc_feature (1)..(1650): Ceres Seq. ID no. 12374914
gatcgaggaggaggcgcattgcccgcattcttctccgcttccaccgagagggcctcgcctgatcggcgccgccttggcccccatgacgtgtgtgcgcgccgaggacgccgtctcgcccgccgccgccgacgacgtggcggctgccctggtttccaggggcggcttgatccagaaggtggctgccggcggcgggcggagaccggcaggctcggcgcgctcgctgcagcgctcagcacatctggccaccggggacggcaacgctccggcgccggcggtggaggccagttgctcctggtccggggatgggataggtaagagcaacggtggtgggaagagagatgatagacacaggatgcggcagtacaggtcgcagctcgaacaggaggtcaagaaattgcagaggcagcttgaagaagaggttgatctgcacgtggcgttggcggatgctgttacacaaaatgttgcgcctatactgaagtcttctatgaagcttccacacaaggcacaggagctactgattaacatcgcctccttggagattaccgtttcaaaccttgaaaagaagctaaatgatctgtactaccagctttgtcacgaaaggaacgaaaggttacttgctgaaaataatcagggatgcttgccatctacatcctccgatgagcaccagtcattgtcaacttgcacgtgtacgtgggaagagcacatatcatcgttgagagatttgaagtttgggggatctgaatcaatgagatcaatgagacaggacttattccccgagcttgaagatgaccaggatatgggagaagatcctgagggtcaacagatagtttctttaaacaggctgctagaaaagcaccgagattcttctttgaatagacttcttgaaaagcatcgagatgaagagatgcaagaatctggctccatggaaaatgaaggcaatgaaaatgagcagcctgacacgttatcctttgaacagtctattctaaagataactagcataaaaggagggaatctttggagcaacccaaatgagctctctgaggagatggttcgctgcatgagaaacattttcctacgcttgtctgaatccttgaagatatcgccgaagacatcttctgattgttcatcttcctccgtggagcgtctatcaggctccacgttagcatctttctcagattcatccataatgccctcaatgctacggagtccttcagttgattctaatcacaatgacgagacgatgaaggaagtcaggaactttgatccgtataaagttaatggaaaggaaacccgaagagatatcggaaactatcgttcagcagctgaagtatcttggatgtctgttggaaaggatcaactagaatatgcatctgaagctttaaagaagttcaggtttgctgctacagccttggctaaacctatgagtcctcatagatatatcacatgtctacaaactgtacaaaccttagtgcatatatacaaaaattttagcatatgatgtatacctttaaattttgttcagccttgttaatgttctaaaagaatatgcagacaatcgaaccagtctagggatttggattgggggaacaaatggatgctctattcttgttcgcttgcagtaaagcaatcagtttcaaaattggtttgcgg

SEQ ID NO: 19836 - protein, 498 aa, Zea mays subsp. mays
  misc_feature (1)..(498): Ceres Seq. ID no. 12374915
IEEEAHCPHSSPLPPRGPRLIGAALAPMTCVRAEDAVSPAAADDVAAALVSRGGLIQKVAAGGGRRPAGSARSLQRSAHLATGDGNAPAPAVEASCSWSGDGIGKSNGGGKRDDRHRMRQYRSQLEQEVKKLQRQLEEEVDLHVALADAVTQNVAPILKSSMKLPHKAQELLINIASLEITVSNLEKKLNDLYYQLCHERNERLLAENNQGCLPSTSSDEHQSLSTCTCTWEEHISSLRDLKFGGSESMRSMRQDLFPELEDDQDMGEDPEGQQIVSLNRLLEKHRDSSLNRLLEKHRDEEMQESGSMENEGNENEQPDTLSFEQSILKITSIKGGNLWSNPNELSEEMVRCMRNIFLRLSESLKISPKTSSDCSSSSVERLSGSTLASFSDSSIMPSMLRSPSVDSNHNDETMKEVRNFDPYKVNGKETRRDIGNYRSAAEVSWMSVGKDQLEYASEALKKFRFAATALAKPMSPHRYITCLQTVQTLVHIYKNFSI

SEQ ID NO: 19837 - protein, 471 aa, Zea mays subsp. mays
  misc_feature (1)..(471): Ceres Seq. ID no. 12374916
MTCVRAEDAVSPAAADDVAAALVSRGGLIQKVAAGGGRRPAGSARSLQRSAHLATGDGNAPAPAVEASCSWSGDGIGKSNGGGKRDDRHRMRQYRSQLEQEVKKLQRQLEEEVDLHVALADAVTQNVAPILKSSMKLPHKAQELLINIASLEITVSNLEKKLNDLYYQLCHERNERLLAENNQGCLPSTSSDEHQSLSTCTCTWEEHISSLRDLKFGGSESMRSMRQDLFPELEDDQDMGEDPEGQQIVSLNRLLEKHRDSSLNRLLEKHRDEEMQESGSMENEGNENEQPDTLSFEQSILKITSIKGGNLWSNPNELSEEMVRCMRNIFLRLSESLKISPKTSSDCSSSSVERLSGSTLASFSDSSIMPSMLRSPSVDSNHNDETMKEVRNFDPYKVNGKETRRDIGNYRSAAEVSWMSVGKDQLEYASEALKKFRFAATALAKPMSPHRYITCLQTVQTLVHIYKNFSI

SEQ ID NO: 19838 - protein, 381 aa, Zea mays subsp. mays
  misc_feature (1)..(381): Ceres Seq. ID no. 12374917
MRQYRSQLEQEVKKLQRQLEEEVDLHVALADAVTQNVAPILKSSMKLPHKAQELLINIASLEITVSNLEKKLNDLYYQLCHERNERLLAENNQGCLPSTSSDEHQSLSTCTCTWEEHISSLRDLKFGGSESMRSMRQDLFPELEDDQDMGEDPEGQQIVSLNRLLEKHRDSSLNRLLEKHRDEEMQESGSMENEGNENEQPDTLSFEQSILKITSIKGGNLWSNPNELSEEMVRCMRNIFLRLSESLKISPKTSSDCSSSSVERLSGSTLASFSDSSIMPSMLRSPSVDSNHNDETMKEVRNFDPYKVNGKETRRDIGNYRSAAEVSWMSVGKDQLEYASEALKKFRFAATALAKPMSPHRYITCLQTVQTLVHIYKNFSI

SEQ ID NO: 19839 - DNA, 1626 bp, Zea mays subsp. mays
  misc_feature (1)..(1626): Ceres Seq. ID no. 12374930
ccttttttcccccaccctccttcttttccatactctactattgcatagtagccttcaacaacggtgctggtgctctgtcggtccgtctgtcgttactcacagcgcttcccggcccgccggctcttgttcttgtctctgtttgccccgtggccagctccgcctcgccgccgcagtacatgacgccggcggcgtcgcccgcgcagttcgcgccggcgcccctcaggatggggtacgggcggccggcgcccgtgacgggcatgtggagcagcgagccgttcaaggtcgacagcggcggccacgccacctgcagcgcgtccaccgtcatggaggcggacaccaagctggagacaagcaggctacaagatgatgttccacaggtagcactcgagccagagaggagtacggatcaggaaacgagcaggccgccagagagggtcatgagaaggctcgcgcagaacagagaggctgctcggaagagtcgcctgcggaaaaaggcctacatccagcagctagagacaagccggatgaagctggcccagctagagctggagcttcaacgggctcgacggcagcagggcgcgtacgcaaatgggagcatgggagactcagctctcggatacacagggtcgatcgatccaggcgtcgccgcgttcgagatcgaatacaggcactgggtggacgagcagaagcggcacacggcggagctgatgtcggcgctccaggggcatcagacgtcgacgacgtcggagctggagctccgcttgctggtggagacggggctcagcaactacgagcacctcttcaggatcaaggcggtggccgccaacgcggacgtgttccacgtcatgtcgggcgtgtggaagacccccgccgagaggttcttcctctggatcggcgggttccgcccgtcggaggtcctaaagatcctgagcccgcagctggagccgttggcggaggcgcagcgcatgctcgtgggcggcctccaggcacacgtcaacgcaggcggaggacgcgctgtcgcagggcatggagaagctacagcagaacctcgccgagatcctgaccgccgaggctgaccccttcggggcccccgacgcctacatgctgcagatggccactgcggtggagaagctgaaagagctcgtcaacttcgtcacccaggcggaccatctccggctgatgacgctgcaacagatgcacaagatcctgacgacgcggcaggcggccaggggcctgctggcgctcggcgactacttccagcgcctccgcacgctgagctcgctgtgggcggcgcgcccgcgggaggcggcgattagctagatgcccgcggtgtgggtgtggccagccaaaggcccaccaaagaacacgacgacgacgaatagtagcagttcgctgtatactttcccaagctgtaaagtccagtggaggacgaagaaatcgacctcacagtcactggggttcggttccgacgaaaggatgcaaggcttttaagtcaatggcggtgcctgcgcctgcgctgcgtttcctcgctcgtctctccgcagcagcagcagcagcagcaagcggtgtgcgtttgtcaagcgaagcgactagagaataaaacggaaatggattgaggccttctcc

SEQ ID NO: 19840 - protein, 357 aa, Zea mays subsp. mays
  misc_feature (1)..(357): Ceres Seq. ID no. 12374931
FFPPPSFFSILYYCIVAFNNGAGALSVRLSLLTALPGPPALVLVSVCPVASSASPPQYMTPAASPAQFAPAPLRMGYGRPAPVTGMWSSEPFKVDSGGHATCSASTVMEADTKLETSRLQDDVPQVALEPERSTDQETSRPPERVMRRLAQNREAARKSRLRKKAYIQQLETSRMKLAQLELELQRARRQQGAYANGSMGDSALGYTGSIDPGVAAFEIEYRHWVDEQKRHTAELMSALQGHQTSTTSELELRLLVETGLSNYEHLFRIKAVAANADVFHVMSGVWKTPAERFFLWIGGFRPSEVLKILSPQLEPLAEAQRMLVGGLQAHVNAGGGRAVAGHGEATAEPRRDPDRRG

SEQ ID NO: 19841 - protein, 299 aa, Zea mays subsp. mays
  misc_feature (1)..(299): Ceres Seq. ID no. 12374932
MTPAASPAQFAPAPLRMGYGRPAPVTGMWSSEPFKVDSGGHATCSASTVMEADTKLETSRLQDDVPQVALEPERSTDQETSRPPERVMRRLAQNREAARKSRLRKKAYIQQLETSRMKLAQLELELQRARRQQGAYANGSMGDSALGYTGSIDPGVAAFEIEYRHWVDEQKRHTAELMSALQGHQTSTTSELELRLLVETGLSNYEHLFRIKAVAANADVFHVMSGVWKTPAERFFLWIGGFRPSEVLKILSPQLEPLAEAQRMLVGGLQAHVNAGGGRAVAGHGEATAEPRRDPDRRG

SEQ ID NO: 19842 - protein, 283 aa, Zea mays subsp. mays
  misc_feature (1)..(283): Ceres Seq. ID no. 12374933
MGYGRPAPVTGMWSSEPFKVDSGGHATCSASTVMEADTKLETSRLQDDVPQVALEPERSTDQETSRPPERVMRRLAQNREAARKSRLRKKAYIQQLETSRMKLAQLELELQRARRQQGAYANGSMGDSALGYTGSIDPGVAAFEIEYRHWVDEQKRHTAELMSALQGHQTSTTSELELRLLVETGLSNYEHLFRIKAVAANADVFHVMSGVWKTPAERFFLWIGGFRPSEVLKILSPQLEPLAEAQRMLVGGLQAHVNAGGGRAVAGHGEATAEPRRDPDRRG

SEQ ID NO: 19843 - DNA, 1365 bp, Zea mays subsp. mays
  misc_feature (1)..(1365): Ceres Seq. ID no. 12374978
aacagtggtacttgaagtcgaaggcagcgcagcaggtacgccaggacgccattagcagcggttggccaccacccgacgccggaggcccggaggaggaggcggcgatggcggggaagcacgggcgcaacggcttcgacgacgacaacgtcaaccctttcgcgggaggaagtgttccacctgccaccaattctcgtctctcacctctatcacatgaaccggctgatttctacaatgtggacattcctctcgactcatcaaaggatctgaagaaaaaggagaaagaactccaggctatggaggctgagctaaacaaaagagaacgggaattgaaaaggaaggaagaggcggcatcccgagctggcgttgtgatagaagagaaaaactggcctccctttttccccctcatccaccacgacatttccaatgaaatacctatccatctacaaaggatgcagtaccttgcattctcatcattcttgggattgatagcgtgtctcttttggaatgtcatagcaactacaacagcatggattaaaggggaaggtgttatgatctggctgcttgccattatctacttcatatctggtgcgcctggggcttatgtgctatggtatcgacctctttataatgcaatgagaactgagagcgctttgaagtttgggtggtttttcctattttacatgattcatataatcttctgtgtgtgggcagctgtggctcctccatttcctttcaaaggaaaatctttggctgggattttaccagcaattgatgtcataagcaagaatgctattgttgggatattttacttcgttggatttggcttgttctgccttgaatcacttctgagcatcggtgtcattcagcaagtctacatgtatttccgtggaagtggaaaaagctgcagagatgaaacgtgaggcagcacgtagtgctctaagttcagccttctgatgaacatagggcggtctgattagagcagtagatggataagggaagggaacgagatgtgccaattaagccacgcggtcttgtacatcactgcagtacgtggatttggatcgctgaaagcgtacagctgatcgtctttttgctcttctgtaaaatatgaacaatcatcatatggtccggatgcgtcagggtgttgtttcatttcttgccatggtttagatgtggttgatagggaaaacggtgaagtattttttggagcagctaatataatgtatcttcatcatacttttacatgtgagtgtaatagcttatttcttgtggtaggaatacagctttgctgtgttttcgggaatgacatttgttgtgtaaggctattcacaatggctatttcataatactcttttcaatactgcc

SEQ ID NO: 19844 - protein, 305 aa, Zea mays subsp. mays
  misc_feature (1)..(305): Ceres Seq. ID no. 12374979
QWYLKSKAAQQVRQDAISSGWPPPDAGGPEEEAAMAGKHGRNGFDDDNVNPFAGGSVPPATNSRLSPLSHEPADFYNVDIPLDSSKDLKKKEKELQAMEAELNKRERELKRKEEAASRAGVVIEEKNWPPFFPLIHHDISNEIPIHLQRMQYLAFSSFLGLIACLFWNVIATTTAWIKGEGVMIWLLAIIYFISGAPGAYVLWYRPLYNAMRTESALKFGWFFLFYMIHIIFCVWAAVAPPFPFKGKSLAGILPAIDVISKNAIVGIFYFVGFGLFCLESLLSIGVIQQVYMYFRGSGKSCRDET

SEQ ID NO: 19845 - protein, 271 aa, Zea mays subsp. mays
  misc_feature (1)..(271): Ceres Seq. ID no. 12374980
MAGKHGRNGFDDDNVNPFAGGSVPPATNSRLSPLSHEPADFYNVDIPLDSSKDLKKKEKELQAMEAELNKRERELKRKEEAASRAGVVIEEKNWPPFFPLIHHDISNEIPIHLQRMQYLAFSSFLGLIACLFWNVIATTTAWIKGEGVMIWLLAIIYFISGAPGAYVLWYRPLYNAMRTESALKFGWFFLFYMIHIIFCVWAAVAPPFPFKGKSLAGILPAIDVISKNAIVGIFYFVGFGLFCLESLLSIGVIQQVYMYFRGSGKSCRDET

SEQ ID NO: 19846 - protein, 208 aa, Zea mays subsp. mays
  misc_feature (1)..(208): Ceres Seq. ID no. 12374981
MEAELNKRERELKRKEEAASRAGVVIEEKNWPPFFPLIHHDISNEIPIHLQRMQYLAFSSFLGLIACLFWNVIATTTAWIKGEGVMIWLLAIIYFISGAPGAYVLWYRPLYNAMRTESALKFGWFFLFYMIHIIFCVWAAVAPPFPFKGKSLAGILPAIDVISKNAIVGIFYFVGFGLFCLESLLSIGVIQQVYMYFRGSGKSCRDET

SEQ ID NO: 19847 - DNA, 1912 bp, Zea mays subsp. mays
  misc_feature (1)..(1912): Ceres Seq. ID no. 12374982
gagagaaacgcgctgcggccaccgccctccgccctccgcctaccacctcccacctctgacctcgcgtgccgagttcgggacgaagccaacgacgagctcagcggcgccggcgccgcagcgagaacacccgctccgtcgagaatacgtgtaaactaaattcaaaggcaggaatgtggcgcctctgttgctgcaattgccaggtggacgaaatagatcggcgtgagagtggtcatgtcaaggccacaaccaacaccatctgacggggtgacgaaggggttgagggatgatgctccccctatcgatgtacctgttctgtccttggatggtctgataagaaaaactggtgactttggttcaagagccttgataggtgaaggtatttatgggagactgtactatgcaactcttggtaattgaacaaaaatggcagtaaagaaacttcactctactgaaaatgaacccgctgccgagttcttggcccaggtctcgttggtttcaaggctgaaacatgaaaactttgttgacatgttggggtactatatcgagcgtgatcttcacatagtatcctacaaattcgccaccatgggttctctgcatgatcttctacatggaagaaaaggagttcaaggtgctcaagctggcccagtgcttcgttggatgcaacgagtgtgaattgctgttgatgctgcaaaagggctcgaatatcttcacgggaaagttcagccttccattgtccatagggatattagatcaagcaatatcctcttgtttgaagatgataggaatcgggcggattccctgatcgatctcaggttgtagtggtgggtgattggtggccagggtttgaggcgcgatgcacaacggcggggcgccgtgttcaccgcgcgcaagaggagagacgcgaggaaaggggcggctaggtcacagtaatcttccggctctctctggaaagccgaaacaatcttgtttctgcttaatccctatagagtggtgcttacaattatttatactcccttctagttcttatctaatgagataaatcccctattttctctctaacaaattttatctccttaatcttctaatccttatcatcttctaatccttatctgcatgcctatgctgttgcccggcgcctatagtggcggccgatcataacagaagacttcaaggcaaagatagcagacttcagtctctcaaaccagacttcatatatgtctgtccggttgcacattagctcacctcgggcctatggatatcatgccccagagtatgtaatgactggtaaactaacccagaaaagtgacgtatatagctttggaatagttcttttggagcttttgacaggtagaaagccaatagaccatacaatgcctatagatcagcacaacctgagagcttggaccacaccaatgttaactgaagagaaggtgaagcagtgtgtagatccgcgtttgatgggtgtgtatccagcaaaaggagtcgcaaagctcgctgctgtagcggctttgtgtgtgcaatctgatgctaagctccgcccaaatatgagcgttgtggttcacctatcagatttccatcactaactgcatggaggacgtcataactcattagtactgcactaataactttgcatctgcggctccacagcatgtcaacaatgttcatattcatctctcaggaaatgccagtataaggactagtgactaggtgatgaaatattgtcattagcattgagacttattgcaaagatgcggaattgtagaaaccccttcttttggtggcacaaacgctaatggaatcaccaagtggttcatacatgtccaactgttgtaatggtaattcattccgctgtgaatcggaagacaagcaaagcagaaaagcattacaacagttgaatctcaaaagacatgcg

SEQ ID NO: 19848 - protein, 122 aa, Zea mays subsp. mays
  misc_feature (1)..(122): Ceres Seq. ID no. 12374983
MSVRLHISSPRAYGYHAPEYVMTGKLTQKSDVYSFGIVLLELLTGRKPIDHTMPIDQHNLRAWTTPMLTEEKVKQCVDPRLMGVYPAKGVAKLAAVAALCVQSDAKLRPNMSVVVHLSDFHH

SEQ ID NO: 19849 - protein, 101 aa, Zea mays subsp. mays
  misc_feature (1)..(101): Ceres Seq. ID no. 12374984
MTGKLTQKSDVYSFGIVLLELLTGRKPIDHTMPIDQHNLRAWTTPMLTEEKVKQCVDPRLMGVYPAKGVAKLAAVAALCVQSDAKLRPNMSVVVHLSDFHH

SEQ ID NO: 19850 - protein, 82 aa, Zea mays subsp. mays
  misc_feature (1)..(82): Ceres Seq. ID no. 12374985
MAVKKLHSTENEPAAEFLAQVSLVSRLKHENFVDMLGYYIERDLHIVSYKFATMGSLHDLLHGRKGVQGAQAGPVLRWMQRV

SEQ ID NO: 19851 - DNA, 876 bp, Zea mays subsp. mays
  misc_feature (1)..(876): Ceres Seq. ID no. 12375045
aatacgctattcttgctaatcttcaagcaggagagaaaaaagcataagctgagcatccatcaatggcggatgctggcaacgaggccgagggtctgacgctgttgggcctgcacgtgagccccttcgcgttgcgcgtgcgcatggcgctgagcctcaagggcctgagctacgagtacatcgagcaggacctgttccacaagggcgagctcctcctcagctcaaaccccgtgcacaagaaggtgcccgtgctcatccaccacggcaagcccatctgcgagtccctcgccgtcgtggagtacgtcgatgaggtctggcccggcgccgccgccaccatcctccccgccgacccccacggtcgcgccaccgctcgcttctgggccgcctacatcgacggcaagctgtttccggcgtggacagggatcatgaaggcggcgacggaggaagcgagggcggataagctgagggagacgcacgccgcggtcctcaacctggagaaggccttcgccgagatcagctctagctccagcaacgacggcgcggccttcttcggcggcgactccgtcgggtacctggacctcgcgctcgggtgctccctgccgtggttcggggcgctgcgcgccatgctcggcgtcgagatcatcgacgccgcccaggctccgctcctggtggcgtgggccgagcgatttggggagaccccggtggccaaggaggtgctgccgcagccggacgaggctgtggcctacgccaagaagattcaggcctactgggcttctgctaagaactgatgagcaccgaatcctgtcatgatgaaattgaagcagcaatacttgtataacactccaatcatggtgaataaaggcctctaaactgttggtt

SEQ ID NO: 19852 - protein, 240 aa, Zea mays subsp. mays
  misc_feature (1)..(240): Ceres Seq. ID no. 12375046
MADAGNEAEGLTLLGLHVSPFALRVRMALSLKGLSYEYIEQDLFHKGELLLSSNPVHKKVPVLIHHGKPICESLAVVEYVDEVWPGAAATILPADPHGRATARFWAAYIDGKLFPAWTGIMKAATEEARADKLRETHAAVLNLEKAFAEISSSSSNDGAAFFGGDSVGYLDLALGCSLPWFGALRAMLGVEIIDAAQAPLLVAWAERFGETPVAKEVLPQPDEAVAYAKKIQAYWASAKN

SEQ ID NO: 19853 - protein, 214 aa, Zea mays subsp. mays
  misc_feature (1)..(214): Ceres Seq. ID no. 12375047
MALSLKGLSYEYIEQDLFHKGELLLSSNPVHKKVPVLIHHGKPICESLAVVEYVDEVWPGAAATILPADPHGRATARFWAAYIDGKLFPAWTGIMKAATEEARADKLRETHAAVLNLEKAFAEISSSSSNDGAAFFGGDSVGYLDLALGCSLPWFGALRAMLGVEIIDAAQAPLLVAWAERFGETPVAKEVLPQPDEAVAYAKKIQAYWASAKN

SEQ ID NO: 19854 - protein, 120 aa, Zea mays subsp. mays
  misc_feature (1)..(120): Ceres Seq. ID no. 12375048
MKAATEEARADKLRETHAAVLNLEKAFAEISSSSSNDGAAFFGGDSVGYLDLALGCSLPWFGALRAMLGVEIIDAAQAPLLVAWAERFGETPVAKEVLPQPDEAVAYAKKIQAYWASAKN

SEQ ID NO: 19855 - DNA, 2973 bp, Zea mays subsp. mays
  misc_feature (1)..(2973): Ceres Seq. ID no. 12375065
gcacgagaccattacctagaacatcctaatcgaaaaagagacgacgacgacgacgacgacgacgacgacgcgagaagtcgaggcgccgctgcttgctaggaccgagcttcaggaagtctccaacggccccggcgccggcacggcctgccccgcgccgccacagggattgattgtgatcagatctattctgtagtggtcagcggctgagggtgaaccgaagatgagcgttgtgggattcgatctcggcaatgagagctgcattgtggcagtcgcgcggcagcgcggcatcgacgtggtcctcaacgatgagtccaaacgcgagacacccgccatcgtctgcttcggggacaagcagcggttcatcggtacggcgggcgccgcgtcctcaaccatgaaccccaaaaactccatttctcagatcaagcgcctgctcggccgcaagttctccgaccccgagctccagagtgatctcgcgtccttcccgttccgtgtcacggagggccccgatggatttcccttggtacatgtgcggttcctgggcgaggagcggacgtttacccccacccagctgcttgccatggtgctgtccaatctgaagggcattgctgaggggaaccttaagactgcggttgttgattgctgcattggcatccctgtgtacttcagtgatttgcagcgcagggctgttcttgatgctgctactattgcaggcctcacgccgttgcagctatttcatgagacaactgccacggcattggcttatggcatttataagactgacctcccggagcatgaccagctaaacgttgcatttgttgatgtcggccatgctagcttgcaggtcagcattgtcggttacaagaagggacagctcaagatgctttcgcatgcatatgaccgttctcttggtgggagggacttcgatgaggccctcttcaagcacttcgcggcgaagttcaaagaagaatataagattgatgtttaccagaatgcccgtgcatgccttaggttgcgtgtggcgtgtgagaagcttaagaagatgctgagcgccaacccagaggccccactgaacattgagtgcttgatggatgagaaagatgtgagagggtttattaagagagaggagtttgaacacatcagtgcacctgtgctggtacgtgtcaaaggacccttggagaaggccttggctgaagctggcttgacaactgaaaatgtgcactttgttgaggttgtcggatctggttctcgtgttccagccataatcaagataatcactgatttttttgggaaggagccgagacgaaccatgaatgcaagcgagtgtgttgcgcggggctgtgctctccagtgtgctattctcagccccactttcaaagtgcgggaattccaggttaatgatgggtttcctttctcaattgcattgtcatggaaacaagactcgcagaacagtgcaccccaacagacccttgtatttccaaaggggaatgtaattcccagcattaaagctctaaccttctataaatccagtacatttgaagttgatgttttgtatgtggacacatgcgactcgcaaattccacagaagataagcacttacacaattggacctttccaaccctccaaaggtgagagggccaaactgaaagttaaagtgcgtctcaacatccacgggattgtcacagttgattcagctatgatgctggaggaggatgtggcagttccagtctcatctgctaatgaagctccaaaggatactacaaagatggacacagatgatgcaccaagtgatcctgtctctggaactgatgtgaatgtgcatgagcctgatactactgaggctgctcctgcagctgaaaatggaacacaaaatcccgaggaaaaatctgttccaatggaaactgatgcaaaggttgagccatcaaaaaggaaagttaagagaacttctgttccggtccatgcgttggtctatggtgccttggctgcagctgacctgcagaaggctgtagagaaagagtatgagatggctcttcaggacagagtaatggaagaaaccaaagagaagaaaaatgctgtggaagcttatgtctatgacatgcgtaacaagctctacgacaggtacaacgattttgtgacacctgaggagaaggaagggttgattggaaagcttcaggaggttgaagattggctatatgaagatggtgaggatgagacaaagggagtctatatttctaaactggaagatcttaagaagattggtgacccaattgaggcacggtacaaggagtcgacagaaaggggttcctctgtagatcaactggtctactgcatcaacagtttcagagaggctgctttgtccagtgaccaaaagtttggccatatcgacatatctgagaaacagaaggtcatcaatgagtgctctgaagtagagaactggttgagagagaggaagcagcagcaggacgccctacctaagcacaccgatcctgtgctgctcgtatcagatctgaagaagaaagctgaagcacttgacaggttctgcaaaccgatcatgactaaaccaaagccagctccgaagccacagactccgccaccacatactccacctccacagcctgaagcccaagcatctgaccctcaaacaccagaacaacaacaaagcgggactggtgcagctggtgagccgggtagtgagggaggtgtgcagcaggcctccggtgagcaaatggacatggacaggcccgatgattctgcggatgttgcggcataattgtggttgtggttgtcatctgtcttatgatcgatcaaaattttctgtttgtctggtaggtggatgagttaaggcaacagcatattctcccaagcgatttcgttttagggtttggaacattgagattgaggtaatgcgtcttgtccagcgttgttttggtctggactgtgaatcagaatagaaacgttgcatgatcgaattgcgcc

SEQ ID NO: 19856 - protein, 848 aa, Zea mays subsp. mays
  misc_feature (1)..(848): Ceres Seq. ID no. 12375066
MSVVGFDLGNESCIVAVARQRGIDVVLNDESKRETPAIVCFGDKQRFIGTAGAASSTMNPKNSISQIKRLLGRKFSDPELQSDLASFPFRVTEGPDGFPLVHVRFLGEERTFTPTQLLAMVLSNLKGIAEGNLKTAVVDCCIGIPVYFSDLQRRAVLDAATIAGLTPLQLFHETTATALAYGIYKTDLPEHDQLNVAFVDVGHASLQVSIVGYKKGQLKMLSHAYDRSLGGRDFDEALFKHFAAKFKEEYKIDVYQNARACLRLRVACEKLKKMLSANPEAPLNIECLMDEKDVRGFIKREEFEHISAPVLVRVKGPLEKALAEAGLTTENVHFVEVVGSGSRVPAIIKIITDFFGKEPRRTMNASECVARGCALQCAILSPTFKVREFQVNDGFPFSIALSWKQDSQNSAPQQTLVFPKGNVIPSIKALTFYKSSTFEVDVLYVDTCDSQIPQKISTYTIGPFQPSKGERAKLKVKVRLNIHGIVTVDSAMMLEEDVAVPVSSANEAPKDTTKMDTDDAPSDPVSGTDVNVHEPDTTEAAPAAENGTQNPEEKSVPMETDAKVEPSKRKVKRTSVPVHALVYGALAAADLQKAVEKEYEMALQDRVMEETKEKKNAVEAYVYDMRNKLYDRYNDFVTPEEKEGLIGKLQEVEDWLYEDGEDETKGVYISKLEDLKKIGDPIEARYKESTERGSSVDQLVYCINSFREAALSSDQKFGHIDISEKQKVINECSEVENWLRERKQQQDALPKHTDPVLLVSDLKKKAEALDRFCKPIMTKPKPAPKPQTPPPHTPPPQPEAQASDPQTPEQQQSGTGAAGEPGSEGGVQQASGEQMDMDRPDDSADVAA

SEQ ID NO: 19857 - protein, 791 aa, Zea mays subsp. mays
  misc_feature (1)..(791): Ceres Seq. ID no. 12375067
MNPKNSISQIKRLLGRKFSDPELQSDLASFPFRVTEGPDGFPLVHVRFLGEERTFTPTQLLAMVLSNLKGIAEGNLKTAVVDCCIGIPVYFSDLQRRAVLDAATIAGLTPLQLFHETTATALAYGIYKTDLPEHDQLNVAFVDVGHASLQVSIVGYKKGQLKMLSHAYDRSLGGRDFDEALFKHFAAKFKEEYKIDVYQNARACLRLRVACEKLKKMLSANPEAPLNIECLMDEKDVRGFIKREEFEHISAPVLVRVKGPLEKALAEAGLTTENVHFVEVVGSGSRVPAIIKIITDFFGKEPRRTMNASECVARGCALQCAILSPTFKVREFQVNDGFPFSIALSWKQDSQNSAPQQTLVFPKGNVIPSIKALTFYKSSTFEVDVLYVDTCDSQIPQKISTYTIGPFQPSKGERAKLKVKVRLNIHGIVTVDSAMMLEEDVAVPVSSANEAPKDTTKMDTDDAPSDPVSGTDVNVHEPDTTEAAPAAENGTQNPEEKSVPMETDAKVEPSKRKVKRTSVPVHALVYGALAAADLQKAVEKEYEMALQDRVMEETKEKKNAVEAYVYDMRNKLYDRYNDFVTPEEKEGLIGKLQEVEDWLYEDGEDETKGVYISKLEDLKKIGDPIEARYKESTERGSSVDQLVYCINSFREAALSSDQKFGHIDISEKQKVINECSEVENWLRERKQQQDALPKHTDPVLLVSDLKKKAEALDRFCKPIMTKPKPAPKPQTPPPHTPPPQPEAQASDPQTPEQQQSGTGAAGEPGSEGGVQQASGEQMDMDRPDDSADVAA

SEQ ID NO: 19858 - protein, 729 aa, Zea mays subsp. mays
  misc_feature (1)..(729): Ceres Seq. ID no. 12375068
MVLSNLKGIAEGNLKTAVVDCCIGIPVYFSDLQRRAVLDAATIAGLTPLQLFHETTATALAYGIYKTDLPEHDQLNVAFVDVGHASLQVSIVGYKKGQLKMLSHAYDRSLGGRDFDEALFKHFAAKFKEEYKIDVYQNARACLRLRVACEKLKKMLSANPEAPLNIECLMDEKDVRGFIKREEFEHISAPVLVRVKGPLEKALAEAGLTTENVHFVEVVGSGSRVPAIIKIITDFFGKEPRRTMNASECVARGCALQCAILSPTFKVREFQVNDGFPFSIALSWKQDSQNSAPQQTLVFPKGNVIPSIKALTFYKSSTFEVDVLYVDTCDSQIPQKISTYTIGPFQPSKGERAKLKVKVRLNIHGIVTVDSAMMLEEDVAVPVSSANEAPKDTTKMDTDDAPSDPVSGTDVNVHEPDTTEAAPAAENGTQNPEEKSVPMETDAKVEPSKRKVKRTSVPVHALVYGALAAADLQKAVEKEYEMALQDRVMEETKEKKNAVEAYVYDMRNKLYDRYNDFVTPEEKEGLIGKLQEVEDWLYEDGEDETKGVYISKLEDLKKIGDPIEARYKESTERGSSVDQLVYCINSFREAALSSDQKFGHIDISEKQKVINECSEVENWLRERKQQQDALPKHTDPVLLVSDLKKKAEALDRFCKPIMTKPKPAPKPQTPPPHTPPPQPEAQASDPQTPEQQQSGTGAAGEPGSEGGVQQASGEQMDMDRPDDSADVAA

SEQ ID NO: 19859 - DNA, 2380 bp, Zea mays subsp. mays
  misc_feature (1)..(2380): Ceres Seq. ID no. 12375079
gcacgagaccattacctagaacatcctaatcgaaaaaggccgcagctactccacggtgacggccgccatgagagccctcctctccctctcccgtctcgcccgacggcttccagcttctctcagccctgtaagggcgccgacaacattactcctccggcacatccatgcggatgcccctccgccgccgccatctcatgactcgacgcccttcgtctcccgcatcctcgaatcggagccgtgcctgaccccgaacgacgagtcggagccggcatccgatccgaccctcgacgagttcctcgcgcgcttcgtggctgccttccgcccgcgactggcggctgccttccccaaccatgaccgtgacgtgctcgacgagatgctccgcctcgtcgcggacgccgtgctgtgccgcctcaccgggaccgaccgggggggcgatgctattgagctcaatgacgacctctgggcggccgtatgggaggtcagcgcctccgtgcgcgaggctatgcgccgggatcaggtccgcgccgaccttcgccaataccttcactgcgacgaggtgaaggagatgacgcggttcgctgtcgatgtcggcatccgcggttccatgctccgggagctccgcttcaagtgggccggcgagaagctcgacgaggtcgagttctatcgcggccttgatgacaagcacgccgatgccgaggccggcgccgaccgggcgccagtgccgaggctgactgctttgccgaagaggaagggagaggtgaagttcacgatgtacgggctggacatgtctgacccaaagtgggctgaggtggcggagcgagtggccgaggctgaggcgcattttgtgcctgaggaggccaaggctgtagaagggagggcgaagaaggctgaggagcggctgctgtccgttgacccgaggagtggagatccggtgcctgccattgaggagtggaaggaagatctcaggccaaaccgtgttgattggatatctctgcttgagcggattaaggcacggaatgtcgagttatacctcaaggttgctgaaattctgctagatcaagaatcttttgaggcaaacatccgagattactcaaaattaattgatcttcatgctaaagcaaataatgtggaaagtgcagagagagtacttggtaaaatgaaagagaagggtattgcacctgatgtcatcatatccatcgtattagtccacatgtatagcagggcaggcaagctagagcaggccaaggaggcttttgattttattcgtagggaggattttaaaccagatcggaaactcttcagttcaatgattaaatgctatatcaaccatggagaaccagaacaagcagaaaatctgataaaagttatgagggatacacgtgtcaaacccactagagaaatctacataggtctcttacgatcatatgttcagcgaggcttgatggcatatgcagagagggttcttaagacaatgtcatttgatagagtcgagcctacacaggaactctatacaatatgtatagaagcatatggacgtgttggtgatccaaaagaggcctgtgccatgtttgatcaaatgaggaggaagtttggacacgaagcagatgacagttcaattgctggtgtggtggccgcatacatgaagaataaccaactagaccatgctttgcagtggctgctgagtttagataaggaaggacttcaacttggtgtcaagacaaatctcatgttactggattggttgtctatgttgcagctagttccggaggctgaacagtttgtgcagaagataaagaatcttggagaagagcccatagaagtccatgtgttccttgccgatatgtatgcgaagtcgtcccaggaagataaagcccgcaggtccctcaagatcttggaagagaagaagaaactattgaagtctgatcagtttgagagggttataagaggccttgtcgatggtgggttttcggaggaggcaaataaattctacaaaatgatgaaatcctgtggctttgaaccatcaaaaacaatcgaggtcgctgttaaggctctcaggattaggggcggttctcatcgcactggtaggtagagcctgtacgccggcagagtggcagtgatctactgggcacgcagtcaggcaaagagggattctggtgtgagaaccttgtggcactgacacggtacaatcaaattgacaaaactcagtgctgaaagatggtttggccaattttttttttctggttgtcaattgtctcgaggcgcgacgttgcttccatagactatgtagttaataggtccttgctaaatgactttgttgtttccagtgatcaggattttcacttgtattagatgaggtttgaagtgattgtaacactgatcc

SEQ ID NO: 19860 - protein, 673 aa, Zea mays subsp. mays
  misc_feature (1)..(673): Ceres Seq. ID no. 12375080
MRALLSLSRLARRLPASLSPVRAPTTLLLRHIHADAPPPPPSHDSTPFVSRILESEPCLTPNDESEPASDPTLDEFLARFVAAFRPRLAAAFPNHDRDVLDEMLRLVADAVLCRLTGTDRGGDAIELNDDLWAAVWEVSASVREAMRRDQVRADLRQYLHCDEVKEMTRFAVDVGIRGSMLRELRFKWAGEKLDEVEFYRGLDDKHADAEAGADRAPVPRLTALPKRKGEVKFTMYGLDMSDPKWAEVAERVAEAEAHFVPEEAKAVEGRAKKAEERLLSVDPRSGDPVPAIEEWKEDLRPNRVDWISLLERIKARNVELYLKVAEILLDQESFEANIRDYSKLIDLHAKANNVESAERVLGKMKEKGIAPDVIISIVLVHMYSRAGKLEQAKEAFDFIRREDFKPDRKLFSSMIKCYINHGEPEQAENLIKVMRDTRVKPTREIYIGLLRSYVQRGLMAYAERVLKTMSFDRVEPTQELYTICIEAYGRVGDPKEACAMFDQMRRKFGHEADDSSIAGVVAAYMKNNQLDHALQWLLSLDKEGLQLGVKTNLMLLDWLSMLQLVPEAEQFVQKIKNLGEEPIEVHVFLADMYAKSSQEDKARRSLKILEEKKKLLKSDQFERVIRGLVDGGFSEEANKFYKMMKSCGFEPSKTIEVAVKALRIRGGSHRTGR

SEQ ID NO: 19861 - protein, 571 aa, Zea mays subsp. mays
  misc_feature (1)..(571): Ceres Seq. ID no. 12375081
MLRLVADAVLCRLTGTDRGGDAIELNDDLWAAVWEVSASVREAMRRDQVRADLRQYLHCDEVKEMTRFAVDVGIRGSMLRELRFKWAGEKLDEVEFYRGLDDKHADAEAGADRAPVPRLTALPKRKGEVKFTMYGLDMSDPKWAEVAERVAEAEAHFVPEEAKAVEGRAKKAEERLLSVDPRSGDPVPAIEEWKEDLRPNRVDWISLLERIKARNVELYLKVAEILLDQESFEANIRDYSKLIDLHAKANNVESAERVLGKMKEKGIAPDVIISIVLVHMYSRAGKLEQAKEAFDFIRREDFKPDRKLFSSMIKCYINHGEPEQAENLIKVMRDTRVKPTREIYIGLLRSYVQRGLMAYAERVLKTMSFDRVEPTQELYTICIEAYGRVGDPKEACAMFDQMRRKFGHEADDSSIAGVVAAYMKNNQLDHALQWLLSLDKEGLQLGVKTNLMLLDWLSMLQLVPEAEQFVQKIKNLGEEPIEVHVFLADMYAKSSQEDKARRSLKILEEKKKLLKSDQFERVIRGLVDGGFSEEANKFYKMMKSCGFEPSKTIEVAVKALRIRGGSHRTGR

SEQ ID NO: 19862 - protein, 528 aa, Zea mays subsp. mays
  misc_feature (1)..(528): Ceres Seq. ID no. 12375082
MRRDQVRADLRQYLHCDEVKEMTRFAVDVGIRGSMLRELRFKWAGEKLDEVEFYRGLDDKHADAEAGADRAPVPRLTALPKRKGEVKFTMYGLDMSDPKWAEVAERVAEAEAHFVPEEAKAVEGRAKKAEERLLSVDPRSGDPVPAIEEWKEDLRPNRVDWISLLERIKARNVELYLKVAEILLDQESFEANIRDYSKLIDLHAKANNVESAERVLGKMKEKGIAPDVIISIVLVHMYSRAGKLEQAKEAFDFIRREDFKPDRKLFSSMIKCYINHGEPEQAENLIKVMRDTRVKPTREIYIGLLRSYVQRGLMAYAERVLKTMSFDRVEPTQELYTICIEAYGRVGDPKEACAMFDQMRRKFGHEADDSSIAGVVAAYMKNNQLDHALQWLLSLDKEGLQLGVKTNLMLLDWLSMLQLVPEAEQFVQKIKNLGEEPIEVHVFLADMYAKSSQEDKARRSLKILEEKKKLLKSDQFERVIRGLVDGGFSEEANKFYKMMKSCGFEPSKTIEVAVKALRIRGGSHRTGR

SEQ ID NO: 19863 - DNA, 2506 bp, Zea mays subsp. mays
  misc_feature (1)..(2506): Ceres Seq. ID no. 12375134
gcacgagaccattacctagaacatcctaatcgaaaaagaagagcacgcccactcctccggctcttcttctccaccggcaccagtccaccacctcctgccaccgcgcggccccaaccaaccacaccgcagcgcagcaatggcgggcaacggcgccatcgtggagagcgacccgctgaactggggcgcggcggcggcggagctggccgggagccacctggacgaggtgaagcgcatggtggcgcaggcccggcagcccgtggtgaagatcgagggctccaccctccgcgtcggccaggtggccgccgtcgcctccgccaaggacgcgtccggcgtcgccgtcgagctcgacgaggaggcccgcccccgcgtcaaggccagcagcgagtggatcctcgactgcatcgcccacggcggcgacatctacggcgtcaccaccggcttcggcggcacctcccaccgccgcaccaaggacgggcccgcgctccaggtcgagctgctcaggcatctcaacgccggaatcttcggcaccggcagcgacgggcacacgctgccgtcggaggtcacccgcgcggcgatgctggtgcgcatcaacaccctcctccagggctactccggcatccgcttcgagatcctcgaggccatcacgaagctgctcaacaccggtgtcagcccctgcctgccgctccggggcaccatcaccgcgtcgggcgacctggtcccgctctcctacatcgccggcctcatcacgggccgccccaacgcgcaggccgtcaccgtcgacggaaggaaggtggacgccgccgaggcgttcaagatcgccggcatcgagggcggcttcttcaagctcaaccccaaggagggcctcgccatcgtcaacggcacgtccgtgggctccgcgctcgcggccaccgtgatgtacgacgccaacgtcctggccgtcctgtcggaggtcctgtccgccgtcttctgcgaggtcatgaacggcaagcccgagtacacggaccacctgacccacaagctgaagcaccacccggggtccatcgaggccgcggccatcatggagcacatcctggatggcagctccttcatgaagcaggccaagaaggtgaacgagctggacccgctgctgaagcccaagcaggacaggtacgcgctccgcacgtcgccgcagtggctgggcccccagatcgaggtcatccgcgccgccaccaagtccatcgagcgcgaggtcaactccgtgaacgacaacccggtcatcgacgtccaccgcggcaaggcgctgcacggcggcaacttccagggcacccccatcggcgtgtccatggacaacgcccgcctcgccatcgccaacatcggcaagctcatgttcgcgcagttctccgagctcgtcaacgagttctacaacaacgggctcacctccaacctggccggcagccgcaaccccagcctggactacggcttcaagggcaccgagatcgccatggcctcctactgctccgagctccagtacctgggcaaccccatcaccaaccacgtgcagagcgcggagcagcacaaccaggacgtgaactccctgggcctcgtctcggccaggaagaccgccgaggcgatcgacatcctgaagctcatgtcgtccacctacatcgtggcgctgtgccaggccgtggacctgcgccacctcgaggagaacatcaaggcgtcggtgaagaacaccgtgacccaggtggccaagaaggtgctgaccatgaacccctcgggcgagctctccagcgcccgcttcagcgagaaggagctgatcagcgccatcgaccgcgaggccgtgttcacgtacgcggaggacgcggccagcgccagcctgccgctgatgcagaagctgcgcgccgtgctggtggaccacgccctcagcagcggcgacgcggagcgggagccctccatgttctccaagatcaccaggttcgaggaggagctccgcgcggtgctgccccaggaggtggaggccgcccgcgtggcggtcgccgagggcaccgcccccgtggcgaaccggatcgcggacagccggtcgttcccgctgtaccgcttcgtgcgcgaggagctcggctgcgtgttcctgaccggcgagaggctcaagtcccccggcgaggagtgcaacaaggtgttcgtcggcatcagccagggcaagctcgtggaccccatgctcgagtgcctcaaggagtgggacggcaagccgctgcccatcaacgtcaagtaaaagaacgccaaggagaagaggagggaggggaggaaatacgtgaaaaaaaataaaacctgtacacgtgtctgtccagatcgtgccgtcgatcgctcttcgttgttgatttttggttgtattgatcgatccgtatgtgtgcgtgcgtgtgtggcgttgctctttcttcttttgtgtagctgtgccctgccaccggccgacgtgcgtgcatgccatggtggcgggcagcgttttctaaggtcatatactgttgttgtgttt

SEQ ID NO: 19864 - protein, 766 aa, Zea mays subsp. mays
  misc_feature (1)..(766): Ceres Seq. ID no. 12375135
ARDHYLEHPNRKRRARPLLRLFFSTGTSPPPPATARPQPTTPQRSNGGQRRHRGERPAELGRGGGGAGREPPGRGEAHGGAGPAARGEDRGLHPPRRPGGRRRLRQGRVRRRRRARRGGPPPRQGQQRVDPRLHRPRRRHLRRHHRLRRHLPPPHQGRARAPGRAAQASQRRNLRHRQRRAHAAVGGHPRGDAGAHQHPPPGLLRHPLRDPRGHHEAAQHRCQPLPAAPGHHHRVGRPGPALLHRRPHHGPPQRAGRHRRRKEGGRRRGVQDRRHRGRLLQAQPQGGPRHRQRHVRGLRARGHRDVRRQRPGRPVGGPVRRLLRGHERQARVHGPPDPQAEAPPGVHRGRGHHGAHPGWQLLHEAGQEGERAGPAAEAQAGQVRAPHVAAVAGPPDRGHPRRHQVHRARGQLRERQPGHRRPPRQGAARRQLPGHPHRRVHGQRPPRHRQHRQAHVRAVLRARQRVLQQRAHLQPGRQPQPQPGLRLQGHRDRHGLLLLRAPVPGQPHHQPRAERGAAQPGRELPGPRLGQEDRRGDRHPEAHVVHLHRGAVPGRGPAPPRGEHQGVGEEHRDPGGQEGADHEPLGRALQRPLQREGADQRHRPRGRVHVRGGRGQRQPAADAEAARRAGGPRPQQRRRGAGALHVLQDHQVRGGAPRGAAPGGGGRPRGGRRGHRPRGEPDRGQPVVPAVPLRARGARLRVPDRREAQVPRRGVQQGVRRHQPGQARGPHARVPQGVGRQAAAHQRQVKERQGEEEGGEEIREKK

SEQ ID NO: 19865 - protein, 703 aa, Zea mays subsp. mays
  misc_feature (1)..(703): Ceres Seq. ID no. 12375136
MAGNGAIVESDPLNWGAAAAELAGSHLDEVKRMVAQARQPVVKIEGSTLRVGQVAAVASAKDASGVAVELDEEARPRVKASSEWILDCIAHGGDIYGVTTGFGGTSHRRTKDGPALQVELLRHLNAGIFGTGSDGHTLPSEVTRAAMLVRINTLLQGYSGIRFEILEAITKLLNTGVSPCLPLRGTITASGDLVPLSYIAGLITGRPNAQAVTVDGRKVDAAEAFKIAGIEGGFFKLNPKEGLAIVNGTSVGSALAATVMYDANVLAVLSEVLSAVFCEVMNGKPEYTDHLTHKLKHHPGSIEAAAIMEHILDGSSFMKQAKKVNELDPLLKPKQDRYALRTSPQWLGPQIEVIRAATKSIEREVNSVNDNPVIDVHRGKALHGGNFQGTPIGVSMDNARLAIANIGKLMFAQFSELVNEFYNNGLTSNLAGSRNPSLDYGFKGTEIAMASYCSELQYLGNPITNHVQSAEQHNQDVNSLGLVSARKTAEAIDILKLMSSTYIVALCQAVDLRHLEENIKASVKNTVTQVAKKVLTMNPSGELSSARFSEKELISAIDREAVFTYAEDAASASLPLMQKLRAVLVDHALSSGDAEREPSMFSKITRFEEELRAVLPQEVEAARVAVAEGTAPVANRIADSRSFPLYRFVREELGCVFLTGERLKSPGEECNKVFVGISQGKLVDPMLECLKEWDGKPLPINVK

SEQ ID NO: 19866 - protein, 671 aa, Zea mays subsp. mays
  misc_feature (1)..(671): Ceres Seq. ID no. 12375137
MVAQARQPVVKIEGSTLRVGQVAAVASAKDASGVAVELDEEARPRVKASSEWILDCIAHGGDIYGVTTGFGGTSHRRTKDGPALQVELLRHLNAGIFGTGSDGHTLPSEVTRAAMLVRINTLLQGYSGIRFEILEAITKLLNTGVSPCLPLRGTITASGDLVPLSYIAGLITGRPNAQAVTVDGRKVDAAEAFKIAGIEGGFFKLNPKEGLAIVNGTSVGSALAATVMYDANVLAVLSEVLSAVFCEVMNGKPEYTDHLTHKLKHHPGSIEAAAIMEHILDGSSFMKQAKKVNELDPLLKPKQDRYALRTSPQWLGPQIEVIRAATKSIEREVNSVNDNPVIDVHRGKALHGGNFQGTPIGVSMDNARLAIANIGKLMFAQFSELVNEFYNNGLTSNLAGSRNPSLDYGFKGTEIAMASYCSELQYLGNPITNHVQSAEQHNQDVNSLGLVSARKTAEAIDILKLMSSTYIVALCQAVDLRHLEENIKASVKNTVTQVAKKVLTMNPSGELSSARFSEKELISAIDREAVFTYAEDAASASLPLMQKLRAVLVDHALSSGDAEREPSMFSKITRFEEELRAVLPQEVEAARVAVAEGTAPVANRIADSRSFPLYRFVREELGCVFLTGERLKSPGEECNKVFVGISQGKLVDPMLECLKEWDGKPLPINVK

SEQ ID NO: 19867 - DNA, 2290 bp, Zea mays subsp. mays
  misc_feature (1)..(2290): Ceres Seq. ID no. 12375158
gcacgagaccattacctagaacatcctaatcgaaaaaccagtcagcactcagcacacagagtccgcctccgccgcggctccggcgcccgcatccgtctcaggagtcccttctccccgcgggtggagacatcttgatcatttctgagattaaactgatgatgctgatgctcgtttagttatcttggtttggagatatatcagatatgggtgatcggaatcatggacgctctctccctctactgctctatctacatcttttgctgccaatacttccgtttgctatggcagatatagcctccgagaagcaagcactccttgcttttgcctctgcagtctaccatggcaacaaactgaattggagccaaaatatcccagtgtgctcatggcatggtgtgacatgctcactggatcgatcgtgtatattggcccttagggtgccaggtgctggtttgattggtaccattcctgctgatactcttggcaggcttgtgtccctccaagttttaagcatgaggtctaaccgtttgagtggaagccttccgaacgatgttgtctcacttccttctttacaagccatatttgttcagcacaacgaactgtcaggagacttgcctccatttctctctccaaaccttaatacccttgatctctcttacaactcctttacaggacaaatcccatcaggtttgcagaatcttaccaaattgtctgtcttgaatttagcagaaaattccctgtccgggccgattccggatctcaaacttcctagcttaagacagctaaatctgagcaacaatgaactgaatggttcgattcctccctttttccaaatcttctcaaatagttccttcctagggaactctggattgtgtggaccgccgctaactgaatgttcttttctatcttcaccaacaccgtcgcaagtgccttcaccaccaaaattaccaaatcatgagaagaaggctggcaatggcttggtaatcgtggctgttgctgggagctttgtcatatttctgctagctgctgtgatgttcactatgtgcatttcaaagaggaaggagaagaaagacgaagcgggttacaacggtaaggttactgatggtggaaggattgagaagcgcaaagaggatctcagcagtggcgtccaaatggcgcataagaacaagttagttttcttggagggatgcagttacaactttgacttggaggacttgctgagagcttctgctgaagttctcgggaaagggagctatggaactgcctacaaggctatactcgaggatggctctactgtggtagtcaagaggctaaaggatgtcgtggcagggaagaaagaatttgagcagcagatggagctcatagggagggtaggtaaacatgcaaacatcgcgcctattcgtgcttactactactcgaaggatgagaagcttgttgtttatgagtatattggtagaggcagcttctcagctctgttgcatggtatcaagggcgtgtgtgagaagaccccattagattggaacacaaggatgaagattatactcggaacagcacgcggcctcgagcacatccattcagaaggcggctccaggctcgcacacggcaacatcaagtcaaccaacgttctgctcgacggagaccacaacccttacgtctcagactacgggctgagctcgttgacgagccttccgatcaccacttcccgagctgtcgctggctaccgagctcaggagaccttcgaatcgaggaagttcacccacaagtccgacgtgtacggtttcggcgtcctcctcatggagacgctgacgggcaaggccccgcttcagtcacagggtcaggacgacgccgtcgacctaccgaggtgggtgcattcggtggtccgcgaggagtggaccgctgaggtgtttgacgtccagctgatgaagtatcccaacatagaagacgagctggtccagatgctccgtatcgccatggcgtgcacggcgtggtctcccgaccggcgtccgacgatggcgcaggtggttaggatggtggaggagctccggcactctgcttccgggagtcgcgctctctccgttggcagtcccaaggaatccagccctctgtcagcctgaattgtggttctgattcagaattcgtgtatccatgacatcgatgatcgatggtatcctgcatgtggttcacggtgcacacgttgtctgcctcgtcagatacttcgtactgctgtaactttggttcaatggaatgcttaagaaacaaggtcggaataggcgaatagctattttcgtctttc

SEQ ID NO: 19868 - protein, 635 aa, Zea mays subsp. mays
  misc_feature (1)..(635): Ceres Seq. ID no. 12375159
MGDRNHGRSLPLLLYLHLLLPILPFAMADIASEKQALLAFASAVYHGNKLNWSQNIPVCSWHGVTCSLDRSCILALRVPGAGLIGTIPADTLGRLVSLQVLSMRSNRLSGSLPNDVVSLPSLQAIFVQHNELSGDLPPFLSPNLNTLDLSYNSFTGQIPSGLQNLTKLSVLNLAENSLSGPIPDLKLPSLRQLNLSNNELNGSIPPFFQIFSNSSFLGNSGLCGPPLTECSFLSSPTPSQVPSPPKLPNHEKKAGNGLVIVAVAGSFVIFLLAAVMFTMCISKRKEKKDEAGYNGKVTDGGRIEKRKEDLSSGVQMAHKNKLVFLEGCSYNFDLEDLLRASAEVLGKGSYGTAYKAILEDGSTVVVKRLKDVVAGKKEFEQQMELIGRVGKHANIAPIRAYYYSKDEKLVVYEYIGRGSFSALLHGIKGVCEKTPLDWNTRMKIILGTARGLEHIHSEGGSRLAHGNIKSTNVLLDGDHNPYVSDYGLSSLTSLPITTSRAVAGYRAQETFESRKFTHKSDVYGFGVLLMETLTGKAPLQSQGQDDAVDLPRWVHSVVREEWTAEVFDVQLMKYPNIEDELVQMLRIAMACTAWSPDRRPTMAQVVRMVEELRHSASGSRALSVGSPKESSPLSA

SEQ ID NO: 19869 - protein, 609 aa, Zea mays subsp. mays
  misc_feature (1)..(609): Ceres Seq. ID no. 12375160
MADIASEKQALLAFASAVYHGNKLNWSQNIPVCSWHGVTCSLDRSCILALRVPGAGLIGTIPADTLGRLVSLQVLSMRSNRLSGSLPNDVVSLPSLQAIFVQHNELSGDLPPFLSPNLNTLDLSYNSFTGQIPSGLQNLTKLSVLNLAENSLSGPIPDLKLPSLRQLNLSNNELNGSIPPFFQIFSNSSFLGNSGLCGPPLTECSFLSSPTPSQVPSPPKLPNHEKKAGNGLVIVAVAGSFVIFLLAAVMFTMCISKRKEKKDEAGYNGKVTDGGRIEKRKEDLSSGVQMAHKNKLVFLEGCSYNFDLEDLLRASAEVLGKGSYGTAYKAILEDGSTVVVKRLKDVVAGKKEFEQQMELIGRVGKHANIAPIRAYYYSKDEKLVVYEYIGRGSFSALLHGIKGVCEKTPLDWNTRMKIILGTARGLEHIHSEGGSRLAHGNIKSTNVLLDGDHNPYVSDYGLSSLTSLPITTSRAVAGYRAQETFESRKFTHKSDVYGFGVLLMETLTGKAPLQSQGQDDAVDLPRWVHSVVREEWTAEVFDVQLMKYPNIEDELVQMLRIAMACTAWSPDRRPTMAQVVRMVEELRHSASGSRALSVGSPKESSPLSA

SEQ ID NO: 19870 - protein, 533 aa, Zea mays subsp. mays
  misc_feature (1)..(533): Ceres Seq. ID no. 12375161
MRSNRLSGSLPNDVVSLPSLQAIFVQHNELSGDLPPFLSPNLNTLDLSYNSFTGQIPSGLQNLTKLSVLNLAENSLSGPIPDLKLPSLRQLNLSNNELNGSIPPFFQIFSNSSFLGNSGLCGPPLTECSFLSSPTPSQVPSPPKLPNHEKKAGNGLVIVAVAGSFVIFLLAAVMFTMCISKRKEKKDEAGYNGKVTDGGRIEKRKEDLSSGVQMAHKNKLVFLEGCSYNFDLEDLLRASAEVLGKGSYGTAYKAILEDGSTVVVKRLKDVVAGKKEFEQQMELIGRVGKHANIAPIRAYYYSKDEKLVVYEYIGRGSFSALLHGIKGVCEKTPLDWNTRMKIILGTARGLEHIHSEGGSRLAHGNIKSTNVLLDGDHNPYVSDYGLSSLTSLPITTSRAVAGYRAQETFESRKFTHKSDVYGFGVLLMETLTGKAPLQSQGQDDAVDLPRWVHSVVREEWTAEVFDVQLMKYPNIEDELVQMLRIAMACTAWSPDRRPTMAQVVRMVEELRHSASGSRALSVGSPKESSPLSA

SEQ ID NO: 19871 - DNA, 2297 bp, Zea mays subsp. mays
  misc_feature (1)..(2297): Ceres Seq. ID no. 12375193
gcacgagaccattacctagaacatcntaatcgaaaaactcgtcacaagctctctttcatcgcatccaccattccacttccaccccacgaggatccagcctgcctgtccctctcgccgcacgccacaaccgtagtcgctcgccggcgtatctagcctagccggggcctgggcctccgcgctcgtgctcccgggaaacaacgaccgacgcgtcctcatagtcatagaggcagctaaggcagccacgcattcgtcactcgctcgaccggcgatggcgagaggtggcacggcgggcgcgggcgcgggcggggaggggagggcggctagcgaggcgctgacggcggactcagccgacgaggaggggcgccgcgggagcagctccagcgccagctccgacgccgcctccagcttctcctgcacgtactccccggccccgcccgacgagtggcacaaggtggccatcatcaagacctgcgtgtctgtgtcggccgacgccgcgggcggcggcggcggcaaggaccagaagccgcgcggcgtcgtcgccgcggccgacaggcacggaggagcatcagagatggagatgatgaaggagcggttctccaagctgctgctcggcgaggacatgtccgggagcggcaagggcgtctgcaccgcgctcgccatctccaacgccgtcaccaacctctgcgcgacggtgttcggccagctctggaggctggagccgctgccgccggagaagaaggccatgtggcggcgcgagttggactgcctgctctgcgtcagcgaccacatcgtggagctggtgcccacgtggcagacattcccggatggtacaaggcttgagatcatgacaagcaggccgcggtctgatctgtacatcaacctgccggcgcttcggaagctagacaacatgctcctcgaaatcctggaaggtttcagggacgtcgagttctggtacgtggaccagggcatctgtgcgccggactgcgacagctccgcgtcctaccggagaacgttccaccgccgcgacgacaagtggtggctgccggtgccgcacgtgccccacggcggtctccgcgaggccacgcggaggcagctggagcaccgtcgcgactgcgccagccagatcctcaaggccgccatggccatcaacagcaacgcactggccgagatggccgtgccggtctcctacctcgactcgctgccaaagaacgggcgcgcggcgctgggcgacgtcatctaccggtacatcacctcggaccagttctcccaggactgcctcctcgactgcctcgacctgtcgtcggaataccaggcgctggagatcgccaaccgcgtcgaggcctccatctacgtgtggcgccggaaggggggcggcggcgccagatcgtcctggggcatcgtgaaggacatggtcatggacacggagaagagggacctgctcgccgagcgcgcggaggcgctgctcatgtccctcaagcagcggttccccgggctcactcagacgagcttggacatgagcaagatccagtacaacaaggacgtgggcaaatcgatcctcgagagctactcgagggtcctggagagcctggcctccaacatcatcgcgcggatcgacgacctgctcaacgtcgacgagctgagcaagcaaccagctgacagcatcccgtccgccggagcggacgcgaaggttgcgtgcaagagcaacggcagcaagcaggccacggcggtgcctgcctcgggcacgccgtacgcgacggcgtacgccacgccgagcttctcgccggcgcagctgtcgagcccgtccaagatcgggagggccctgctggtcgaccgccggtcgcaccacgttgccggagctaagagggcaacggcgtccgcggctgatcgcgctggcgtggaggtggtcaagggaatggtggtcgacggcagcagcgccatattcgatatcatcccgatagctgtcccagcaaagatatgaagagtccgctcgtctgtgcggaccagatacgtcatacgtgttgtgttggcgtgaagtagtgggtttactgtagcatccgagggcgatttctcttgttgccgatggcagccctccgcttgcgactgtaatgcttttggtgcggtgtcgtgtagtatgttacacgtagagttttctgtatctgtcagatgttcgttggatgaaagcaccgccgacactggtcgtcggctgtcgcggagtaagattatgtcaccacactcacgatctcactcctatttcaaactactacactttacaaaaaaaaaaaaaaaaaaaaagaaaa

SEQ ID NO: 19872 - protein, 569 aa, Zea mays subsp. mays
  misc_feature (1)..(569): Ceres Seq. ID no. 12375194
MARGGTAGAGAGGEGRAASEALTADSADEEGRRGSSSSASSDAASSFSCTYSPAPPDEWHKVAIIKTCVSVSADAAGGGGGKDQKPRGVVAAADRHGGASEMEMMKERFSKLLLGEDMSGSGKGVCTALAISNAVTNLCATVFGQLWRLEPLPPEKKAMWRRELDCLLCVSDHIVELVPTWQTFPDGTRLEIMTSRPRSDLYINLPALRKLDNMLLEILEGFRDVEFWYVDQGICAPDCDSSASYRRTFHRRDDKWWLPVPHVPHGGLREATRRQLEHRRDCASQILKAAMAINSNALAEMAVPVSYLDSLPKNGRAALGDVIYRYITSDQFSQDCLLDCLDLSSEYQALEIANRVEASIYVWRRKGGGGARSSWGIVKDMVMDTEKRDLLAERAEALLMSLKQRFPGLTQTSLDMSKIQYNKDVGKSILESYSRVLESLASNIIARIDDLLNVDELSKQPADSIPSAGADAKVACKSNGSKQATAVPASGTPYATAYATPSFSPAQLSSPSKIGRALLVDRRSHHVAGAKRATASAADRAGVEVVKGMVVDGSSAIFDIIPIAVPAKI

SEQ ID NO: 19873 - protein, 468 aa, Zea mays subsp. mays
  misc_feature (1)..(468): Ceres Seq. ID no. 12375195
MEMMKERFSKLLLGEDMSGSGKGVCTALAISNAVTNLCATVFGQLWRLEPLPPEKKAMWRRELDCLLCVSDHIVELVPTWQTFPDGTRLEIMTSRPRSDLYINLPALRKLDNMLLEILEGFRDVEFWYVDQGICAPDCDSSASYRRTFHRRDDKWWLPVPHVPHGGLREATRRQLEHRRDCASQILKAAMAINSNALAEMAVPVSYLDSLPKNGRAALGDVIYRYITSDQFSQDCLLDCLDLSSEYQALEIANRVEASIYVWRRKGGGGARSSWGIVKDMVMDTEKRDLLAERAEALLMSLKQRFPGLTQTSLDMSKIQYNKDVGKSILESYSRVLESLASNIIARIDDLLNVDELSKQPADSIPSAGADAKVACKSNGSKQATAVPASGTPYATAYATPSFSPAQLSSPSKIGRALLVDRRSHHVAGAKRATASAADRAGVEVVKGMVVDGSSAIFDIIPIAVPAKI

SEQ ID NO: 19874 - protein, 466 aa, Zea mays subsp. mays
  misc_feature (1)..(466): Ceres Seq. ID no. 12375196
MMKERFSKLLLGEDMSGSGKGVCTALAISNAVTNLCATVFGQLWRLEPLPPEKKAMWRRELDCLLCVSDHIVELVPTWQTFPDGTRLEIMTSRPRSDLYINLPALRKLDNMLLEILEGFRDVEFWYVDQGICAPDCDSSASYRRTFHRRDDKWWLPVPHVPHGGLREATRRQLEHRRDCASQILKAAMAINSNALAEMAVPVSYLDSLPKNGRAALGDVIYRYITSDQFSQDCLLDCLDLSSEYQALEIANRVEASIYVWRRKGGGGARSSWGIVKDMVMDTEKRDLLAERAEALLMSLKQRFPGLTQTSLDMSKIQYNKDVGKSILESYSRVLESLASNIIARIDDLLNVDELSKQPADSIPSAGADAKVACKSNGSKQATAVPASGTPYATAYATPSFSPAQLSSPSKIGRALLVDRRSHHVAGAKRATASAADRAGVEVVKGMVVDGSSAIFDIIPIAVPAKI

SEQ ID NO: 19875 - DNA, 2245 bp, Zea mays subsp. mays
  misc_feature (1)..(2245): Ceres Seq. ID no. 12375229
gcacgagaccattacctagaacatcctaatcgaaaaaaaaccgaagcctccccggttatcccccggcctccacctgaccactaccaccacccgggacgtcttccatggcctcctcatagaataagctctatctcaccgcaacaactcctcattacaatccttcaagagagcagcactacactacactacattagagagaggtcgagcgcccctcctccgatccgccggcccgccgagagctagctgctgatcggtcgaggagagtcatggcgacgtcgacgatgcgcgttgccgccggcgtgctgctggtcgtgtcggcgctggcgaccttggcccgggccgaggacccctacctgttcttcgagtggaaggtgacgtacgggaccaggtccctgctgggagtgccccagaaggtcatcctcatcaacggcgagttccctggccccaggatcaactgctcctccaacaacaacatcgtcgtcaacgtcttcaaccagctcgaccatccgctccttttcacctggaacgggatgcagcacaggaagaactcgtggatggacgggatgccaggcacgcagtgccccatcgcgcccaacaccaacttcacgtacaagtggcagcccaaggaccagatcggcagcttcttctacttcccgtccatcggcatgcagcgggcggcgggcgggtacggcgccatcagcgtggtgagccgcctcctcatcccggtccccttcgaccagccgccgccggagagcgaccacgcggtgctcatcggcgactggtacaccaaggaccacgaggtgctggcgcgccagctcgacgccggcaagagcgtgggccgccccgcgggcgtgctcatcaacggcaagggaggcaaggacctggaggccgccgcgcccatgctcaccttcgaggcgggcaagacgtaccgtctccgcgtgtgcaacaccgggatcaaggcgtcgctcaacttccgcatccagggccactacatgaagctcgtggagctggagggctcccacaccctgcaggacgtgtacgactcgctggacgtgcacgtcggcccactgcctctccgtgctggtcgacgccgaccaggcgcccggcgactactacatggtggcctccacgcggttcatccacgacgccaagtccgcctccgccgtcatccgctacgccggctccagcggcgccccgccggcgcccaacatgaccgagccaccggccggctgggcctggtccatcaaccaggccaggtcgttccgctggaacctgacggccagcgccgcgcgccccaacccgcagggctcctaccactacggccagatcaacatcacccgcaccatcaaggtcatggtctcccgcggccacatcgacggcaagctccgctacggcttcaacggcatctcccacagggataccgagacccccctcaagctcgccgagtacttcaacgtcaccgacggggtgttcagctacaaccagatgggcgacgtgccacccgctgttaacgggccactccatgtcatccccaacgtcatcaccgccgagttccggaccttcatcgagatcgtcttcgagaaccccgagaagagcatagactccctccacctcgacggctacgccttcttcggcgtcgggatggggcccgggacgtggtcgccggagatgaggaagacgtacaacctactggacacggtgagccggcacacgatccaggtgtacccgcggtcatggacggcgatcatgctgacattcgacaacgcgggcatgtggagcgtccggtccaacgtctgggagcggtactacctcggggagcagttctacatcagcgtcatctcgccggcgcggtcgctgcgcgacgagtacaacatgcccgacaacgccctccgctgcggcaaggtcgtggggctgccgctgccgccatcctacgcccccgcgcgctaaagacgacgaaggcgccgttttcacctcgtgttctgaccatccagtctaactaacccattcctgtgctgctcggcgaaataaaatcatcaaaaagaacaaagacgaaggaagcctagggaagggagaaggacgttgggtgggggtgagccaaatgagaacgcacggatatatctattcatgtaatcttgagatgccctctcaaatcactgtaatggggtttaaaaaacaatcattgtaatgggagttatatatacttttatcttaacatttatttacaccagcaagtcctggtgtatgc

SEQ ID NO: 19876 - protein, 414 aa, Zea mays subsp. mays
  misc_feature (1)..(414): Ceres Seq. ID no. 12375230
MATSTMRVAAGVLLVVSALATLARAEDPYLFFEWKVTYGTRSLLGVPQKVILINGEFPGPRINCSSNNNIVVNVFNQLDHPLLFTWNGMQHRKNSWMDGMPGTQCPIAPNTNFTYKWQPKDQIGSFFYFPSIGMQRAAGGYGAISVVSRLLIPVPFDQPPPESDHAVLIGDWYTKDHEVLARQLDAGKSVGRPAGVLINGKGGKDLEAAAPMLTFEAGKTYRLRVCNTGIKASLNFRIQGHYMKLVELEGSHTLQDVYDSLDVHVGPLPLRAGRRRPGARRLLHGGLHAVHPRRQVRLRRHPLRRLQRRPAGAQHDRATGRLGLVHQPGQVVPLEPDGQRRAPQPAGLLPLRPDQHHPHHQGHGLPRPHRRQAPLRLQRHLPQGYRDPPQARRVLQRHRRGVQLQPDGRRATRC

SEQ ID NO: 19877 - protein, 409 aa, Zea mays subsp. mays
  misc_feature (1)..(409): Ceres Seq. ID no. 12375231
MRVAAGVLLVVSALATLARAEDPYLFFEWKVTYGTRSLLGVPQKVILINGEFPGPRINCSSNNNIVVNVFNQLDHPLLFTWNGMQHRKNSWMDGMPGTQCPIAPNTNFTYKWQPKDQIGSFFYFPSIGMQRAAGGYGAISVVSRLLIPVPFDQPPPESDHAVLIGDWYTKDHEVLARQLDAGKSVGRPAGVLINGKGGKDLEAAAPMLTFEAGKTYRLRVCNTGIKASLNFRIQGHYMKLVELEGSHTLQDVYDSLDVHVGPLPLRAGRRRPGARRLLHGGLHAVHPRRQVRLRRHPLRRLQRRPAGAQHDRATGRLGLVHQPGQVVPLEPDGQRRAPQPAGLLPLRPDQHHPHHQGHGLPRPHRRQAPLRLQRHLPQGYRDPPQARRVLQRHRRGVQLQPDGRRATRC

SEQ ID NO: 19878 - protein, 326 aa, Zea mays subsp. mays
  misc_feature (1)..(326): Ceres Seq. ID no. 12375232
MQHRKNSWMDGMPGTQCPIAPNTNFTYKWQPKDQIGSFFYFPSIGMQRAAGGYGAISVVSRLLIPVPFDQPPPESDHAVLIGDWYTKDHEVLARQLDAGKSVGRPAGVLINGKGGKDLEAAAPMLTFEAGKTYRLRVCNTGIKASLNFRIQGHYMKLVELEGSHTLQDVYDSLDVHVGPLPLRAGRRRPGARRLLHGGLHAVHPRRQVRLRRHPLRRLQRRPAGAQHDRATGRLGLVHQPGQVVPLEPDGQRRAPQPAGLLPLRPDQHHPHHQGHGLPRPHRRQAPLRLQRHLPQGYRDPPQARRVLQRHRRGVQLQPDGRRATRC

SEQ ID NO: 19879 - DNA, 2408 bp, Zea mays subsp. mays
  misc_feature (1)..(2408): Ceres Seq. ID no. 12375257
gcacgagaccattacctagaacatcctaatcgaaaagatcgatgacgcaccggaacagtgcaggtgcagcgaaagaggagcgcgccgtcgctgtcgacggccgtgccgagcgccagcagacaagcggcgacgctacaaaacaacgcgccaaccaaccgccccactgctgaccctttccaacctccaagctccctgccttctgccggccggtcggcagcggtggtagcggccaccaccccagggtatggccgcccgctccctcctcctctacgcgctgctgctcctggccctcgccaccgccgcaccgtcccacggcctcactcaagcggatgttgcgaagcgattgaaggaggtgctgtcggagaggaaccgagggcatgagatgctcgattcgtggaatggggatggggacccgtgttctccgtctacctgggaaggcttctcttgcgaacccaaggatggtgcccaggtcgtcgtcaagttgaacttttcttcgaagaaattgcaagggccgattcctgcagagattgctaacttgacggagctaaatgaaatacatctgcagtataataacttcactggatctattccggcatccttttctgctctcagacacctgctgaagctgtcggtgatttgcaaccccttgttgaacaataagcagcctgatggattttctagcggtgtaaatttcagctatggaggatgtgccgcccaagagtactatagctcaccagctgaagagtaccaaagcccacctgcagttgccagtcagaaagtatatgttattggtggtgtcgccggaggatctttggcatgtactgttgcactcggatcgttctttgtttgttttaacaaacgtgaacggcgttctccaaaaaaggactgctcttctacaacaaatcctgtttttcaagaatgcagcatccataacactacaaatcctgcagtacaacagttctccctcaaagcaatccagactgcaataagcaactacaaaactacgataggagagggtgggtttggagcagtttatcgaggtgcattagcaaatgggcaagaagttgcagtaaaagtccgctcaagttcatcgacacagggaacacgtgagtttaacaatgagctaagacttctttctgctgtgtggcatgagaatttagtcccacttatcggctattgctgtgaaaaagatcaacagatattggtctatccgttcatgtccaatggctcactacaagatcgtctttacggtgaggcatcaaaaaggaaagttcttgattggcccacaagactatctgtttgcattggtgctgctagagggctagtatatctgcacaattttgccgggcgttgtatcatacacagagatattaaatcgagcaacatacttctggatcacagcatgtgtggcaaggtagccgactttgggttttccaagtatgcaccacaggaaggtgacagcaatccatcaatggaagtgaggggaactgctgggtatttggaccctgaatactattccactcaggtgttatcaaccagaagcgacgtcttcagtttcggagtagtcctgttagaaattgtgacaggaagagaacctcttgatgtcaaaaggcctcgtcatgaatggagcttagttgagtgggcaaaaccatacatcagggagtacaagatcgaggagatggtggaccctggcataaaagggcagtattgctcagaggccatgtggagagtgctcgaggtcgcatctgtgtgcaccgagcccttctcaaccttcaggccgaccatggaggacgtcctgagggagctggaggacgctctgatcatcgagaacaacgcgtccgagtacatgaggtccatcgagagcacagggactctggggtccaaccgctatctgtccatcgacaggaagatgttcgcgtcagggtcagcgcgaatcgagtcgacgaaggggaatctgcaagcaatgccctcgcttccgcggtaactagacgccgcattgtgatttcgtagcgggcgtcgtcagggtgtgatccatgctcaaggcacatctaaccacgctgaggcctgactgagcacctgagatgggcatagacatgaagggatagtctgtactctgtaccatgtacagagcccattcagtggtgagagcacagatcagcgatacctacactgggaaatgccttctgaagccaatgtgctagttttgcctgttgaatttcccaaaagcaggcgaatgtgcgggcacaaactattctttggaccattataaacacgtaaaatgtgtcgagggaatccctcaagaaatcgaatattcagatctgtaccgtcacttcattatgtgaactattgctcgcttgttgtaattgtcattcttgcctaataaaccgatcaacagatgaattttcttc

SEQ ID NO: 19880 - protein, 579 aa, Zea mays subsp. mays
  misc_feature (1)..(579): Ceres Seq. ID no. 12375258
MAARSLLLYALLLLALATAAPSHGLTQADVAKRLKEVLSERNRGHEMLDSWNGDGDPCSPSTWEGFSCEPKDGAQVVVKLNFSSKKLQGPIPAEIANLTELNEIHLQYNNFTGSIPASFSALRHLLKLSVICNPLLNNKQPDGFSSGVNFSYGGCAAQEYYSSPAEEYQSPPAVASQKVYVIGGVAGGSLACTVALGSFFVCFNKRERRSPKKDCSSTTNPVFQECSIHNTTNPAVQQFSLKAIQTAISNYKTTIGEGGFGAVYRGALANGQEVAVKVRSSSSTQGTREFNNELRLLSAVWHENLVPLIGYCCEKDQQILVYPFMSNGSLQDRLYGEASKRKVLDWPTRLSVCIGAARGLVYLHNFAGRCIIHRDIKSSNILLDHSMCGKVADFGFSKYAPQEGDSNPSMEVRGTAGYLDPEYYSTQVLSTRSDVFSFGVVLLEIVTGREPLDVKRPRHEWSLVEWAKPYIREYKIEEMVDPGIKGQYCSEAMWRVLEVASVCTEPFSTFRPTMEDVLRELEDALIIENNASEYMRSIESTGTLGSNRYLSIDRKMFASGSARIESTKGNLQAMPSLPR

SEQ ID NO: 19881 - protein, 533 aa, Zea mays subsp. mays
  misc_feature (1)..(533): Ceres Seq. ID no. 12375259
MLDSWNGDGDPCSPSTWEGFSCEPKDGAQVVVKLNFSSKKLQGPIPAEIANLTELNEIHLQYNNFTGSIPASFSALRHLLKLSVICNPLLNNKQPDGFSSGVNFSYGGCAAQEYYSSPAEEYQSPPAVASQKVYVIGGVAGGSLACTVALGSFFVCFNKRERRSPKKDCSSTTNPVFQECSIHNTTNPAVQQFSLKAIQTAISNYKTTIGEGGFGAVYRGALANGQEVAVKVRSSSSTQGTREFNNELRLLSAVWHENLVPLIGYCCEKDQQILVYPFMSNGSLQDRLYGEASKRKVLDWPTRLSVCIGAARGLVYLHNFAGRCIIHRDIKSSNILLDHSMCGKVADFGFSKYAPQEGDSNPSMEVRGTAGYLDPEYYSTQVLSTRSDVFSFGVVLLEIVTGREPLDVKRPRHEWSLVEWAKPYIREYKIEEMVDPGIKGQYCSEAMWRVLEVASVCTEPFSTFRPTMEDVLRELEDALIIENNASEYMRSIESTGTLGSNRYLSIDRKMFASGSARIESTKGNLQAMPSLPR

SEQ ID NO: 19882 - DNA, 2333 bp, Zea mays subsp. mays
  misc_feature (1)..(2333): Ceres Seq. ID no. 12375264
gcacgagaccattacctagaacatcctaatcgaaaaggcttttgctgcgtctttcctttgacgtcagcgagcgaagaactacttctttccctccctctctcatcattctcagatctcccgctccctccttcccttcatctctctgaatcctgctgcccacctcgccgtcctcgcattccgccgctcgctctcgcgatccggcagcttcctcttcgccgtcgttcttgcctcacctcgtccgctatcctgtaagctgctgctgggtcacccgtggctggactcgaccccgccggcgccgcctccgggggctgggttcgccggatgtttatcggctcctgatccatccggatcccggatccgccgcaaaggcaccgcctttgtaggttctccgggcccatgcaggagggtttggcgattcggcggtgaggcagggctctggtttagttcttgcgttggactagcccggagatgcttcgtggaacggggcacggcggcggggatgcgcggaggcgggcactgcgctcgtcgcggcggcgtctgcccgggtggatctggtggcttctcgggatcttcctccttgtcgggctcatgctcttcgtccttcaccacaaccaaaaggagcagttccggccgcccgtcgtggataatggttcagagatggaggaagtccctcgtgagaaagtgaatttctcagaagagcttttgagcagcacatcatttgctcgccaattagcggatcagatgactttagcaaaggcgtatgtcatccttgcaaaagagcatgataatcttcagcttgcatgggagcttagttcgcagataaggaattgtcaaagattgctctctgaaggggcagttagtgggagagcaatcactaaagatgaagcccatcctataataagccggctagcactgttaatatacaaggctcaggactctcactatgatatcagcacaacaatagtgacattgaagaaccatgccctggcactagaggagcgtgcaaaggcagcaattgttcagagtgctgagtttggccagttagcagcagaatccttcccgaagaatctgcactgtctaactgtgaaactgacagaggagtggcttcggaacccgaagcataggagtcgctcagaggagaaccggaattccacacgattggtggataataatctgtatcatttctgtatattctctgataatgtgctggccacttcagttgttgtcaattctacagtctccaatgcaaatcaccctcaacagcttgtgtttcatgtggtcactgacagaatccattttggcgcaatgtcaacattgttcctcataaatgacttcaaaggttgtactgttgaagtccgatgcatagatgagttctcgtggttgaatgcttcttcatctcctcttgtcaggcaactatctgaggttgaaactcagggttactattactcagctggttccaagaatcctgaaagagaaataaaattccataatccaaagtttgtttctctactgaaccatttacggttctacattcctcagatacttcccaacttggagaaggtggtgtttcttgatgacgatgttgtggtgcaaaaggatttgactcagctgttctccatagagctgcatggcaatgtcattggagcagtggaaacttgtttagagtcgtttcatcggtatcacaagtatctaaatttttcgcatcctactatcagctccaagattgatccacatacttgtggatgggcttttggaatgaacatttttgacttgatagcttggaggaaggcaaacgccacatcattgtatcattattggcaagagcaaaattctgacctattgctctggagaacaggaactcttcctgcaggccttttgacattttatggcctgatggagcccctagaccgcagatggcatgtcttgggtctcgggtatgatgtagacatagatgatcgtctgattgagagtgctgctgttgtgcactataatggaaacatgaaaccctggctgaagctggctattcgccgttacaagtatatatgggaacggtatgtgaatatctcacacccgtatgttagagagtgtatgttgcattagaaagtctgcaaatctctgtatgttcttgcatggcactgaagctgcatgcttcagtttcttcacatgaggctgcttttgagcaccttatgtgccggaaagttccagaggtagaatatatactcaagggacagcatcaaagaagtcaactgttaagttttctttttgggttgggagaagattcattttgggatgaaaataattcctttgcagagtttacatacaatttggactgg

SEQ ID NO: 19883 - protein, 543 aa, Zea mays subsp. mays
  misc_feature (1)..(543): Ceres Seq. ID no. 12375265
MLRGTGHGGGDARRRALRSSRRRLPGWIWWLLGIFLLVGLMLFVLHHNQKEQFRPPVVDNGSEMEEVPREKVNFSEELLSSTSFARQLADQMTLAKAYVILAKEHDNLQLAWELSSQIRNCQRLLSEGAVSGRAITKDEAHPIISRLALLIYKAQDSHYDISTTIVTLKNHALALEERAKAAIVQSAEFGQLAAESFPKNLHCLTVKLTEEWLRNPKHRSRSEENRNSTRLVDNNLYHFCIFSDNVLATSVVVNSTVSNANHPQQLVFHVVTDRIHFGAMSTLFLINDFKGCTVEVRCIDEFSWLNASSSPLVRQLSEVETQGYYYSAGSKNPEREIKFHNPKFVSLLNHLRFYIPQILPNLEKVVFLDDDVVVQKDLTQLFSIELHGNVIGAVETCLESFHRYHKYLNFSHPTISSKIDPHTCGWAFGMNIFDLIAWRKANATSLYHYWQEQNSDLLLWRTGTLPAGLLTFYGLMEPLDRRWHVLGLGYDVDIDDRLIESAAVVHYNGNMKPWLKLAIRRYKYIWERYVNISHPYVRECMLH

SEQ ID NO: 19884 - protein, 503 aa, Zea mays subsp. mays
  misc_feature (1)..(503): Ceres Seq. ID no. 12375266
MLFVLHHNQKEQFRPPVVDNGSEMEEVPREKVNFSEELLSSTSFARQLADQMTLAKAYVILAKEHDNLQLAWELSSQIRNCQRLLSEGAVSGRAITKDEAHPIISRLALLIYKAQDSHYDISTTIVTLKNHALALEERAKAAIVQSAEFGQLAAESFPKNLHCLTVKLTEEWLRNPKHRSRSEENRNSTRLVDNNLYHFCIFSDNVLATSVVVNSTVSNANHPQQLVFHVVTDRIHFGAMSTLFLINDFKGCTVEVRCIDEFSWLNASSSPLVRQLSEVETQGYYYSAGSKNPEREIKFHNPKFVSLLNHLRFYIPQILPNLEKVVFLDDDVVVQKDLTQLFSIELHGNVIGAVETCLESFHRYHKYLNFSHPTISSKIDPHTCGWAFGMNIFDLIAWRKANATSLYHYWQEQNSDLLLWRTGTLPAGLLTFYGLMEPLDRRWHVLGLGYDVDIDDRLIESAAVVHYNGNMKPWLKLAIRRYKYIWERYVNISHPYVRECMLH

SEQ ID NO: 19885 - protein, 480 aa, Zea mays subsp. mays
  misc_feature (1)..(480): Ceres Seq. ID no. 12375267
MEEVPREKVNFSEELLSSTSFARQLADQMTLAKAYVILAKEHDNLQLAWELSSQIRNCQRLLSEGAVSGRAITKDEAHPIISRLALLIYKAQDSHYDISTTIVTLKNHALALEERAKAAIVQSAEFGQLAAESFPKNLHCLTVKLTEEWLRNPKHRSRSEENRNSTRLVDNNLYHFCIFSDNVLATSVVVNSTVSNANHPQQLVFHVVTDRIHFGAMSTLFLINDFKGCTVEVRCIDEFSWLNASSSPLVRQLSEVETQGYYYSAGSKNPEREIKFHNPKFVSLLNHLRFYIPQILPNLEKVVFLDDDVVVQKDLTQLFSIELHGNVIGAVETCLESFHRYHKYLNFSHPTISSKIDPHTCGWAFGMNIFDLIAWRKANATSLYHYWQEQNSDLLLWRTGTLPAGLLTFYGLMEPLDRRWHVLGLGYDVDIDDRLIESAAVVHYNGNMKPWLKLAIRRYKYIWERYVNISHPYVRECMLH

SEQ ID NO: 19886 - DNA, 1713 bp, Zea mays subsp. mays
  misc_feature (1)..(1713): Ceres Seq. ID no. 12375320
atagattttcttattcgccccttctctctccttctattttcagagagtcccctcgcctctgcctgcctgtcccatccccagtccaccaagcagcgcccgtcaccatctctccccatcccctttgccactctcggtcttctccctcctcagggcaggcaggggaagcagaagaaggaagcgagagcacggagcctgatttggtttgctttttgttgcccagactcggagggagttggtgtctctgtgtgtgtggagatggaccccaagttccccccacccccaccgctaaacaaaacggagcccaccaccgcgacgaccaccaccacctcgaccgcgcagcagcagcagcagctggatcctaaggactaccaccagcagcagccggcgcagcaccaggagcaccaccaccacctgcaaatccaaactcaccagccgccgcagcaggacgggggcggcggagggaaggagcagcagcagctgcaggtggtggcgcagcccggggagaggaggcagcaggcgctcgcgcccaagcggagctccaacaaggaccgacacaccaaggtcgacggcaggggccggcggatccggatgcccgcgctctgcgccgcgcggatcttccagctcacgcgggaactcggccacaagtccgacggcgagaccgtccagtggctgctgcagcaggccgagccggccatcgtcgccgccaccggcacgggcaccataccggcgtccgcgctcgcctccgtcgcgccctcgctcccgtcgcccacctccgggctcgccaggccgcaccaccacatgtgggcgccgtccgccggcttctcctcgccctccttcctgaactctgccgccgcgggcacgggcgatgccgccggtatcatgcagcggatggggatccccgcgggcttcgagctgccgggagcctccgccgccggagccaccctcggcgccggcggccacatcggttttgcgcccatgttcgctggacacgccgccgccatgccggggctcgagctcgggctatcgcaggacggccacatcggcgtgctcgccgcgcagtcgatcagccagttctaccaccaggtgggtgctgccgccgccggcggcggccagatgcagcacgcgcacgggcaccatcatcaccatcaccagcagcaggaggacggggaggacgaccgcgaggacggcgagtccgatgacgagtctgggcagtagtagtgtaaccgttcaaccttttgcgttgctgaatcttccctcaagttggaaggagagaaaagtgtatgcgtgcagccacgggatgcttctgctactcttggactgttgttggtcgagttctgatggatttttgtgtccatttttttctcgtgtggtatccaaactcaacggaggcctctcttgctgtgaagacttgcggattcgagatcatcctcagttcttcccacaatctcatggagtggatgatcgccacagccttctctccgacttccaggtgtatactagctgagaaaatgatggattggatcgatcacccttgagtgagtgccttatttgttattgcacagtgtgtagatattcaggtaattttgcagttagagaggtgttccttttattgtagtagtgatcaacgttttaaaacaatcaaggtattctcctccacaggctgtctatgcaacgcaagtatagtacaattctagttcatgaccacgcataccg

SEQ ID NO: 19887 - protein, 404 aa, Zea mays subsp. mays
  misc_feature (1)..(404): Ceres Seq. ID no. 12375321
IDFLIRPFSLLLFSESPLASACLSHPQSTKQRPSPSLPIPFATLGLLPPQGRQGKQKKEARARSLIWFAFCCPDSEGVGVSVCVEMDPKFPPPPPLNKTEPTTATTTTTSTAQQQQQLDPKDYHQQQPAQHQEHHHHLQIQTHQPPQQDGGGGGKEQQQLQVVAQPGERRQQALAPKRSSNKDRHTKVDGRGRRIRMPALCAARIFQLTRELGHKSDGETVQWLLQQAEPAIVAATGTGTIPASALASVAPSLPSPTSGLARPHHHMWAPSAGFSSPSFLNSAAAGTGDAAGIMQRMGIPAGFELPGASAAGATLGAGGHIGFAPMFAGHAAAMPGLELGLSQDGHIGVLAAQSISQFYHQVGAAAAGGGQMQHAHGHHHHHHQQQEDGEDDREDGESDDESGQ

SEQ ID NO: 19888 - protein, 319 aa, Zea mays subsp. mays
  misc_feature (1)..(319): Ceres Seq. ID no. 12375322
MDPKFPPPPPLNKTEPTTATTTTTSTAQQQQQLDPKDYHQQQPAQHQEHHHHLQIQTHQPPQQDGGGGGKEQQQLQVVAQPGERRQQALAPKRSSNKDRHTKVDGRGRRIRMPALCAARIFQLTRELGHKSDGETVQWLLQQAEPAIVAATGTGTIPASALASVAPSLPSPTSGLARPHHHMWAPSAGFSSPSFLNSAAAGTGDAAGIMQRMGIPAGFELPGASAAGATLGAGGHIGFAPMFAGHAAAMPGLELGLSQDGHIGVLAAQSISQFYHQVGAAAAGGGQMQHAHGHHHHHHQQQEDGEDDREDGESDDESGQ

SEQ ID NO: 19889 - protein, 212 aa, Zea mays subsp. mays
  misc_feature (1)..(212): Ceres Seq. ID no. 12375323
MPPVSCSGWGSPRASSCREPPPPEPPSAPAATSVLRPCSLDTPPPCRGSSSGYRRTATSACSPRSRSASSTTRWVLPPPAAARCSTRTGTIITITSSRRTGRTTARTASPMTSLGSSSVTVQPFALLNLPSSWKERKVYACSHGMLLLLLDCCWSSSDGFLCPFFSRVVSKLNGGLSCCEDLRIRDHPQFFPQSHGVDDRHSLLSDFQVYTS

SEQ ID NO: 19890 - DNA, 981 bp, Zea mays subsp. mays
  misc_feature (1)..(981): Ceres Seq. ID no. 12375363
aaaagaaaaaaaattaacggctcgtcggacctccacgaaaaccaagtccagcagacggacgcgaactgagaaaaatctcacgtgacgacgacggacgcggcggcgatggcgtgccgcgcacttgccctccgcttcctgctcctcccggacccgctacaccgcctcccggccacgccgccatctgttgggagggcatccggctcccgcggtggtcgccgtccgcacctccgctgcagctccggcggcgggggtggggagcccgggcagccgccgcaagaagctgtgctcgaggccatatccaagatagcaaggtctaaaggaagggttgcactcacaacaaatgtggtcatgggtggtactgtgatggacgatgcaagtgatgaatggcttgctctggatcagaaggtaaattcctaccccacagatagaggttttacagcaattggcattggaggtgatgattttgtccagtcgatggtagttgctgttgaatctgttcttcaagaatccattcccaagggccgagtatctcagaaactatcttcaggaggaaaatatgtttctgtaaaaattgggccaattcgtgttgtttcaagtgagcaggtccaagctgtatatcgtgccatgagaagagataacagaatgaaatacttcttatgaagtgcaattgcatgtcctgcacgttccctggtccattccatcatgtaaacaaaaggagtccaacagtacattttcgccacattttgctggactggactggactggacccccgatgaattgcaaaaggaaaatgggaagacttttatgtgccattcatgccctgatggaagcttctcaaataaccctacaggcaatttggtgggatcggttatgttatgtagtgcttgtgtagtacagtgggcgtatatagctactatatatgctaaagttgtattttagtgtctcatattagatgcattttaatattttataaaccatatg

SEQ ID NO: 19891 - protein, 184 aa, Zea mays subsp. mays
  misc_feature (1)..(184): Ceres Seq. ID no. 12375364
MACRALALRFLLLPDPLHRLPATPPSVGRASGSRGGRRPHLRCSSGGGGGEPGQPPQEAVLEAISKIARSKGRVALTTNVVMGGTVMDDASDEWLALDQKVNSYPTDRGFTAIGIGGDDFVQSMVVAVESVLQESIPKGRVSQKLSSGGKYVSVKIGPIRVVSSEQVQAVYRAMRRDNRMKYFL

SEQ ID NO: 19892 - protein, 103 aa, Zea mays subsp. mays
  misc_feature (1)..(103): Ceres Seq. ID no. 12375365
MGGTVMDDASDEWLALDQKVNSYPTDRGFTAIGIGGDDFVQSMVVAVESVLQESIPKGRVSQKLSSGGKYVSVKIGPIRVVSSEQVQAVYRAMRRDNRMKYFL

SEQ ID NO: 19893 - protein, 98 aa, Zea mays subsp. mays
  misc_feature (1)..(98): Ceres Seq. ID no. 12375366
MDDASDEWLALDQKVNSYPTDRGFTAIGIGGDDFVQSMVVAVESVLQESIPKGRVSQKLSSGGKYVSVKIGPIRVVSSEQVQAVYRAMRRDNRMKYFL

SEQ ID NO: 19894 - DNA, 1596 bp, Zea mays subsp. mays
  misc_feature (1)..(1596): Ceres Seq. ID no. 12375384
gcacgagaccattacctagaacatcctaatcgaaaaattttgcacccagcaacgtacagctagctagcaggcaccaggcagcacatagcctccgattattcagctggaggtcggtctgtgtgtgcgtgcatggggcatcactcctgctgcaaccagcagaaggtgaagagggggctctggtcccctgaggaggacgagaagctcatcaggtacatcaccacccatggctacgggtgctggagcgaggtccccgagaaggccggcctacaacgctgcgggaagagctgccggctgcggtggatcaactacctcaggccggacatccgccgaggccggttcacggcggaggaggagaagctcatcatcagcctgcacgccattgttggcaacaggtgggcccacattgccagccacttgcccgggcggacggacaacgagatcaagaactactggaactcgtggatcaagaagaagatccgaaagccggcgatgagcacgacgacgacgagctcggccgtgacggcggcgagccctccgtgcagcacggcggcgtcggacgcggcgcttggtcgtcacctgcagacgccgttcagcgcggcggagcaccggctcgacgccatcctcagccagagccttgccttgccgccgccgaagctgggctccggcggcggcggcggcggcggccaagagtccccgccgctgcccccgcactgccccttcttcatgttcgacacgagcgtcagcgtcagcccgccgtcgcccgcggccgcagcacaccacctgcagcacccgttcctcaccttcacggcggcggcggcgatggacgacaacgcgccgatgggcttccatctgccgcccttggtggacggcatgggaatgggcatgccagcaggccatggactgcggcgctctaggccatgaccaccgcgttgccggcggcaacaacaatggtcaggcggaggcggcggcggccggcatggcgaacggctgctgctacgggcagctgcaaaagcagcaggaggaggagcagcagccgtcgctggggcaggaggaccagtgggacgacgagtcggcgcggcacctgctgatgtgggacgatgaccaagaactaacaccgtccaacctggaagccatggaaagtacagctcactccctcctttttatgggaccaaatgaccatacatgacgaaaaagctagcttattattggtgtgcatgcgcatctatccccctctcttcttgatctgatctgctacctctagctctctcacccgatctgctgatctgtgtccatacatgcaataatgaggttgttgtccaaggcgcataatttatttttgctggatttttcatttttctcatattgatttaacctttattttttttggtttttggtttgggctttgtggagtgaattgaagactaaaaggctaagagtgtgcgtgttaaatggggttttattttttgtaaagaggatttgcatgctcttgcatggcgctgcgcttggagtgtaatttgattgatgtatctaagtgaatttaaaataaggaagatgacactaaaagagatcgaaagggagtcacgcaccccttttcct

SEQ ID NO: 19895 - protein, 263 aa, Zea mays subsp. mays
  misc_feature (1)..(263): Ceres Seq. ID no. 12375385
MGHHSCCNQQKVKRGLWSPEEDEKLIRYITTHGYGCWSEVPEKAGLQRCGKSCRLRWINYLRPDIRRGRFTAEEEKLIISLHAIVGNRWAHIASHLPGRTDNEIKNYWNSWIKKKIRKPAMSTTTTSSAVTAASPPCSTAASDAALGRHLQTPFSAAEHRLDAILSQSLALPPPKLGSGGGGGGGQESPPLPPHCPFFMFDTSVSVSPPSPAAAAHHLQHPFLTFTAAAAMDDNAPMGFHLPPLVDGMGMGMPAGHGLRRSRP

SEQ ID NO: 19896 - protein, 143 aa, Zea mays subsp. mays
  misc_feature (1)..(143): Ceres Seq. ID no. 12375386
MSTTTTSSAVTAASPPCSTAASDAALGRHLQTPFSAAEHRLDAILSQSLALPPPKLGSGGGGGGGQESPPLPPHCPFFMFDTSVSVSPPSPAAAAHHLQHPFLTFTAAAAMDDNAPMGFHLPPLVDGMGMGMPAGHGLRRSRP

SEQ ID NO: 19897 - DNA, 1649 bp, Zea mays subsp. mays
  misc_feature (1)..(1649): Ceres Seq. ID no. 12375395
gcacgagaccattacctagaacatcctaatcgaaaaagcaacagccatggcttcagcgaagcagagcaagaagatgcgcatacttctgatcccattcttcgccaccagccacatcgggccctacatcgacttcgccgtccgtctcgcggcagccaggccaggagccgtcgagcccaccgtcgccgtgaccccggccaatgttgcggtggtccggtcggcgctcgagcgccacggccccgcggcgagcggcacggtcaggatcgtcacgtacccgttcccgcgcgtggatggcctcgctccgggcgtggagaacctctccaccgccggagacgacgcgtggcgcatcgacgccgccgccatcgacgaggccctctcgcggccggcgcaggaggcgctcctcagggagcggtcccccgacgccgtcgtgtcggactaccacttcttctggaccagcagcatcgccgccgagctgggcctgccgtgcgtcgttttcagtgtcatcgcccccttctcgggtctcgtcatgcgcatcctcgccggcgccgtcgtctctgggtcgcgtgacgttaccgttcccgggttgccagggccggagatacggatccccgtcagcgagctgccggagttcctgagacgcccggcgaaggaccaaggcacgttcagcccctgcaacgcggcgcaggccaggtgtttgggcgtcgcctacaacacgttcgcaggcatggagcaggagtaccgcgaggcgaacgtgcgcgccaaatccttgaagcgctgctacttcgtcggccccgtctcactgccgctgccggcggcagcggcaggcaccagcgagtctccatgcatcaggtggctcgactccaggccaaactgctcggtggtgtacgtgtgcttcggcacctacgccgccatctcggaggaccagctccgggagctggcgctcggcctggaggcctcaggggagccgttcctgtgggtggtgagggccgacgggtggacgccgccggagggctgggagcagcgcgtcggggagagggggatgctggtgagagggtgggctccgcagacggcggtgctggcccatccagcggtgggcgcgttcctgacgcactgcgggtcgagctcgttgctggaggcggcggcggccggcgtgccgatgctgacgtggccgctggtgttcgaccagttcatcgaggagaggctggtgacggacgtgctcgggatcggggagcgggtctggagtggggcgcggagcacgaggtacgaggagagggagctcgtgccggcggaggcggtggctcgggcggtggcgaggttcttggagccaggcgggccgggggaggcggcgaggggcagggcgcgggatctcgcagtgaaggcccacgctgccgtagcggagggcggctcgtcgtcccgtgatctgcatcgcctcatcgacgacctggtcgaagccagagcggcaacgagcagctgcaacgctgacagcgagtaagagatggaattgctggagatgtctcgatctggcgagcaactggaagaaggtctcgaacagccttcacggacaagtacgccatctgcaacgtacgtacgttctcggagtcgaagaaaacacttatggaaataatatggtactgcaccacctcgatttctgt

SEQ ID NO: 19898 - protein, 480 aa, Zea mays subsp. mays
  misc_feature (1)..(480): Ceres Seq. ID no. 12375396
MASAKQSKKMRILLIPFFATSHIGPYIDFAVRLAAARPGAVEPTVAVTPANVAVVRSALERHGPAASGTVRIVTYPFPRVDGLAPGVENLSTAGDDAWRIDAAAIDEALSRPAQEALLRERSPDAVVSDYHFFWTSSIAAELGLPCVVFSVIAPFSGLVMRILAGAVVSGSRDVTVPGLPGPEIRIPVSELPEFLRRPAKDQGTFSPCNAAQARCLGVAYNTFAGMEQEYREANVRAKSLKRCYFVGPVSLPLPAAAAGTSESPCIRWLDSRPNCSVVYVCFGTYAAISEDQLRELALGLEASGEPFLWVVRADGWTPPEGWEQRVGERGMLVRGWAPQTAVLAHPAVGAFLTHCGSSSLLEAAAAGVPMLTWPLVFDQFIEERLVTDVLGIGERVWSGARSTRYEERELVPAEAVARAVARFLEPGGPGEAARGRARDLAVKAHAAVAEGGSSSRDLHRLIDDLVEARAATSSCNADSE

SEQ ID NO: 19899 - protein, 471 aa, Zea mays subsp. mays
  misc_feature (1)..(471): Ceres Seq. ID no. 12375397
MRILLIPFFATSHIGPYIDFAVRLAAARPGAVEPTVAVTPANVAVVRSALERHGPAASGTVRIVTYPFPRVDGLAPGVENLSTAGDDAWRIDAAAIDEALSRPAQEALLRERSPDAVVSDYHFFWTSSIAAELGLPCVVFSVIAPFSGLVMRILAGAVVSGSRDVTVPGLPGPEIRIPVSELPEFLRRPAKDQGTFSPCNAAQARCLGVAYNTFAGMEQEYREANVRAKSLKRCYFVGPVSLPLPAAAAGTSESPCIRWLDSRPNCSVVYVCFGTYAAISEDQLRELALGLEASGEPFLWVVRADGWTPPEGWEQRVGERGMLVRGWAPQTAVLAHPAVGAFLTHCGSSSLLEAAAAGVPMLTWPLVFDQFIEERLVTDVLGIGERVWSGARSTRYEERELVPAEAVARAVARFLEPGGPGEAARGRARDLAVKAHAAVAEGGSSSRDLHRLIDDLVEARAATSSCNADSE

SEQ ID NO: 19900 - protein, 321 aa, Zea mays subsp. mays
  misc_feature (1)..(321): Ceres Seq. ID no. 12375398
MRILAGAVVSGSRDVTVPGLPGPEIRIPVSELPEFLRRPAKDQGTFSPCNAAQARCLGVAYNTFAGMEQEYREANVRAKSLKRCYFVGPVSLPLPAAAAGTSESPCIRWLDSRPNCSVVYVCFGTYAAISEDQLRELALGLEASGEPFLWVVRADGWTPPEGWEQRVGERGMLVRGWAPQTAVLAHPAVGAFLTHCGSSSLLEAAAAGVPMLTWPLVFDQFIEERLVTDVLGIGERVWSGARSTRYEERELVPAEAVARAVARFLEPGGPGEAARGRARDLAVKAHAAVAEGGSSSRDLHRLIDDLVEARAATSSCNADSE

SEQ ID NO: 19901 - DNA, 1617 bp, Zea mays subsp. mays
  misc_feature (1)..(1617): Ceres Seq. ID no. 12375523
gcacgagaccattacctagaacatcctaatcgaaaaatggatggtggagcatgaataatttgctgaggcccccctttgagcagcagcaccacgcttctcttttcatgccgtccacaaccaccagcagcagcaccgccgccgccgcgccctcttcttcttcgtcgtcgtcgccgcctctccaatccttctcctctctgctgctctcgaaccactacccgctgcctaccaccaccagcacgtcgccgtggcagcacgacaccagcatcacaagtagccatggccagccggattcttggagccagctcatacacaaggaaagccagcagatggcgtttccaactacgatttgttcggaatccggaggcggcggcagcagctacgtcgtctacggtgccgcagcggctagccatgggagcagcacaagtgatgtcgagatccagttgccatggggaagcagcagcgtactccagcagcagcagaaagcgtcctctcctaggtcttcttccagaaccacagcgacgacgacctctcccggaagcaacatgctggagttctccaacaacagtagcagttcaccacgtgagtgcatcagtacagtatctggatcagctttcaagaaggctaggacccaagaaccctccccggctcaatctactgtgaaggtgaggaaggagaagctaggggatcgaataactgctctccaccagcttgtctccccgtttggaaagactgacacagcgtctgtactccttgaagccattgggtacatcagattcctccatagtcaaattgaggctctgagctccccgtacgtgggcggcagcaatggaggtgggggcggctccaagcagaatcagcagctccacgaggctagtgcgcagagagaaagcaggcacagcatatttccagaagaccctggccagctcctgcatgacagcagcgcaataaagaaacgggccggactgcagcctgatggtgagcaggatgaagaaagctgtgatgaagagaagaagaaggatctgagaagcaggggtctgtgcctcgtcccggtgagctgcacgctggacgtgggtgtggacgtggtcgctggccccgcagactactgggcggcagctgcgccggctttcggcatggggttcggtgcgtagatgatgctggccaggacgtacgatcgatgctgtgaggaacacttgtgtgtgtctgtgtgcgccatatgcatgtatgggctgcacctgcatgcatagcatcaggagcagccatcctggtggaagctggagaatgctcaagaaggctggctcctcttgatgctatatatgcgtatggtatatggtgcacacaccgacaatgcatgcatgggcatatattatatagctacagagacgctgagagtatatgacttgcgtttctgtgtttgtgtgtacgtgatgagatcttgtctagctagctagagcgagatcaaacaatttgggtgccatggagaggggcgctatagctgcagatatttaattgttaaggctaggagtactgcgcgcggatctgtaagcaatgcaactcttttaagtcttcgtcattgaggcgtcactgtgtgctatatatatatgcatggccgaaatgtgc

SEQ ID NO: 19902 - protein, 365 aa, Zea mays subsp. mays
  misc_feature (1)..(365): Ceres Seq. ID no. 12375524
MNNLLRPPFEQQHHASLFMPSTTTSSSTAAAAPSSSSSSSPPLQSFSSLLLSNHYPLPTTTSTSPWQHDTSITSSHGQPDSWSQLIHKESQQMAFPTTICSESGGGGSSYVVYGAAAASHGSSTSDVEIQLPWGSSSVLQQQQKASSPRSSSRTTATTTSPGSNMLEFSNNSSSSPRECISTVSGSAFKKARTQEPSPAQSTVKVRKEKLGDRITALHQLVSPFGKTDTASVLLEAIGYIRFLHSQIEALSSPYVGGSNGGGGGSKQNQQLHEASAQRESRHSIFPEDPGQLLHDSSAIKKRAGLQPDGEQDEESCDEEKKKDLRSRGLCLVPVSCTLDVGVDVVAGPADYWAAAAPAFGMGFGA

SEQ ID NO: 19903 - protein, 347 aa, Zea mays subsp. mays
  misc_feature (1)..(347): Ceres Seq. ID no. 12375525
MPSTTTSSSTAAAAPSSSSSSSPPLQSFSSLLLSNHYPLPTTTSTSPWQHDTSITSSHGQPDSWSQLIHKESQQMAFPTTICSESGGGGSSYVVYGAAAASHGSSTSDVEIQLPWGSSSVLQQQQKASSPRSSSRTTATTTSPGSNMLEFSNNSSSSPRECISTVSGSAFKKARTQEPSPAQSTVKVRKEKLGDRITALHQLVSPFGKTDTASVLLEAIGYIRFLHSQIEALSSPYVGGSNGGGGGSKQNQQLHEASAQRESRHSIFPEDPGQLLHDSSAIKKRAGLQPDGEQDEESCDEEKKKDLRSRGLCLVPVSCTLDVGVDVVAGPADYWAAAAPAFGMGFGA

SEQ ID NO: 19904 - protein, 273 aa, Zea mays subsp. mays
  misc_feature (1)..(273): Ceres Seq. ID no. 12375526
MAFPTTICSESGGGGSSYVVYGAAAASHGSSTSDVEIQLPWGSSSVLQQQQKASSPRSSSRTTATTTSPGSNMLEFSNNSSSSPRECISTVSGSAFKKARTQEPSPAQSTVKVRKEKLGDRITALHQLVSPFGKTDTASVLLEAIGYIRFLHSQIEALSSPYVGGSNGGGGGSKQNQQLHEASAQRESRHSIFPEDPGQLLHDSSAIKKRAGLQPDGEQDEESCDEEKKKDLRSRGLCLVPVSCTLDVGVDVVAGPADYWAAAAPAFGMGFGA

SEQ ID NO: 19905 - DNA, 1584 bp, Zea mays subsp. mays
  misc_feature (1)..(1584): Ceres Seq. ID no. 12375563
gcacgagaccattacctagaacatcctaatcgaaaaatcgcaccccgcaccccgctcctccctcctcctgctccggctcccttcctccacagctcgaataaagtcccctcctcttccagtcttcctcctccgcgctccaatcttcccagcggcacggtttcggttcttgcagagtagcacggaggttccttcgttgggggttcttggtctgccttgagcgatttggtgcgccgcggattgttgtgtggttgtgagttgtgactgcagagacaagggccgtgtggagagtcgagccatcgaggtcgaggaggagggaagggaaaaggggggcgcatgggcggccagtggctgggggaggggatgccgtcgtccaacctgcagtgcttcttggactgcaccacccccaccgtcgagacgcacattctccccaagacgaatggacgattgccgaccgacgcctggcaccacgctgagatggacagcgtcgagtacttcaatcttgccgacctctgggaacagtactatgaatggagcgcgtacggcgccggagctacggtgcagctcccaggaggggacagagtagttcagtactatgttccatacctgtcagggatgcagctatacaccaacaaggtcctgactgcatccagaagttttggtgaagataatggcatggatttatggagtgatgatgaggacaacgagaagatgtcgagatcctggagttccacctctgatgaatcattgttcaactgtgatgtgttatggtccaacaggaagcgtccagggcacctgtactttgagttctttgaagtaggttcaccttatggaagggttcctctcattgacaaggtttatgaactatcccagggctttcctggattgacatcactgaagagtgctgagctttcgcctgttagctggatgtcagttgcctggtaccctatataccacattccttaccagcgcagcgtgaaggacttatctgcatgcttcctaacttaccataccatttcctcctcgtttcaagatcacgggcttgagaccatgaccactgattgttgccatccagttgcaaacggcaaacaaaatggccacatggataagaagagcaacaccgtatcactgcctccatttggcctcgcagcacacaagatacaaggttccctctggaccaaccccatgacaggagaccgcagaaagatggacttcctcttcagtgcggcagactcctggctgaagcagcttggagtccagcatcatgacttcaacttcttcatcactcaccccatgtgaactgctgatccggagtggcttgcaaagaaccacatgggtacagtttgaagctagttatattacctacaccaccaccaacggggtagcaaaacgtttacagtacaatgcactggtgaaacgagtctaacaatcgcaggatagatttatacttgagtttactgctgcagcgaataccaaacatgtcggcactcaaaaaggttttctgtttcttgtttcttggcagaaaatgtaactgatctgtacagaagttttgcaactaatttggtatccaatgtgggggttggatcc

SEQ ID NO: 19906 - protein, 320 aa, Zea mays subsp. mays
  misc_feature (1)..(320): Ceres Seq. ID no. 12375564
MGGQWLGEGMPSSNLQCFLDCTTPTVETHILPKTNGRLPTDAWHHAEMDSVEYFNLADLWEQYYEWSAYGAGATVQLPGGDRVVQYYVPYLSGMQLYTNKVLTASRSFGEDNGMDLWSDDEDNEKMSRSWSSTSDESLFNCDVLWSNRKRPGHLYFEFFEVGSPYGRVPLIDKVYELSQGFPGLTSLKSAELSPVSWMSVAWYPIYHIPYQRSVKDLSACFLTYHTISSSFQDHGLETMTTDCCHPVANGKQNGHMDKKSNTVSLPPFGLAAHKIQGSLWTNPMTGDRRKMDFLFSAADSWLKQLGVQHHDFNFFITHPM

SEQ ID NO: 19907 - protein, 311 aa, Zea mays subsp. mays
  misc_feature (1)..(311): Ceres Seq. ID no. 12375565
MPSSNLQCFLDCTTPTVETHILPKTNGRLPTDAWHHAEMDSVEYFNLADLWEQYYEWSAYGAGATVQLPGGDRVVQYYVPYLSGMQLYTNKVLTASRSFGEDNGMDLWSDDEDNEKMSRSWSSTSDESLFNCDVLWSNRKRPGHLYFEFFEVGSPYGRVPLIDKVYELSQGFPGLTSLKSAELSPVSWMSVAWYPIYHIPYQRSVKDLSACFLTYHTISSSFQDHGLETMTTDCCHPVANGKQNGHMDKKSNTVSLPPFGLAAHKIQGSLWTNPMTGDRRKMDFLFSAADSWLKQLGVQHHDFNFFITHPM

SEQ ID NO: 19908 - protein, 273 aa, Zea mays subsp. mays
  misc_feature (1)..(273): Ceres Seq. ID no. 12375566
MDSVEYFNLADLWEQYYEWSAYGAGATVQLPGGDRVVQYYVPYLSGMQLYTNKVLTASRSFGEDNGMDLWSDDEDNEKMSRSWSSTSDESLFNCDVLWSNRKRPGHLYFEFFEVGSPYGRVPLIDKVYELSQGFPGLTSLKSAELSPVSWMSVAWYPIYHIPYQRSVKDLSACFLTYHTISSSFQDHGLETMTTDCCHPVANGKQNGHMDKKSNTVSLPPFGLAAHKIQGSLWTNPMTGDRRKMDFLFSAADSWLKQLGVQHHDFNFFITHPM

SEQ ID NO: 19909 - DNA, 1521 bp, Zea mays subsp. mays
  misc_feature (1)..(1521): Ceres Seq. ID no. 12375567
gcacgagaccattacctagaacatcctaatcaaaaagcgaaaccatcagcggattacataagccgacaggcaccggtcgttgcgtcttgctcatcagaacgctagctaggactaggagaagcttaacctctgcaaccaccgataagagttactactatttacataggagcggcagctgctaccgcgtgcgccggcgatggggtggtgggagaacgccaagagcgtgttcggcgacgccgggaacgtcggctgcttcccgaggatcgggaggaagcagtccaagaactcgtacgctttcccggcggatcctgggagcgagaaacggagagggtcaggcggccccgcccccgccccggaggaggtgatcacggtggaggtgccggaggtgcgcctgcgcgagctgaacgagatcacggcgtccttctcaggcgagaagctgatcgggcaagggtcctacgccaaggtctaccaggccacgacgcggaccggcaggctggccgtcgtcaagcggctggagaagccctccaagcacgcgtccaacgacgtcttcctcaagcagctcggggtggcgtccaggctcaagcacgacaacttcgtccgcctgctcgggtacaccatcagcggcgacctccgcgtgctggtctacgagttcgccaccatgggcaccctccacgacgtgcttcacggggacagggatgtgctgaggctaccgccgccggagcagctgggcagcgccgccaggccggtgctgagctggattcaccgcgtgcacatcgcgctggatgcggcgagggggctggagtacctgcacgagatggtgcagccgccggtgacgcacaaggacgtgcgctccaccaacgtcctgctgttcgacggcttcagggccaagatcgccgactacaacatgttcagccaggccgcggacatggccaggctcaaccgctccacgcacacgctcggttccttcggctaccaggcgcccgagtacgccatgacgggccagatgacggacaagagcgacgtgtacagcttcggcatcgttctcctggagctcctgacgggtaggaagccattggaccggacgctgccgccgggccagcgaagcctggtgaactgggcaactccgatgctgacggaagacagggttcaggaatgcatcgatccgcaacttggtgatcagtatcctcctgctggagctgtcaagctcgggcgaatcgcggtgcagtgcctgcagtacgaccccaccttccggccgtccatgggcaccgtcgcccgcgtcatcaactacgccgtcttgcgagaccagcagggcgtcgtctgatttgatggcatgccgaattttgctactatagctgtgaatatcatgcatgtcttgctgtgctatatgttatgtaagctgagcagcggttattatctgagaatggatactatccttggaagcagcacggaatggttgcggttacgaccatgcataaaacaatgggctagtttgtaatatcaatatatttttctctgagaatg

SEQ ID NO: 19910 - protein, 374 aa, Zea mays subsp. mays
  misc_feature (1)..(374): Ceres Seq. ID no. 12375568
MGWWENAKSVFGDAGNVGCFPRIGRKQSKNSYAFPADPGSEKRRGSGGPAPAPEEVITVEVPEVRLRELNEITASFSGEKLIGQGSYAKVYQATTRTGRLAVVKRLEKPSKHASNDVFLKQLGVASRLKHDNFVRLLGYTISGDLRVLVYEFATMGTLHDVLHGDRDVLRLPPPEQLGSAARPVLSWIHRVHIALDAARGLEYLHEMVQPPVTHKDVRSTNVLLFDGFRAKIADYNMFSQAADMARLNRSTHTLGSFGYQAPEYAMTGQMTDKSDVYSFGIVLLELLTGRKPLDRTLPPGQRSLVNWATPMLTEDRVQECIDPQLGDQYPPAGAVKLGRIAVQCLQYDPTFRPSMGTVARVINYAVLRDQQGVV

SEQ ID NO: 19911 - protein, 220 aa, Zea mays subsp. mays
  misc_feature (1)..(220): Ceres Seq. ID no. 12375569
MGTLHDVLHGDRDVLRLPPPEQLGSAARPVLSWIHRVHIALDAARGLEYLHEMVQPPVTHKDVRSTNVLLFDGFRAKIADYNMFSQAADMARLNRSTHTLGSFGYQAPEYAMTGQMTDKSDVYSFGIVLLELLTGRKPLDRTLPPGQRSLVNWATPMLTEDRVQECIDPQLGDQYPPAGAVKLGRIAVQCLQYDPTFRPSMGTVARVINYAVLRDQQGVV

SEQ ID NO: 19912 - DNA, 1676 bp, Zea mays subsp. mays
  misc_feature (1)..(1676): Ceres Seq. ID no. 12375592
gcacgagaccattacctagaacatcctaatcgaaaacacgcccacttcgccactcggacagtgctcggctcggatcggtcgcacggacacgccccgcgcgtcgcgggctctctctcacctctctcctcctcctttgcctgattggcgtgcccccatgcggatgcggtggctccgacccagctagccccaggctggggctgcgcccgcggcggcgatgaagcggccgctgcggcgctccttcgcggtgctcatcttcgtcgggctcgtcggcgcggcctccttctccaccgcgctccgtcgcgccgtggcgcccccgcccgcgcaggagcccccgccgctcgacccggcgcgcctcaacgctacgctgctccgcctggccgcagccgatccgtcggaagcgtcgctgcgccgggacgtggacggactcctcgagggccgcctcccggcctccgcggcgcgggcccgcgcgtggcgccgcgaccgcctcctccacccgctccacctccaccgccaccgcagcttcccgctcccgcgccgcggccgctacccggacgacgaccacgacatcctgctccacccgctcccgcgccacgagcagctccgcatcgaccccgccctgcgccgcgacctccgctcctggcaccgcctccgccgctacgaccctgccgtcctcgccgccctcccctccctgctctccatccccgggcgcatcccctcctgcgccgtcgtcggcaacagcggcatcctcctgcgcgcgaaccatggagccctcatcgattcccacgcagccgtgttccgcctcaacaacgcccgcgtctcaggctacgccgcgcacgttggcagcaagaccaacttctccttcatcaacagcaacgttcttcacctctgcgcgcgccggcccggctgcttctgccacccttacggccacggcgtccccatcctgctctacatctgccaggccgcccatttcgtcgacgtcgccgcctgcaacgccacctcgtcctcccgccacggctcccccatctccgtcaccgacgcccgcctcgacgtcctctgcgcgcgcatcgtcaagtactactccctccgccgattcgtcgccgagaccggccgcgcgcccgaggagtgggaccgcgcgcacgacgccgccatgttccattactcgtccgggatgcaagccatcatggtcgccgtgggagtgtgcgacagagtcagcgtgtttggcttcagcaagtcttccgacgccaagcatcattaccacagcaaccaaaaggcggagctagacctccacgactacgatgcggagtacgccttctaccacgacctctccgagcgaccgcaggtagtcccgttcctcaaggattccgggttcgccgtcccgcccgtcgtcttctaccattaggccagcttcgtagagcgcgcgccatgtgctcgacgttatgtggaacggctgttttcctcgcttatttttccggttttgattagtgggtacgacatagtaaaattttcgtgtgctgttggagttggaaggtgtatattagggtttagcctactccactggtatagaagaagggatcgtttgcccttttggtttcagcacgacagtaggcagtgcctggaattgtaacttcagactgatattttaatttattaagaaacagaatgtatatcttaccagc

SEQ ID NO: 19913 - protein, 394 aa, Zea mays subsp. mays
  misc_feature (1)..(394): Ceres Seq. ID no. 12375593
MKRPLRRSFAVLIFVGLVGAASFSTALRRAVAPPPAQEPPPLDPARLNATLLRLAAADPSEASLRRDVDGLLEGRLPASAARARAWRRDRLLHPLHLHRHRSFPLPRRGRYPDDDHDILLHPLPRHEQLRIDPALRRDLRSWHRLRRYDPAVLAALPSLLSIPGRIPSCAVVGNSGILLRANHGALIDSHAAVFRLNNARVSGYAAHVGSKTNFSFINSNVLHLCARRPGCFCHPYGHGVPILLYICQAAHFVDVAACNATSSSRHGSPISVTDARLDVLCARIVKYYSLRRFVAETGRAPEEWDRAHDAAMFHYSSGMQAIMVAVGVCDRVSVFGFSKSSDAKHHYHSNQKAELDLHDYDAEYAFYHDLSERPQVVPFLKDSGFAVPPVVFYH

SEQ ID NO: 19914 - DNA, 1842 bp, Zea mays subsp. mays
  misc_feature (1)..(1842): Ceres Seq. ID no. 12375598
atccacacatgcagctccaagcatcggtacggcactgagcatcggtgaggcaggcgacgcgcgccgcgcgagagaggcgcctcgcctggggagacagggagggtggccgagcccgagatggccgccgcgagggaggaggacgaggcggcacggccgctgcttctgctgccgcggacggcgcaggaggaccagaagtggtggaggcggtgggcgcgcgaggccgggtgggtggggtacctggccctgcccatggtggtggtgaacctgtcgcagtacgccgtccaggtgtcgtccaacatgatggtggggcacctccccggcgtgctcccgctctcctccgccgccatcgccacctccctcgccaacgtctccgggttcagcctcctgatcggaatggcaagtgcactggagacgctatgcggccaggcctacggtgcgaagcagtaccataagctaggcctagacacctacagagcggtcgtcaccctcctggtggtctgcgtccccctctcgctcctctgggtgttcatggacaagatcctggtcctcataggccaggaccctctcatctcgcaaggcgccgggaggtacatggtctggctgatcccggggctcttcgccaacgcggtgatccagccgctcaccaagttcctgcagacgcagagcctcatctacccgctgctgctgtcgtccgcggcgacggcggcggtccacgtccccctgtgctacgtgatggtgttcaagaccgggctcgggtacacgggcgccgccctgaccataagcatatcgtactggctgaacgtggccatgctcgtcggatacatcgccttctccagctcttgcaaggagacgcgcgcgcgcccgacggtcgaggtcttcaggggagtcgacgcgttcctgcgtctcgccctgccttctgcgctcatgatgtgtcttgaatggtggtcgtttgagctccttactctcatgtcagggcttctacccaacccagagctgcagacctcagtgctttcgatctgtctcacgagtgtaacattactcttcactataccttttggccttggagctgctggaagcacgcgagtggcaaatgagctgggcgctgggaaccctgacggagctcgatcagcagtccgcgtggtgctgtccatggcggggatcgacgcggtcgtcgtgagcggaagccttctggcggcccggcgcctcgtgggcatcgcgtacagcagcgaggaggaggtcatatctgcggtcgccgccatggttcctctggtctgcatcaccgccataactgactgcctacaaggaatcctctcaggcgtcgcccgcgggtgcgggtggcagcacctgggcgcgtacgtgaacctcggctcgttctacctgctggggatcccgatggcgatcctcctcggctttgtgctgcgcatggggtcgagggggctctggatgggcatcgtctgcggctccctgtcgcagaccacgctcatgtccgccatcacgttcttcaccgactggaacaagatggctgagaaggctagagagagggtgttcagcgacaagcagccacaagagccggggccatgatttgtacgccgactagcggcagctgcacatttttccagaccggttttgcaggggatcggaaggcgtttgcttgtcattccgtcgcattcacgaggagggagggggtcatgcctccctcctgcaaagtttctcacaaggcaaatgggttcttgctttgaacttcgccttcctacgtttgatttttgtatcatgtaaagtggagaggaacatggaacgaacaaattggacctcatatatgactaacaaggcgaaaatcatctc

SEQ ID NO: 19915 - protein, 487 aa, Zea mays subsp. mays
  misc_feature (1)..(487): Ceres Seq. ID no. 12375599
MAAAREEDEAARPLLLLPRTAQEDQKWWRRWAREAGWVGYLALPMVVVNLSQYAVQVSSNMMVGHLPGVLPLSSAAIATSLANVSGFSLLIGMASALETLCGQAYGAKQYHKLGLDTYRAVVTLLVVCVPLSLLWVFMDKILVLIGQDPLISQGAGRYMVWLIPGLFANAVIQPLTKFLQTQSLIYPLLLSSAATAAVHVPLCYVMVFKTGLGYTGAALTISISYWLNVAMLVGYIAFSSSCKETRARPTVEVFRGVDAFLRLALPSALMMCLEWWSFELLTLMSGLLPNPELQTSVLSICLTSVTLLFTIPFGLGAAGSTRVANELGAGNPDGARSAVRVVLSMAGIDAVVVSGSLLAARRLVGIAYSSEEEVISAVAAMVPLVCITAITDCLQGILSGVARGCGWQHLGAYVNLGSFYLLGIPMAILLGFVLRMGSRGLWMGIVCGSLSQTTLMSAITFFTDWNKMAEKARERVFSDKQPQEPGP

SEQ ID NO: 19916 - protein, 443 aa, Zea mays subsp. mays
  misc_feature (1)..(443): Ceres Seq. ID no. 12375600
MVVVNLSQYAVQVSSNMMVGHLPGVLPLSSAAIATSLANVSGFSLLIGMASALETLCGQAYGAKQYHKLGLDTYRAVVTLLVVCVPLSLLWVFMDKILVLIGQDPLISQGAGRYMVWLIPGLFANAVIQPLTKFLQTQSLIYPLLLSSAATAAVHVPLCYVMVFKTGLGYTGAALTISISYWLNVAMLVGYIAFSSSCKETRARPTVEVFRGVDAFLRLALPSALMMCLEWWSFELLTLMSGLLPNPELQTSVLSICLTSVTLLFTIPFGLGAAGSTRVANELGAGNPDGARSAVRVVLSMAGIDAVVVSGSLLAARRLVGIAYSSEEEVISAVAAMVPLVCITAITDCLQGILSGVARGCGWQHLGAYVNLGSFYLLGIPMAILLGFVLRMGSRGLWMGIVCGSLSQTTLMSAITFFTDWNKMAEKARERVFSDKQPQEPGP

SEQ ID NO: 19917 - protein, 427 aa, Zea mays subsp. mays
  misc_feature (1)..(427): Ceres Seq. ID no. 12375601
MMVGHLPGVLPLSSAAIATSLANVSGFSLLIGMASALETLCGQAYGAKQYHKLGLDTYRAVVTLLVVCVPLSLLWVFMDKILVLIGQDPLISQGAGRYMVWLIPGLFANAVIQPLTKFLQTQSLIYPLLLSSAATAAVHVPLCYVMVFKTGLGYTGAALTISISYWLNVAMLVGYIAFSSSCKETRARPTVEVFRGVDAFLRLALPSALMMCLEWWSFELLTLMSGLLPNPELQTSVLSICLTSVTLLFTIPFGLGAAGSTRVANELGAGNPDGARSAVRVVLSMAGIDAVVVSGSLLAARRLVGIAYSSEEEVISAVAAMVPLVCITAITDCLQGILSGVARGCGWQHLGAYVNLGSFYLLGIPMAILLGFVLRMGSRGLWMGIVCGSLSQTTLMSAITFFTDWNKMAEKARERVFSDKQPQEPGP

SEQ ID NO: 19918 - DNA, 1475 bp, Zea mays subsp. mays
  misc_feature (1)..(1475): Ceres Seq. ID no. 12375615
gcacgagaccattacctagaacatcctaatcgaaaaaggagcttcatccaacagcccaagtgtccctgctacccccactggatcagcaagctagctacccagtggagagccacagccgaagccgaagccgaagctagagctagcaagcaatggctgcggcggctcctcctgcgcgtcctactagcagcatcagcagctgctgctgctgcatctcgcggcgcgccgccgccgtcgtgccggcgctgctgctgctggcggcgatggccgcctcctccggcgacgcgcagccttccccggggtactacccgagctccaggttcaggccggtgccgttcaaccgggcgtacaccaacaagtggggcccgcagcaccagacgctctccggcgaccattccgccctcaccatctggctcgacaagacctgcgggagtggtttcaagtcgaagcacgcgtacaggaacggctacttctccactcgcatcaagctccccgcccggatacaccgcgggcaccaacaccgccttctatctctccaacaacgaggcgcaccctggtttctacgacgagatcgacatggagttcctgggcaccatcccgggggagccctacacgctgcagacgaacgtgtacgtgcgcggcagcggcgacgggcgcatcgtggggcgggagatgcggttccacctgtggttcgaccccacggcggcctaccacacctacgccatcctgtggaaccccgacgccatcaccttcttcgtggacgacgtgcccgtccgccgctacgagcgccgcaccgagctcaccttcccggaccgccccatgtgggtctacggctccatctgggacgcctccgactgggccaccgacgacggccgccaccgcgccgactaccgctaccagcccttcgtcgcgcgcctcgaccgcttcgtcgtcgccggctgctccgccagcgccccgcccgcgtgcaggcccgtgccggcgtcccccgcgggggccgggctcacgccgcggcagtacgcggccatgcgctgggcgcagcagggccacatggtctactactactgcaacgacttccgcagggaccactcgctcacgcccgagtgctagcgagcgtgcctgtctgctgtgttgcgtcgtcgtcgtcgtccttgttgctttgtgctttgtttcgttgttgatgaaaaggtcgctaggcgtggctgccctactaccgcccgcgcccgccgctgctctctctgcttgcggtgactgaggcgcccgcgcgagccggtggttgaggcgttggtcgttggcttatcgccagcaaactcgtgtcgtcgctcgtctacgtacgcgtacggcgtacccattgcatttcttccggttgttgctttccatttggtctcgcatgcatcacacgaggcgccccaaaggggcaagcttccatgattcatacggatacactatgtataccatatatacatattatatatatattt

SEQ ID NO: 19919 - protein, 367 aa, Zea mays subsp. mays
  misc_feature (1)..(367): Ceres Seq. ID no. 12375616
ARDHYLEHPNRKRSFIQQPKCPCYPHWISKLATQWRATAEAEAEARASKQWLRRLLLRVLLAASAAAAAASRGAPPPSCRRCCCWRRWPPPPATRSLPRGTTRAPGSGRCRSTGRTPTSGARSTRRSPATIPPSPSGSTRPAGVVSSRSTRTGTATSPLASSSPPGYTAGTNTAFYLSNNEAHPGFYDEIDMEFLGTIPGEPYTLQTNVYVRGSGDGRIVGREMRFHLWFDPTAAYHTYAILWNPDAITFFVDDVPVRRYERRTELTFPDRPMWVYGSIWDASDWATDDGRHRADYRYQPFVARLDRFVVAGCSASAPPACRPVPASPAGAGLTPRQYAAMRWAQQGHMVYYYCNDFRRDHSLTPEC

SEQ ID NO: 19920 - protein, 341 aa, Zea mays subsp. mays
  misc_feature (1)..(341): Ceres Seq. ID no. 12375617
MAAAAPPARPTSSISSCCCCISRRAAAVVPALLLLAAMAASSGDAQPSPGYYPSSRFRPVPFNRAYTNKWGPQHQTLSGDHSALTIWLDKTCGSGFKSKHAYRNGYFSTRIKLPARIHRGHQHRLLSLQQRGAPWFLRRDRHGVPGHHPGGALHAADERVRARQRRRAHRGAGDAVPPVVRPHGGLPHLRHPVEPRRHHLLRGRRARPPLRAPHRAHLPGPPHVGLRLHLGRLRLGHRRRPPPRRLPLPALRRAPRPLRRRRLLRQRPARVQARAGVPRGGRAHAAAVRGHALGAAGPHGLLLLQRLPQGPLAHARVLASVPVCCVASSSSSLLLCALFRC

SEQ ID NO: 19921 - protein, 304 aa, Zea mays subsp. mays
  misc_feature (1)..(304): Ceres Seq. ID no. 12375618
MAASSGDAQPSPGYYPSSRFRPVPFNRAYTNKWGPQHQTLSGDHSALTIWLDKTCGSGFKSKHAYRNGYFSTRIKLPARIHRGHQHRLLSLQQRGAPWFLRRDRHGVPGHHPGGALHAADERVRARQRRRAHRGAGDAVPPVVRPHGGLPHLRHPVEPRRHHLLRGRRARPPLRAPHRAHLPGPPHVGLRLHLGRLRLGHRRRPPPRRLPLPALRRAPRPLRRRRLLRQRPARVQARAGVPRGGRAHAAAVRGHALGAAGPHGLLLLQRLPQGPLAHARVLASVPVCCVASSSSSLLLCALFRC

SEQ ID NO: 19922 - DNA, 692 bp, Zea mays subsp. mays
  misc_feature (1)..(692): Ceres Seq. ID no. 12375668
gagaactcacattgcggttgcggacctcagcttgcccactacagagctaaccaaaagagatgaaagggagcctttcccacgagctcgagacggggctcccagccgccgacgtgtgggaggtctacggaggcctccttgttggggacttgattccccagctgcttcctcaagttttctcaaaggttgaactcgtagagggagacggtggagttggaacggttctgctcgtcactctcccgccagggactcctggatcagaggctttcaaagagaagttcgtcaaggtcgatgacgaaaaccgcgtcaaggagtgcctggtaaccgagggaagcttttttgaccgtggcttcaagaaatacctggtgcgaatcgagatcataggagaagatcgggaggcatccaccataagatcaactatcgagtacgaagttgaccaggagcatgcaggcaacccccctgttgccagtagcagtggcttggctactatcgctaaggccatcgcagaatatatcatcaagcagaagaagaaaggtcctcctgagtcctgagtaattaagctcccatgtaatcaactccgggaagaaaggatattatattatatcgtgtatatgtttgatcagtgaacaactgaagttaatttgtgtctaccaatgaacaaatagaatacggtaacgagcgaatggttgccattt

SEQ ID NO: 19923 - protein, 162 aa, Zea mays subsp. mays
  misc_feature (1)..(162): Ceres Seq. ID no. 12375669
MKGSLSHELETGLPAADVWEVYGGLLVGDLIPQLLPQVFSKVELVEGDGGVGTVLLVTLPPGTPGSEAFKEKFVKVDDENRVKECLVTEGSFFDRGFKKYLVRIEIIGEDREASTIRSTIEYEVDQEHAGNPPVASSSGLATIAKAIAEYIIKQKKKGPPES

SEQ ID NO: 19924 - DNA, 990 bp, Zea mays subsp. mays
  misc_feature (1)..(990): Ceres Seq. ID no. 12375677
cttcgatcggtccatggctgtcgtcacgagggacgcggcgtgcctgcccctcgtcctcttgctcctagtcttctccgcggccccgtctccggctgacggctgcgaccgctgcgtgcgccggtccaaggccacctactaccaggcctcctcgctcgccctcaacgccgggtcgtgcgggtacggctccttggccgcgtccctcaacggcggcctgctcgccgcagccagccccgagctgtacaggggcggcgtcggctgcggcgcctgcttccaggtgcggtgcagggacagcgagctgtgcagcgccgccggcgccaaggtggtggtgacggaccaggcgcggacgtcgaaccgcacggcgctggtgctgagcgccgcggcgtacgcggccatggccagtgccggcaaggccgcgcgcctcagggaccggcgcgtcgtcgacgtcgagtacaagagggtaccctgcgagtacgcgaaggaccgcaacctgttgatacgcgtggaggagaagagccggccgccaagcaacctgtccatcaggttcctgtaccagggcggccagaccgacatcgtcgccgtcgacgtcgccaccgtggggtcgtccaactggcggttcatggcgcgggaccacgggccggcgtggagcacggcgcaggcgccgccggggccgctgcagttccggctggtggtgaccggtggctacgacggcaagtgggtgtgggcggagtcggaggtgctgccgcgccggtgggaggccggccgcgtctacgacgccggggtgcaggtctccgacgtcgcgcaggaagggtgctacccctgcgacacgcgcgagtggcagtgacgtgacgcgcgcacgggctggattgtagtagattgtacagttttttttttttggtcgggaatgggacgaaagatatgaaatgatgatgagcggagccggagagccgaatcaaaccaaatcaaacaaacgtgccgttgcaagttggttct

SEQ ID NO: 19925 - protein, 279 aa, Zea mays subsp. mays
  misc_feature (1)..(279): Ceres Seq. ID no. 12375678
FDRSMAVVTRDAACLPLVLLLLVFSAAPSPADGCDRCVRRSKATYYQASSLALNAGSCGYGSLAASLNGGLLAAASPELYRGGVGCGACFQVRCRDSELCSAAGAKVVVTDQARTSNRTALVLSAAAYAAMASAGKAARLRDRRVVDVEYKRVPCEYAKDRNLLIRVEEKSRPPSNLSIRFLYQGGQTDIVAVDVATVGSSNWRFMARDHGPAWSTAQAPPGPLQFRLVVTGGYDGKWVWAESEVLPRRWEAGRVYDAGVQVSDVAQEGCYPCDTREWQ

SEQ ID NO: 19926 - protein, 275 aa, Zea mays subsp. mays
  misc_feature (1)..(275): Ceres Seq. ID no. 12375679
MAVVTRDAACLPLVLLLLVFSAAPSPADGCDRCVRRSKATYYQASSLALNAGSCGYGSLAASLNGGLLAAASPELYRGGVGCGACFQVRCRDSELCSAAGAKVVVTDQARTSNRTALVLSAAAYAAMASAGKAARLRDRRVVDVEYKRVPCEYAKDRNLLIRVEEKSRPPSNLSIRFLYQGGQTDIVAVDVATVGSSNWRFMARDHGPAWSTAQAPPGPLQFRLVVTGGYDGKWVWAESEVLPRRWEAGRVYDAGVQVSDVAQEGCYPCDTREWQ

SEQ ID NO: 19927 - protein, 149 aa, Zea mays subsp. mays
  misc_feature (1)..(149): Ceres Seq. ID no. 12375680
MASAGKAARLRDRRVVDVEYKRVPCEYAKDRNLLIRVEEKSRPPSNLSIRFLYQGGQTDIVAVDVATVGSSNWRFMARDHGPAWSTAQAPPGPLQFRLVVTGGYDGKWVWAESEVLPRRWEAGRVYDAGVQVSDVAQEGCYPCDTREWQ

SEQ ID NO: 19928 - DNA, 1521 bp, Zea mays subsp. mays
  misc_feature (1)..(1521): Ceres Seq. ID no. 12375686
gcacgagaccattacctagaacatcctaatcgaaaaacaaacaatggctttccaccaaagatcagtgagcctgccgtccaagagcctcaccaaggaggccgaagtcgaggccgaactgcaaagcctggaggacgccgcctctcccccctcctcctcctcctcctcctcaaccgtcgcggcggtgcgcgacggtctgacgaggctcggagacgtgtacggacacatcgaggagatcgtccacctccccagtaaccaagcctgcaccgtccagcagcagcggaaggagctggacgcggagatggagcgctctctggacctcatcgacctctgcaacgcgacgcaggagagcctcgccgagctgaaggccgccgtccaggacctgctggcgggtctcaggaggagggacgacgcgagcgtccaggccaaggtccagtcgtacgtccgcctggccaagaacgcgcggaagcagctcaggaaggccggcaggagggccgctgccgcctctggcagggaggagcgcgagtgcagtctcgtcatcaggctgctgctcagggccaggctggtcgctgcctccctcctcggctcggcgctgcagtgcctcgcgggcgtggcgaagcaggtggtgactctgacgcccaggaggtcccttgtctccaaggcgttgcagaggagaagcaaggcggtcgtctgcgaggagggccagccggccaggtgctggcgctggagcgcgtcgtcgttggagagcttgagcgtggagcggagcttctgttcaggaggatggtccagaccagagtcgccctcctcaacgtccttagctcgtagatcctcctcgtcttcatgtgtagcgcgcgtcctgcgattggcctccgcgttttagaggatcctccaatctacatatgtgtacagtttttgtagatagatgtgcagtatgtagattgtatgatcaatgccctgcagaggatcttgaactggcgaagctgttggtaagacccggcttccagttcatggacgacccaacgatgaaggacgagacgctgctgacggacggcaactacgggtccgtgaagagggtgtttgtcgtcgccaaagccgacagaagcagcaccgaggagatgcagcgccggatggtggagctgagccccggcgcggacgtcgaggaggtcgccggagccgatcacatggccatgctctccaagccaacggaggtctgcgaagttctggtcaggattgccggcaggtacgactgagaagaagacgggcaatgggtgcttcagtctgctacgtacctttcagttcaagtgtgctggattgctagcaatgactgttatgcaagcgatccacaagtataatcgtgtaagcgagcttcctgatccgttagttcatgatccaagactgctagggggtgttgttttctttgcaagttcacagtcgctgacgcatgtgccatgtggagttgcgctgcagggattcaaactgattttaagaagcgtcatggctaaacgaataatgctacactttctt

SEQ ID NO: 19929 - protein, 277 aa, Zea mays subsp. mays
  misc_feature (1)..(277): Ceres Seq. ID no. 12375687
MAFHQRSVSLPSKSLTKEAEVEAELQSLEDAASPPSSSSSSSTVAAVRDGLTRLGDVYGHIEEIVHLPSNQACTVQQQRKELDAEMERSLDLIDLCNATQESLAELKAAVQDLLAGLRRRDDASVQAKVQSYVRLAKNARKQLRKAGRRAAAASGREERECSLVIRLLLRARLVAASLLGSALQCLAGVAKQVVTLTPRRSLVSKALQRRSKAVVCEEGQPARCWRWSASSLESLSVERSFCSGGWSRPESPSSTSLARRSSSSSCVARVLRLASAF

SEQ ID NO: 19930 - protein, 192 aa, Zea mays subsp. mays
  misc_feature (1)..(192): Ceres Seq. ID no. 12375688
MERSLDLIDLCNATQESLAELKAAVQDLLAGLRRRDDASVQAKVQSYVRLAKNARKQLRKAGRRAAAASGREERECSLVIRLLLRARLVAASLLGSALQCLAGVAKQVVTLTPRRSLVSKALQRRSKAVVCEEGQPARCWRWSASSLESLSVERSFCSGGWSRPESPSSTSLARRSSSSSCVARVLRLASAF

SEQ ID NO: 19931 - DNA, 1375 bp, Zea mays subsp. mays
  misc_feature (1)..(1375): Ceres Seq. ID no. 12375696
gcacgagaccattacctagaacatcctaatcgaaaagccgttcaactcgatcacttctttcccttccacacaggcacacaggcacacagcacacagctcactcaactcccctcccgcttcgtcagctcaccatcataaaccaaacagagagctctctccctctcggtcgttccattccaggatgctgcttaacccggcgtccatgctggacaccatccggcagcacctcctggaggagccaccagcggcggccgacgagagcttcgggatcctggtggcggaccagtggagcgactcgctcccgttccgcaccgacgacgccgacgacatggtggtgttcggggcgctgcaggacgccttcgcctacggctggctacccgacggctccttcgcgcacgtgaagcccgagccggtgcggtcccccgactcctcctactactcctacgacggctcctgcttcggcggcctcccgtacccggagcagccactgacgcccggcagcgagggcgaggcggccgccacgcccagccccaggagggaggaggccgcggcggccgtggccaggggcaagcactacaggggcgtcaggcagcgcccgtggggcaagttcgcggcggagatcagggacccggccaagaacggcgcgcgcgtctggctcggcacctacgacaccgccgaggacgccgcgctcgcctacgaccgcgccgcctaccgcatgcgcggctcgcgcgcgctcctcaacttcccgctccgcatcgcctccgagatcgccgccgcggccgccggcgacaagcggccgttggcgttgcccgagcccgccacctcctcggactcgtnctccaccggcggctcgcccaagaggcggaagcgaggcgaagccgccgccgccaacatggccatggcgctggtgcccccgccttcccagcttagccggccggcccagccatggttccctgccgccgcgccggtcgagcaggcggcgatgccgccgcgcgtggagcagctcgtcatctagctagccccgcgcgttaaaccggactcgcggcgagacaatgaggcgtgcaagtgcaacgacgggtgagccggcggaaggcggaggaaaacaggacgaggcccttgcgcgaatgcgacggcgcgcggaatgcgataagctcgggagcaattgggggtccggatgccgctgttgctccgtgcaactcgcgcaagtggaaagaagctgtctgtgtgtagattcatccaagtgtcttgtctgcaaacggattttcggtatatgcgtccttgtcacctgtcagggtggtgtggtgtgagggcttgggcttgtgctgctgataagtttggagatctgtacaaagaaaaaacgtagggagaagatgag

SEQ ID NO: 19932 - protein, 277 aa, Zea mays subsp. mays
  misc_feature (1)..(277): Ceres Seq. ID no. 12375697
  misc_feature (219)..(219): Xaa is any aa, unknown or other
MLLNPASMLDTIRQHLLEEPPAAADESFGILVADQWSDSLPFRTDDADDMVVFGALQDAFAYGWLPDGSFAHVKPEPVRSPDSSYYSYDGSCFGGLPYPEQPLTPGSEGEAAATPSPRREEAAAAVARGKHYRGVRQRPWGKFAAEIRDPAKNGARVWLGTYDTAEDAALAYDRAAYRMRGSRALLNFPLRIASEIAAAAAGDKRPLALPEPATSSDSXSTGGSPKRRKRGEAAAANMAMALVPPPSQLSRPAQPWFPAAAPVEQAAMPPRVEQLVI

SEQ ID NO: 19933 - protein, 270 aa, Zea mays subsp. mays
  misc_feature (1)..(270): Ceres Seq. ID no. 12375698
  misc_feature (212)..(212): Xaa is any aa, unknown or other
MLDTIRQHLLEEPPAAADESFGILVADQWSDSLPFRTDDADDMVVFGALQDAFAYGWLPDGSFAHVKPEPVRSPDSSYYSYDGSCFGGLPYPEQPLTPGSEGEAAATPSPRREEAAAAVARGKHYRGVRQRPWGKFAAEIRDPAKNGARVWLGTYDTAEDAALAYDRAAYRMRGSRALLNFPLRIASEIAAAAAGDKRPLALPEPATSSDSXSTGGSPKRRKRGEAAAANMAMALVPPPSQLSRPAQPWFPAAAPVEQAAMPPRVEQLVI

SEQ ID NO: 19934 - protein, 228 aa, Zea mays subsp. mays
  misc_feature (1)..(228): Ceres Seq. ID no. 12375699
  misc_feature (170)..(170): Xaa is any aa, unknown or other
MVVFGALQDAFAYGWLPDGSFAHVKPEPVRSPDSSYYSYDGSCFGGLPYPEQPLTPGSEGEAAATPSPRREEAAAAVARGKHYRGVRQRPWGKFAAEIRDPAKNGARVWLGTYDTAEDAALAYDRAAYRMRGSRALLNFPLRIASEIAAAAAGDKRPLALPEPATSSDSXSTGGSPKRRKRGEAAAANMAMALVPPPSQLSRPAQPWFPAAAPVEQAAMPPRVEQLVI

SEQ ID NO: 19935 - DNA, 1172 bp, Zea mays subsp. mays
  misc_feature (1)..(1172): Ceres Seq. ID no. 12375730
gcacgagaccattacctagaacatcctaatcgaaaaatcgacagcctccgccgcacgttcacacacacagcaagcagaatccagctagctcagctctcactcgctcgctcactccagtgtccagtctcccttcacttcaggacgtcctcgattcgccgccgtctgtcaaccgagatggacgcgctgtggaatggttcgtcgtgcgattggccggcgccgacggtgatcatcagcgacgacgacgcggcggcagcggagctgcggcgggggccgtggacagtggacgaggacgcgctcctggcggcccacgtggccgcgcacggcgaggggcggtggaacgagctggcgcgcgacgcggggctacggcgcaccggcaagagctgccgcctccgctggctcaactacctccgccccggcgtgcgccgcgggggcttcaccccgcgggagcagctgctcatcctcgacctccactcgcgctggggcaaccgctggtccaagatcgcggcgcacctgccgggccgcacggacaacgaggtcaagaactactggaggacgcgggtgcagaagcacgccaagcagctgcactgcgacgtcggcagccgcaggttccacgacgccatgaggaacctctggatgccgcgcctgatcgagaggatccacgccgacgactcagccgccgtcgccgctaatgccaccggcgacgtctcccacttctactccgcgagcccatcgcatgagctgtcgtcgtcctcccagccggcgccggcgtaccgaaacgctgcgcccaacggcagctgcgcgcgtgcgccgtccccggacgcctcctgcgtcaccgggccgtcgtcgtggtcacgggaggcgtcgcccgcgtcgcagttccaatcgagcggctcgaccattgccggaccgtctacttccaccgagctgtgccagaacggatgctccagcgcgacgagcgttgacatgttcgacgagagctggtcggagcttcttgcgcgcgccaaccatgacgacacggatttcggattgggagaaactggagacaactggtggggtctggaggatatctgggaacaaccgctttaaactgatcgctccctacttttgtactactacatactacgtatgctgcccgagacgaaatgacagaattgttgtttctagtgttattg

SEQ ID NO: 19936 - protein, 361 aa, Zea mays subsp. mays
  misc_feature (1)..(361): Ceres Seq. ID no. 12375731
ARDHYLEHPNRKIDSLRRTFTHTASRIQLAQLSLARSLQCPVSLHFRTSSIRRRLSTEMDALWNGSSCDWPAPTVIISDDDAAAAELRRGPWTVDEDALLAAHVAAHGEGRWNELARDAGLRRTGKSCRLRWLNYLRPGVRRGGFTPREQLLILDLHSRWGNRWSKIAAHLPGRTDNEVKNYWRTRVQKHAKQLHCDVGSRRFHDAMRNLWMPRLIERIHADDSAAVAANATGDVSHFYSASPSHELSSSSQPAPAYRNAAPNGSCARAPSPDASCVTGPSSWSREASPASQFQSSGSTIAGPSTSTELCQNGCSSATSVDMFDESWSELLARANHDDTDFGLGETGDNWWGLEDIWEQPL

SEQ ID NO: 19937 - protein, 303 aa, Zea mays subsp. mays
  misc_feature (1)..(303): Ceres Seq. ID no. 12375732
MDALWNGSSCDWPAPTVIISDDDAAAAELRRGPWTVDEDALLAAHVAAHGEGRWNELARDAGLRRTGKSCRLRWLNYLRPGVRRGGFTPREQLLILDLHSRWGNRWSKIAAHLPGRTDNEVKNYWRTRVQKHAKQLHCDVGSRRFHDAMRNLWMPRLIERIHADDSAAVAANATGDVSHFYSASPSHELSSSSQPAPAYRNAAPNGSCARAPSPDASCVTGPSSWSREASPASQFQSSGSTIAGPSTSTELCQNGCSSATSVDMFDESWSELLARANHDDTDFGLGETGDNWWGLEDIWEQPL

SEQ ID NO: 19938 - DNA, 1141 bp, Zea mays subsp. mays
  misc_feature (1)..(1141): Ceres Seq. ID no. 12375733
gcacgagaccattacctagaacatcctaatcgaaaaaaacacctcccaacccaatctcctcagtcctcactcctcagagagagccccaagccaagatctgcgcgggcaagtcaccaggcgaagcaccggctcccatggccgtggacctgatgggctgctacgccccgcgccgcgccaacgaccagctcgccatccaggaggcggcggcggccgggctccgcaacctggagctgctggtgacgtccctgtccacgcaggccgccgcgccgcacagggccgctgatcagccgttcggcgagatcgccggccgggccgtctccaagttccgcaaggtcatctccatcctcgaccgcacggggcacgcccgcttccgccgcgggcccgtcgagccgtcgccgccgccggcgcctcctgtcgtccccggtccgcccgtcagcgtggcgcagccgccgcagagcctgacgctggatttcacgaagccgaacctggccgtgtcggccgccacgtccgtcacctccacgtccttcttctcgtcggtcacggccggcgagggcagcgtctccaagggccggagcctcatgtcctccgggaagccgccgctgtctggccacaagcggaagccctgcgccggcgcccactccgaggccaccaccaacggcagccgttgccactgctccaagagaaggaagaaccgcgtgaagaggagcatcagagtgccggcgatcagctcgaaggtcgccgacatcccgccggacgagtactcgtggaggaagtacggccagaagcctatcaagggctccccttacccacgtggctactacaagtgcagcactgtgcggggatgcccggcgaggaagcacgtggagcgggccaccgacgacccggccatgctggtggtgacgtacgagggcgagcaccgccacacgccgggcgcggtccaggggccgagccccctggcgaccgcgtcgccggtgcccgtcgccgtctccgccggcaacgggctcgttgtctagtctactaaaagctaggattagcttctcgtcttctttgttttttttttttgtttgagctgatgtccgtgtaaaacaaggaagaaggttgtagaaagagggagaggaggacaccggaatttcgatgccgg

SEQ ID NO: 19939 - protein, 292 aa, Zea mays subsp. mays
  misc_feature (1)..(292): Ceres Seq. ID no. 12375734
MAVDLMGCYAPRRANDQLAIQEAAAAGLRNLELLVTSLSTQAAAPHRAADQPFGEIAGRAVSKFRKVISILDRTGHARFRRGPVEPSPPPAPPVVPGPPVSVAQPPQSLTLDFTKPNLAVSAATSVTSTSFFSSVTAGEGSVSKGRSLMSSGKPPLSGHKRKPCAGAHSEATTNGSRCHCSKRRKNRVKRSIRVPAISSKVADIPPDEYSWRKYGQKPIKGSPYPRGYYKCSTVRGCPARKHVERATDDPAMLVVTYEGEHRHTPGAVQGPSPLATASPVPVAVSAGNGLVV

SEQ ID NO: 19940 - protein, 287 aa, Zea mays subsp. mays
  misc_feature (1)..(287): Ceres Seq. ID no. 12375735
MGCYAPRRANDQLAIQEAAAAGLRNLELLVTSLSTQAAAPHRAADQPFGEIAGRAVSKFRKVISILDRTGHARFRRGPVEPSPPPAPPVVPGPPVSVAQPPQSLTLDFTKPNLAVSAATSVTSTSFFSSVTAGEGSVSKGRSLMSSGKPPLSGHKRKPCAGAHSEATTNGSRCHCSKRRKNRVKRSIRVPAISSKVADIPPDEYSWRKYGQKPIKGSPYPRGYYKCSTVRGCPARKHVERATDDPAMLVVTYEGEHRHTPGAVQGPSPLATASPVPVAVSAGNGLVV

SEQ ID NO: 19941 - DNA, 2629 bp, Zea mays subsp. mays
  misc_feature (1)..(2629): Ceres Seq. ID no. 12375783
gcacgagaccattacctagaacatcctaatcgaaaaacagtgcagtgcattcaatctcaaataaaaagccctgctacagtgctagcagtactcggatccacgaccttctccctccctccgctgctgctccgtcaaggaagggaggaaagaaagggcaggggaatggaggtggaggaagacggccgagccgcccgagtgctgctgagctcccagtgtctctgtctctgatgagatgactggacttatttgatgctcttgccgttctcgacttggggcgcgagccgatggatctcctccggatgaaacttctcctgccctccttcatcagctgccttcttctgatgcaggcagcactatgtgatggcgccgccgccaccaccaccaccaccggcgaaaacggaacggcaaactggacatgtgtgtgcgcagctcatcctctcggtgaaccagactccaacagcagcttgctgtccaattgctcttcctcctgccattgccaccgagatgagaacggcggcggcggcggcggcggcgcaggctcgtggaactgcacgtgtgcctctggtgatgagggccttcagaaggaagagcatgctgagctacgtgacgggagctgtttcacttcctgcaactgcacgtcgggtactggaacttcagaggaagggagaaagcgtgtctcaagcaaaacagtcatagctacgctcctggtctgcgtggttctcaccaccaccgctttcctcgtcaccaccgtatactacttccgccgcaaggacgccctctctccgcgatcgcagatatactccttcgatagatacactactagctggagcagcaggtcgaacctcgtcagcagtcgatcgtctccgcttccccagatgaaacccaaaccaaagcttggtggtctgaaagagtttctgtgcagctgcaatcttgtcatctgtgggggagagagcggcgcattccccggtgtcgtcgcccggttctcgtacgcagagctggagcaagcgaccgggagattctcggacgaccaccttatcggagtcggtgggtcaagcaaggtgtaccgcggccagctcggcgatggcagagtcgttgccgtgaagaagcttaggccgctaggaggcacggacgaagacttggagttcctgtcagagatcgagctgctgtcgaggctgaaccactgccacgtggtgccgttgctggggtactgctcggagagccagggccggcagctggagcggctgctggtgttcgagtgcatggccaacggcaacctgagggactgcctagacctgaagcgagggaggaagcccatggactggcagacgcgggtgagcgtcgcgctcggcgccgcgagggggctggagtacctgcacgaggcggcggcgccgcgcatcctccaccgcgacatcaagtccaccaacatcctcctggacgacaagttcagagccaagatcactgacctcggcatggccaagtgcctgatgaacgacggcgtgaccagctgctcgagctccccggcgcggatgctgggcacgttcggctacttcgcaccggagtacgccatcgtgggcaaggcgtcgctcaagtccgacgtcttcagcttcggcgtcgttgtgctggagctcatcaccggccggcagcccatccacaagtcgtcgtcgacgagggccgacgagagcctcgtactctgggcgacgtcgcggctgcgggacagcgggctggtggtcacggagctgccggacccgacgctgcagggcaagttcccggcggaggagatgcagatcatggcgcacctggcgcgggagtgcctgcagtgggaccccgaggccaggcccaccatgacggaggtcgtgcacatcctcgccaccatcgcaccactccagcacggcgccaagcgtcggaaccttcccatcgccaccgccttcaacctcacgccatcgccgcacgtcgggcggtgtgacccggagcctaaagacgacgacatcgagaggcagatgcagcagcaggagtgctcgccgacgacggctgtccagtggcaacaacaacaagcgcgctgcacccacgcgccaacgggccgcgcgtcgtggcccggcgacagggggaacgttgtgagcagaggcgcggcggtgtcgggcgagctggtgaacgggacggtgctgatgaacccccacgggcggggcagctggcggcggccgccgccgcttggcgacgaggaggcagtggacgtggatctgacggagccccggatggaggcgttcacgcagccggcggcgtttcagcctttcaggtgacggaaggattaggatcaggtggtggtggttctgattggtgcggcggcggcgggtgctgctgtacatcttcttgttcgtgcctccacgatccacaccaggatcatctgcttctgcatctgcgttcatgaatgtacagtacaggcaaatacatctagattggcaacgggaaaagaaaagaaaggcatcgagatcgttatgggatataggacctagattgaacacgagatcaatgcatgaatctgaatccacggcgcgcgtcattggacacatcactgttgtacacaagcaaacagacaatgagtgttcacagaagcaaaaaatataagaccgagttc

SEQ ID NO: 19942 - protein, 669 aa, Zea mays subsp. mays
  misc_feature (1)..(669): Ceres Seq. ID no. 12375784
MDLLRMKLLLPSFISCLLLMQAALCDGAAATTTTTGENGTANWTCVCAAHPLGEPDSNSSLLSNCSSSCHCHRDENGGGGGGGAGSWNCTCASGDEGLQKEEHAELRDGSCFTSCNCTSGTGTSEEGRKRVSSKTVIATLLVCVVLTTTAFLVTTVYYFRRKDALSPRSQIYSFDRYTTSWSSRSNLVSSRSSPLPQMKPKPKLGGLKEFLCSCNLVICGGESGAFPGVVARFSYAELEQATGRFSDDHLIGVGGSSKVYRGQLGDGRVVAVKKLRPLGGTDEDLEFLSEIELLSRLNHCHVVPLLGYCSESQGRQLERLLVFECMANGNLRDCLDLKRGRKPMDWQTRVSVALGAARGLEYLHEAAAPRILHRDIKSTNILLDDKFRAKITDLGMAKCLMNDGVTSCSSSPARMLGTFGYFAPEYAIVGKASLKSDVFSFGVVVLELITGRQPIHKSSSTRADESLVLWATSRLRDSGLVVTELPDPTLQGKFPAEEMQIMAHLARECLQWDPEARPTMTEVVHILATIAPLQHGAKRRNLPIATAFNLTPSPHVGRCDPEPKDDDIERQMQQQECSPTTAVQWQQQQARCTHAPTGRASWPGDRGNVVSRGAAVSGELVNGTVLMNPHGRGSWRRPPPLGDEEAVDVDLTEPRMEAFTQPAAFQPFR

SEQ ID NO: 19943 - protein, 664 aa, Zea mays subsp. mays
  misc_feature (1)..(664): Ceres Seq. ID no. 12375785
MKLLLPSFISCLLLMQAALCDGAAATTTTTGENGTANWTCVCAAHPLGEPDSNSSLLSNCSSSCHCHRDENGGGGGGGAGSWNCTCASGDEGLQKEEHAELRDGSCFTSCNCTSGTGTSEEGRKRVSSKTVIATLLVCVVLTTTAFLVTTVYYFRRKDALSPRSQIYSFDRYTTSWSSRSNLVSSRSSPLPQMKPKPKLGGLKEFLCSCNLVICGGESGAFPGVVARFSYAELEQATGRFSDDHLIGVGGSSKVYRGQLGDGRVVAVKKLRPLGGTDEDLEFLSEIELLSRLNHCHVVPLLGYCSESQGRQLERLLVFECMANGNLRDCLDLKRGRKPMDWQTRVSVALGAARGLEYLHEAAAPRILHRDIKSTNILLDDKFRAKITDLGMAKCLMNDGVTSCSSSPARMLGTFGYFAPEYAIVGKASLKSDVFSFGVVVLELITGRQPIHKSSSTRADESLVLWATSRLRDSGLVVTELPDPTLQGKFPAEEMQIMAHLARECLQWDPEARPTMTEVVHILATIAPLQHGAKRRNLPIATAFNLTPSPHVGRCDPEPKDDDIERQMQQQECSPTTAVQWQQQQARCTHAPTGRASWPGDRGNVVSRGAAVSGELVNGTVLMNPHGRGSWRRPPPLGDEEAVDVDLTEPRMEAFTQPAAFQPFR

SEQ ID NO: 19944 - protein, 650 aa, Zea mays subsp. mays
  misc_feature (1)..(650): Ceres Seq. ID no. 12375786
MQAALCDGAAATTTTTGENGTANWTCVCAAHPLGEPDSNSSLLSNCSSSCHCHRDENGGGGGGGAGSWNCTCASGDEGLQKEEHAELRDGSCFTSCNCTSGTGTSEEGRKRVSSKTVIATLLVCVVLTTTAFLVTTVYYFRRKDALSPRSQIYSFDRYTTSWSSRSNLVSSRSSPLPQMKPKPKLGGLKEFLCSCNLVICGGESGAFPGVVARFSYAELEQATGRFSDDHLIGVGGSSKVYRGQLGDGRVVAVKKLRPLGGTDEDLEFLSEIELLSRLNHCHVVPLLGYCSESQGRQLERLLVFECMANGNLRDCLDLKRGRKPMDWQTRVSVALGAARGLEYLHEAAAPRILHRDIKSTNILLDDKFRAKITDLGMAKCLMNDGVTSCSSSPARMLGTFGYFAPEYAIVGKASLKSDVFSFGVVVLELITGRQPIHKSSSTRADESLVLWATSRLRDSGLVVTELPDPTLQGKFPAEEMQIMAHLARECLQWDPEARPTMTEVVHILATIAPLQHGAKRRNLPIATAFNLTPSPHVGRCDPEPKDDDIERQMQQQECSPTTAVQWQQQQARCTHAPTGRASWPGDRGNVVSRGAAVSGELVNGTVLMNPHGRGSWRRPPPLGDEEAVDVDLTEPRMEAFTQPAAFQPFR

SEQ ID NO: 19945 - DNA, 1732 bp, Zea mays subsp. mays
  misc_feature (1)..(1732): Ceres Seq. ID no. 12375791
aaataatagaggcagaggcagagccaagacggttccgttcagtggctggcggcgcatagatagatagccatggcgaagaagctagtggaggaagcgctcctcgcagcggcggacgagcactaggaggagaacctgagcgtgcgcgaggagctgaagaagcagctatggctggctgggcccatgatcgccggcgcgctcctgcagaacgtgatccagatgatctccgtcatgtacgtgggacaccttggagagcccccctcgctggctcatccatggccaactccttcgccaccgtcaccggcctcagcctgctgctaggcatggcaagcgctctagacacactgtgcggccaagcgttcggcgcgaggcagtactatctcctgggcatctacaagcagcgcgccatgttcctgctgaccctggtgagcgtccctctgtccgtggtgtggttctacaccggcgagatcctcctcctgttcggccaggacccggacatcgccgcagaggccggcacctacgcccggtggatgatcccgctgctgttcgcgtacggcctgctgcagtgccacgtccggttcctccagacgcagaacatcgtggtgcccgtgatggcgagcgccggcgccgccgcggcctgccacgtcgtcgtctgctgggcgctggtgtacgcgctcgggatgggcagcaagggcgcggcgctcagcaacgccatctcctactgggtcaacgtggccgtgctgtccgtgtacgtgagggtgtccagcgcctgcaaggagacgtggacgggcttctccacggaggccttccgcgacgcgctcggcttcttcaggcttgcggtcccgtccgctctcatggtctgcttggagatgtggtcgtttgaactcattgtgctcctctcgggccttcttcccaacccaaaactggagacctccgtgctgtcgatcagccttaacactgctgcgttcgtgtggatgatcccctttgggcttagctcagctatcagcactcgcgtgtcgaatgagctgggtgccgggcgtcctcgagccgcccgccttgcggtgcgtgtcgttgtgttgctgtctgtcgccgaagggctaggcgtgggcctcatcctggtgtgcgtgcgctacgtctggggccatgcctacagcaacgtcgaggaggtggtgacgtacgtggccaacatgatgctggtcattgcagtgtccaacttcttcgatggtatccagtgcgtgctttcaggtgtggctagaggctgcggatggcagaagatcggtgcctgcatcaaccttggcgcctactacatcgtcggcatcccctctgcttacctcatagcgttcgtcctgcgtgtcggtgggacgggactctggttgggcatcatatgtgggctcatcgtacagctccttctgctcgcgatcatcactctctgcaccaactgggatagcgaggcaacgaaggcaaagaacagagtgttcaattcttcctctccagcatccggaacgtgaacgcattggcggtgaagtaaacggcgagcaaacacggaaactataggagttatgcctgtagttttggaaacttcagcacctctgatcctctctgattttctggctcccacattaactctaatggttagcattgacacttgcagtctggattttgaaacataaatgcgttccttgaacagagtagaggaagggaccaatggaaaacttatacaatagcgttagatcgc

SEQ ID NO: 19946 - protein, 446 aa, Zea mays subsp. mays
  misc_feature (1)..(446): Ceres Seq. ID no. 12375792
MAGWAHDRRRAPAERDPDDLRHVRGTPWRAPLAGSSMANSFATVTGLSLLLGMASALDTLCGQAFGARQYYLLGIYKQRAMFLLTLVSVPLSVVWFYTGEILLLFGQDPDIAAEAGTYARWMIPLLFAYGLLQCHVRFLQTQNIVVPVMASAGAAAACHVVVCWALVYALGMGSKGAALSNAISYWVNVAVLSVYVRVSSACKETWTGFSTEAFRDALGFFRLAVPSALMVCLEMWSFELIVLLSGLLPNPKLETSVLSISLNTAAFVWMIPFGLSSAISTRVSNELGAGRPRAARLAVRVVVLLSVAEGLGVGLILVCVRYVWGHAYSNVEEVVTYVANMMLVIAVSNFFDGIQCVLSGVARGCGWQKIGACINLGAYYIVGIPSAYLIAFVLRVGGTGLWLGIICGLIVQLLLLAIITLCTNWDSEATKAKNRVFNSSSPASGT

SEQ ID NO: 19947 - protein, 410 aa, Zea mays subsp. mays
  misc_feature (1)..(410): Ceres Seq. ID no. 12375793
MANSFATVTGLSLLLGMASALDTLCGQAFGARQYYLLGIYKQRAMFLLTLVSVPLSVVWFYTGEILLLFGQDPDIAAEAGTYARWMIPLLFAYGLLQCHVRFLQTQNIVVPVMASAGAAAACHVVVCWALVYALGMGSKGAALSNAISYWVNVAVLSVYVRVSSACKETWTGFSTEAFRDALGFFRLAVPSALMVCLEMWSFELIVLLSGLLPNPKLETSVLSISLNTAAFVWMIPFGLSSAISTRVSNELGAGRPRAARLAVRVVVLLSVAEGLGVGLILVCVRYVWGHAYSNVEEVVTYVANMMLVIAVSNFFDGIQCVLSGVARGCGWQKIGACINLGAYYIVGIPSAYLIAFVLRVGGTGLWLGIICGLIVQLLLLAIITLCTNWDSEATKAKNRVFNSSSPASGT

SEQ ID NO: 19948 - protein, 394 aa, Zea mays subsp. mays
  misc_feature (1)..(394): Ceres Seq. ID no. 12375794
MASALDTLCGQAFGARQYYLLGIYKQRAMFLLTLVSVPLSVVWFYTGEILLLFGQDPDIAAEAGTYARWMIPLLFAYGLLQCHVRFLQTQNIVVPVMASAGAAAACHVVVCWALVYALGMGSKGAALSNAISYWVNVAVLSVYVRVSSACKETWTGFSTEAFRDALGFFRLAVPSALMVCLEMWSFELIVLLSGLLPNPKLETSVLSISLNTAAFVWMIPFGLSSAISTRVSNELGAGRPRAARLAVRVVVLLSVAEGLGVGLILVCVRYVWGHAYSNVEEVVTYVANMMLVIAVSNFFDGIQCVLSGVARGCGWQKIGACINLGAYYIVGIPSAYLIAFVLRVGGTGLWLGIICGLIVQLLLLAIITLCTNWDSEATKAKNRVFNSSSPASGT

SEQ ID NO: 19949 - DNA, 3065 bp, Zea mays subsp. mays
  misc_feature (1)..(3065): Ceres Seq. ID no. 12375814
gcacgagaccattacctagaacatcctaaatcgaaaatcccaacatcgcccgctctctcctcgctgttctccgctgtcatctcccccggagaagcgtggctcctgtagccggcctcctacctgcccctcctccgcgcgccgagcaccagacgacgcgacacggccgagcacggtcgctgcttccgcggcggcgccgctccactctcgtgctgcagctagcggaacagagatccgtggggacatgaacagggtttctcctctctgttggtatgaactaaattgatcgatggtcctattgaatatagagctactattatatggcatattctgtcatgcaaatgatggtggttgtaagttgtgattgaggaactccattgtttgagaaatggatgaaacaccaactagttctgggcaatctgaagatagttcatgtgaacctaattggtggccaccagacttattagagaagatagagtctgcttccatatcaaggaaacatgatgttttgggtaatctaaggtcctcatcctggaaggcatcacaattactgtggtcaacaggatcttattcagggttaatccctaatggtttctattcaatcatcccggataaaaagttgaaggagactttcccaacaattccatcggtagatgacctgcaaactcttgaagcagatgggcttaaggctgacataattattgtagacactgagagggataagaaggttttcatgttgaagcagcttagtgctgcacttgtgaaagggttaagctctagcccagcattagtgataaagaaaatagcaggtttggtttttgactgcttcaagcgacaaaatcctgacgccagtccagcaaaaggctcgattgaagatactcatttctttggatataaaggaccacaacttctagggcagataagacatggatcatgccgacctcgagctattctatttaaagttcttgcagatgctgttggccttgagagtaaacttgtagttggtctacctgatgacggtgccgttggatttgtggactcctacaaacatatgtctgtggtagtttcgctaaactctatggaactgctagtggatcttatgcgatttccaggccagttgattccattttcagctaaggctatctttatatcgcatatatctgctgcgggtgaaagtgactcagctgaaaatgactcctgtgattctccccttgagcccaacagccctctgtatggattgtctgataaagttgaaactgaaggaattgaatcttcatcaaatctatctggacgatcactgcgtaatatgatgttgagatcaaggacattttctgaggggaaattaagcacgtcatgtagtgaaccgaatatagcgaatgccttttggaggcacagtcaaaggagaggagttgccgaggaaccccgtggtgctagttccagtcctgagcatccattaatgagagcaaggggaagatctatacttggtggtgagaagcaatcatttcaagaatacacagaatctggagctgcttcaagatcagatggtcttgggggcacttcaacctctaatgctcgaagaataaggcgtagaagcattagcatcacccctgagattggagatgacattgtgagggcagttcgggctatgaacgaaacactaaagcaaaatcgctttcaaagggatcatgtcgaaggttcatgctcatatgttacggaagaccaaagcaacgccaatgactgcccaaataaagatgatgcatctcggataattggtgctactgacagtgactcaagaaaccgaactggtcctactcaaaaggccatgtcattgccttcttcgcctcatgaatataggggtcaagatacccaaaaaggtgatgattttataagtaaagagaagatggcattggcatggaacaaagttttccagagctccccatttcttaacaagcccttgctgccgtttgaggaatggaacatagatttctctgagataacaattggcacgcgggttggaataggattcttcggagaagttttccgtggtatatggaatggaaccgatgttgccatcaaagtatttctagaacaggacttgacaactgaaaacatggaagatttttgcaacgagatatacatcctgagccggttgcgacatccaaacgttatattgtttcttggtgcatgcattacacctccacacttgtcaatggttactgaatatatggaaatgggatcactgtattatctcatccatatgagtggtcagaaaaagaaacttagttggcgtaggaggttgaaaattattcgtgatatatgcagggggttgatgtgcatacaccgcatgaagatagttcacagggatctcaaaagtgcaaactgcctggtgaacaaacattggactgttaagatatgtgactttggtctatctcgagtgatgattgatagtcctatgactgataattcctctgctggcaccccggaatggatggcccctgagcttatacggaatgaaccttttacagagaaatgtgatatattcagccttggtgttatcatgtgggagctgtgcacattgagtcgcccatgggaaggcatctccccagttcaagtggtgtacgcagttgctaatgaaggttcgcggcttgagattcctgaaggacctctcggcaggttgattgcagattgctgggcagagcctgagaatcggccgagctgccaggagatcctaacccgtttgctggactgcgaatacactgtcagctgaaatggaagctgctcgctcgtccactcaattcctgcacaggtggaaacatttcttgtataaaacctgtaaaaaaggctgccgattctgcggacttgaggtcacatatcgaagcgctgtgtttttttttaaacaatggcgaccctttctcaaaaaaaatgtaaaaatgattccctggttatagaagaacatgtctgattcgatagacgtgccttgcatcgcagggcaagctggttgttgtaccttattctagataagtagcacgcccgcgaatgctgttcggctttcaaatagctgcagctcc

SEQ ID NO: 19950 - protein, 792 aa, Zea mays subsp. mays
  misc_feature (1)..(792): Ceres Seq. ID no. 12375815
MDETPTSSGQSEDSSCEPNWWPPDLLEKIESASISRKHDVLGNLRSSSWKASQLLWSTGSYSGLIPNGFYSIIPDKKLKETFPTIPSVDDLQTLEADGLKADIIIVDTERDKKVFMLKQLSAALVKGLSSSPALVIKKIAGLVFDCFKRQNPDASPAKGSIEDTHFFGYKGPQLLGQIRHGSCRPRAILFKVLADAVGLESKLVVGLPDDGAVGFVDSYKHMSVVVSLNSMELLVDLMRFPGQLIPFSAKAIFISHISAAGESDSAENDSCDSPLEPNSPLYGLSDKVETEGIESSSNLSGRSLRNMMLRSRTFSEGKLSTSCSEPNIANAFWRHSQRRGVAEEPRGASSSPEHPLMRARGRSILGGEKQSFQEYTESGAASRSDGLGGTSTSNARRIRRRSISITPEIGDDIVRAVRAMNETLKQNRFQRDHVEGSCSYVTEDQSNANDCPNKDDASRIIGATDSDSRNRTGPTQKAMSLPSSPHEYRGQDTQKGDDFISKEKMALAWNKVFQSSPFLNKPLLPFEEWNIDFSEITIGTRVGIGFFGEVFRGIWNGTDVAIKVFLEQDLTTENMEDFCNEIYILSRLRHPNVILFLGACITPPHLSMVTEYMEMGSLYYLIHMSGQKKKLSWRRRLKIIRDICRGLMCIHRMKIVHRDLKSANCLVNKHWTVKICDFGLSRVMIDSPMTDNSSAGTPEWMAPELIRNEPFTEKCDIFSLGVIMWELCTLSRPWEGISPVQVVYAVANEGSRLEIPEGPLGRLIADCWAEPENRPSCQEILTRLLDCEYTVS

SEQ ID NO: 19951 - protein, 677 aa, Zea mays subsp. mays
  misc_feature (1)..(677): Ceres Seq. ID no. 12375816
MLKQLSAALVKGLSSSPALVIKKIAGLVFDCFKRQNPDASPAKGSIEDTHFFGYKGPQLLGQIRHGSCRPRAILFKVLADAVGLESKLVVGLPDDGAVGFVDSYKHMSVVVSLNSMELLVDLMRFPGQLIPFSAKAIFISHISAAGESDSAENDSCDSPLEPNSPLYGLSDKVETEGIESSSNLSGRSLRNMMLRSRTFSEGKLSTSCSEPNIANAFWRHSQRRGVAEEPRGASSSPEHPLMRARGRSILGGEKQSFQEYTESGAASRSDGLGGTSTSNARRIRRRSISITPEIGDDIVRAVRAMNETLKQNRFQRDHVEGSCSYVTEDQSNANDCPNKDDASRIIGATDSDSRNRTGPTQKAMSLPSSPHEYRGQDTQKGDDFISKEKMALAWNKVFQSSPFLNKPLLPFEEWNIDFSEITIGTRVGIGFFGEVFRGIWNGTDVAIKVFLEQDLTTENMEDFCNEIYILSRLRHPNVILFLGACITPPHLSMVTEYMEMGSLYYLIHMSGQKKKLSWRRRLKIIRDICRGLMCIHRMKIVHRDLKSANCLVNKHWTVKICDFGLSRVMIDSPMTDNSSAGTPEWMAPELIRNEPFTEKCDIFSLGVIMWELCTLSRPWEGISPVQVVYAVANEGSRLEIPEGPLGRLIADCWAEPENRPSCQEILTRLLDCEYTVS

SEQ ID NO: 19952 - protein, 571 aa, Zea mays subsp. mays
  misc_feature (1)..(571): Ceres Seq. ID no. 12375817
MSVVVSLNSMELLVDLMRFPGQLIPFSAKAIFISHISAAGESDSAENDSCDSPLEPNSPLYGLSDKVETEGIESSSNLSGRSLRNMMLRSRTFSEGKLSTSCSEPNIANAFWRHSQRRGVAEEPRGASSSPEHPLMRARGRSILGGEKQSFQEYTESGAASRSDGLGGTSTSNARRIRRRSISITPEIGDDIVRAVRAMNETLKQNRFQRDHVEGSCSYVTEDQSNANDCPNKDDASRIIGATDSDSRNRTGPTQKAMSLPSSPHEYRGQDTQKGDDFISKEKMALAWNKVFQSSPFLNKPLLPFEEWNIDFSEITIGTRVGIGFFGEVFRGIWNGTDVAIKVFLEQDLTTENMEDFCNEIYILSRLRHPNVILFLGACITPPHLSMVTEYMEMGSLYYLIHMSGQKKKLSWRRRLKIIRDICRGLMCIHRMKIVHRDLKSANCLVNKHWTVKICDFGLSRVMIDSPMTDNSSAGTPEWMAPELIRNEPFTEKCDIFSLGVIMWELCTLSRPWEGISPVQVVYAVANEGSRLEIPEGPLGRLIADCWAEPENRPSCQEILTRLLDCEYTVS

SEQ ID NO: 19953 - DNA, 912 bp, Zea mays subsp. mays
  misc_feature (1)..(912): Ceres Seq. ID no. 12375830
aatcccctcccgccgcgtcacatcgccgccgtcctcgtgccccgttacctctaaaaccctagcggggagccggggatgaagatccagtgcaacgcgtgcggggccgcggaggcgcgggtgctgtgctgcgcggacgaggccccgctctgcgtcgcctgcgacgaggaggtgcacgccgccaacaagctcgccgggaagcaccagcgggtgccgctcctgacggacgccgccgtcgctgccgccgcggcggccccggccgtgcccaagtgcgacatctgtcaggaggcttctggatacttcttctgcctagaggaccgtgcactactttgtagagactgtgatgttgctatacacacagtgaattcctttgtttcagtacatcagagattcctgctaactggagttcaggtgggtcttgatcctgctgatccagttccacctattgctgaaaagcacgttaatgctgctggtggatcagtaaatcaaccagtgagacatcagccaaagagaagcccgacagttcaattttcagttgaagggagtgcttctgttcctactaaaaatgtaacaaatggagattgttcaaggcagaattttgtcccaacagccaggggagaagtggttgattggactatgaataatagtacaattcggtcagtagaatctccgcctaagtacatttcagaggaaagcccgacacttctgcaatctagccagaccacaacagtcttctccaaccaaattaatggcaacagtgatggggcctaccacttgtcattctcaggtggtaatgtgacagacagcctaccagattggcccgtggatgagttcttcagtaactcagaatatggtccaaactttggcttctccgagaatggttcttctaagggtgataacgctaagctggggggc

SEQ ID NO: 19954 - protein, 279 aa, Zea mays subsp. mays
  misc_feature (1)..(279): Ceres Seq. ID no. 12375831
MKIQCNACGAAEARVLCCADEAPLCVACDEEVHAANKLAGKHQRVPLLTDAAVAAAAAAPAVPKCDICQEASGYFFCLEDRALLCRDCDVAIHTVNSFVSVHQRFLLTGVQVGLDPADPVPPIAEKHVNAAGGSVNQPVRHQPKRSPTVQFSVEGSASVPTKNVTNGDCSRQNFVPTARGEVVDWTMNNSTIRSVESPPKYISEESPTLLQSSQTTTVFSNQINGNSDGAYHLSFSGGNVTDSLPDWPVDEFFSNSEYGPNFGFSENGSSKGDNAKLGG

SEQ ID NO: 19955 - DNA, 1101 bp, Zea mays subsp. mays
  misc_feature (1)..(1101): Ceres Seq. ID no. 12375844
gcacgagaccattacctagaacatcctaatcgaaaaacatccctcaaccggtatgtgtttcgtgccaactgctgtaggaagtaggatccagcagtctgcaaggtgtccaaagaaaacaacacggcaggagtgaagatctctgataggatgacttcagtgtctgaatcaacacttgtgctggcttcaggtgcatcaatgttaccgcatcctgcgaaggtacggacaggtggtgaagatgcatattttatagcttgtgatggctggtttggtgtagcagatggagttggtcagtggtcatttgaagggatcaatgccggactttatgccagagaactaatggatggctgcaaaaagatcgtggaagagacccaaggagctccggggatgagaaccgaggaagttcttgccaaggctgcagatgaagcacggtcccctggttcttccactgttttagttgctcactttgatggcaaggtccttcacgcatcaaacatcggagattctggattcctcgtgattaggaacggaggggtccataagaaatcaaacccaatgacttacggtttcaatttcccgttgcagattgagaagggcgacgaccctctaaaacttgtacagaaatacgccatctgtctacaagaaggcgacgtcgttgtaacagcgtcagacggtcttttcgacaacgtctacgaggaagaagtagcaggcatcgtctccaaatcattagaagctgatctgaagcccacggaaatggccgatttactggttgcccgagcgaaggaggtggggcggtgtgggtttggaaggagcccgttctcggactcggctctcgcggctgggtacctgggctactccggcggcaagctggatgatgtaacggttgttgtatcgattgttcggaaatctgaagtttaataaactagaaacgaactctcaaagttgagcgcacttcttatttttttcttcttctttttctcttcttgcaacagctgcactcgctggcaaaatgcccgtgagcatttcgcacgtccctggcctacgcgcccaggcgcattgcgaaacgtgtattgtgtacacttgatacatactataaggttgtat

SEQ ID NO: 19956 - protein, 255 aa, Zea mays subsp. mays
  misc_feature (1)..(255): Ceres Seq. ID no. 12375845
MTSVSESTLVLASGASMLPHPAKVRTGGEDAYFIACDGWFGVADGVGQWSFEGINAGLYARELMDGCKKIVEETQGAPGMRTEEVLAKAADEARSPGSSTVLVAHFDGKVLHASNIGDSGFLVIRNGGVHKKSNPMTYGFNFPLQIEKGDDPLKLVQKYAICLQEGDVVVTASDGLFDNVYEEEVAGIVSKSLEADLKPTEMADLLVARAKEVGRCGFGRSPFSDSALAAGYLGYSGGKLDDVTVVVSIVRKSEV

SEQ ID NO: 19957 - protein, 239 aa, Zea mays subsp. mays
  misc_feature (1)..(239): Ceres Seq. ID no. 12375846
MLPHPAKVRTGGEDAYFIACDGWFGVADGVGQWSFEGINAGLYARELMDGCKKIVEETQGAPGMRTEEVLAKAADEARSPGSSTVLVAHFDGKVLHASNIGDSGFLVIRNGGVHKKSNPMTYGFNFPLQIEKGDDPLKLVQKYAICLQEGDVVVTASDGLFDNVYEEEVAGIVSKSLEADLKPTEMADLLVARAKEVGRCGFGRSPFSDSALAAGYLGYSGGKLDDVTVVVSIVRKSEV

SEQ ID NO: 19958 - protein, 192 aa, Zea mays subsp. mays
  misc_feature (1)..(192): Ceres Seq. ID no. 12375847
MDGCKKIVEETQGAPGMRTEEVLAKAADEARSPGSSTVLVAHFDGKVLHASNIGDSGFLVIRNGGVHKKSNPMTYGFNFPLQIEKGDDPLKLVQKYAICLQEGDVVVTASDGLFDNVYEEEVAGIVSKSLEADLKPTEMADLLVARAKEVGRCGFGRSPFSDSALAAGYLGYSGGKLDDVTVVVSIVRKSEV

SEQ ID NO: 19959 - DNA, 1107 bp, Zea mays subsp. mays
  misc_feature (1)..(1107): Ceres Seq. ID no. 12376269
gacgacggcgacgcttcagttgagtgcgggtgtagtgctcctgcgacttcggcctgtccactttttagggggcgccgaggggcgtgggggtacggccgtccgcacaataatctgcgctgcgcggaagaagggaaggggaaaagcagttaagcttgagcgcgcgcgacagggtcaagtcgagggccggggaatcgccggagaatggaggtgggcagggctccgcgacgacgggtgtccccagcagcggcggcggcggctgtgccttcgctgcttctgttcgccgttctattcgcgggccgggcggcggcgttcggccacctgcaagccgccggcgccggcgcgacggcgctgtacaagcacgcgtcgttcttcgaccgcgacggcgacggcgtcgtctccttctcggagacgtacggcgcgtttcgggcactcgggtttggattcggcctgtccagcgtcagcgctgcgctcatcaacggcgctcttggtagcaagtgcagacctcaaaatgcaacgtcatcgaagttggatatctacatagaggacatccagaaagggaaacatggaagcgattcagggtcatacgacgccgaaggaaggtttgttcctgacaagttcgaagagatattcgccaagcacgccaagactgtcccagacgccctgacgtcggacgagatcgaccagctgctccaggcgaacagagagcccggggactacagcggatgggctggcgcagaagcggagtggaagaccctctacagcctcggcaaggacaaggacggcctcctccgcaaggacgtcgcgagaagcgtctacgacgggacactgttccacatgctcgcgcccaactggaaatctcccgacgaggaggaggaacaggaactaagcgtgatccgggagagctgaaccgagaggtacaagcaaagtctggttgagagataaggactctgggaccctctgaacatgctgtcaagcaacatgtactactagctaagtttttacaatatatattcttattgtgtaattaaactttaaatgggttaatttcacaattaaaatcattgaaagggaaatagttttaaaactatttcttatattttggtgctc

SEQ ID NO: 19960 - protein, 234 aa, Zea mays subsp. mays
  misc_feature (1)..(234): Ceres Seq. ID no. 12376270
MEVGRAPRRRVSPAAAAAAVPSLLLFAVLFAGRAAAFGHLQAAGAGATALYKHASFFDRDGDGVVSFSETYGAFRALGFGFGLSSVSAALINGALGSKCRPQNATSSKLDIYIEDIQKGKHGSDSGSYDAEGRFVPDKFEEIFAKHAKTVPDALTSDEIDQLLQANREPGDYSGWAGAEAEWKTLYSLGKDKDGLLRKDVARSVYDGTLFHMLAPNWKSPDEEEEQELSVIRES

SEQ ID NO: 19961 - protein, 179 aa, Zea mays subsp. mays
  misc_feature (1)..(179): Ceres Seq. ID no. 12376271
TTATLQLSAGVVLLRLRPVHFLGGAEGRGGTAVRTIICAARKKGRGKAVKLERARQGQVEGRGIAGEWRWAGLRDDGCPQQRRRRLCLRCFCSPFYSRAGRRRSATCKPPAPARRRCTSTRRSSTATATASSPSRRRTARFGHSGLDSACPASALRSSTALLVASADLKMQRHRSWIST

SEQ ID NO: 19962 - DNA, 1101 bp, Zea mays subsp. mays
  misc_feature (1)..(1101): Ceres Seq. ID no. 12376272
aagacaccgttatacgctactgtggttggcgacgcggcgaacatcatactggacccgattttgatgtttgtttgccatatgggcgtcactggtgcggctattgctcatgttgtttctcagtacatgataacgttgatactgctgtgccggctcgtccagcgagttcacgttatcccacccagcattaaatctctgaaatttgggaggtttcttggatgtggattcctgctgctcgcaagggttgtcgcggtgacgttctgcgtcacgctggcggcgtccctggccgctcgccatggacccaccgtcatggcaggcttccagatctgctgccagctctggctggcccacgtctcttctcgccgatggattggccgtggcaggacaggcggtgcttgcaagcgcgttcgccaagaacgacagtaagaaggtcgctgccgcgacatcccgtgtgttgcagctgagcattgtcctgggcatgggtctcaccgtcgtgctgggacttgctatgaggttcggggctggcattttcacaagcgacgtgcccgtgatccaagtcattcacagaggcatcccgtttgtcgccgggacgcagaccatcaattccctggccttcgtgtttgatggcatcaactttggaacgtcagactacagatactctgcttactccatggttgctgttgcgtctgtgtcgataccatgcctgctgtacctttctgcgcataacggattcatcggtatatggatcgcattgacgatctacatgagtctgaggaccatagctagcacctggaggatgggggcagcgaggggaccatggacgtttctccggaactgatgatggattggcttggaactgatgatctgcggcacactgctgacagataaggctgcgccgcgctgcgcatgcgcctctcatgtagcatcagcgaagtatagtacgtgttctgctggtgtttaaagcttcggatatcggaggtagatgtagctatgggactatcccctcctgatcgtctgacttgtggccttgcgtggagagtttacgttgctccgttgatttatgttgtatcatgccaggatgtcagtttaataccatacatcggt

SEQ ID NO: 19963 - protein, 180 aa, Zea mays subsp. mays
  misc_feature (1)..(180): Ceres Seq. ID no. 12376273
MDPPSWQASRSAASSGWPTSLLADGLAVAGQAVLASAFAKNDSKKVAAATSRVLQLSIVLGMGLTVVLGLAMRFGAGIFTSDVPVIQVIHRGIPFVAGTQTINSLAFVFDGINFGTSDYRYSAYSMVAVASVSIPCLLYLSAHNGFIGIWIALTIYMSLRTIASTWRMGAARGPWTFLRN

SEQ ID NO: 19964 - protein, 140 aa, Zea mays subsp. mays
  misc_feature (1)..(140): Ceres Seq. ID no. 12376274
KTPLYATVVGDAANIILDPILMFVCHMGVTGAAIAHVVSQYMITLILLCRLVQRVHVIPPSIKSLKFGRFLGCGFLLLARVVAVTFCVTLAASLAARHGPTVMAGFQICCQLWLAHVSSRRWIGRGRTGGACKRVRQERQ

SEQ ID NO: 19965 - protein, 119 aa, Zea mays subsp. mays
  misc_feature (1)..(119): Ceres Seq. ID no. 12376275
MFVCHMGVTGAAIAHVVSQYMITLILLCRLVQRVHVIPPSIKSLKFGRFLGCGFLLLARVVAVTFCVTLAASLAARHGPTVMAGFQICCQLWLAHVSSRRWIGRGRTGGACKRVRQERQ

SEQ ID NO: 19966 - DNA, 1191 bp, Zea mays subsp. mays
  misc_feature (1)..(1191): Ceres Seq. ID no. 12376280
gcacgagaccattacctagaacatcctaatcgaaaaattccattgacttgacacgctataaaatcccagctccatggccgcaaaccagcagctgcagcatcagcatcgttccatccatccatcctactatccagcttcagcccgggccagccgctccacagcagcaagcaagcaaggctgagaacgaacgaagcagcccgcatccgcatccatggccgccgtgctggtggcgaggcaggggcgcgagctgcagcggtacagccagagcacgggcgggcgcatcgtggtgggctgcatcccgtaccgcgtgcggcgcgacggcgagctggaggtgctggtgatcacgtcccagaaggggcacggcatgatgttccccaagggcgggtgggaggtggacgagtccatggacgaggccgcccggcgcgaggccctcgaggaggccggcgtgctcggcgacaccgagccggtcctcggcctctggcactacaagagccgccgctacgtggaccagacctacgagggcttcatgttcccgctccgcgtcgccgacgagctccaccagtggcccgagatggcgtcccgcaagcgcacctgggcaacggtgcagcaggcgatggacgggtgcccgcactggtggatgcgcgaggcgctggagcggctcgtcgcgcggcaagccgtgctgcagtctgccctctgatcgccgtcatcgactggggtaacaacagaggcggggaggcgcgaggcaccatgtgcgcacgccgccacggctctctctctctctctgtctcggtgcagcggcaggccggccggcccggcgttccgggtctggaatttggtcgccctcaccgggagagtcgaacggcgcgccgcgcggctcgtgtgctctggcgatgctttcttgtgaccccccctgaccccgaggcgcggagtcgtcgttggcaaataaaatcatcagatcgtttttagagggcggatggtttagacgaaatggaaaacaaaatctgaactggacgcctagtggaaggaaaagaaaaggaatagaacagcagcgcgaaacaattcggcgattctttcgagtaactgcacaaattgtaaaattttagtggtgactcgtttcttgaccttgggtggcaccgtggcagaattgttacgagctgttcaattcaaaaaagaagaagaagaaaaagtttc

SEQ ID NO: 19967 - protein, 161 aa, Zea mays subsp. mays
  misc_feature (1)..(161): Ceres Seq. ID no. 12376281
MAAVLVARQGRELQRYSQSTGGRIVVGCIPYRVRRDGELEVLVITSQKGHGMMFPKGGWEVDESMDEAARREALEEAGVLGDTEPVLGLWHYKSRRYVDQTYEGFMFPLRVADELHQWPEMASRKRTWATVQQAMDGCPHWWMREALERLVARQAVLQSAL

SEQ ID NO: 19968 - protein, 110 aa, Zea mays subsp. mays
  misc_feature (1)..(110): Ceres Seq. ID no. 12376282
MMFPKGGWEVDESMDEAARREALEEAGVLGDTEPVLGLWHYKSRRYVDQTYEGFMFPLRVADELHQWPEMASRKRTWATVQQAMDGCPHWWMREALERLVARQAVLQSAL

SEQ ID NO: 19969 - protein, 109 aa, Zea mays subsp. mays
  misc_feature (1)..(109): Ceres Seq. ID no. 12376283
MFPKGGWEVDESMDEAARREALEEAGVLGDTEPVLGLWHYKSRRYVDQTYEGFMFPLRVADELHQWPEMASRKRTWATVQQAMDGCPHWWMREALERLVARQAVLQSAL

SEQ ID NO: 19970 - DNA, 1323 bp, Zea mays subsp. mays
  misc_feature (1)..(1323): Ceres Seq. ID no. 12376296
attgcttcgaacccacttgatcgctgcgtcgtctcccgggccggccctcagcgagctctcccgtacgtgcgcagttctcggcacgctaccccttatataccccccggccgctctcgctctagatgcacaggcagtgacacgcgcgcataccgacggactaggtagctgctcatcagctatccagatcgttgctcctcccctcgccatcggccgcgcccgtgtcgggcggcgggaatgggacgccacgcgggctccggcggcggcgtgcagcagaagctgcgcaagggcctctggtcgcccgaggaagacgagaagctctacaaccacatcatccactacggcgtcgggtgctggagctccgtgcccaagctctcagggctgcagaggtgcggcaagagctgccgccttcggtggatcaactacctgcgccccgacctgaagcggggcagcttctcgcagcaggaggaggacgccatcgtcggcctccatgagatcctgggcaacagatggtcgcagatcgcgtcgcacttgccgggccgaacggacaacgagatcaagaacttctggaacagctgcctcaagaagaagctgcgccagcgcggcatcgaccccagcacccacaagcccatctccgccgacgcggcggcattggagcagccggcgtcgcgagaccgcaagccgtcgttggccacagccgccgctggtggcggcctcgatgtgaagcagcatcagcagcagcagcaggtgttcgacccgttcccgctgaccgacagcttcggcggcggcttcgacgacgcggccggcgccgcattgtacggccacatgggcggcggcggcaagcagcaggacgcggccgcgttcgtggactacagcagcgtgctggacgtgtcggagaacctgggctacggcgagagctccagcaacagcagcaacaactggaactgcgcgccggaggtgaacaacaacaacaatgcgctggacggcggcgacgcgccgctgcactgggcctccgagagcaaggccgcgcccttcgccggctacggcgccgaggagcagtcgctgctggagcacaagctccttccgcatttcgacttcgacatcggccgggccgccgtggtcggcgacttcagcctcgacttcttctgaagggttcttcagccctgcgggtataatcatcgatcgccgtgcccgtgtatgtactgtatcaaagccaattcatacggaacagtcgggagcttagagaccgcgctttgttaattctcctctagtcgtccttactcagcagctctcctcctttaacaatgttttgggcttcttcgtttc

SEQ ID NO: 19971 - protein, 303 aa, Zea mays subsp. mays
  misc_feature (1)..(303): Ceres Seq. ID no. 12376297
MGRHAGSGGGVQQKLRKGLWSPEEDEKLYNHIIHYGVGCWSSVPKLSGLQRCGKSCRLRWINYLRPDLKRGSFSQQEEDAIVGLHEILGNRWSQIASHLPGRTDNEIKNFWNSCLKKKLRQRGIDPSTHKPISADAAALEQPASRDRKPSLATAAAGGGLDVKQHQQQQQVFDPFPLTDSFGGGFDDAAGAALYGHMGGGGKQQDAAAFVDYSSVLDVSENLGYGESSSNSSNNWNCAPEVNNNNNALDGGDAPLHWASESKAAPFAGYGAEEQSLLEHKLLPHFDFDIGRAAVVGDFSLDFF

SEQ ID NO: 19972 - protein, 221 aa, Zea mays subsp. mays
  misc_feature (1)..(221): Ceres Seq. ID no. 12376298
MVADRVALAGPNGQRDQELLEQLPQEEAAPARHRPQHPQAHLRRRGGIGAAGVARPQAVVGHSRRWWRPRCEAASAAAAGVRPVPADRQLRRRLRRRGRRRIVRPHGRRRQAAGRGRVRGLQQRAGRVGEPGLRRELQQQQQQLELRAGGEQQQQCAGRRRRAAALGLREQGRALRRLRRRGAVAAGAQAPSAFRLRHRPGRRGRRLQPRLLLKGSSALRV

SEQ ID NO: 19973 - DNA, 986 bp, Zea mays subsp. mays
  misc_feature (1)..(986): Ceres Seq. ID no. 12376299
attcaagcatcgacagtcgacgctgcagcaggaagccaaagaggagagaatccatcgagtcgaccaccgagcacggtcagggcggcggggctcgccgtggccacagctcaggaatccaatcccccactcctcaccggcgcccgcggttttataaatagattccctcgtcactgtcgcggtcgcggcttgatcggattcaactcacctaccccaccccctcgattccttcccagctctggctacttcctacgccaccaccgcccgctccggcctcggctcctcgagcaagctgccatggctgccgccgcgctgagggagcaactcaacgctctcctctcctccatgttcgcctcgggtctggtggacgagcagttccagcagctgcagatgctgcaggaagacgggggcacgccgggcttcgtcgccgaggtcgtcaccctcttctgcgacgacgccgacaggatcatctccgagctcgccgctctgcttgaccagcccatcgtggactttgataaggtggacgcctacgtgcatcagctcaaagggagcagcgccagtgttggcgctcagaaagtgaagtttacttgcatgcagttccgtcagttatgtcaggataagaacagagacgggtgcatcatggcattggctgttgtgagaaatgagttctatgatctgcgcaataaattccagactatgcttcagcttgagcagcaaatccaggctcaacaataaatcgaagcagaaagcgtagctgcatgtggcctcacatgataagtgtatctttaaagatgtagaccatgttctctgtgttcctacaattgtgacaaaatcatcgtcgttgaggccggctcacatgcatgtaactgttagctataacaattattgtctaacgttgtccttgttactccacccgtttgtgttggattgccatcgaccatcatatgaaaacttttttttttccaatcccctccaatccatgtgggatg

SEQ ID NO: 19974 - protein, 243 aa, Zea mays subsp. mays
  misc_feature (1)..(243): Ceres Seq. ID no. 12376300
IQASTVDAAAGSQRGENPSSRPPSTVRAAGLAVATAQESNPPLLTGARGFINRFPRHCRGRGLIGFNSPTPPPRFLPSSGYFLRHHRPLRPRLLEQAAMAAAALREQLNALLSSMFASGLVDEQFQQLQMLQEDGGTPGFVAEVVTLFCDDADRIISELAALLDQPIVDFDKVDAYVHQLKGSSASVGAQKVKFTCMQFRQLCQDKNRDGCIMALAVVRNEFYDLRNKFQTMLQLEQQIQAQQ

SEQ ID NO: 19975 - protein, 145 aa, Zea mays subsp. mays
  misc_feature (1)..(145): Ceres Seq. ID no. 12376301
MAAAALREQLNALLSSMFASGLVDEQFQQLQMLQEDGGTPGFVAEVVTLFCDDADRIISELAALLDQPIVDFDKVDAYVHQLKGSSASVGAQKVKFTCMQFRQLCQDKNRDGCIMALAVVRNEFYDLRNKFQTMLQLEQQIQAQQ

SEQ ID NO: 19976 - protein, 129 aa, Zea mays subsp. mays
  misc_feature (1)..(129): Ceres Seq. ID no. 12376302
MFASGLVDEQFQQLQMLQEDGGTPGFVAEVVTLFCDDADRIISELAALLDQPIVDFDKVDAYVHQLKGSSASVGAQKVKFTCMQFRQLCQDKNRDGCIMALAVVRNEFYDLRNKFQTMLQLEQQIQAQQ

SEQ ID NO: 19977 - DNA, 904 bp, Zea mays subsp. mays
  misc_feature (1)..(904): Ceres Seq. ID no. 12376350
atacgaattttcgatttccatccgcaattttctgtgccttactaatagcactcggtagtagtagtagtgatccgaaagttgacaccattccccttgtgctttcttgccagtaacccatccatcggggatcaccaggggagcaagatgtcgactgccgccgccccaagattgcccgctcccagatccggggcaagctatcactatcagacgaccgcggctccggtggccaacaccctctccttcgccggccacgcgaggcaggcggcccgcgcgtccgggccacggctgtccagcaggttcgtggcgtccgcggcggccgtgctgcacaaggtgaagctggtcggcccggacgggacggagcacgagttcgaggcccccgacgacacctacatcctcgaggcggccgagaccgccggggtggagctgcccttctcctgccgcgccgggtcctgctccacctgcgccgggaggatgtcggccggcgaggtcgaccagtcggaggggtccttcctcgacgacggccagatggccgaggggtacctcctcacctgcatctcctaccccaaggcagactgcgtcatccacacccacaaggaggaggacctgtactagagattgggttgctttatgcatcagtggttgttccaaaggtggtggtgactggtgcgttcgttgctattccgtgccaccagcggaaggggggtttcgttgttgagatgggctagttcttgtcatcaatttcggtcattcgatgagatcatgtcatatgagttgtggcaataatgctggcaatatggttttgcaattcaaactgcaaatgtgaccagcaatgtcaaaaactgcacactgtgtctgtgtgcgaacttgtgaaattgacattgagttcaattagctagttggctcg

SEQ ID NO: 19978 - protein, 155 aa, Zea mays subsp. mays
  misc_feature (1)..(155): Ceres Seq. ID no. 12376351
MSTAAAPRLPAPRSGASYHYQTTAAPVANTLSFAGHARQAARASGPRLSSRFVASAAAVLHKVKLVGPDGTEHEFEAPDDTYILEAAETAGVELPFSCRAGSCSTCAGRMSAGEVDQSEGSFLDDGQMAEGYLLTCISYPKADCVIHTHKEEDLY

SEQ ID NO: 19979 - DNA, 1414 bp, Zea mays subsp. mays
  misc_feature (1)..(1414): Ceres Seq. ID no. 12376364
gcacgagaccattacctagaacatcctaatcgaaaaacacacaggtcgcaggcgcgcgcatccgcaccacggcgccccatccctcccgtcagcgtcgctgccctgcctgcctgcctgcgtccgctcgcaactgcaacgacagggaggcgcacgcgcggggagggagagagacaaaccgagaaaggcacggcacagctgcctgcctcggcacgcgctcgcgccctggtgactggtgaacactgaggactggaggcggtgggcgcggcgggtccagccaccgcgcggttcacggcgcgggcgaatgccggccgtttcaacggcgggcggatcggcctgttcccctggcgctgctggcccccctgggcggtgactgcgaggcccgatcctgaggcgggcggcgactccgagagggcggttggctggttttcttgccaagtgccagtcagtctctctcgtctcggcgacgccgcgcgaaggtcggaactcggaatcctcttcccggcgtcgtcatcccacccccgtcggttcccttctaactcctggctcctggggccgccgccgagccgaggagaggcgcacgcgcctcgggaatggagctggcgcctccgctccgcctacgggatccgagcctgggatggcttcctgcaacttgcgcaggtaacaaagctgctggaagaaccccattggactgggagaccagggtgaagatagctctgggcactgcacgcggaatggcttatcttcactccgtgggtagcggcgggaagttcattcacgggaacatcaagtcaagcaacatccttctctcacaggaactcggcgcctgcgtcaccgagttcggccttgcccagctcatgtccacgccccacgtccacccgcggctcgtcgggtaccggtcgcccgaggtcctcgagaccaggaaaccgacgcagaaatctgacgtctacagcttcggcgtcctcctcctcgagatgctcacaggcaaagcccctctcaggtcccccgggcgcgacgactccatcgaacacctcccgaggtgggtgcagtccgtggtccgggaggagtggacgtcggaggtcttcgacgtcgacctgctgaggcacccgaacctagaggacgagatggtccagatgctccacgtcgcgatggcatgcgtcgcggtcgtccccgacgagcggcctcggatggaggaggtggtcggcaggatcgaggagatccggagctcctactcggacacgaagacgtccccggaggacaatccgagggagggcgctttctaataaatcaccgagtaccacacgtaccggaacggcagtgacttgccgtctacagaaagtaggtcggttggtttgacagctctgtgtccagtgaagctttgcagtcagtcagttgattattcctgatcattctttgg

SEQ ID NO: 19980 - protein, 229 aa, Zea mays subsp. mays
  misc_feature (1)..(229): Ceres Seq. ID no. 12376365
MELAPPLRLRDPSLGWLPATCAGNKAAGRTPLDWETRVKIALGTARGMAYLHSVGSGGKFIHGNIKSSNILLSQELGACVTEFGLAQLMSTPHVHPRLVGYRSPEVLETRKPTQKSDVYSFGVLLLEMLTGKAPLRSPGRDDSIEHLPRWVQSVVREEWTSEVFDVDLLRHPNLEDEMVQMLHVAMACVAVVPDERPRMEEVVGRIEEIRSSYSDTKTSPEDNPREGAF

SEQ ID NO: 19981 - protein, 182 aa, Zea mays subsp. mays
  misc_feature (1)..(182): Ceres Seq. ID no. 12376366
MAYLHSVGSGGKFIHGNIKSSNILLSQELGACVTEFGLAQLMSTPHVHPRLVGYRSPEVLETRKPTQKSDVYSFGVLLLEMLTGKAPLRSPGRDDSIEHLPRWVQSVVREEWTSEVFDVDLLRHPNLEDEMVQMLHVAMACVAVVPDERPRMEEVVGRIEEIRSSYSDTKTSPEDNPREGAF

SEQ ID NO: 19982 - protein, 141 aa, Zea mays subsp. mays
  misc_feature (1)..(141): Ceres Seq. ID no. 12376367
MSTPHVHPRLVGYRSPEVLETRKPTQKSDVYSFGVLLLEMLTGKAPLRSPGRDDSIEHLPRWVQSVVREEWTSEVFDVDLLRHPNLEDEMVQMLHVAMACVAVVPDERPRMEEVVGRIEEIRSSYSDTKTSPEDNPREGAF

SEQ ID NO: 19983 - DNA, 1427 bp, Zea mays subsp. mays
  misc_feature (1)..(1427): Ceres Seq. ID no. 12376372
gcacgagaccattacctagaacatcctaatcgaaaaagtttcaaatctcaaatcctcatcgttctcctttccccaaaggccaaaaccgaccccgctccacgcctccactccagccccagcggatcttctcgagcggcggccggcgatggcagcgagcaacatcgggatgatggacggagcctacttcgtcgggcgcaacgagatcctcgcgtggatcaacactacgctgcacctcggcctctccaaggtggaggaggcggcgtcagtcgcggttgcgtgccaactgatggacgcggcgcatcccggcgccgtgccgatgcacaaggtcaacttcgacgccaagacggagtacgacatgatccagaactacaaggtcctgcaggatgtgttcaacaagctcaagatcactaagcatatagaggtgaacaagctaatcaaaggaagaccccttgacaatctggagttcatgcagtggatgaaacgatattgtgattctgtcaatggtggcttcatgagcagctacaatgcttctgagagaagggaaagcagcaaagggggaaaggagacgaacagaagggcatcggtgccctctcacacaccggccaagtctgcatccacaggtcacaaggctcaagcatcacatggcgctaagcgggcaagcgggcagacggcgggtgcaccacagcgcagtgctaagccatcacctgtagccaactctagtggaccagcttatgacgaacaaataactgagctgaagctccttgtggatagcctggagaaggagagagatttctacttttccaagctgcgggacattgagatcttgtgccaaaaccctgaggttgagcacgtgccggtccatgctatccagaacatactctacacatcagaggaggaccctcagcagcaggctccagccctgagccccatcatggaggcgtccgaggagaggccgaagcaagaggcggcgcacaagagaaagagcatctcggacctggacgagtttggtatgtcgtccagctcaaggcagaggctctccgacatctcggacgtgcagctgtgtggatccccgctgacgagtttcagctaaagaaactgtcatctctacaaaatgggtgtctcgtctttctgttggattggttcgtggtttcgtatttcatgtgttgtttggtggtgaactgtcgtgtgctcttagcaaagtgtgacacatttagccacgaaccaaacagcctcttagtctgtgaccagagcgcatgacctcgtctactaatttctctctcagaatcagcttttttttcgtacctattgcgcatcagttgatttttccttctctcttttctttttggccgtatttcatcaggttgcatataaaaaaagtaagatctactggttctggcgttcggctataatgggatctttgatcaggc

SEQ ID NO: 19984 - protein, 314 aa, Zea mays subsp. mays
  misc_feature (1)..(314): Ceres Seq. ID no. 12376373
MAASNIGMMDGAYFVGRNEILAWINTTLHLGLSKVEEAASVAVACQLMDAAHPGAVPMHKVNFDAKTEYDMIQNYKVLQDVFNKLKITKHIEVNKLIKGRPLDNLEFMQWMKRYCDSVNGGFMSSYNASERRESSKGGKETNRRASVPSHTPAKSASTGHKAQASHGAKRASGQTAGAPQRSAKPSPVANSSGPAYDEQITELKLLVDSLEKERDFYFSKLRDIEILCQNPEVEHVPVHAIQNILYTSEEDPQQQAPALSPIMEASEERPKQEAAHKRKSISDLDEFGMSSSSRQRLSDISDVQLCGSPLTSFS

SEQ ID NO: 19985 - protein, 307 aa, Zea mays subsp. mays
  misc_feature (1)..(307): Ceres Seq. ID no. 12376374
MMDGAYFVGRNEILAWINTTLHLGLSKVEEAASVAVACQLMDAAHPGAVPMHKVNFDAKTEYDMIQNYKVLQDVFNKLKITKHIEVNKLIKGRPLDNLEFMQWMKRYCDSVNGGFMSSYNASERRESSKGGKETNRRASVPSHTPAKSASTGHKAQASHGAKRASGQTAGAPQRSAKPSPVANSSGPAYDEQITELKLLVDSLEKERDFYFSKLRDIEILCQNPEVEHVPVHAIQNILYTSEEDPQQQAPALSPIMEASEERPKQEAAHKRKSISDLDEFGMSSSSRQRLSDISDVQLCGSPLTSFS

SEQ ID NO: 19986 - protein, 306 aa, Zea mays subsp. mays
  misc_feature (1)..(306): Ceres Seq. ID no. 12376375
MDGAYFVGRNEILAWINTTLHLGLSKVEEAASVAVACQLMDAAHPGAVPMHKVNFDAKTEYDMIQNYKVLQDVFNKLKITKHIEVNKLIKGRPLDNLEFMQWMKRYCDSVNGGFMSSYNASERRESSKGGKETNRRASVPSHTPAKSASTGHKAQASHGAKRASGQTAGAPQRSAKPSPVANSSGPAYDEQITELKLLVDSLEKERDFYFSKLRDIEILCQNPEVEHVPVHAIQNILYTSEEDPQQQAPALSPIMEASEERPKQEAAHKRKSISDLDEFGMSSSSRQRLSDISDVQLCGSPLTSFS

SEQ ID NO: 19987 - DNA, 1485 bp, Zea mays subsp. mays
  misc_feature (1)..(1485): Ceres Seq. ID no. 12376376
aattcctaaacaaacgaacgcattctcctcccaaaccaccagacatattgcagtctgccgtagaagtgaaagggtttggtgaaaaattccggccgcctcagcgtcgcgaggtgggggacgagacgaagccagagcgccccaaacccaaaccccagaaccccgacatagggttacgccatcgccatgggatctgttgcctccgcagcagcgccaccttctcctcactcagcgctaccccaggagggcgcgccgccctatggccccgggctcgccgggatcctcccgcagacgtcagtgggagaggagaagaaggaggagaaggtggactacctcaacctcctctgccccgtgcccttcgaggagatccagcgcgaggctctcatgtctttgaagcctgaactttttgaaggattgaggtttgacttcacaaaagggttgaatcaaaagttttctcttagccacagcgtttttatgggctccttagaagttccagcccaggggtctgaaactattaaagttccaactgctcattatgaatttggtgccaattttttagatccaaagttaatgctcattggaagggtgatgacagatggaaggcttaatgctcgcgtgaaatgtgatttgacagacaatctgatgctgaaagtaaatgcacagcttacccaagaggcacattactcacaaggaatgtttaactttgactacaagggaagtgactatcgagcacaattccaaatagggaacaatgcattctatggtgcaaattatattcagagtgttactccgaacctatcaatgggaactgaaatgttctggcttggtcaccaaaggaagtctggaattggttttgcctgtcgctataacacggacaaaatggtgggcactctacaggtcgcaagcactggaatagttgccttaagttatgtccagaagatttctgagaaggtttcccttgcgtctgatttcatgtataaccatatgtcaagagacgtaacttccagctttggttacgattacttgcttaggcagtgccgtctaagaggcaaaattgactcgaatggtgttgttgcggcatatctggaggagaggttgaacatgggtgtcaactttcttctatctgctgagattgaccattgtaagaagaactacaagtttggtttcggaatgaccgtaggagagtaattctgctaaaacaattgctgagaagagcacatgaggactttcgcagtctgctttgcattgtatgttaagatacttcaggtctcagttttgattgatcaggttctgccccgtcgaaaaaatactagctgttgctgctttacagggttttgtctcagtgtattggtggttgtttattttcagctacttgagcatgggggccatgattctttgttcatcttggatgtaactagctgattggtgttccaatgaaaaaaaaaaaaaaaaaaaaaaaaaaaaaaaaaaaaaaaaaaaaaaaataaa

SEQ ID NO: 19988 - protein, 333 aa, Zea mays subsp. mays
  misc_feature (1)..(333): Ceres Seq. ID no. 12376377
MGSVASAAAPPSPHSALPQEGAPPYGPGLAGILPQTSVGEEKKEEKVDYLNLLCPVPFEEIQREALMSLKPELFEGLRFDFTKGLNQKFSLSHSVFMGSLEVPAQGSETIKVPTAHYEFGANFLDPKLMLIGRVMTDGRLNARVKCDLTDNLMLKVNAQLTQEAHYSQGMFNFDYKGSDYRAQFQIGNNAFYGANYIQSVTPNLSMGTEMFWLGHQRKSGIGFACRYNTDKMVGTLQVASTGIVALSYVQKISEKVSLASDFMYNHMSRDVTSSFGYDYLLRQCRLRGKIDSNGVVAAYLEERLNMGVNFLLSAEIDHCKKNYKFGFGMTVGE

SEQ ID NO: 19989 - protein, 267 aa, Zea mays subsp. mays
  misc_feature (1)..(267): Ceres Seq. ID no. 12376378
MSLKPELFEGLRFDFTKGLNQKFSLSHSVFMGSLEVPAQGSETIKVPTAHYEFGANFLDPKLMLIGRVMTDGRLNARVKCDLTDNLMLKVNAQLTQEAHYSQGMFNFDYKGSDYRAQFQIGNNAFYGANYIQSVTPNLSMGTEMFWLGHQRKSGIGFACRYNTDKMVGTLQVASTGIVALSYVQKISEKVSLASDFMYNHMSRDVTSSFGYDYLLRQCRLRGKIDSNGVVAAYLEERLNMGVNFLLSAEIDHCKKNYKFGFGMTVGE

SEQ ID NO: 19990 - protein, 237 aa, Zea mays subsp. mays
  misc_feature (1)..(237): Ceres Seq. ID no. 12376379
MGSLEVPAQGSETIKVPTAHYEFGANFLDPKLMLIGRVMTDGRLNARVKCDLTDNLMLKVNAQLTQEAHYSQGMFNFDYKGSDYRAQFQIGNNAFYGANYIQSVTPNLSMGTEMFWLGHQRKSGIGFACRYNTDKMVGTLQVASTGIVALSYVQKISEKVSLASDFMYNHMSRDVTSSFGYDYLLRQCRLRGKIDSNGVVAAYLEERLNMGVNFLLSAEIDHCKKNYKFGFGMTVGE

SEQ ID NO: 19991 - DNA, 1870 bp, Zea mays subsp. mays
  misc_feature (1)..(1870): Ceres Seq. ID no. 12376390
aaatcctcgcttccctcccccacgtcgcgtccgatcggcgacggtgcgccatgtcgatgctggacaccttcttcagcaagggcggcggcggcggcttccgcggcgccaagtgcaagacgctgctgaagctgtcgatcccgcggataaagctgctgcgggaaccggcgggagctgcagctgcgccagatgcgccgggacatcgccaagctcctagaggccggccaggaggccactgcccggatcagggtggagcacatcatccgggaggagaacatgatggccgcgcaggagatcctcgagctcttctgcgagctcatcgcggttcgcctgcccatcatcgaggcccaaaaggagtgtcctattgatctcaaagaagcaatatcaagtgtctgttttgccgctccaagatgtgcagatctacctgaactgatgcaagttcaaatgatgtttgcaactaaatatgggaaggaatttgtcgctgcagcttcagagttgatgcctgattgtggggtcaatcgtcagataattgaattgctttctattcgtcctcctcctgttgatgcaaagttgaaactgctgaaggagatagctgaggaacatgaagttgattgggatccatcagagacagagacagaatttctcaaacctcatgaagatctattgaatggaccgacctacttcaatgtatccacactacctcttcccaaggagaaacatgaggaaacagtagttgcaagtgctgccgagcagcctgatgaagactatgagtcagataccggtcttgactcactggatttgcctgaagtcccaaaagctgcaattcgtccaccttctgacgcaccattgaccccagatatttgcccacatgttcagggctctcagtcacttcctcatgagttctcagatcctggtaacttggaggagaatccaacagctggtggtgcttttaatgttattcagatgaaaagcttggagcatcttgtttatgcaccatctgatcagtcaaacataccggatttgccaaatgaaaagaagcagtttattccttttgcatctccaccgcccgttctttctccttcggtgggaaaagccgagacagttccctcaccttctctgtctcctccagtgaagccgacagagccagaaccagaaatcctcacaaagaaaattgatgaagtgaccacacctccagtacttccctcagattatattttcacaaaacagccagaacaagtgcggacaatctctccttctgagagtggggcaaatattgacttggacgacgttttatctgctgcgcagacagctgctgaatcagctgagcgagctgcatcagcagcccgtgctgctgcaaaccttgcacaactgcgcatttcagacctgaaagaagaattccaaggtttatagcaattacggtgatagcgtccaaaaggaaagccatcatcagactgaggcgacacaggaaccggtatttgatcaccaggactccttcaccaatgatacacaggactatgtgtcatcccatgtgccgcagaggtcgtcatctttggaggacgatccatatttctcgtatcccaacttgttctcagcgccaaagccctgaaggcggaaactagtggtctgcaagtagttgttcagaatagtctgaaacatgagatatcactttttcagctctgtccggtcctcttatgtttggtcttttctgatgcctccgaaaattctgtttatgttgagttggtacatagcggacaaaagggagactatgaaacctctgtctagttttgtctctgtaaattgtacatgtgcggtgtttgtatcagttgtctgaaacatttctgcagtctactggtaataacagaaattgaatctc

SEQ ID NO: 19992 - protein, 406 aa, Zea mays subsp. mays
  misc_feature (1)..(406): Ceres Seq. ID no. 12376391
MRRDIAKLLEAGQEATARIRVEHIIREENMMAAQEILELFCELIAVRLPIIEAQKECPIDLKEAISSVCFAAPRCADLPELMQVQMMFATKYGKEFVAAASELMPDCGVNRQIIELLSIRPPPVDAKLKLLKEIAEEHEVDWDPSETETEFLKPHEDLLNGPTYFNVSTLPLPKEKHEETVVASAAEQPDEDYESDTGLDSLDLPEVPKAAIRPPSDAPLTPDICPHVQGSQSLPHEFSDPGNLEENPTAGGAFNVIQMKSLEHLVYAPSDQSNIPDLPNEKKQFIPFASPPPVLSPSVGKAETVPSPSLSPPVKPTEPEPEILTKKIDEVTTPPVLPSDYIFTKQPEQVRTISPSESGANIDLDDVLSAAQTAAESAERAASAARAAANLAQLRISDLKEEFQGL

SEQ ID NO: 19993 - protein, 377 aa, Zea mays subsp. mays
  misc_feature (1)..(377): Ceres Seq. ID no. 12376392
MMAAQEILELFCELIAVRLPIIEAQKECPIDLKEAISSVCFAAPRCADLPELMQVQMMFATKYGKEFVAAASELMPDCGVNRQIIELLSIRPPPVDAKLKLLKEIAEEHEVDWDPSETETEFLKPHEDLLNGPTYFNVSTLPLPKEKHEETVVASAAEQPDEDYESDTGLDSLDLPEVPKAAIRPPSDAPLTPDICPHVQGSQSLPHEFSDPGNLEENPTAGGAFNVIQMKSLEHLVYAPSDQSNIPDLPNEKKQFIPFASPPPVLSPSVGKAETVPSPSLSPPVKPTEPEPEILTKKIDEVTTPPVLPSDYIFTKQPEQVRTISPSESGANIDLDDVLSAAQTAAESAERAASAARAAANLAQLRISDLKEEFQGL

SEQ ID NO: 19994 - protein, 376 aa, Zea mays subsp. mays
  misc_feature (1)..(376): Ceres Seq. ID no. 12376393
MAAQEILELFCELIAVRLPIIEAQKECPIDLKEAISSVCFAAPRCADLPELMQVQMMFATKYGKEFVAAASELMPDCGVNRQIIELLSIRPPPVDAKLKLLKEIAEEHEVDWDPSETETEFLKPHEDLLNGPTYFNVSTLPLPKEKHEETVVASAAEQPDEDYESDTGLDSLDLPEVPKAAIRPPSDAPLTPDICPHVQGSQSLPHEFSDPGNLEENPTAGGAFNVIQMKSLEHLVYAPSDQSNIPDLPNEKKQFIPFASPPPVLSPSVGKAETVPSPSLSPPVKPTEPEPEILTKKIDEVTTPPVLPSDYIFTKQPEQVRTISPSESGANIDLDDVLSAAQTAAESAERAASAARAAANLAQLRISDLKEEFQGL

SEQ ID NO: 19995 - DNA, 1202 bp, Zea mays subsp. mays
  misc_feature (1)..(1202): Ceres Seq. ID no. 12376402
gacgtccagcccgtcacaaaaggcccatctcactgaagagatacgctggtcggctggtgggcgcgtggcttgtgggccgtgggcttcttcgctgttcgtcgtctcgtcaccactcaccattgtcgacgcaagctgcgactgaacctccgtggcgacggaggagacggccatggtggcagcgatggagctcgagatcctaggcatgaatttcgggtgcgtcctcgcggctctgtccgacgccaagatccccgacaaggactgcctgctcccgctcatctctaagctgctcggctacgccatcgtcgccgcatccaccaccgtgaagcttccccagatactgaaaattttgaagcatggaagtgttagaggactaagtgtggcatcctttgaacttgaggttgtcggctacacaattgctttggcatattgtattcataaaggacttcccttttcagcttatggggagctagcttttctgttaatccaagcaattattttggttgcaatcatttactattactcaccaccaatgggaaccaaaacatggatgaaagctttattatattgtggaatggctccaacggttttggctggaaaaatagatcctgctctttttgaagtcctttatgcttcacagcatgctatcttcttttttgctagagttccacaaatatggaagaattttacgaataaagggaccggcgagctaagcttccttacctgtttcatgaactttgctggttccatcgtaagagtttttaccagcatccaggagaagactcccttaagtgtgatcatgggctccgcaatcggcatcgtcatgaatggtacgctcttgggtcagatagtactgtaccagaagcccgctccgaagaaacagaagaaagaagattaagcaacatggagaagctgcggaaagttcttcctggttgtttaggattctgttgcaacactcgctccacatctgaacaaatggcaccagtataggaagttgttggcaacttgttacgagaaaagaacatagttggactattgctatataacaacatttctgtgctgttgtttttagcacttagtagtgtaccatgacttgagtagttcatacaactgcctttagatattgactgcaagctgctgctgatgtgttttcctttctgctgtgccgttccatattttagtttgagttaaatgcatgaaagttt

SEQ ID NO: 19996 - protein, 241 aa, Zea mays subsp. mays
  misc_feature (1)..(241): Ceres Seq. ID no. 12376403
MVAAMELEILGMNFGCVLAALSDAKIPDKDCLLPLISKLLGYAIVAASTTVKLPQILKILKHGSVRGLSVASFELEVVGYTIALAYCIHKGLPFSAYGELAFLLIQAIILVAIIYYYSPPMGTKTWMKALLYCGMAPTVLAGKIDPALFEVLYASQHAIFFFARVPQIWKNFTNKGTGELSFLTCFMNFAGSIVRVFTSIQEKTPLSVIMGSAIGIVMNGTLLGQIVLYQKPAPKKQKKED

SEQ ID NO: 19997 - protein, 237 aa, Zea mays subsp. mays
  misc_feature (1)..(237): Ceres Seq. ID no. 12376404
MELEILGMNFGCVLAALSDAKIPDKDCLLPLISKLLGYAIVAASTTVKLPQILKILKHGSVRGLSVASFELEVVGYTIALAYCIHKGLPFSAYGELAFLLIQAIILVAIIYYYSPPMGTKTWMKALLYCGMAPTVLAGKIDPALFEVLYASQHAIFFFARVPQIWKNFTNKGTGELSFLTCFMNFAGSIVRVFTSIQEKTPLSVIMGSAIGIVMNGTLLGQIVLYQKPAPKKQKKED

SEQ ID NO: 19998 - protein, 230 aa, Zea mays subsp. mays
  misc_feature (1)..(230): Ceres Seq. ID no. 12376405
MNFGCVLAALSDAKIPDKDCLLPLISKLLGYAIVAASTTVKLPQILKILKHGSVRGLSVASFELEVVGYTIALAYCIHKGLPFSAYGELAFLLIQAIILVAIIYYYSPPMGTKTWMKALLYCGMAPTVLAGKIDPALFEVLYASQHAIFFFARVPQIWKNFTNKGTGELSFLTCFMNFAGSIVRVFTSIQEKTPLSVIMGSAIGIVMNGTLLGQIVLYQKPAPKKQKKED

SEQ ID NO: 19999 - DNA, 1368 bp, Zea mays subsp. mays
  misc_feature (1)..(1368): Ceres Seq. ID no. 12376414
acgggtgctccaaacaactgcactagacatctcaattaattagctaatgagcaagcggctgagctgcactcaagacaaactaccatggatcagtcaaacattagcaacaagcacataacgatgacaaccctaatgctcctcctctgtgtcatagccattgcagactgcatttgccaagccgcagtggcagcccgggtggagccatccaccaccgtcggcagaactacaggaggagacgaggcgatgatgatggcgaggtacaagaagtggatggcgcagtatcgccggaagtacaaggacgacgccgagaaagcacaccgtttccaggtattcaaggcgaacgcggagtttattgacaggtctaacgctggaggcaagaagaagtacgtcctagggaccaaccagtttgccgacctgaccagcaaagagttcgcggccatgtacaccggtttgaggaaaccggcggcggtgccttccggggccaagcagatccctgcaggtttcaagtaccagaattttacgcgcctagatgatgatgtccaggttgattggaggcagcagggtgctgtcactcctgtcaagaaccaaggccaatgtggctgttgctgggcgttctctgcagtaggtgccatggaaggtttgatcatgataacgacaggaaacctggtttccctgtcggagcagcagattctagactgcgacgagtcagacgggaaccagggctgcaacggtggctacatggacaacgccttccagtacgtcgtcaacaatggcggcgtcactactgaggacgcctacccttactctgcagtccaagggacgtgccaaaacgtccagccagccgccaccatcagcggcttccaggacctgcccagcggcgacgagaacgcgctcgccaacgcagtcgccaaccagccggtgtctgttggcgtcgacggcggatcgagtcctttccagttttaccagggtggcatatacgacggggatggctgtggcacggacatgaaccatgcagtgacggcgatcggctacggcgccgatgaccagggaacccagtactggatcctcaagaactcctggggcacaggatggggtgagaacggtttcatgcagctacagatgggcgtcggcgcctgtggtatctccacgatggcctcctacccaactccatgaacacaaatcttcagataaagcatagtatatatcagtccatgcgtatgactgcagaataaagcatggaagattaattacatgcgtgcatcaaggcatgctacgtactgtattaaaacttcggtactggccagatatatgtacaaaggtagaatgttcgtgtgataatataaaagttcgtaatgcttgtacgaatgc

SEQ ID NO: 20000 - protein, 362 aa, Zea mays subsp. mays
  misc_feature (1)..(362): Ceres Seq. ID no. 12376415
MDQSNISNKHITMTTLMLLLCVIAIADCICQAAVAARVEPSTTVGRTTGGDEAMMMARYKKWMAQYRRKYKDDAEKAHRFQVFKANAEFIDRSNAGGKKKYVLGTNQFADLTSKEFAAMYTGLRKPAAVPSGAKQIPAGFKYQNFTRLDDDVQVDWRQQGAVTPVKNQGQCGCCWAFSAVGAMEGLIMITTGNLVSLSEQQILDCDESDGNQGCNGGYMDNAFQYVVNNGGVTTEDAYPYSAVQGTCQNVQPAATISGFQDLPSGDENALANAVANQPVSVGVDGGSSPFQFYQGGIYDGDGCGTDMNHAVTAIGYGADDQGTQYWILKNSWGTGWGENGFMQLQMGVGACGISTMASYPTP

SEQ ID NO: 20001 - protein, 350 aa, Zea mays subsp. mays
  misc_feature (1)..(350): Ceres Seq. ID no. 12376416
MTTLMLLLCVIAIADCICQAAVAARVEPSTTVGRTTGGDEAMMMARYKKWMAQYRRKYKDDAEKAHRFQVFKANAEFIDRSNAGGKKKYVLGTNQFADLTSKEFAAMYTGLRKPAAVPSGAKQIPAGFKYQNFTRLDDDVQVDWRQQGAVTPVKNQGQCGCCWAFSAVGAMEGLIMITTGNLVSLSEQQILDCDESDGNQGCNGGYMDNAFQYVVNNGGVTTEDAYPYSAVQGTCQNVQPAATISGFQDLPSGDENALANAVANQPVSVGVDGGSSPFQFYQGGIYDGDGCGTDMNHAVTAIGYGADDQGTQYWILKNSWGTGWGENGFMQLQMGVGACGISTMASYPTP

SEQ ID NO: 20002 - protein, 346 aa, Zea mays subsp. mays
  misc_feature (1)..(346): Ceres Seq. ID no. 12376417
MLLLCVIAIADCICQAAVAARVEPSTTVGRTTGGDEAMMMARYKKWMAQYRRKYKDDAEKAHRFQVFKANAEFIDRSNAGGKKKYVLGTNQFADLTSKEFAAMYTGLRKPAAVPSGAKQIPAGFKYQNFTRLDDDVQVDWRQQGAVTPVKNQGQCGCCWAFSAVGAMEGLIMITTGNLVSLSEQQILDCDESDGNQGCNGGYMDNAFQYVVNNGGVTTEDAYPYSAVQGTCQNVQPAATISGFQDLPSGDENALANAVANQPVSVGVDGGSSPFQFYQGGIYDGDGCGTDMNHAVTAIGYGADDQGTQYWILKNSWGTGWGENGFMQLQMGVGACGISTMASYPTP

SEQ ID NO: 20003 - DNA, 1579 bp, Zea mays subsp. mays
  misc_feature (1)..(1579): Ceres Seq. ID no. 12376418
agaaccgaacctcgccgccgccgactcctcttccgtctctctctctatcatctactccttgtctccttccctctaaacccgcacccgcagcagcgccgctagggtttgctcaggccccgaaccccacccttggattgctctgatttcgtggcggctgtttcccgaagtttgcagtatggcggggtacccggaggacaaccagcacgagttgaacgggtacgacgaggaggtcgacgaagaggagggacaccccgggaggcgggtaggccgggatgggggctctgggtacgctgatgctgtcggagaggatgggaggggggcgggtggcgactcgttgggaaagatttttgtcggaggcgttgcttgggagacaactgaagaatcattctccaagcattttgagaagtatggggcaataactgattctgtaattatgaaggacaagcatactaagatgcctcgtggatttggatttgttacattttctgatccatctgttatagacaaggttttggaggatgatcacgttatagatggcagaacggttgaagttaagaggactgtcccgagggaagagatgatcaccaaagacggccctaagacaagaaagatcttcatcggtgggctaccaccatctcttactgaagatgaattgaaggatcacttttcatcatatggtaatgtggttgaacatcagataatgcttgatcatagcactgggcgttctagagggtttggttttgtcacatttgaaagtgaagattctgttgaaagggtcatatcagaggggagaatgcgtgatcttggtgggaagcaggttgaaataaagaaggctgaaccaaagaaacatggatctgaccacagcagtaatgggagatcaaaccacggaggtggagcttaccgcaattcttaccgtagtggtggtggagctggtagtggcagcagtggaggcggcggtggttatgggtatggtggtgcttatcgatctgctgcagcaggttatggatatgatggtggcgcaggagcaggatatggctatggtagagggtatggctatggaggcaatgctggctttgggtctagttttggtggtggttatggtggatccatgtatggaggtgctgcctatggtgcatatggtgcctatggtggtggcgcctatggaggaggtgcctacggaggcggtgcctatggaggtggtgctgcctatggtggcgccccaggtggttatggcactggcggatacggcagttatggcggagcaggtagtactggtggtgggagcacaggtgctcggggttctagcaggtatcatccatacggaaaataagcgacgagtttaaactatttttctgggtctcaggtgttcctcttctcctagaagttcagatttcatggcatgtccatctaaacagtgggcattggaacgtagttgggtctaattaagtcaccgtgagaactgtgtaattgctgcagctgagcctccctgcctgccttgtttgcagtacaagctacacataaaacctgtgttgtattctttagtttggtatatgcagagtttagaaccctgagatcgagc

SEQ ID NO: 20004 - protein, 384 aa, Zea mays subsp. mays
  misc_feature (1)..(384): Ceres Seq. ID no. 12376419
MAGYPEDNQHELNGYDEEVDEEEGHPGRRVGRDGGSGYADAVGEDGRGAGGDSLGKIFVGGVAWETTEESFSKHFEKYGAITDSVIMKDKHTKMPRGFGFVTFSDPSVIDKVLEDDHVIDGRTVEVKRTVPREEMITKDGPKTRKIFIGGLPPSLTEDELKDHFSSYGNVVEHQIMLDHSTGRSRGFGFVTFESEDSVERVISEGRMRDLGGKQVEIKKAEPKKHGSDHSSNGRSNHGGGAYRNSYRSGGGAGSGSSGGGGGYGYGGAYRSAAAGYGYDGGAGAGYGYGRGYGYGGNAGFGSSFGGGYGGSMYGGAAYGAYGAYGGGAYGGGAYGGGAYGGGAAYGGAPGGYGTGGYGSYGGAGSTGGGSTGARGSSRYHPYGK

SEQ ID NO: 20005 - protein, 298 aa, Zea mays subsp. mays
  misc_feature (1)..(298): Ceres Seq. ID no. 12376420
MKDKHTKMPRGFGFVTFSDPSVIDKVLEDDHVIDGRTVEVKRTVPREEMITKDGPKTRKIFIGGLPPSLTEDELKDHFSSYGNVVEHQIMLDHSTGRSRGFGFVTFESEDSVERVISEGRMRDLGGKQVEIKKAEPKKHGSDHSSNGRSNHGGGAYRNSYRSGGGAGSGSSGGGGGYGYGGAYRSAAAGYGYDGGAGAGYGYGRGYGYGGNAGFGSSFGGGYGGSMYGGAAYGAYGAYGGGAYGGGAYGGGAYGGGAAYGGAPGGYGTGGYGSYGGAGSTGGGSTGARGSSRYHPYGK

SEQ ID NO: 20006 - protein, 291 aa, Zea mays subsp. mays
  misc_feature (1)..(291): Ceres Seq. ID no. 12376421
MPRGFGFVTFSDPSVIDKVLEDDHVIDGRTVEVKRTVPREEMITKDGPKTRKIFIGGLPPSLTEDELKDHFSSYGNVVEHQIMLDHSTGRSRGFGFVTFESEDSVERVISEGRMRDLGGKQVEIKKAEPKKHGSDHSSNGRSNHGGGAYRNSYRSGGGAGSGSSGGGGGYGYGGAYRSAAAGYGYDGGAGAGYGYGRGYGYGGNAGFGSSFGGGYGGSMYGGAAYGAYGAYGGGAYGGGAYGGGAYGGGAAYGGAPGGYGTGGYGSYGGAGSTGGGSTGARGSSRYHPYGK

SEQ ID NO: 20007 - DNA, 1343 bp, Zea mays subsp. mays
  misc_feature (1)..(1343): Ceres Seq. ID no. 12376422
aggccagcacaaaaccactcgatagaaaagcccccctcaaaacccacggcgccgccgcagccgcgttcacgaagcttggggaggcgagcaccccgatccggcgaggtgccgcgagcgaggcagcgatgagaggccgtgcgtcccatctccgcgcgctcctctcgcgagcgctctctccaagccttcctcctcctggtcgcgctctgcctcaggtcactaggcccggtgcgtctccgttcggagctggattcgtggggcgcgcgcgcttcttctccatcgacgcctcggctgcgacgcagggcgggtcgaagccccctgcgccgccgccggcgggtactgcgggcggcgagggagggggtggtggtcagtctgggaaatctgaacaagcggacgccgggaaagccgtccgcggagggccggtgtcttggctcagttttctactcctgcttgtgactggaggagggataatcgtgtactacgacaaagaaaagaagcgtcacattgaagaattgaagaatagaacaagtgctgtgaagcctggacaatcagtaggcactgcagccattggcggtccattcaagcttttgaatcatgatggaaaacctgttactgaaaaggatttcttgggcaaatggacgctgctttattttggatttacacactgtcctgacatttgtccagatgaactccagaaaatggctgcagcgattgacaaaattaaggaaaaggcaaaactggatgttgtgccagtttttattacagttgatcctgaaagagatactgttgagcaggttcgggactatgttaaagagttccatccagatctagtaggcctcacgggcacgacagatgaagtaagacaagttgcacgtgcttatcgagtttactatatgaagacagaggaggagggttctgactaccttgttgatcactcaattgtcatgtacctgatggacccagagatgaagtttgtcaagttttatggcaagaactacgacacagattcccttgctgacggtatcgttaaagaaattaaagagcacaagtaaacagtagttggaatgccactttgcaacgtcagccttgtttctgaatttctcccgagagttttgttaaatcaagcaaaaaccaaatggcacacgagatcatgtggcaatagctgatgacatttgaatctcgcggcggcttttatttcagcagattcgggtgcacatgttgcggttttgtgcacgtttttgtcacggcaaacttctgcgttattagcttgggacgctgttcattgctgaatgtaattttatttgcatagtttcataccagttcaatatgaaacctttttccccttc

SEQ ID NO: 20008 - protein, 348 aa, Zea mays subsp. mays
  misc_feature (1)..(348): Ceres Seq. ID no. 12376423
ASTKPLDRKAPLKTHGAAAAAFTKLGEASTPIRRGAASEAAMRGRASHLRALLSRALSPSLPPPGRALPQVTRPGASPFGAGFVGRARFFSIDASAATQGGSKPPAPPPAGTAGGEGGGGGQSGKSEQADAGKAVRGGPVSWLSFLLLLVTGGGIIVYYDKEKKRHIEELKNRTSAVKPGQSVGTAAIGGPFKLLNHDGKPVTEKDFLGKWTLLYFGFTHCPDICPDELQKMAAAIDKIKEKAKLDVVPVFITVDPERDTVEQVRDYVKEFHPDLVGLTGTTDEVRQVARAYRVYYMKTEEEGSDYLVDHSIVMYLMDPEMKFVKFYGKNYDTDSLADGIVKEIKEHK

SEQ ID NO: 20009 - protein, 307 aa, Zea mays subsp. mays
  misc_feature (1)..(307): Ceres Seq. ID no. 12376424
MRGRASHLRALLSRALSPSLPPPGRALPQVTRPGASPFGAGFVGRARFFSIDASAATQGGSKPPAPPPAGTAGGEGGGGGQSGKSEQADAGKAVRGGPVSWLSFLLLLVTGGGIIVYYDKEKKRHIEELKNRTSAVKPGQSVGTAAIGGPFKLLNHDGKPVTEKDFLGKWTLLYFGFTHCPDICPDELQKMAAAIDKIKEKAKLDVVPVFITVDPERDTVEQVRDYVKEFHPDLVGLTGTTDEVRQVARAYRVYYMKTEEEGSDYLVDHSIVMYLMDPEMKFVKFYGKNYDTDSLADGIVKEIKEHK

SEQ ID NO: 20010 - DNA, 1192 bp, Zea mays subsp. mays
  misc_feature (1)..(1192): Ceres Seq. ID no. 12376433
gcacgagaccattacctagaacatcctaatcgaaaagtccctgcaccgacgccgcccgcccgcctccgtgcgctgcactgaatctgacagcgcccgtcctgcagcggccggcgaggaagagctctcggcgagagggcgagcgatggcggcggcaatgccggcgctgctgctggtggtggccacggcgatgatgttctcccccgccgccgcccgcattcccggcgtgtacggcggcggcggctggcagagcgcgcacgccacgttctacggcggcagcgacgcctcgggcaccatgggcggcgcctgcgggtacggcaacctgtacagccaggggtacggcgtgaacaacgcggcgctgagcacggcgctgttcaaccaggggctgagctgcggcgcgtgcttcgagatcaagtgcgaggaccagcccgggtggcggtggtgccgcccggggagcccctccatcctggtgacggccaccaacttctgcccgcccaactacgcgctgccctccgacgacggcggctggtgcaacccgccccgcccccacttcgacctcgccatgcccatgttcctccacatcgccgagtaccgcgccggcatcgtccccgtcacctaccgccgggtgccgtgccgcaagtccggcggcgtgcggttcaccatcaacggcttccggtacttcaacctggtgctgatcaccaacgtggccggcgcgggggacgtggtgcgcgcgagcgtgaaggcgtcgggcgccggggagtggatgcccatgtcgcggaactggggccagaactggcagtccagcgccatcctcgtcggccaggcgctctccttccgcgtcaccggcagcgaccgccgcacctccacctcctggaacgccgccccgcgggactggcgcttcggccagaccttcgagggcaagaacttcagggtctgagactctgagctcaggccgcgagtggcggcgagaagaagccagagctcaaggccttcttccgccgtactatatataccgtgattactgctgctagtagtcggtataaagcgcgtgttagggtggtgggaatgtacgtgaatgcccgtttagggtcacgccgtctcgccctggttcaagtactctctggaaaaaaaaggggagcctttttcttctgaacatgtgcggacaaaagggagataagtatggtgattggatgct

SEQ ID NO: 20011 - protein, 263 aa, Zea mays subsp. mays
  misc_feature (1)..(263): Ceres Seq. ID no. 12376434
MAAAMPALLLVVATAMMFSPAAARIPGVYGGGGWQSAHATFYGGSDASGTMGGACGYGNLYSQGYGVNNAALSTALFNQGLSCGACFEIKCEDQPGWRWCRPGSPSILVTATNFCPPNYALPSDDGGWCNPPRPHFDLAMPMFLHIAEYRAGIVPVTYRRVPCRKSGGVRFTINGFRYFNLVLITNVAGAGDVVRASVKASGAGEWMPMSRNWGQNWQSSAILVGQALSFRVTGSDRRTSTSWNAAPRDWRFGQTFEGKNFRV

SEQ ID NO: 20012 - protein, 259 aa, Zea mays subsp. mays
  misc_feature (1)..(259): Ceres Seq. ID no. 12376435
MPALLLVVATAMMFSPAAARIPGVYGGGGWQSAHATFYGGSDASGTMGGACGYGNLYSQGYGVNNAALSTALFNQGLSCGACFEIKCEDQPGWRWCRPGSPSILVTATNFCPPNYALPSDDGGWCNPPRPHFDLAMPMFLHIAEYRAGIVPVTYRRVPCRKSGGVRFTINGFRYFNLVLITNVAGAGDVVRASVKASGAGEWMPMSRNWGQNWQSSAILVGQALSFRVTGSDRRTSTSWNAAPRDWRFGQTFEGKNFRV

SEQ ID NO: 20013 - protein, 248 aa, Zea mays subsp. mays
  misc_feature (1)..(248): Ceres Seq. ID no. 12376436
MMFSPAAARIPGVYGGGGWQSAHATFYGGSDASGTMGGACGYGNLYSQGYGVNNAALSTALFNQGLSCGACFEIKCEDQPGWRWCRPGSPSILVTATNFCPPNYALPSDDGGWCNPPRPHFDLAMPMFLHIAEYRAGIVPVTYRRVPCRKSGGVRFTINGFRYFNLVLITNVAGAGDVVRASVKASGAGEWMPMSRNWGQNWQSSAILVGQALSFRVTGSDRRTSTSWNAAPRDWRFGQTFEGKNFRV

SEQ ID NO: 20014 - DNA, 1699 bp, Zea mays subsp. mays
  misc_feature (1)..(1699): Ceres Seq. ID no. 12376457
agagcagagctgcctccagacgagacgaggaggacgcggcgccgctcgggcttggcagcaaccagcgtcgagcgcagtgcccttctgtctcctatctccccgctgcccagccgggtctcactttccagtctccgagactctgagtctcgctcgcaccccgtcccccgcagcctgtgctctgggttggagggaggtgagctgcgagggagcgcggagggggcgaggagatggaggcagattcggcgaggaagagacttgcattgctggccctgcttctcctggcggcgcccgtccgcccggcctcggcggctccggtggaggatggcctgctcagcaatggtgactttgagacagcaccaagtggtggttttgtaaaatctgcgtctgttgctgagggtgcatcgtcaatccctggttggacgatcaacggcacggttgaactcatttcagcaggccaacactagggtggcatgatcctgattgttccacagggggaccatgcagtaaggctagggaatgatgctagcgttgggcaggtggtggacgttgagaagggttcggagtatgctatcacattcagtgctgcccggacatgtgcacaactggaggcactgaatgtttccgtgctaggtggcgtatctcagacagtagacttgcagacgttgtacaacatagaaggctgggatgcgtacgcgttggcttttcaggcgacggaagagcaggcacatcttcaattcatgaaccctggcatggaggatgatccaacttgtggtcctatcctagacaacgttgcagtcaagaagctcttcaccccagacaaaccaaaggataacgtggtgctgaatggagactttgaggagggtccatggatgttcccgaacacgagcttcggcgtgctgctcccaactaaccttgacgagcagacgtctgccatacctgggtggatgatcgagtcaaaccgcgccgtccgctacatagactctgatgagtacaaggttccccagggaaagcgtgccattgagcttctgtcaggcaaggagggtatcatctcccagatggttgagaccacccctcagaaggtttacagcctgacgttcacactgggcacggcgggggactcgtgccaaccaccaatggccgtcatggcgttcgcgggggatcaggcccagaacttccactactccccaatgagcaatgccaccagccaggctgcgaatgtgacgttcactgcacgcgctgagagaacacgtgtggcgttctatagcgtgtactacaacacgaggagtgacgaccacagctcgctgtgtggcccagtgattgacgatgtccgggtatgggcattgaacgccgcggctgggttgaaggcaagtattggactggttcttggcgttgttggtgtcgttggcatggtgctgttctgaaatctgaatctctcggtggcagtggtcttgggaagtatggatgtataacttcttctgttagttggaggcttactagttttggtagtaagcttgaagtttgttgagtgatatgagcttaggttaaaaagctacgagaacctacatggtattgcttgtgttacttcattggtgacatgcagttgtatggtattgtgtggcttgtttgccctagcttgtaatatgagatgtcagaattattcgagatcatctcttcaatatattagaaaagagtaaagtgc

SEQ ID NO: 20015 - protein, 316 aa, Zea mays subsp. mays
  misc_feature (1)..(316): Ceres Seq. ID no. 12376458
MILIVPQGDHAVRLGNDASVGQVVDVEKGSEYAITFSAARTCAQLEALNVSVLGGVSQTVDLQTLYNIEGWDAYALAFQATEEQAHLQFMNPGMEDDPTCGPILDNVAVKKLFTPDKPKDNVVLNGDFEEGPWMFPNTSFGVLLPTNLDEQTSAIPGWMIESNRAVRYIDSDEYKVPQGKRAIELLSGKEGIISQMVETTPQKVYSLTFTLGTAGDSCQPPMAVMAFAGDQAQNFHYSPMSNATSQAANVTFTARAERTRVAFYSVYYNTRSDDHSSLCGPVIDDVRVWALNAAAGLKASIGLVLGVVGVVGMVLF

SEQ ID NO: 20016 - protein, 227 aa, Zea mays subsp. mays
  misc_feature (1)..(227): Ceres Seq. ID no. 12376459
MNPGMEDDPTCGPILDNVAVKKLFTPDKPKDNVVLNGDFEEGPWMFPNTSFGVLLPTNLDEQTSAIPGWMIESNRAVRYIDSDEYKVPQGKRAIELLSGKEGIISQMVETTPQKVYSLTFTLGTAGDSCQPPMAVMAFAGDQAQNFHYSPMSNATSQAANVTFTARAERTRVAFYSVYYNTRSDDHSSLCGPVIDDVRVWALNAAAGLKASIGLVLGVVGVVGMVLF

SEQ ID NO: 20017 - protein, 223 aa, Zea mays subsp. mays
  misc_feature (1)..(223): Ceres Seq. ID no. 12376460
MEDDPTCGPILDNVAVKKLFTPDKPKDNVVLNGDFEEGPWMFPNTSFGVLLPTNLDEQTSAIPGWMIESNRAVRYIDSDEYKVPQGKRAIELLSGKEGIISQMVETTPQKVYSLTFTLGTAGDSCQPPMAVMAFAGDQAQNFHYSPMSNATSQAANVTFTARAERTRVAFYSVYYNTRSDDHSSLCGPVIDDVRVWALNAAAGLKASIGLVLGVVGVVGMVLF

SEQ ID NO: 20018 - DNA, 1636 bp, Zea mays subsp. mays
  misc_feature (1)..(1636): Ceres Seq. ID no. 12376468
gctagctgctaccagccgacgacgacggccgcgcgcgtttgttgtgtgtgtgtgtgtgtgtgtgtgtgtgtgtgtgtgtgtgtgttataagcgcgagggtttctggcgaggttgctaaagcgttagcgggggcgcccatggagcttgacgaggagacgttcttggacgagctcatgtcgctgcggcgggaggcgncggcggcggcgtccgggcagtggcaagcagctgccgcctacacgggcggcggcggagacgaaggcatgatgatgggcgacctcctcttctacggcggggcgacggaggccgccgcgactgccaccagcggcggcggcatggaccagctctcgccgttccaccagcacgcgccgctgcaggtgcaggtgcaggcgcccgcggcggccccgcaccctcactcgcacgaggagttcaacttcgactgcctcagcgaggtttgcaacccgtacaggggggccggcgtcgccgtaataacgggggccgaggccgccgcggtgcctggaagggcgctcgccgctctccacgacgccatggtggaggacgagacgagcggtcacctgccgcaggggcagcaacatggagccggcgggtccccgacgttcgtgttcggcggtgccgccggcgagagctccgagcagatgcccgtcgtcgtcaggggtgccggcggcggcccccaccacaggagcaaggtccacggcggcgcgccgtccaagaatctcatggccgagaggcggcggcggaagcgcctcaacgaccgtctctccatgctccgctccattgttcccaagatcagcaagatggacaggacatccattctcggggacaccattgactacgtgaaggagctgacggagcggatcaaagtcctggaagaggagatcggcgcctctgcggaggacctggacctcctcaacaccttgaaagcttcttcgtccagcggcagcaacgagatgatggtgaggaactccacaaagttcgacgtcgagaggcggggcaacgggagcacgaggatcgagatctgctgcgccacaaaccccgaggtgctgctgtccacggtaagcgcgctggaggtgctgggcctggagatcgagcagtgcgtggtgagctgcttcagcgactttggcatgcaggcctcttgctcacaagaggaggaggacggtaataataagaggcaagttctaagcaccgacgagataaaacaggccttgtttcggagtgctggctacggagggaggtgcctctaatatagctagcttagctaccatgcaagcagctccgatccaaacccaggccatcgatcccggcaaatactgtataaagctagctagtaagttgcatgcatctatgattgttattgctgtgtgtttgatgctttagttttcatcaatatatatatcccgtacgttaattggttttctccatgagttcatagcgctaataagtgtgcgtagtagtagtagcagcaagaggtatgtatgtatatatatctgaatcccagcaccaaattgaagatttgttgctcaggtattgtaagttgatcatttcttacggtctgtatcattgggtcatggtatgtatgcggattgatatattccaataataagcagattgttcctttcgc

SEQ ID NO: 20019 - protein, 373 aa, Zea mays subsp. mays
  misc_feature (1)..(373): Ceres Seq. ID no. 12376469
  misc_feature (20)..(20): Xaa is any aa, unknown or other
MELDEETFLDELMSLRREAXAAASGQWQAAAAYTGGGGDEGMMMGDLLFYGGATEAAATATSGGGMDQLSPFHQHAPLQVQVQAPAAAPHPHSHEEFNFDCLSEVCNPYRGAGVAVITGAEAAAVPGRALAALHDAMVEDETSGHLPQGQQHGAGGSPTFVFGGAAGESSEQMPVVVRGAGGGPHHRSKVHGGAPSKNLMAERRRRKRLNDRLSMLRSIVPKISKMDRTSILGDTIDYVKELTERIKVLEEEIGASAEDLDLLNTLKASSSSGSNEMMVRNSTKFDVERRGNGSTRIEICCATNPEVLLSTVSALEVLGLEIEQCVVSCFSDFGMQASCSQEEEDGNNKRQVLSTDEIKQALFRSAGYGGRCL

SEQ ID NO: 20020 - protein, 361 aa, Zea mays subsp. mays
  misc_feature (1)..(361): Ceres Seq. ID no. 12376470
  misc_feature (8)..(8): Xaa is any aa, unknown or other
MSLRREAXAAASGQWQAAAAYTGGGGDEGMMMGDLLFYGGATEAAATATSGGGMDQLSPFHQHAPLQVQVQAPAAAPHPHSHEEFNFDCLSEVCNPYRGAGVAVITGAEAAAVPGRALAALHDAMVEDETSGHLPQGQQHGAGGSPTFVFGGAAGESSEQMPVVVRGAGGGPHHRSKVHGGAPSKNLMAERRRRKRLNDRLSMLRSIVPKISKMDRTSILGDTIDYVKELTERIKVLEEEIGASAEDLDLLNTLKASSSSGSNEMMVRNSTKFDVERRGNGSTRIEICCATNPEVLLSTVSALEVLGLEIEQCVVSCFSDFGMQASCSQEEEDGNNKRQVLSTDEIKQALFRSAGYGGRCL

SEQ ID NO: 20021 - protein, 332 aa, Zea mays subsp. mays
  misc_feature (1)..(332): Ceres Seq. ID no. 12376471
MMMGDLLFYGGATEAAATATSGGGMDQLSPFHQHAPLQVQVQAPAAAPHPHSHEEFNFDCLSEVCNPYRGAGVAVITGAEAAAVPGRALAALHDAMVEDETSGHLPQGQQHGAGGSPTFVFGGAAGESSEQMPVVVRGAGGGPHHRSKVHGGAPSKNLMAERRRRKRLNDRLSMLRSIVPKISKMDRTSILGDTIDYVKELTERIKVLEEEIGASAEDLDLLNTLKASSSSGSNEMMVRNSTKFDVERRGNGSTRIEICCATNPEVLLSTVSALEVLGLEIEQCVVSCFSDFGMQASCSQEEEDGNNKRQVLSTDEIKQALFRSAGYGGRCL

SEQ ID NO: 20022 - DNA, 1557 bp, Zea mays subsp. mays
  misc_feature (1)..(1557): Ceres Seq. ID no. 12376476
actcaaatcacaaaccccgctacctcttaactcttcacacgcacaccgtcgtcaaccatggttgctgacatgaaggagaacggcggcgcggtgttggcggcgggcgagaaggcgccgcaggtggtcgtcaagcgcggcgagccgacgctggtgccgccggcggaggcgacgccgacgggcgggcagtactacctgtccaacctggaccagaacatcgcggtgatcgtgcagacggtgtactgctacaagcccagcggcggcggcggcgacgtggcggccgcgctccgcgacgcgctggcgcgcgtgctggtgcactactacccgctggcggggcggctgggcgtaagcccggagatgaagctgaccgtggagctgaccggcgagggcgccgtgttcgtggaggccgacgccgcctgcgaactcgccaccgtcggcgacctcaccaagcccgaccccgccgcgctcggccagctcgtctactccgtccccggcgccaagcacatcctcgagatgcctcccatgaccgcgcaggtgacaaggttcaagtgtgggggcttcgcacttggcctggccatgaaccactgcatgttcgacggcatcggcgccatggagttcgtcaactcgtgggccgagacggcgcgcggcgtcgctgagctcaccgtgccgccgttcctggaccgcagcgtcctgaaggcgcgcgacccgccggtgcacaccttcccgcaccacgagttcgccgagatcccggacgtctccgacacggcggcgctctacggcgcgcaggagctgcagtaccgctccttctgcttcgacccggaccggcctggagcgcgtccgcgggctggcgcttgccgacggcgccctcggccgctgcaccaccttcgaggcgctgtcggggctcgtgtggcgcgcgcgcaccaaggcgctcgggctggcgcccgggcagcgcacgaagctgctgttcgccgtggacggacggcgccggttcgtgccgccgctcccgcggggctacttcggcaacggcatcgtgctgaccaacgccctggccacggccggcgagctgctgtccgcgcccgtgtcgcgcgcagccgggctggtgcaggaggccgtgcggatggtgactgacgactacatgcggtcggcggtggactacttcgaggcgacgcgggcccggccgtcgctggcgtccacgctgctcatcaccacgtggtcgcgcctcgagttccacggcgccgacttcgggtggggcgagcccgtcatgtcgggcccagtcacgctgccggagaaggaggtcatcctcttcctcgcacacggcaaagagaggaagagcatcaacgtgctgctcggcctgccagccaccgcgatggacgccttccaagagctcgtggacgagatatgactgattcatcggtgatgagcagcgatgacggacagggatgggttgctatacatacatatataatgcagggtgcgcctgctttggtttatgtacgaacgtgttaatattccttctatgttggtgtctaagtttaatgagcatatgagaaattgttatcg

SEQ ID NO: 20023 - protein, 355 aa, Zea mays subsp. mays
  misc_feature (1)..(355): Ceres Seq. ID no. 12376477
MVADMKENGGAVLAAGEKAPQVVVKRGEPTLVPPAEATPTGGQYYLSNLDQNIAVIVQTVYCYKPSGGGGDVAAALRDALARVLVHYYPLAGRLGVSPEMKLTVELTGEGAVFVEADAACELATVGDLTKPDPAALGQLVYSVPGAKHILEMPPMTAQVTRFKCGGFALGLAMNHCMFDGIGAMEFVNSWAETARGVAELTVPPFLDRSVLKARDPPVHTFPHHEFAEIPDVSDTAALYGAQELQYRSFCFDPDRPGARPRAGACRRRPRPLHHLRGAVGARVARAHQGARAGARAAHEAAVRRGRTAPVRAAAPAGLLRQRHRADQRPGHGRRAAVRARVARSRAGAGGRADGD

SEQ ID NO: 20024 - protein, 351 aa, Zea mays subsp. mays
  misc_feature (1)..(351): Ceres Seq. ID no. 12376478
MKENGGAVLAAGEKAPQVVVKRGEPTLVPPAEATPTGGQYYLSNLDQNIAVIVQTVYCYKPSGGGGDVAAALRDALARVLVHYYPLAGRLGVSPEMKLTVELTGEGAVFVEADAACELATVGDLTKPDPAALGQLVYSVPGAKHILEMPPMTAQVTRFKCGGFALGLAMNHCMFDGIGAMEFVNSWAETARGVAELTVPPFLDRSVLKARDPPVHTFPHHEFAEIPDVSDTAALYGAQELQYRSFCFDPDRPGARPRAGACRRRPRPLHHLRGAVGARVARAHQGARAGARAAHEAAVRRGRTAPVRAAAPAGLLRQRHRADQRPGHGRRAAVRARVARSRAGAGGRADGD

SEQ ID NO: 20025 - protein, 256 aa, Zea mays subsp. mays
  misc_feature (1)..(256): Ceres Seq. ID no. 12376479
MKLTVELTGEGAVFVEADAACELATVGDLTKPDPAALGQLVYSVPGAKHILEMPPMTAQVTRFKCGGFALGLAMNHCMFDGIGAMEFVNSWAETARGVAELTVPPFLDRSVLKARDPPVHTFPHHEFAEIPDVSDTAALYGAQELQYRSFCFDPDRPGARPRAGACRRRPRPLHHLRGAVGARVARAHQGARAGARAAHEAAVRRGRTAPVRAAAPAGLLRQRHRADQRPGHGRRAAVRARVARSRAGAGGRADGD

SEQ ID NO: 20026 - DNA, 1464 bp, Zea mays subsp. mays
  misc_feature (1)..(1464): Ceres Seq. ID no. 12376480
aaagctcaaaccgagcaatagcagtccttgctcctccaacttccctcctggcttctgcccctttgtctgcgctcctcacgccgccccccgccccagccccacacccgcattccccagatctccatggactcgaactcgacccctcccacggacccggcggcctcctgcttggcctccgcctctgcggcggtggcatcgggggacgtcgccgcgatgctgccggactcgccgccgcggcgtggggcgggccaccgccgcgcacagtcggagatcctcctcggcggcgccgcgctccccgacgacctcaccttcgacgcggacctcggcgttgtcggggaggcctgcgtggccggcgacgaggatgaggaggatgacgacgacgacgaggaaggggtcggcggcgctggcggcagccggatgttcgagatgttcctcgagaacggtggcaagctcccgggaccgccggagccgtcggcgcatccgcattcgacgccgccgcggccacggcaccatcacagcatgtctatggatgggtccacgtctttgtttggttccgccgccgccgggatgcctgggaggtcgggcactgatgccaagaaggctatttctgacgctaagctcgccgagctcgcgcttgttgaccccaagcgtgccaagaggattttggcaaaccgccagtcagctgctaggtcgaaagaaagaaagatgcgctacattgcggagcttgaaaggaaagtacagactctccaattagaagcaactacactatcagctcagctggccatgttgcagcgagatacgactggtatgacaagcgagaatagtgatctgaagatacgtgtgcagacaatggagcagcaggttcagctgcaggacgctctgaacgacaggctaagagacgagattcagcagctgaaggttgcaacaggacaggtaaacgccagcattggaaaaacaggaaactctggtatgtcatcatttggaggtaatccacaaagttaccagcgtagccatatacagtctcttctgactgctcagcacctgcagcggctccggatccactcccaacatcagcaacagcagacgcattttcagcagcagcagcagcagccgcagccgcagctgctgctgcaggaggcgcatccatttccggtggacctaaagatgagaggattttctctgtcatcacatgctcagaacgcaggtgcatcagacagccatgctgccaagagcgaaccctgagatttagcatgtattcatgtgggttgttagaaataataatgtcgctctgttagcgtggtgtctaggtgaacttcaaattgtttgaggtgcttagattttgtgcagcctggagctcccatttggttgtaagcttcagtgctgactgaccggtcatttaccttgcctaatgcttgtacctgggtcctggccatgactttgtgcctggaggatggagccgttcgc

SEQ ID NO: 20027 - protein, 372 aa, Zea mays subsp. mays
  misc_feature (1)..(372): Ceres Seq. ID no. 12376481
MDSNSTPPTDPAASCLASASAAVASGDVAAMLPDSPPRRGAGHRRAQSEILLGGAALPDDLTFDADLGVVGEACVAGDEDEEDDDDDEEGVGGAGGSRMFEMFLENGGKLPGPPEPSAHPHSTPPRPRHHHSMSMDGSTSLFGSAAAGMPGRSGTDAKKAISDAKLAELALVDPKRAKRILANRQSAARSKERKMRYIAELERKVQTLQLEATTLSAQLAMLQRDTTGMTSENSDLKIRVQTMEQQVQLQDALNDRLRDEIQQLKVATGQVNASIGKTGNSGMSSFGGNPQSYQRSHIQSLLTAQHLQRLRIHSQHQQQQTHFQQQQQQPQPQLLLQEAHPFPVDLKMRGFSLSSHAQNAGASDSHAAKSEP

SEQ ID NO: 20028 - protein, 342 aa, Zea mays subsp. mays
  misc_feature (1)..(342): Ceres Seq. ID no. 12376482
MLPDSPPRRGAGHRRAQSEILLGGAALPDDLTFDADLGVVGEACVAGDEDEEDDDDDEEGVGGAGGSRMFEMFLENGGKLPGPPEPSAHPHSTPPRPRHHHSMSMDGSTSLFGSAAAGMPGRSGTDAKKAISDAKLAELALVDPKRAKRILANRQSAARSKERKMRYIAELERKVQTLQLEATTLSAQLAMLQRDTTGMTSENSDLKIRVQTMEQQVQLQDALNDRLRDEIQQLKVATGQVNASIGKTGNSGMSSFGGNPQSYQRSHIQSLLTAQHLQRLRIHSQHQQQQTHFQQQQQQPQPQLLLQEAHPFPVDLKMRGFSLSSHAQNAGASDSHAAKSEP

SEQ ID NO: 20029 - protein, 274 aa, Zea mays subsp. mays
  misc_feature (1)..(274): Ceres Seq. ID no. 12376483
MFEMFLENGGKLPGPPEPSAHPHSTPPRPRHHHSMSMDGSTSLFGSAAAGMPGRSGTDAKKAISDAKLAELALVDPKRAKRILANRQSAARSKERKMRYIAELERKVQTLQLEATTLSAQLAMLQRDTTGMTSENSDLKIRVQTMEQQVQLQDALNDRLRDEIQQLKVATGQVNASIGKTGNSGMSSFGGNPQSYQRSHIQSLLTAQHLQRLRIHSQHQQQQTHFQQQQQQPQPQLLLQEAHPFPVDLKMRGFSLSSHAQNAGASDSHAAKSEP

SEQ ID NO: 20030 - DNA, 1142 bp, Zea mays subsp. mays
  misc_feature (1)..(1142): Ceres Seq. ID no. 12376498
gcacgagaccattacctagaacatcctaatcgaaaagccgagcagcaaaccaaccagcccacccgccggttggtcacgctcctccccgatcccgaattcccgatctccggccgacgccatggcagccccctccgcggccgtcataggggtgctcgtcctcctcgtcgtgggggcctcgggcgcgcgcctcccaggccgcggcagcaccacccggggagctgcgctgccgcgcgggggagcgccggccacggcggtgttcgcgctgggaagcttctggcggtcggaggcggcgttcgggtgcctccacggcgtgatccgcacctccgtcggctacgctggcggctccaagtccaaccccgagtaccgcaacctcgccgaccacgccgagtgcgtcaaggttgagtatgatccccggttgattcactacaggcaacttttggatgtgttctgggcaagtcatgacccacgtgaggtgtttgggcaagggccagatgttggcaaccagtatagatctgtcatcttcactaatggaaccatcgaggccagattggctggtcttagcaaagaaaaagaacaagctaaagaccgtagcagcgttgttaccacacagatccaaccattgggggtctttcatcatgctgaaccagaacatcagaaatttgaactgaagcgtaaaccgttcctcttgcaattgattgggaatttgccggaggaggagctcctgacatcaacactagctgcaaaactgaatgcatatgccgctgagctctgccctgtgaatacccaaaagagaattaactccaagattgatgaggtcacaaagaaaggatggcccattttaagggacatttaactctttctagcttttggactgaaaccgatcgatgcaatgtagacacagaagaggtgcatgattttgcaaagaagatttttaggaatatttcagctgttcgccactgccatgatgacctcaatcatccattcttcattttgctcacaaagattatatagttggtcataacatgtcgttgtgttacgatatttgtaacgcatattcatggttcgaagcttactcaacagacaactttttttcgtattgtttgtttttcatttatgaaaatatagatgttttgtttttattg

SEQ ID NO: 20031 - protein, 244 aa, Zea mays subsp. mays
  misc_feature (1)..(244): Ceres Seq. ID no. 12376499
MAAPSAAVIGVLVLLVVGASGARLPGRGSTTRGAALPRGGAPATAVFALGSFWRSEAAFGCLHGVIRTSVGYAGGSKSNPEYRNLADHAECVKVEYDPRLIHYRQLLDVFWASHDPREVFGQGPDVGNQYRSVIFTNGTIEARLAGLSKEKEQAKDRSSVVTTQIQPLGVFHHAEPEHQKFELKRKPFLLQLIGNLPEEELLTSTLAAKLNAYAAELCPVNTQKRINSKIDEVTKKGWPILRDI

SEQ ID NO: 20032 - protein, 133 aa, Zea mays subsp. mays
  misc_feature (1)..(133): Ceres Seq. ID no. 12376500
ARDHYLEHPNRKAEQQTNQPTRRLVTLLPDPEFPISGRRHGSPLRGRHRGARPPRRGGLGRAPPRPRQHHPGSCAAARGSAGHGGVRAGKLLAVGGGVRVPPRRDPHLRRLRWRLQVQPRVPQPRRPRRVRQG

SEQ ID NO: 20033 - DNA, 870 bp, Zea mays subsp. mays
  misc_feature (1)..(870): Ceres Seq. ID no. 12376501
atggcgaatgtctcgcacacactcccctgccgctgtgccgcacccgcacccctccagcgcgcgggggcacgagcacgagtacgaggctccatcgccggacgaccaggtagttgcactgccgccgccgtcgacgacgaccgacggcgacgatggcccggccgcagcaacggtaccgcggcgtgcggcagcgccactggggctcctgggtctccgagatccgccaccctctcctgaaggcgcggatatggctgggcaccttcgagacggcagaggacgcggcgcgcgcctacgacgaggcggcgcggatcatgtgcgggccccgcgcgcgcaccaacttccccgccgacgccaacggcccgccgccgtcgttcctctccgcggcgctcgtcgacaagctgcaccggttcaacctggcgtccgtgcaggccgcgcagcggcagagagaggctgcggcggcggcggcggcagcagcagcagcagcaacttccgcgccggcgacgccaccggccgcgcagtggggcggcggtaggtccctggaggagcagcacgtggagcagatgatcgaggaactgctggactccgacttctccatggagatttgctgctagtgctaggctagccgcgacgcgacctgcctagcgactagctagcgcccccggccggcccgtcaccgccgcgctccgctccaactctcctctgttcttgcacttgcaccatgcgtcgcgctcgcgctcttctttgtactcgtgccgacgtgcgtagtatcgctcagccgctgcagcgtgcgtaggagcctgatttgtgtacgccacgtgtatagctgtagctgtacgtataagtatatatgtaatcgagcattctcattcttgc

SEQ ID NO: 20034 - protein, 175 aa, Zea mays subsp. mays
  misc_feature (1)..(175): Ceres Seq. ID no. 12376502
WRMSRTHSPAAVPHPHPSSARGHEHEYEAPSPDDQVVALPPPSTTTDGDDGPAAATVPRRAAAPLGLLGLRDPPPSPEGADMAGHLRDGRGRGARLRRGGADHVRAPRAHQLPRRRQRPAAVVPLRGARRQAAPVQPGVRAGRAAAERGCGGGGGSSSSSNFRAGDATGRAVGRR

SEQ ID NO: 20035 - protein, 173 aa, Zea mays subsp. mays
  misc_feature (1)..(173): Ceres Seq. ID no. 12376503
MSRTHSPAAVPHPHPSSARGHEHEYEAPSPDDQVVALPPPSTTTDGDDGPAAATVPRRAAAPLGLLGLRDPPPSPEGADMAGHLRDGRGRGARLRRGGADHVRAPRAHQLPRRRQRPAAVVPLRGARRQAAPVQPGVRAGRAAAERGCGGGGGSSSSSNFRAGDATGRAVGRR

SEQ ID NO: 20036 - protein, 152 aa, Zea mays subsp. mays
  misc_feature (1)..(152): Ceres Seq. ID no. 12376504
MARPQQRYRGVRQRHWGSWVSEIRHPLLKARIWLGTFETAEDAARAYDEAARIMCGPRARTNFPADANGPPPSFLSAALVDKLHRFNLASVQAAQRQREAAAAAAAAAAAATSAPATPPAAQWGGGRSLEEQHVEQMIEELLDSDFSMEICC

SEQ ID NO: 20037 - DNA, 2114 bp, Zea mays subsp. mays
  misc_feature (1)..(2114): Ceres Seq. ID no. 12376562
acccccacttaaccaagaaaacggaatcaaagaaaacctgtccctgaaacgacgacgcaacatcgttacgtctacaagcctgtgcctgtcccatcgatcgatcaaccatggagattgcattggcagccaagaagaagaaccgtgcccgtcgccacctcgccgttcttctcctgctcctcgcctgcgcctgcgccggcattgcgcccgcgagcggcgccggcgggaggtgggacctccagcagcgcagcatcggggtgtcggcgatgcacatgcagctcctgcacaacgaccgcgtcatcatcttcgaccgcaccgacttcggccactccaacctctccctccccgacggacgctgccgcgtcaacccgcgggagcgcgtgctccctcagggggactgcaccgcgcactccgtcgagtacgacgtcgccgccaacgcgttccgcccgctcttcgtcttcaccgacacctggtgctcctcgggcaccgtcgcgcccgacggcacgctcgtccagaccggcggctggaacgacgggttccgcaacgcgcgcaccatgcccgcgtgcagcgacggcgacgagagctgcgactggtccgagacgcaggacgcgctctcggccaaccggtggtacgccaccaaccagatcctccccgacggccgcgcgttcatcatcggcggccggaggcagttcagctacgagttctacccaaaggcgggcccttcggatacgtccgtcatcccgatgccatttctggtgcagacgagggaccccgaggagaacaatctttatccgttcgtgcacctcaacatagacggcaaccttttcatcttctccaacaaccgcgccgtcctcttggactacagcagcaacaagatcgtgcggacgtaccccgtgctgggcgacggcgacccgcggaactaccccagctcgggctcctcggtgctgctcccgctgaaacccaaccccaccgaggccgaggtgctggtctgcggcggcgcgccggcgggctcctacaactccaccaagcagcagggcggcaccgccggcgctttcgtcccggcgctgacgacgtgtgggcggatcaagatcaccgacgccacgccggcgtgggtcatcgagacaatgccgtcgccgcgggtgatgggcgacatgatcctgctgcccaacggcgcggaggtggccatcatcaacggcgccgcggacggcaccgccgggtgggagtccgccaagaccccggcgtacgcgcccgtcgtctaccgcccggaccactcgccgggggaccggttcgaggagcagaacgcggcgggcgtcgcgcggctgtaccactcctcggcggtgctcctccgcgacggccgcctgctggtgggcggcagcaacccgcacacctactacaacttcagcaacgtgcagttccccaccgacctcagcctggaggccttctcgccggagtacctcgacgcgtccaacgacatgctccggccgaggatcctcgacccgtcccccaccggcgcgccggcgaccgtgggctacggggcgacgatggcgatccggttcctggtcccggcattggcgcggagaaggcgtggcggccgcgccggcggcctcggtgacgtgtcggtgacgatggtggcgccgtccttcacgacgcactcgttcgcgatgaaccagcggctgctgttccttgacgtgaccaagaacgtggcggtgcgcggccgagccggcgcgttcagcgcgtcggtgacgatgccggcgacagcggtgctggcgccaccggggtactacatgctgttcgtggtgaacgggcacatccccagcgaggggatctgggtcaaaatacaggcacagtgagagcgtgcgacagggaagggttatacatttcattcattttgtttcgttattgccattgatactcccctcttcttagttcttgttactactctacaggtgtacgtaaaaagacaaagacccttgtataaaagaggtgtaaatccatggtagcgttgacagtcactgactgtgactggacactgtgttgctgtctctcgttgacgtgagtcgtgagatgagattggaaagaaaaaaaaaaaaaaaaaaaaaaaaaaaaaaaaacaaaaa

SEQ ID NO: 20038 - protein, 579 aa, Zea mays subsp. mays
  misc_feature (1)..(579): Ceres Seq. ID no. 12376563
MEIALAAKKKNRARRHLAVLLLLLACACAGIAPASGAGGRWDLQQRSIGVSAMHMQLLHNDRVIIFDRTDFGHSNLSLPDGRCRVNPRERVLPQGDCTAHSVEYDVAANAFRPLFVFTDTWCSSGTVAPDGTLVQTGGWNDGFRNARTMPACSDGDESCDWSETQDALSANRWYATNQILPDGRAFIIGGRRQFSYEFYPKAGPSDTSVIPMPFLVQTRDPEENNLYPFVHLNIDGNLFIFSNNRAVLLDYSSNKIVRTYPVLGDGDPRNYPSSGSSVLLPLKPNPTEAEVLVCGGAPAGSYNSTKQQGGTAGAFVPALTTCGRIKITDATPAWVIETMPSPRVMGDMILLPNGAEVAIINGAADGTAGWESAKTPAYAPVVYRPDHSPGDRFEEQNAAGVARLYHSSAVLLRDGRLLVGGSNPHTYYNFSNVQFPTDLSLEAFSPEYLDASNDMLRPRILDPSPTGAPATVGYGATMAIRFLVPALARRRRGGRAGGLGDVSVTMVAPSFTTHSFAMNQRLLFLDVTKNVAVRGRAGAFSASVTMPATAVLAPPGYYMLFVVNGHIPSEGIWVKIQAQ

SEQ ID NO: 20039 - protein, 535 aa, Zea mays subsp. mays
  misc_feature (1)..(535): Ceres Seq. ID no. 12376564
PPLNQENGIKENLSLKRRRNIVTSTSLCLSHRSINHGDCIGSQEEEPCPSPPRRSSPAPRLRLRRHCARERRRREVGPPAAQHRGVGDAHAAPAQRPRHHLRPHRLRPLQPLPPRRTLPRQPAGARAPSGGLHRALRRVRRRRQRVPPALRLHRHLVLLGHRRARRHARPDRRLERRVPQRAHHARVQRRRRELRLVRDAGRALGQPVVRHQPDPPRRPRVHHRRPEAVQLRVLPKGGPFGYVRHPDAISGADEGPRGEQSLSVRAPQHRRQPFHLLQQPRRPLGLQQQQDRADVPRAGRRRPAELPQLGLLGAAPAETQPHRGRGAGLRRRAGGLLQLHQAAGRHRRRFRPGADDVWADQDHRRHAGVGHRDNAVAAGDGRHDPAAQRRGGGHHQRRRGRHRRVGVRQDPGVRARRLPPGPLAGGPVRGAERGGRRAAVPLLGGAPPRRPPAGGRQQPAHLLQLQQRAVPHRPQPGGLLAGVPRRVQRHAPAEDPRPVPHRRAGDRGLRGDDGDPVPGPGIGAEKAWRPRRRPR

SEQ ID NO: 20040 - protein, 527 aa, Zea mays subsp. mays
  misc_feature (1)..(527): Ceres Seq. ID no. 12376565
MHMQLLHNDRVIIFDRTDFGHSNLSLPDGRCRVNPRERVLPQGDCTAHSVEYDVAANAFRPLFVFTDTWCSSGTVAPDGTLVQTGGWNDGFRNARTMPACSDGDESCDWSETQDALSANRWYATNQILPDGRAFIIGGRRQFSYEFYPKAGPSDTSVIPMPFLVQTRDPEENNLYPFVHLNIDGNLFIFSNNRAVLLDYSSNKIVRTYPVLGDGDPRNYPSSGSSVLLPLKPNPTEAEVLVCGGAPAGSYNSTKQQGGTAGAFVPALTTCGRIKITDATPAWVIETMPSPRVMGDMILLPNGAEVAIINGAADGTAGWESAKTPAYAPVVYRPDHSPGDRFEEQNAAGVARLYHSSAVLLRDGRLLVGGSNPHTYYNFSNVQFPTDLSLEAFSPEYLDASNDMLRPRILDPSPTGAPATVGYGATMAIRFLVPALARRRRGGRAGGLGDVSVTMVAPSFTTHSFAMNQRLLFLDVTKNVAVRGRAGAFSASVTMPATAVLAPPGYYMLFVVNGHIPSEGIWVKIQAQ

SEQ ID NO: 20041 - DNA, 1982 bp, Zea mays subsp. mays
  misc_feature (1)..(1982): Ceres Seq. ID no. 12376579
actcgtgtccgatggctcgcccccgccgcctcctctgacgacggtctgactgacccccgcctccccggagagcggctccgctgtctcgccggatatggcgccgcctcgtccccctcctaacccggcgggggagcagcagccgcagctccacggggtggtcatcatcacgctccctcccgcggaccagccctccaagggcaagaccgtcaccgccttcgcctacaccaacgaccccccgccccctcgctcgcccccggatccggttatggggtacccggcggcgacggaggctaggcggcggccgaggcgggcgctctcgacgcggcgggtggcgacggcggcgctcgtgctgggcgcgctcgcggtcgccgcctactattgcttctactcggacgtggccgtgcagttcctggggatggagcaggaggaggagcagaggaacgagaccaggtctttcctgctgccgctctaccccaaggcgcgtcagggccgcgcactgcgcgagttcggggacgtcaagctcgccgccaggagggtcgacgacggcggaagaaaggctaggaacaggatggaggtcgcgaaggcggccacggcgaggaccaattccacggcgttgctcccgatcaagggcaatgtcttccccgatggccagtattacacatctatctttattggcaaccctccaagaccatactttcttgatgttgatactggaagcgacttgacgtggatccagtgtgatgcaccatgtacaaactgcgcaaagggaccacatcctctatataagccagcaaaagaaaagattgtccctcctagagacttgttgtgccaagaattgcaaggcaaccagaactactgcgaaacctgcaagcagtgtgactatgaaattgaatacgcagaccaaagctcctctatgggtgtccttgcaagggatgatatgcatatgatcgcaaccaatggtggaagggaaaaattagattttgtctttggtgcggcgataagctttcccagtcagctggctagtcacgggattattgccaacgtttttggccattgtatcactagagagcaaggtggtggaggatatatgtttctgggagatgattatgtacctagatggggagtaacatggacttctattcgaagtggtccagataacttatatcacacacaagcccaccatgtaaaatatggggatcagcaactccggaggcctgaacaggcaggaagcactgttcaagtaatttttgacagtggaagctcctatacgtacctcccaaatgaaatatatgaaaaccttgttgcagcaatcaaatatgcgtctccgggctttgtccaagacacttcagatcggacattacctttatgctggaaagctgatttccctgtgaggtatctggaagatgtcaagcagttcttcgagcccttgaaccttcacttcgggaagaaatggcttttcatgtctaaaacattcactatttctcctgaggattacttgattattagtgataaaggaaatgtctgtcttgggcttctcaacggaacggagattaatcatgggtcaactatcatagtaggagatgtttctctgcgcggcaagttggttgtgtacgacaatcagcggaagcagattggatgggcagattcagactgcaccaaacctcaatcacaaaagggctttcctttcttcctctgacgaagcatcactctctacataatacatgtgtaaagcgtaaatagtgaacgccattgtattgtagaatacattattaagtggagactgcctttgtgtatgggtatatcgttccattggaactgtcagaaatcctccactgtgttgtacccgtctgtaatgtgtatactatgttgtttacttgtatgatgtatgtacactatctcctctacatggagttgtcccctacacatggattttttgtagattagttacattatgaacattttcgacagaagttgggtacttt

SEQ ID NO: 20042 - protein, 533 aa, Zea mays subsp. mays
  misc_feature (1)..(533): Ceres Seq. ID no. 12376580
MAPPRPPPNPAGEQQPQLHGVVIITLPPADQPSKGKTVTAFAYTNDPPPPRSPPDPVMGYPAATEARRRPRRALSTRRVATAALVLGALAVAAYYCFYSDVAVQFLGMEQEEEQRNETRSFLLPLYPKARQGRALREFGDVKLAARRVDDGGRKARNRMEVAKAATARTNSTALLPIKGNVFPDGQYYTSIFIGNPPRPYFLDVDTGSDLTWIQCDAPCTNCAKGPHPLYKPAKEKIVPPRDLLCQELQGNQNYCETCKQCDYEIEYADQSSSMGVLARDDMHMIATNGGREKLDFVFGAAISFPSQLASHGIIANVFGHCITREQGGGGYMFLGDDYVPRWGVTWTSIRSGPDNLYHTQAHHVKYGDQQLRRPEQAGSTVQVIFDSGSSYTYLPNEIYENLVAAIKYASPGFVQDTSDRTLPLCWKADFPVRYLEDVKQFFEPLNLHFGKKWLFMSKTFTISPEDYLIISDKGNVCLGLLNGTEINHGSTIIVGDVSLRGKLVVYDNQRKQIGWADSDCTKPQSQKGFPFFL

SEQ ID NO: 20043 - protein, 476 aa, Zea mays subsp. mays
  misc_feature (1)..(476): Ceres Seq. ID no. 12376581
MGYPAATEARRRPRRALSTRRVATAALVLGALAVAAYYCFYSDVAVQFLGMEQEEEQRNETRSFLLPLYPKARQGRALREFGDVKLAARRVDDGGRKARNRMEVAKAATARTNSTALLPIKGNVFPDGQYYTSIFIGNPPRPYFLDVDTGSDLTWIQCDAPCTNCAKGPHPLYKPAKEKIVPPRDLLCQELQGNQNYCETCKQCDYEIEYADQSSSMGVLARDDMHMIATNGGREKLDFVFGAAISFPSQLASHGIIANVFGHCITREQGGGGYMFLGDDYVPRWGVTWTSIRSGPDNLYHTQAHHVKYGDQQLRRPEQAGSTVQVIFDSGSSYTYLPNEIYENLVAAIKYASPGFVQDTSDRTLPLCWKADFPVRYLEDVKQFFEPLNLHFGKKWLFMSKTFTISPEDYLIISDKGNVCLGLLNGTEINHGSTIIVGDVSLRGKLVVYDNQRKQIGWADSDCTKPQSQKGFPFFL

SEQ ID NO: 20044 - protein, 426 aa, Zea mays subsp. mays
  misc_feature (1)..(426): Ceres Seq. ID no. 12376582
MEQEEEQRNETRSFLLPLYPKARQGRALREFGDVKLAARRVDDGGRKARNRMEVAKAATARTNSTALLPIKGNVFPDGQYYTSIFIGNPPRPYFLDVDTGSDLTWIQCDAPCTNCAKGPHPLYKPAKEKIVPPRDLLCQELQGNQNYCETCKQCDYEIEYADQSSSMGVLARDDMHMIATNGGREKLDFVFGAAISFPSQLASHGIIANVFGHCITREQGGGGYMFLGDDYVPRWGVTWTSIRSGPDNLYHTQAHHVKYGDQQLRRPEQAGSTVQVIFDSGSSYTYLPNEIYENLVAAIKYASPGFVQDTSDRTLPLCWKADFPVRYLEDVKQFFEPLNLHFGKKWLFMSKTFTISPEDYLIISDKGNVCLGLLNGTEINHGSTIIVGDVSLRGKLVVYDNQRKQIGWADSDCTKPQSQKGFPFFL

SEQ ID NO: 20045 - DNA, 1240 bp, Zea mays subsp. mays
  misc_feature (1)..(1240): Ceres Seq. ID no. 12376591
gcacgagaccattacctagaacatcctaatcgaaaaatccgcagtcgcacacccgccattgcattcgcagcaccagcgccgcttctccttcctcgagctcacccctctcttctcttctcctattcgctcgcgtgctctctctctctctctctgctgcctcagccgccctcgctgtcgctgagccgacagattcattcggccggtcatggctgacgcgttgtgcaacggcgtcgtggcgtccccgtgcggccgggacgtcgccggcagggccaggggcgccggcagggccgcgctcgcggagtcccttcaggtcgccgggcacgccagcaagacctccttctccgccgggaggatgtcggtcaaggacagcaagccgaggcccctgtcgcgtagcctcgaggccgccgcgccaggacagatgaacctgtcgttccccaaggccatgcggtggtgggagaaggggctgcaccccaacatgcgcgaggtcgagtccgcgcaggacctcgccgactcgctgctcagcgccggcgacaaactcgtggtcgtcgacttcttctccccaggctgcggcggctgccgcgccctccaccccaagatcgcccagttcgccgagaagaacccgggcgtgcagttcctgcaggtgaactacgagacgcacaagtccatgtgctacagcctccgcgtccacgtcctccctttcttcaggttctaccggggagccgagggccgggtcagcagcttcagctgcaccaacgcaacgatcaacaagttcaaggacgcgctcgccaagcacggggctgagaggtgcagcctcgggcctgcgcgggggctggacgagtcggagctcatggctttggctgagaacagggacctgcacttcacctacgacaagccgggcggcctcgtccccctcgcggaagccattgccaaggaggctgccgcgccgggaggcccgtggcttcctctgcctgcgtccctgctcggccagggatcggccgataactcattgctgccgtctggaagatagaccgtgctccgtgctcggttggtttcattcattggaggtggctcctccgtcttgtacagatttcattcgttcgtagtggtctgatgatgctggagtgacagaaatattcagacgcgggatgcgcagtgactatcgcgggatgcgcagtgactatcgcgtctgtattgttgcatctagacctttgctgaaacatgaaaaaatccattgcttggc

SEQ ID NO: 20046 - protein, 273 aa, Zea mays subsp. mays
  misc_feature (1)..(273): Ceres Seq. ID no. 12376592
MADALCNGVVASPCGRDVAGRARGAGRAALAESLQVAGHASKTSFSAGRMSVKDSKPRPLSRSLEAAAPGQMNLSFPKAMRWWEKGLHPNMREVESAQDLADSLLSAGDKLVVVDFFSPGCGGCRALHPKIAQFAEKNPGVQFLQVNYETHKSMCYSLRVHVLPFFRFYRGAEGRVSSFSCTNATINKFKDALAKHGAERCSLGPARGLDESELMALAENRDLHFTYDKPGGLVPLAEAIAKEAAAPGGPWLPLPASLLGQGSADNSLLPSGR

SEQ ID NO: 20047 - protein, 224 aa, Zea mays subsp. mays
  misc_feature (1)..(224): Ceres Seq. ID no. 12376593
MSVKDSKPRPLSRSLEAAAPGQMNLSFPKAMRWWEKGLHPNMREVESAQDLADSLLSAGDKLVVVDFFSPGCGGCRALHPKIAQFAEKNPGVQFLQVNYETHKSMCYSLRVHVLPFFRFYRGAEGRVSSFSCTNATINKFKDALAKHGAERCSLGPARGLDESELMALAENRDLHFTYDKPGGLVPLAEAIAKEAAAPGGPWLPLPASLLGQGSADNSLLPSGR

SEQ ID NO: 20048 - protein, 202 aa, Zea mays subsp. mays
  misc_feature (1)..(202): Ceres Seq. ID no. 12376594
MNLSFPKAMRWWEKGLHPNMREVESAQDLADSLLSAGDKLVVVDFFSPGCGGCRALHPKIAQFAEKNPGVQFLQVNYETHKSMCYSLRVHVLPFFRFYRGAEGRVSSFSCTNATINKFKDALAKHGAERCSLGPARGLDESELMALAENRDLHFTYDKPGGLVPLAEAIAKEAAAPGGPWLPLPASLLGQGSADNSLLPSGR

SEQ ID NO: 20049 - DNA, 1197 bp, Zea mays subsp. mays
  misc_feature (1)..(1197): Ceres Seq. ID no. 12376601
gcacgagaccattacctagaacatcctaatcgaaaaggctggaggctcgcctagctggctctggcagcagcatctaccgttcgcttgctgcaaagagaacttccactggtgatatactgaaggcgttcagtttgtatgtcaaagcatgtccgtttaggatactatcacactatgtcgcaaacacgaccatcttaaacgctacgaagagcgccacaaggctgcacatcatagactacgggataatgtatggtttccagtggccagtcctcatgcagcggctctcaaagagacctggtggccccccgtaccttcggatcactggtatagactttcccctgtcaggattccgccctgcagagcgtgttgaggcgacagggcggcggttgcatgagtatgcccgtatgttcaatgtcccatttgaataccaagccattgctgccaagtgggatactatccaagttaaagatctcaacatgaagagcgatgagttcgtcgtcgttaactgcctctaccggatgaggaacatgatggacgagacggtgaccgatgacagcccgagaacgagggttttgaacacaatcaggaagctgaatccccatctgttcgttcatgggatcgtcaatggtacttacaatgcacccttcttcgtgacgcggtttaaggaggctatgttcttcttctcttcgatctttgatatgctcgaagcgaatgccttacggatggatgagcataggctgctgatagagagagagttctttggccgggaagctgtcaatgtgattgcctgtgagggcacagagaggattgaaaggccagagacctacaagcaatggcagatgaggaacctcagggcaggcttccggcagctagctctggacagggagataatgaagagagcaaggtacaaggtaagcaagagctatcagggggatttcctcgtggacgaagataacaagtggatgctacaaggttggaagggtcgtatcatatatgcactttcagcatggactagctagacttgtaaatattagtgagctactgagctgcttagctgacctcttccattaatttcttgattattcaccatttcattttgctgtattatgtttacgttgttgaatctagccctcttttagaaaccaaagttttgtatgtttgaattgactgcaataatagaatcttgtccgtgtctgcctc

SEQ ID NO: 20050 - protein, 257 aa, Zea mays subsp. mays
  misc_feature (1)..(257): Ceres Seq. ID no. 12376602
MYGFQWPVLMQRLSKRPGGPPYLRITGIDFPLSGFRPAERVEATGRRLHEYARMFNVPFEYQAIAAKWDTIQVKDLNMKSDEFVVVNCLYRMRNMMDETVTDDSPRTRVLNTIRKLNPHLFVHGIVNGTYNAPFFVTRFKEAMFFFSSIFDMLEANALRMDEHRLLIEREFFGREAVNVIACEGTERIERPETYKQWQMRNLRAGFRQLALDREIMKRARYKVSKSYQGDFLVDEDNKWMLQGWKGRIIYALSAWTS

SEQ ID NO: 20051 - protein, 248 aa, Zea mays subsp. mays
  misc_feature (1)..(248): Ceres Seq. ID no. 12376603
MQRLSKRPGGPPYLRITGIDFPLSGFRPAERVEATGRRLHEYARMFNVPFEYQAIAAKWDTIQVKDLNMKSDEFVVVNCLYRMRNMMDETVTDDSPRTRVLNTIRKLNPHLFVHGIVNGTYNAPFFVTRFKEAMFFFSSIFDMLEANALRMDEHRLLIEREFFGREAVNVIACEGTERIERPETYKQWQMRNLRAGFRQLALDREIMKRARYKVSKSYQGDFLVDEDNKWMLQGWKGRIIYALSAWTS

SEQ ID NO: 20052 - protein, 204 aa, Zea mays subsp. mays
  misc_feature (1)..(204): Ceres Seq. ID no. 12376604
MFNVPFEYQAIAAKWDTIQVKDLNMKSDEFVVVNCLYRMRNMMDETVTDDSPRTRVLNTIRKLNPHLFVHGIVNGTYNAPFFVTRFKEAMFFFSSIFDMLEANALRMDEHRLLIEREFFGREAVNVIACEGTERIERPETYKQWQMRNLRAGFRQLALDREIMKRARYKVSKSYQGDFLVDEDNKWMLQGWKGRIIYALSAWTS

SEQ ID NO: 20053 - DNA, 1336 bp, Zea mays subsp. mays
  misc_feature (1)..(1336): Ceres Seq. ID no. 12376632
gcacgagaccattacctagaacatcctaatcgaaaaatcagttcagtaagttcagccttcttgacttgtacagttgtactgaggtaggtctcgtctgagttggcaacgaccatgcctgccgtctcggccgccgcctgctgcgccgccacaacgccggcaaacgaggtggcggaggacctcctcggcttcctccgcgttctcagagacggcaccgtgctccggtcgccggcggacccagtgttctgcccggccaccttccccggcagccacccgtccgtgcagtggaaggaggccgtctacgacaagcccaagaacctccgcgtccgcgtgtacaggccgacgacgccgccggggacgaagaagaagctcccagtgctcgtccacttccacggcggcggcttctgcctggggtcgtgcacgtgggccaacgtccacgagttctgcctccgcctggccgcggaggccggcgccgtcgtgctctccgcgggataccgcctggcccccgagcaccgcctccccgcggccttcgacgacggggccgggttcatgcgctggctccgggaccagtcagcgatcggcggcgccggcgcctccgacgcctggctcgcggaggccgccgatttcggccgcgtgctcgtcaccggcgactcggcgggcgccacgatcgcgcaccacctcgccgtgcgcgccgnnctcggccgcggcggagccagagccggagccggagccgggcctcctcacggtccgcggctacgttctgctcatgccgttcttcggcggcgtccggcgcacggcctcggaggccgagtgcgcggaggaggcgttcccgaaccttgacctggtggaccggttctggaggctgtcgctgccggccggcgccaccagggaccacccggcgtccaacccgttcgggccggacagccctgacctgggcccggtggacttccggtccgtgctcgtggtggccggcggcctcgacctgatacgcgaccgcaccgtcgactacgccgagcggctggcggcgatgggcaagcccgtggagctcgccgagttcgccggcatgccccacgggttctacctgcaccagccggggtcccaggccaccggcgagctcatccagaccgtcgcccggttcgtccacgtcgttgcgccagaggctgcggcttaatttactcggcatatgcatgcatccgtgcatgtatcccgtttcttgtcgtcgtgttgtggttcactcgtatacctcatcttttttctcttatgaaattcttgtagagtaaaacccttctctctctgatgtctcggttgaatgatccaaataatggaccactggtttggg

SEQ ID NO: 20054 - protein, 241 aa, Zea mays subsp. mays
  misc_feature (1)..(241): Ceres Seq. ID no. 12376633
  misc_feature (194)..(194): Xaa is any aa, unknown or other
MPAVSAAACCAATTPANEVAEDLLGFLRVLRDGTVLRSPADPVFCPATFPGSHPSVQWKEAVYDKPKNLRVRVYRPTTPPGTKKKLPVLVHFHGGGFCLGSCTWANVHEFCLRLAAEAGAVVLSAGYRLAPEHRLPAAFDDGAGFMRWLRDQSAIGGAGASDAWLAEAADFGRVLVTGDSAGATIAHHLAVRAXLGRGGARAGAGAGPPHGPRLRSAHAVLRRRPAHGLGGRVRGGGVPEP

SEQ ID NO: 20055 - protein, 134 aa, Zea mays subsp. mays
  misc_feature (1)..(134): Ceres Seq. ID no. 12376634
MPFFGGVRRTASEAECAEEAFPNLDLVDRFWRLSLPAGATRDHPASNPFGPDSPDLGPVDFRSVLVVAGGLDLIRDRTVDYAERLAAMGKPVELAEFAGMPHGFYLHQPGSQATGELIQTVARFVHVVAPEAAA

SEQ ID NO: 20056 - DNA, 1581 bp, Zea mays subsp. mays
  misc_feature (1)..(1581): Ceres Seq. ID no. 12376644
gcacgagaccattacctagaacatcctaatcgaaaagaaatgaaactcgcgacagacagttcgtcctctgctccgtggaccctattcctgcgattatctggttgctcacatggacggtgatccgtgatccccggtgaccaagggtgttgaatcctcatgcaggcagaggcagaaacactgcccgaggctgatgcctgatggtgcgatcccgttccctgtcgccatcgagttcgttttttcgttgcttgacagccttaaagcggcgcacgaatgccacgagccactgaggcggcttcccagttcactccaggcccagggcgcccggtcgccatgaactcccgctcctcctccggcggcgtgcggtccgagagctcgctgtcgttgggggagcgcctctgcgcggtcttcttccccgtcatcgccatcgccgaggccgttttcttcgccttcaccgactgcctcgcggacctctgcaccgactccggctcctcgcactcgcgccgcttcggcgcgggcgcgtcctcctccgccgccaggaacagtcggagcaaccattgccagccccaccacagacctttcctacgccgcgccgctcgggtggatggacctcccccaacctccgccagctcgcacgcctcgccgacgagtcccgatgcttctcggtgaacgaggtggaggcgctctttgagctctacaagaagatcagctgctccatcatcgacgacggcctcatccacaaggaagaacttcagctggcactgttcaaaactccaagcggcgagaatctttttcttgatagagtttttttatttgtttgatgagaagaaaaatggtgtgatcgagtttgatgagtttattcattccctaagtgtcttccaccccttggcaccaattgaagacaagatcgattttgcatttaggttgtatgacttgagacaaactgggtttattgagcgtgaagaggttaagcaaatggtaattgctattttgatggaatctgatttaaaattatcagatgacttactcgaggccatcatagataagacatttgaagatgctgatgcggataaggatggaaaaataaataaagaggagtggaaggaatttgcgttacgccaccctaacctgttaaagaatatgacactgccttatctgagggacatcacaaccgtcttccctagtttcgtcttcaacacggcggtggaagattagtcgctccaattgaaggcaataaagcagtactggggattgcttgaggtgcacaaggttcctgaaacctgacggctgttggtcgccttcaaccactgagaatccgatgtgttctgagcatcaaggcagccgccacctgaccatcactcctgctataaattgtaatattataatataaggctcatccggggtggcagatcggcagcgggaacttacctgatataatttcttgctgccgtttttgcgcagcaatggattgagagtcggtagctgtagatacatctagcttccattctgtacgtagggatccaggaactgtaaatacgttctatggaattgtatcggaaagttcctagtacgccagccagatct

SEQ ID NO: 20057 - protein, 131 aa, Zea mays subsp. mays
  misc_feature (1)..(131): Ceres Seq. ID no. 12376645
MPRATEAASQFTPGPGRPVAMNSRSSSGGVRSESSLSLGERLCAVFFPVIAIAEAVFFAFTDCLADLCTDSGSSHSRRFGAGASSSAARNSRSNHCQPHHRPFLRRAARVDGPPPTSASSHASPTSPDASR

SEQ ID NO: 20058 - protein, 111 aa, Zea mays subsp. mays
  misc_feature (1)..(111): Ceres Seq. ID no. 12376646
MNSRSSSGGVRSESSLSLGERLCAVFFPVIAIAEAVFFAFTDCLADLCTDSGSSHSRRFGAGASSSAARNSRSNHCQPHHRPFLRRAARVDGPPPTSASSHASPTSPDASR

SEQ ID NO: 20059 - protein, 79 aa, Zea mays subsp. mays
  misc_feature (1)..(79): Ceres Seq. ID no. 12376647
MVIAILMESDLKLSDDLLEAIIDKTFEDADADKDGKINKEEWKEFALRHPNLLKNMTLPYLRDITTVFPSFVFNTAVED

SEQ ID NO: 20060 - DNA, 2188 bp, Zea mays subsp. mays
  misc_feature (1)..(2188): Ceres Seq. ID no. 12376651
gcacgagaccattacctagaacatcctaatcgaaaaacaacaaactcagtttccaaattagcaaattagcaagcaactgagtgcaacagaaacatgaaggtaacatgtttttttttctgcttcttttttttctgccgggaagagtttgtctctcttcgatggaccacggcatctagctcttttgtgtgtgtgtgcctctagccctccagctgatgaaacatcttcttgggcttttttttgatattattcgggtcccagcaaaggattgtgatcaaggtgcagatgacctgcgacaagtgccgtaaaaacgctctggctctagcttgctcgacatatggtaagcactgcgttactgatcgcagtgacccgtgtctgaacgcccagcctctcgcgtggtcgaggagcggcacagcagctgatcgtgtctgtgactgtgacgtcttggttgcaggagtgcaatccgtggggatcgagggtgaggagcgggaccagctcgtggtgatcggcgacggcgtcgacgccacctgcctggcgagcggcctgcggaagaaggtgaaggtgggcagggcggacatcgtgaaggtggaagcggtgggcgacgagaaggaggcgacgacgaaggacgacgcggccgccagtagtagtagtagtagtcctaatcccgtggcccaccgcttacaccttccctcggtcccttccatctcctagccgccgccgccgccgcccaaaaccctacctaccctcttctccccctcactctcctttcatctccattctaatggcggcccaacccgtccggcgaagctgctagtgcttgtatctactatcttcatcaggtacttcgcgatcctactgaagtattccccgccgccgctgccatggccaccctcaaccctttcgaactcctcggcgccgacgacaacgacgacccgtcgctgttgattgcggcggcggcggctgctgctcagaaagccgaggcgaagaagtccgccgtggcgcctgctgggaaggctgcccagcctgcggcgaccaccaagttcccgaccaagcccgctcctccctcgcagacggttcgggatgcacgcggcggtggctcatcagctcgtggaggctttggccgtggtgaacgtggccgtggcagaggtggacggggatatggtcagaaccgtggcttcagtggtgacaatggcaatgagttccagggaggttatggtggcggaggctatggggatggtgctgtaactggtggatctgaaggagaaagggagagagacactcgtcccccgtaccgtggcggaggcagacgtggtggttacaggaatgttgagtttggtgatgactctgcagaggccaccacggagaaactatgagcgccacagcgggactggccatggctatgagatgaagcgtgatggcgcagggcgtgggaactggggcactgccactgatgagcttattgcccaggatgcagaggactctccgaagatggaggaggctgctcctgttgctgagaaacaaggtgagcagatcgatgccccagcagcagatgagaacaaagataacaaggatgctactgcaaatgaggaggaagaaaaggaagaggacaaggagatgactctggaggaatttgagaaaataagagaggagaagaggaaagcactacttgcgttgaaggctgaggagaggaaagttgaagttgacaaggatctgcgttctctgcagccactttcaaacaagaaagaaaatgatgaagttttcattaagctgggttctgacaaggataagaagaaggaaaatgctgagcgtgatgagcgtgccaagaagtcggtgagcatcaacgagttcctgaaacctgctgaaggagaaaggtactacggcggccgtggccgtggaaggggccgtggggatcgtggtggttttagaggcggatacggagggggatacagtcgtggcccagctgctgctgctccatccattgaagatcaagctcagttcccaagccttggtgggaagtgaagggcgcccagctgctgctgtcaccgagcgttgtgttgtctgctgttgtcatatttaaattttgtccgacgttacatttctgtgccacggtttaaacggaacaaataatggtgttgcatgtggctatctttggttatgtggtacttgacgttgaataccggagttgtttatc

SEQ ID NO: 20061 - protein, 231 aa, Zea mays subsp. mays
  misc_feature (1)..(231): Ceres Seq. ID no. 12376652
MLSLVMTLQRPPRRNYERHSGTGHGYEMKRDGAGRGNWGTATDELIAQDAEDSPKMEEAAPVAEKQGEQIDAPAADENKDNKDATANEEEEKEEDKEMTLEEFEKIREEKRKALLALKAEERKVEVDKDLRSLQPLSNKKENDEVFIKLGSDKDKKKENAERDERAKKSVSINEFLKPAEGERYYGGRGRGRGRGDRGGFRGGYGGGYSRGPAAAAPSIEDQAQFPSLGGK

SEQ ID NO: 20062 - protein, 226 aa, Zea mays subsp. mays
  misc_feature (1)..(226): Ceres Seq. ID no. 12376653
MTLQRPPRRNYERHSGTGHGYEMKRDGAGRGNWGTATDELIAQDAEDSPKMEEAAPVAEKQGEQIDAPAADENKDNKDATANEEEEKEEDKEMTLEEFEKIREEKRKALLALKAEERKVEVDKDLRSLQPLSNKKENDEVFIKLGSDKDKKKENAERDERAKKSVSINEFLKPAEGERYYGGRGRGRGRGDRGGFRGGYGGGYSRGPAAAAPSIEDQAQFPSLGGK

SEQ ID NO: 20063 - protein, 204 aa, Zea mays subsp. mays
  misc_feature (1)..(204): Ceres Seq. ID no. 12376654
MKRDGAGRGNWGTATDELIAQDAEDSPKMEEAAPVAEKQGEQIDAPAADENKDNKDATANEEEEKEEDKEMTLEEFEKIREEKRKALLALKAEERKVEVDKDLRSLQPLSNKKENDEVFIKLGSDKDKKKENAERDERAKKSVSINEFLKPAEGERYYGGRGRGRGRGDRGGFRGGYGGGYSRGPAAAAPSIEDQAQFPSLGGK

SEQ ID NO: 20064 - DNA, 1582 bp, Zea mays subsp. mays
  misc_feature (1)..(1582): Ceres Seq. ID no. 12376690
aaagcaccagctaagctaaagacgacactagcattgcacacactaactacatatatagctaaatacactagcatacccccccaaaaaaatgtccgcgtcacgggttcctcctcgccgtcctcgtggtgggcagcgtactgtgcaccgccgccgctccccgcgcgctcgcggcggcggctcgcgagctggccggggacgacgaggccgccgccgcgatggcgtcgcggcacgagaagtggatggcggagcacgggcgcgcgtacaaggatgaggccgagaaggcgcggcggctggaggtgttccgggccaacgcggagctgatcgactcgttcaacgccgcagggacgcacagccaccggctggcgaccaacaggttcgccgacctcaccgtcgaggagttccgcgcggccaggaccgggctccggcagcgcccggcgccgtccgcgggcgccggccggttcaggtacgagaacttcagcctggcggacgcggcgcagagcgtggactggcgggccatgggtgccgtcaccggcgtcaaggaccagggagcgtgcggctgctgctgggcgttctcggcggtggcggcggtggaagggctaaacaagatccggacggggcggctggtgtcgctgtcggagcaggagctggtggactgcgacgtcagcggcgtggaccagggctgcgacggcggcctcatggacaacgccttccagttcgtcgcgcgccgcggcgggctggcctcggagtcgggctacccgtaccagggccggggacgggccctgccgctcgtccgccgccgccgccgcgtccatccggggccacgaggacgtgccgcgcaacaacgaggccgcgctcgcggccgccgtggccaaccagcccgtgtccgtggccatcaacggcgaggacatggcgttccgcttctacgacagcggcgtgctgggcggggcctgcggcacggacctcaaccacgccatcacggccgtcgggtacggcacggcgaacgacggcacaaggtactggctgatgaagaactcctggggcgcgtcgtggggcgagggcggatacgtccgcatccgccgcggcgtccgtggggagggcgtctgcggtctcgccaagctgccgtcctacccggtctagaggccaggcccagcggatcggagcaccgatcgcgtccaccaacgtaaccatcgcacagcatacagtacgcatgatgctgttacgtcatccaagacaagcgtgcacgtgcatggcatttatatttgactagctacgaatttaccgttctttttatttgtagccgacgataaatattggagaacagagatattactatttataagattgtatataatcatacgattcatggttatatatatgtatagtggtatagtcgaaatcacgacccacgccaagcattatgtattgtactcccagccataagaatgtcgctgaggtattagttggaccttacgtgtgatggtcacgtattgtaatgtacagattgcgttgaatgcaaccagtttagtgtaaacaaatacattcatactagaatgtgtgatttttaaaaaaaaaatatatgctc

SEQ ID NO: 20065 - protein, 322 aa, Zea mays subsp. mays
  misc_feature (1)..(322): Ceres Seq. ID no. 12376691
MASRHEKWMAEHGRAYKDEAEKARRLEVFRANAELIDSFNAAGTHSHRLATNRFADLTVEEFRAARTGLRQRPAPSAGAGRFRYENFSLADAAQSVDWRAMGAVTGVKDQGACGCCWAFSAVAAVEGLNKIRTGRLVSLSEQELVDCDVSGVDQGCDGGLMDNAFQFVARRGGLASESGYPYQGRGRALPLVRRRRRVHPGPRGRAAQQRGRARGRRGQPARVRGHQRRGHGVPLLRQRRAGRGLRHGPQPRHHGRRVRHGERRHKVLADEELLGRVVGRGRIRPHPPRRPWGGRLRSRQAAVLPGLEARPSGSEHRSRPPT

SEQ ID NO: 20066 - protein, 314 aa, Zea mays subsp. mays
  misc_feature (1)..(314): Ceres Seq. ID no. 12376692
MAEHGRAYKDEAEKARRLEVFRANAELIDSFNAAGTHSHRLATNRFADLTVEEFRAARTGLRQRPAPSAGAGRFRYENFSLADAAQSVDWRAMGAVTGVKDQGACGCCWAFSAVAAVEGLNKIRTGRLVSLSEQELVDCDVSGVDQGCDGGLMDNAFQFVARRGGLASESGYPYQGRGRALPLVRRRRRVHPGPRGRAAQQRGRARGRRGQPARVRGHQRRGHGVPLLRQRRAGRGLRHGPQPRHHGRRVRHGERRHKVLADEELLGRVVGRGRIRPHPPRRPWGGRLRSRQAAVLPGLEARPSGSEHRSRPPT

SEQ ID NO: 20067 - protein, 222 aa, Zea mays subsp. mays
  misc_feature (1)..(222): Ceres Seq. ID no. 12376693
MGAVTGVKDQGACGCCWAFSAVAAVEGLNKIRTGRLVSLSEQELVDCDVSGVDQGCDGGLMDNAFQFVARRGGLASESGYPYQGRGRALPLVRRRRRVHPGPRGRAAQQRGRARGRRGQPARVRGHQRRGHGVPLLRQRRAGRGLRHGPQPRHHGRRVRHGERRHKVLADEELLGRVVGRGRIRPHPPRRPWGGRLRSRQAAVLPGLEARPSGSEHRSRPPT

SEQ ID NO: 20068 - DNA, 1830 bp, Zea mays subsp. mays
  misc_feature (1)..(1830): Ceres Seq. ID no. 12376720
gcacgagaccattacctagaacatcctaatcaaaaagcgtactgccaccgcaatcgtctcgtttcatacagggcagggaagtcaggaggaagatgatgcagcaggagccctggaacgccgccgccgccatggggctcctccgcccgaccaagtcggctccctgctcgcccatcaagccgccgccggcgaccatgctgcggactcacttccacgtcgcgcacaaggtgccggtcggcgacacgccctacgtgcgagccaagcgcgtccagctggtggacaaggatccggagaaggcgatcgcgctgttctggagtgcgatcaacgccggagaccgcgttgacagcgcgctcaaggacatggccatcgtgatgaagcagcagaaccgcgccgaggaggccatcgaggccatcaagtcgctgcgcagccgatgctccgaccaggcgcaggagtccctcgacaacatcctcctcgatctctacaagagatgcgggcggctggacgaccaaatctcgctgctcaagcacaagctgcagctgatcaaccagggccacgccttcaacggcaagcggaccaaaacggctcgctctcagggccgcaagttccaggtcaccctggagcaagaagccaccaggctccttggtaacctggggtgggcgctgatgcagaaggagaactacacggaagcggagggagcgtaccgtcgggcgctgctcatcgggccggacaacaacaagatgtgcaatcggcatctgccttatgaagcaggcccgcgtgctcgaggccaaggatgtgctcaagcaggtacgccccgcggcggttgatggtctgcgcggcgccgactctcacctcaaggcctacgagcgagcgcaggagatgctgcgggacctcgagaccaagctcatcggccgcccgcgcgctgaccagctcgacacgaactggctcttcgatgcgctgctgctgggatcgtcctcaagcatctggcagccgcagccgtgcaccgatcacttgctgccacctcctgttccggctccagccacggcgccgcgcggccacttcgccgatgaaaacgccggtgtgagcaagaagctggcggtgctccaggagaacatgcttaatgtggacgcgcagcccttctactctttgcgggtgtcgtcgctcgcagccaagtcacataacacgctgcctcagcggcaacagcagcagaagccagctcctgtccatgatcccctgggcaacctgaagagaacacggtccggcaattgcatggacaaggcaggagcagtggtgttcaaggagcagagcatcgacgagaacagcggcaggaggaagtcgctgtcagctgaggacaggtggccagagctacccgaccacagcgcgttcgatgaggccctcgtcgcggccgtcctggctccagtgctcgacgacgaaccaacagctactgaagtcaagctgccggcgagctgcggcacgagtccagcggtgaaggaaaagatcggcaagaggctgaggattttccaggacatcacacagacagtgaacagtttctgattcgttttggttttcttcaatttcctactcacaaattaatcagggaaggagaaagggcttgttctcctgggagctaaattaatcagggattcgattcgatttttaatttgatgctgattttaatttaatttattaacacacaaaaataacagctgattcgcttcttcagcttgacactttagaagcgcgcgcttcctttaccgcaagattctcctcgtaatagaagtggactgcatcttgttctaatttcatttcttttgaaataacaaagttcatttgtgg

SEQ ID NO: 20069 - protein, 263 aa, Zea mays subsp. mays
  misc_feature (1)..(263): Ceres Seq. ID no. 12376721
MKQARVLEAKDVLKQVRPAAVDGLRGADSHLKAYERAQEMLRDLETKLIGRPRADQLDTNWLFDALLLGSSSSIWQPQPCTDHLLPPPVPAPATAPRGHFADENAGVSKKLAVLQENMLNVDAQPFYSLRVSSLAAKSHNTLPQRQQQQKPAPVHDPLGNLKRTRSGNCMDKAGAVVFKEQSIDENSGRRKSLSAEDRWPELPDHSAFDEALVAAVLAPVLDDEPTATEVKLPASCGTSPAVKEKIGKRLRIFQDITQTVNSF

SEQ ID NO: 20070 - protein, 242 aa, Zea mays subsp. mays
  misc_feature (1)..(242): Ceres Seq. ID no. 12376722
MMQQEPWNAAAAMGLLRPTKSAPCSPIKPPPATMLRTHFHVAHKVPVGDTPYVRAKRVQLVDKDPEKAIALFWSAINAGDRVDSALKDMAIVMKQQNRAEEAIEAIKSLRSRCSDQAQESLDNILLDLYKRCGRLDDQISLLKHKLQLINQGHAFNGKRTKTARSQGRKFQVTLEQEATRLLGNLGWALMQKENYTEAEGAYRRALLIGPDNNKMCNRHLPYEAGPRARGQGCAQAGTPRGG

SEQ ID NO: 20071 - protein, 241 aa, Zea mays subsp. mays
  misc_feature (1)..(241): Ceres Seq. ID no. 12376723
MQQEPWNAAAAMGLLRPTKSAPCSPIKPPPATMLRTHFHVAHKVPVGDTPYVRAKRVQLVDKDPEKAIALFWSAINAGDRVDSALKDMAIVMKQQNRAEEAIEAIKSLRSRCSDQAQESLDNILLDLYKRCGRLDDQISLLKHKLQLINQGHAFNGKRTKTARSQGRKFQVTLEQEATRLLGNLGWALMQKENYTEAEGAYRRALLIGPDNNKMCNRHLPYEAGPRARGQGCAQAGTPRGG

SEQ ID NO: 20072 - DNA, 1858 bp, Zea mays subsp. mays
  misc_feature (1)..(1858): Ceres Seq. ID no. 12376724
attggaatctctgggcgactcgacctgaacaaccccgcccgccgtcctgcccttgtgctctagtcctcccgcgaccgttccaaattcttcctcgcgttcgtattccacgcggcgacgtcgccatcgccatcgcggccgccgctccgcccctcttccttcgcatatacgtaggtaggcgcctccccaaaccctaagcctttatctcccacgcgcgcggctcgctctgctgcgccgcggctcgctcgaccccgcagatcgccggcgatgggatccaaggaccaggacggaggggctgcatcctcgggaggcggcttcttctcgtcgttcgccgccggcatgcgcagctggggcaccgccgtgcataaatccgtcaacgggctgcttggttatgaaggccttgaagttattaaccccgatggaggcacagatgatgctgaagaagaagctttgaaggggagatggaagcaggaggaccgtgatagctactggaagatgatgcacaaatacataggatcagatgttacatcacttgtgacacttccagtcataatttttgagccaatgacaatgcttcagaaaatggccgagttgatggaatactgtgaattgttagacaaagcagatgaatgtgaggatccatacatgtgtatggtttatgcttctacatgggctgtttctgtgtactttgcatatcaacgcacatggaagccttttaatccgatccttggagagacttatgagatggttaaccaccagggcattacatttcttgctgagcaggtaagccatcatcccccaatgggtgttgctcactgcgagaatgaacattttacttacgatatcacgtctaagttgaagaccaagtttttgggaaattcagtggaaatttacccagttggaaggactcgagtgacactaaaaaaatctggtgtcgtgttggatttggtgccaccactaacaaaggttaacaacctgatatttgggcgcacttgggttgattctcctggagagatggtcatgacgaacctgacaactggagacaaagttgtgctatatttccagccatgcggctggtttggggctggccgttacgaggtggatgggtatgtgtacagtgcagcggaagaacccaaaatcatgattacagggaagtggaacaagtccctgagttgccaaccatgtgaccaagaaggcgatcctcttccaggcacggagctgaaggagatctggagagttgctcctgccccacagggcgacaagtatcagtacacacacttcgcacacaaaataaacagcttcgacacggcacctaagaagctgttggcatctgattcacggctgaggcctgatagatatgccctcgagaagggtgacatgtctaagtccggggcagagaagagcaggctcgaggaacaacagagagctgagaaacgaactcgagaggccaagggcgagcaatttactcctagatggttcaacctgacagatgtggtctcccctacaccgtggggtgacctggaaatttatgaatacaacggcaaatacacagagcaccgggctgccatagaccgctccgatgtcaccgacgagacagatgtcacttcagtcaagttcagcccatggcaatatggtagctcatcttcccaatgattctccgtggccagaagccgccatgcctacgcgcattgtgtaaaacacttccaggcctggctttgctggtttgttgtgccatcagcggtttccttgcccttgtagtattgtggccttcccccttttttcccttaaatgctacagttattcaggaagtggtgtagtccgtgtactgtcgcaagtctagcagagattgcagagttttgtt

SEQ ID NO: 20073 - protein, 461 aa, Zea mays subsp. mays
  misc_feature (1)..(461): Ceres Seq. ID no. 12376725
MGSKDQDGGAASSGGGFFSSFAAGMRSWGTAVHKSVNGLLGYEGLEVINPDGGTDDAEEEALKGRWKQEDRDSYWKMMHKYIGSDVTSLVTLPVIIFEPMTMLQKMAELMEYCELLDKADECEDPYMCMVYASTWAVSVYFAYQRTWKPFNPILGETYEMVNHQGITFLAEQVSHHPPMGVAHCENEHFTYDITSKLKTKFLGNSVEIYPVGRTRVTLKKSGVVLDLVPPLTKVNNLIFGRTWVDSPGEMVMTNLTTGDKVVLYFQPCGWFGAGRYEVDGYVYSAAEEPKIMITGKWNKSLSCQPCDQEGDPLPGTELKEIWRVAPAPQGDKYQYTHFAHKINSFDTAPKKLLASDSRLRPDRYALEKGDMSKSGAEKSRLEEQQRAEKRTREAKGEQFTPRWFNLTDVVSPTPWGDLEIYEYNGKYTEHRAAIDRSDVTDETDVTSVKFSPWQYGSSSSQ

SEQ ID NO: 20074 - protein, 437 aa, Zea mays subsp. mays
  misc_feature (1)..(437): Ceres Seq. ID no. 12376726
MRSWGTAVHKSVNGLLGYEGLEVINPDGGTDDAEEEALKGRWKQEDRDSYWKMMHKYIGSDVTSLVTLPVIIFEPMTMLQKMAELMEYCELLDKADECEDPYMCMVYASTWAVSVYFAYQRTWKPFNPILGETYEMVNHQGITFLAEQVSHHPPMGVAHCENEHFTYDITSKLKTKFLGNSVEIYPVGRTRVTLKKSGVVLDLVPPLTKVNNLIFGRTWVDSPGEMVMTNLTTGDKVVLYFQPCGWFGAGRYEVDGYVYSAAEEPKIMITGKWNKSLSCQPCDQEGDPLPGTELKEIWRVAPAPQGDKYQYTHFAHKINSFDTAPKKLLASDSRLRPDRYALEKGDMSKSGAEKSRLEEQQRAEKRTREAKGEQFTPRWFNLTDVVSPTPWGDLEIYEYNGKYTEHRAAIDRSDVTDETDVTSVKFSPWQYGSSSSQ

SEQ ID NO: 20075 - protein, 385 aa, Zea mays subsp. mays
  misc_feature (1)..(385): Ceres Seq. ID no. 12376727
MMHKYIGSDVTSLVTLPVIIFEPMTMLQKMAELMEYCELLDKADECEDPYMCMVYASTWAVSVYFAYQRTWKPFNPILGETYEMVNHQGITFLAEQVSHHPPMGVAHCENEHFTYDITSKLKTKFLGNSVEIYPVGRTRVTLKKSGVVLDLVPPLTKVNNLIFGRTWVDSPGEMVMTNLTTGDKVVLYFQPCGWFGAGRYEVDGYVYSAAEEPKIMITGKWNKSLSCQPCDQEGDPLPGTELKEIWRVAPAPQGDKYQYTHFAHKINSFDTAPKKLLASDSRLRPDRYALEKGDMSKSGAEKSRLEEQQRAEKRTREAKGEQFTPRWFNLTDVVSPTPWGDLEIYEYNGKYTEHRAAIDRSDVTDETDVTSVKFSPWQYGSSSSQ

SEQ ID NO: 20076 - DNA, 1463 bp, Zea mays subsp. mays
  misc_feature (1)..(1463): Ceres Seq. ID no. 12376728
gcacgagaccattacctagaacatcctaatcgaaaaaaccaaatgaatagccctgtgaatatataactgcgcccagaaaaccgtcgcaacgaccgcgtctcttgcgttctagtaggaagctagaatagcaggtagcgcctggtggccatggccacggcgtctgcagcttgtcatggcggggggatcgtgtactacaaggtccttccgatgagcatgttcctgctgctgctccgagggctcgtgcagccggtggcggccgcggcgtgctccgtggacgccatctacagcttcggcgactccatcgctgacacgggcaacctcctgcgcgagggccccgttggcttcttcgcctccatcggcagctacccgtacggccagaccctccgcaaacccacaggccgggtgctccgacggcctcctcatcatcgactacttcgcgatggcgctgaacctatcgctggtgagcccgtacctggacaagggagccgacttcgccagcggcgccaacttcgcggtggccggggccacggcgctggaccgggccgtgttgctgcagagcggcatcatggctccaccggcgagcgtgccgctcagctcccagctcgactggttcaaggcgcacctcaacgccaccgcctgcccctcgctacaagattgcgccaagaagctcgccggagcgctgttcttggtcggcgagatcggagggaacgactacaactacggcttcttacagggattcaggtcgatcgaggccatgaaggcctacgtgccacaggtcataaacgccataatggacgtcgccaaggaagtgatcgagctaggcgcgacccagatcgtgatcccggggaacttcccgatcgggtgctccccgagctacctctccctcttcgccgcgtccggcgacctcgacgaccggggctgcctcaggagctacaacgccttcgcccagcaccacaacgagcagctccaggcggccatcgacgggctgaggaaggccaacaccgacgtcaccgtcgtgtacgcggactactacggcgccttcatgcacctgctggaccatgcttcgctcctcgggttcgagcagggcgcgctcctgcaggcgtgctgcggggcgggcggcgcgtacaacttcaacatgaactcgatgtgcggcgcgccgggcacgacgacgtgcgcggacccggcgcgcaacgtcagctgggacggcatccacctcacgcagcaggcgtacagggccatcgcgctgtcccttctcatggaggggttcgcgcagccggatgacgccgtgcaagagatctggagctgctgacgtgcacccgttttggtttcattgggcctgtacctgctatcgatacgtatatatttttcctctagactagaattttgtacctgctattgatccatgtataggtgtttgcattgttcatatatataataataacgtgggaaattagaaatggttt

SEQ ID NO: 20077 - protein, 377 aa, Zea mays subsp. mays
  misc_feature (1)..(377): Ceres Seq. ID no. 12376729
MATASAACHGGGIVYYKVLPMSMFLLLLRGLVQPVAAAACSVDAIYSFGDSIADTGNLLREGPVGFFASIGSYPYGQTLRKPTGRVLRRPPHHRLLRDGAEPIAGEPVPGQGSRLRQRRQLRGGRGHGAGPGRVAAERHHGSTGERAAQLPARLVQGAPQRHRLPLATRLRQEARRSAVLGRRDRRERLQLRLLTGIQVDRGHEGLRATGHKRHNGRRQGSDRARRDPDRDPGELPDRVLPELPLPLRRVRRPRRPGLPQELQRLRPAPQRAAPGGHRRAEEGQHRRHRRVRGLLRRLHAPAGPCFAPRVRAGRAPAGVLRGGRRVQLQHELDVRRAGHDDVRGPGAQRQLGRHPPHAAGVQGHRAVPSHGGVRAAG

SEQ ID NO: 20078 - protein, 357 aa, Zea mays subsp. mays
  misc_feature (1)..(357): Ceres Seq. ID no. 12376730
MSMFLLLLRGLVQPVAAAACSVDAIYSFGDSIADTGNLLREGPVGFFASIGSYPYGQTLRKPTGRVLRRPPHHRLLRDGAEPIAGEPVPGQGSRLRQRRQLRGGRGHGAGPGRVAAERHHGSTGERAAQLPARLVQGAPQRHRLPLATRLRQEARRSAVLGRRDRRERLQLRLLTGIQVDRGHEGLRATGHKRHNGRRQGSDRARRDPDRDPGELPDRVLPELPLPLRRVRRPRRPGLPQELQRLRPAPQRAAPGGHRRAEEGQHRRHRRVRGLLRRLHAPAGPCFAPRVRAGRAPAGVLRGGRRVQLQHELDVRRAGHDDVRGPGAQRQLGRHPPHAAGVQGHRAVPSHGGVRAAG

SEQ ID NO: 20079 - protein, 355 aa, Zea mays subsp. mays
  misc_feature (1)..(355): Ceres Seq. ID no. 12376731
MFLLLLRGLVQPVAAAACSVDAIYSFGDSIADTGNLLREGPVGFFASIGSYPYGQTLRKPTGRVLRRPPHHRLLRDGAEPIAGEPVPGQGSRLRQRRQLRGGRGHGAGPGRVAAERHHGSTGERAAQLPARLVQGAPQRHRLPLATRLRQEARRSAVLGRRDRRERLQLRLLTGIQVDRGHEGLRATGHKRHNGRRQGSDRARRDPDRDPGELPDRVLPELPLPLRRVRRPRRPGLPQELQRLRPAPQRAAPGGHRRAEEGQHRRHRRVRGLLRRLHAPAGPCFAPRVRAGRAPAGVLRGGRRVQLQHELDVRRAGHDDVRGPGAQRQLGRHPPHAAGVQGHRAVPSHGGVRAAG

SEQ ID NO: 20080 - protein, 289 aa, Zea mays subsp. mays
  misc_feature (1)..(289): Ceres Seq. ID no. 12376732
MALNLSLVSPYLDKGADFASGANFAVAGATALDRAVLLQSGIMAPPASVPLSSQLDWFKAHLNATACPSLQDCAKKLAGALFLVGEIGGNDYNYGFLQGFRSIEAMKAYVPQVINAIMDVAKEVIELGATQIVIPGNFPIGCSPSYLSLFAASGDLDDRGCLRSYNAFAQHHNEQLQAAIDGLRKANTDVTVVYADYYGAFMHLLDHASLLGFEQGALLQACCGAGGAYNFNMNSMCGAPGTTTCADPARNVSWDGIHLTQQAYRAIALSLLMEGFAQPDDAVQEIWSC

SEQ ID NO: 20081 - DNA, 1703 bp, Zea mays subsp. mays
  misc_feature (1)..(1703): Ceres Seq. ID no. 12376841
gcacgagaccattacctagaacatcctaatcgaaaagaccgaataaccacccgtctgccgctgtgccgcacggcccgcaccccgcacgagacccgtccttgaggggcacgtcctagatcggtggcgccttcctctcgccgccgatacggtgcctctcgcggtctcgctccccctcgcaggtcttttggtttttttagttcctccctttgcttcttggaggtgtttgttgccgtctcacccgcagttcttgaggtacgcacgcagtaatccggcttctttctatgttccgatgtcttgctggttggatgaggagggtacgacgctctgtggagagatctaatcgcgctggtaaactggggcgatcggtgtgggggaatcggatagcgtggatgggatttgggattggaagagaagctggaggatgccttttttctggatgacggtgataatcgtggacgagctaagctcattgagtgtctggctgatgtgggattgggtggcatatgctggattgctaactgttccatctggtgcaccaagcaattggactgcactggggttgggattgggattgggatgggattgctttgcctttgattgtgtatatgcttattatgtgctcatccgctgtggctttggccggaactttgcagacatgcagagccagatagtgtgccacgggtgcaggacccttctgttctacccaagaggtgctccgagcgtgtgttgtgcggtatgccatgtggtcaccaatgtgccgcctccagcaatggagatggctcgacttatatgtggtggctgccagacattattgatgtatgctcgcagtgcaacaactgtaagatgctcatgttgtgacacagtcaatcttgtcagaccagtgagtagcatagctcatgtgaactgtggccagtgccaaacagtgttgatgtatccatacggagcaccgtctgtcaaatgtgctgtttgcaacttcattacaaatgttggcggggtgactcccatgatacctttgccaccaccagcactacctgcatcaagtggaacttcatatatcatcccgtcaatttccgtgccgacgaatcaaccgcggaatgtaactgttgtcgttgaaaacccaatgacagtagatgacaagggaaaattggtgagcaatgttgtagtaggggttacgagcggcgggaaaaagtgacggcatatcacaaccgtgtgtagctttgtccaaactatctaaaaagggtttaagaatacataccttgtatcatactgctgtttggcgatcggctgctcgacggaggaatccccctccctggagagcgtagtggcaaagcagcgaggctttcgccactgcgaacgagccaaaaaaaaacgaagtgcgggtgtgcatactcagagtatatctgtagcttgttaccccttgattcttttgtatgtaatatgggctctgcctgactttcactgtgtgatcaaatttccaagcccgtgggcgctgttgctgcgtgccttgttattagtgaataacaaacattgcaaatggctcttgaaatacagtgtgtgtgtgttttaatctctctgcatttatgttaatcagcaggtgccaccatttgctgttccagactgataatgcagagtttgtatccacgttctttggagaaaacatttgaggctcatacgctgtttcatgtcccatnngtatattttct

SEQ ID NO: 20082 - protein, 256 aa, Zea mays subsp. mays
  misc_feature (1)..(256): Ceres Seq. ID no. 12376842
MPFFWMTVIIVDELSSLSVWLMWDWVAYAGLLTVPSGAPSNWTALGLGLGLGWDCFAFDCVYAYYVLIRCGFGRNFADMQSQIVCHGCRTLLFYPRGAPSVCCAVCHVVTNVPPPAMEMARLICGGCQTLLMYARSATTVRCSCCDTVNLVRPVSSIAHVNCGQCQTVLMYPYGAPSVKCAVCNFITNVGGVTPMIPLPPPALPASSGTSYIIPSISVPTNQPRNVTVVVENPMTVDDKGKLVSNVVVGVTSGGKK

SEQ ID NO: 20083 - protein, 251 aa, Zea mays subsp. mays
  misc_feature (1)..(251): Ceres Seq. ID no. 12376843
MTVIIVDELSSLSVWLMWDWVAYAGLLTVPSGAPSNWTALGLGLGLGWDCFAFDCVYAYYVLIRCGFGRNFADMQSQIVCHGCRTLLFYPRGAPSVCCAVCHVVTNVPPPAMEMARLICGGCQTLLMYARSATTVRCSCCDTVNLVRPVSSIAHVNCGQCQTVLMYPYGAPSVKCAVCNFITNVGGVTPMIPLPPPALPASSGTSYIIPSISVPTNQPRNVTVVVENPMTVDDKGKLVSNVVVGVTSGGKK

SEQ ID NO: 20084 - protein, 235 aa, Zea mays subsp. mays
  misc_feature (1)..(235): Ceres Seq. ID no. 12376844
MWDWVAYAGLLTVPSGAPSNWTALGLGLGLGWDCFAFDCVYAYYVLIRCGFGRNFADMQSQIVCHGCRTLLFYPRGAPSVCCAVCHVVTNVPPPAMEMARLICGGCQTLLMYARSATTVRCSCCDTVNLVRPVSSIAHVNCGQCQTVLMYPYGAPSVKCAVCNFITNVGGVTPMIPLPPPALPASSGTSYIIPSISVPTNQPRNVTVVVENPMTVDDKGKLVSNVVVGVTSGGKK

SEQ ID NO: 20085 - DNA, 1588 bp, Zea mays subsp. mays
  misc_feature (1)..(1588): Ceres Seq. ID no. 12376845
gagaccattacctagaacatcctaatcgaaaaaccgattcccacgtgattgcggcgcggccgcgcgaggagtgctcgtagccctcccccccgcccgcccgcccagattcggtcgcccatggcgagggacccagcccgcaccgtcttcataggtaacttggacgaaaaggtatctgagagaatcttgtatgagattcttattcaggcaggccatgtagtagacctgcatgtacccagtgacaaggagagtaacagtctcaaaggttacgcttttgttgagtatgaaaccgaggaaatcgcacaatacgctgttaagcttttctcaggacttgttcggatcagtggtaaaacgcttaagttcatgattgctggttatgacaaaccgtcttcaaatgtcaatacctcagtaatgctcaatcctgtaccctcttcaaatggcaataatccacatatcaggtggtaaacgggaggattggaggttatgtcttttctctcactccttatccatatggttttcaagctttatcaggtggacaagtacacggccatggccagcctttgcacatcggacatacttgaaggcttgaagctgtcgtccttacagtctcatcgaccgatgccacagcgacacatgcacgaacaagagcacctgcccgactgagcgtgcacgacctcgcgccgatcagggccaagaactcacccccgtcgtgtgtgccgatggaggtggaggccgacgggatccaggaagccaccgcaggcgcaggagacggcggcggcgtggcacgcatgtcttcttctgcgtcgccgcgacgtccaggggcaacaagaacagcatctcctacttccacaccaacgcggtcggcgaggacgccgagtcggcgctcgcgctcgccgcgctctgcctcgaccacgcccccgaccaccaccggtggcaccaccacaccgtcgccggggcgaagacgttcgcgttcctctcggccgacgacggccgcacgtacttcgccgcggccgacccgagccccggcgccgccgaggtggtccggttcctggagcgcgtccgcgacgcgtgcgacgccgcgcccaggaagcgcctgcgcgacgaggcggtggcccccgtcgctcgccagttcgccaggacgctgcgggcggcggcggcgggcccgagctcaggcgcggagctaccggaggcctcgctgcaggcgaaggagccgtccacgccgctggcgccggtctgcgagaaagacgaggaggagcgccagagggccggagagcgacgtcgcgccttcttgcagccggaggaaagcgcaagcgcgcttccggggtggcgcccgtggtggcgccacgcgtcggtcgtgatcgtcgtggatgtggtgctgtgcctcgtgctgttcgccgtgtggatgggggtttgcaaaggcttcgggtgtctgcgatgaaaatcgcccgagagcatgcaattgtaaatttgtaatcacatccatgctgtgtgcatggttcgcgttctttatgttaatttgcttgtcagatatcacatctacaatttgaaggaaaaaaacggtttaagaaacgaagacgcatgccttcaatgc

SEQ ID NO: 20086 - protein, 212 aa, Zea mays subsp. mays
  misc_feature (1)..(212): Ceres Seq. ID no. 12376846
MEVEADGIQEATAGAGDGGGVARMSSSASPRRPGATRTASPTSTPTRSARTPSRRSRSPRSASTTPPTTTGGTTTPSPGRRRSRSSRPTTAARTSPRPTRAPAPPRWSGSWSASATRATPRPGSACATRRWPPSLASSPGRCGRRRRARAQARSYRRPRCRRRSRPRRWRRSARKTRRSARGPESDVAPSCSRRKAQARFRGGARGGATRRS

SEQ ID NO: 20087 - protein, 189 aa, Zea mays subsp. mays
  misc_feature (1)..(189): Ceres Seq. ID no. 12376847
MSSSASPRRPGATRTASPTSTPTRSARTPSRRSRSPRSASTTPPTTTGGTTTPSPGRRRSRSSRPTTAARTSPRPTRAPAPPRWSGSWSASATRATPRPGSACATRRWPPSLASSPGRCGRRRRARAQARSYRRPRCRRRSRPRRWRRSARKTRRSARGPESDVAPSCSRRKAQARFRGGARGGATRRS

SEQ ID NO: 20088 - protein, 114 aa, Zea mays subsp. mays
  misc_feature (1)..(114): Ceres Seq. ID no. 12376848
MARDPARTVFIGNLDEKVSERILYEILIQAGHVVDLHVPSDKESNSLKGYAFVEYETEEIAQYAVKLFSGLVRISGKTLKFMIAGYDKPSSNVNTSVMLNPVPSSNGNNPHIRW

SEQ ID NO: 20089 - DNA, 2120 bp, Zea mays subsp. mays
  misc_feature (1)..(2120): Ceres Seq. ID no. 12376866
gcacgagaccattacctagaacatcctaatcgaaaaaatgtcggagcagcagcagccattgccgcagcctcggagcagcatgcgggaggctctggagaaggaggacaaggagaaggcggcggctgctgcggcggccaaggagaaggcggccgtccccaagaacggcaacggcaacggcggcaagaatggcggcggcgccggcagcggcaacggcggagcgcccccgcagtccggggaggagacggcccgcgagatccaggtggtcagggaggcgtaccgccgcgagacggccgcgccggcctacgtcatacccgaggagccgccggccgtggtcgagctcgtcggctggtacatctacggcttctgctcctacttcatcacccacctgctgctgccggtcctcttcccggccatcatcacgcaggtcgccttccccaactccgacttcacgcccgaccccaagtacaccctcaagggcgtcacctgctccgtccacgagatgtccatgtaccagaggcttaccaagcactccattgtgatcgatggatcccggatgtcaccattgggctggagtggactgtcgtgggcaatcggcatcctcatcgtggcgccgctcctcacccagaccgctcaccatctcgaccgtggccagtaccagtcgctgatcctcattgccgccacgtccttcgggtccttcttctgcctgctaacaggcttcttcaagacggtctgggtgttcctgttctacatcctcttcatcgctggctcgatcatcgtcgctgaggcggtgcacacccgcaaccttgggctgatgatccgtggcctggctgcgcatgactcgggcaagcaccttgtccttcgccgccgcgctgctgccagccagctcagcctgtactgcactgccataggaggcattggagctgccctcatggcagctttcatgtaccacatgctgcggcgcactgaccagctcactggcctctgggtcgtgtccatcttctgtggccttatctggttcatcggcatctgccatggcctcttcacaaacaggcccagcagctcgtcacccaccaccgcattcgagcccaacttcttcaccaagctcagctacagcatgaccctcctccgttacccgcaggccattggcagcctggttgcggtgttcctgtcctctttcgccacaatgtgcatcttcaccagcggcacgctctatgctatcggtggtgtctgcatcaagccggtgctcgtgcttgcgctatggatcctctactttctgttccccttgatctcgctcccgctcctccacccgatccagatcataatccgcgcggacgccgtgcgcatgcagctgctcgggttcataatctgcctgttcgtgtccggtgccgggttctacttcaagagccacaggtggagggctgcccacatcatcgtcatcgccctggtccagagcaccgccaatggcatactgtacgcgttcggccgcatcctgctcctcgatgcctcgccgccggggaaggagggtgcgttctcggtctggtacgcgtttgttcgtgtcaccggtgccatgatcggcttcgctgcctcctccgctggccctgggcgcgcgggagggtcctttgctgctgcgttcctcgggagcttcctgggcatcatcgtgctgatcttcggcaacgtcagcaacatcggggcgctgaaggcggccgggcacctcaaggggatggacgacgagaagaggatgggcggtctcgggatggagaagggcgagggcatgggtagcgccgtcgctgattctggcgagagcagggggagggtatgatgatgactattcgtgacagtgaattcctgggaggtgggggagaaaaggattgcgtcctgtggaggttgtgcttgtgagaaggatttgttctctcttttttttcttgtttctttggccgtgtttcagtgacactgttgatggatcccagtgcttcgcccgtttgatgcatcatggtggtggtggtgatgatggatgacatagtggtaggggagtgtgtgctagttgttaatgtgttatttattcttttgcttgcaagacaattgtaactgatgatcgttagatcatatggttcttccttcgt

SEQ ID NO: 20090 - protein, 593 aa, Zea mays subsp. mays
  misc_feature (1)..(593): Ceres Seq. ID no. 12376867
MSEQQQPLPQPRSSMREALEKEDKEKAAAAAAAKEKAAVPKNGNGNGGKNGGGAGSGNGGAPPQSGEETAREIQVVREAYRRETAAPAYVIPEEPPAVVELVGWYIYGFCSYFITHLLLPVLFPAIITQVAFPNSDFTPDPKYTLKGVTCSVHEMSMYQRLTKHSIVIDGSRMSPLGWSGLSWAIGILIVAPLLTQTAHHLDRGQYQSLILIAATSFGSFFCLLTGFFKTVWVFLFYILFIAGSIIVAEAVHTRNLGLMIRGLAAHDSGKHLVLRRRAAASQLSLYCTAIGGIGAALMAAFMYHMLRRTDQLTGLWVVSIFCGLIWFIGICHGLFTNRPSSSSPTTAFEPNFFTKLSYSMTLLRYPQAIGSLVAVFLSSFATMCIFTSGTLYAIGGVCIKPVLVLALWILYFLFPLISLPLLHPIQIIIRADAVRMQLLGFIICLFVSGAGFYFKSHRWRAAHIIVIALVQSTANGILYAFGRILLLDASPPGKEGAFSVWYAFVRVTGAMIGFAASSAGPGRAGGSFAAAFLGSFLGIIVLIFGNVSNIGALKAAGHLKGMDDEKRMGGLGMEKGEGMGSAVADSGESRGRV

SEQ ID NO: 20091 - protein, 579 aa, Zea mays subsp. mays
  misc_feature (1)..(579): Ceres Seq. ID no. 12376868
MREALEKEDKEKAAAAAAAKEKAAVPKNGNGNGGKNGGGAGSGNGGAPPQSGEETAREIQVVREAYRRETAAPAYVIPEEPPAVVELVGWYIYGFCSYFITHLLLPVLFPAIITQVAFPNSDFTPDPKYTLKGVTCSVHEMSMYQRLTKHSIVIDGSRMSPLGWSGLSWAIGILIVAPLLTQTAHHLDRGQYQSLILIAATSFGSFFCLLTGFFKTVWVFLFYILFIAGSIIVAEAVHTRNLGLMIRGLAAHDSGKHLVLRRRAAASQLSLYCTAIGGIGAALMAAFMYHMLRRTDQLTGLWVVSIFCGLIWFIGICHGLFTNRPSSSSPTTAFEPNFFTKLSYSMTLLRYPQAIGSLVAVFLSSFATMCIFTSGTLYAIGGVCIKPVLVLALWILYFLFPLISLPLLHPIQIIIRADAVRMQLLGFIICLFVSGAGFYFKSHRWRAAHIIVIALVQSTANGILYAFGRILLLDASPPGKEGAFSVWYAFVRVTGAMIGFAASSAGPGRAGGSFAAAFLGSFLGIIVLIFGNVSNIGALKAAGHLKGMDDEKRMGGLGMEKGEGMGSAVADSGESRGRV

SEQ ID NO: 20092 - protein, 439 aa, Zea mays subsp. mays
  misc_feature (1)..(439): Ceres Seq. ID no. 12376869
MSMYQRLTKHSIVIDGSRMSPLGWSGLSWAIGILIVAPLLTQTAHHLDRGQYQSLILIAATSFGSFFCLLTGFFKTVWVFLFYILFIAGSIIVAEAVHTRNLGLMIRGLAAHDSGKHLVLRRRAAASQLSLYCTAIGGIGAALMAAFMYHMLRRTDQLTGLWVVSIFCGLIWFIGICHGLFTNRPSSSSPTTAFEPNFFTKLSYSMTLLRYPQAIGSLVAVFLSSFATMCIFTSGTLYAIGGVCIKPVLVLALWILYFLFPLISLPLLHPIQIIIRADAVRMQLLGFIICLFVSGAGFYFKSHRWRAAHIIVIALVQSTANGILYAFGRILLLDASPPGKEGAFSVWYAFVRVTGAMIGFAASSAGPGRAGGSFAAAFLGSFLGIIVLIFGNVSNIGALKAAGHLKGMDDEKRMGGLGMEKGEGMGSAVADSGESRGRV

SEQ ID NO: 20093 - DNA, 1092 bp, Zea mays subsp. mays
  misc_feature (1)..(1092): Ceres Seq. ID no. 12376878
gcacgagaccatttacctagaacatcctaatcaaaaaaatccatcttcagagagagagagagagatagagagagagagagagttggtttgcatggggtgtgtgtcctccaaggagtccagacgacgacctccgggatacgaggatcccaacaccttagctagagagaccacgttttctgtcaacgaagtggaggccctctacgagctgtacaagaggataagctattccataaccaaagacggcctaatccacaaggaggagttccagctcgctctcttccggaacagtaacaagaggaaccttttcgccgatcggatatttgacctgttcgacctgaagcgcaacggagtgattgagttcggggagttcgttcgctccctcgacgttttccacccagctacgcccgtggaagaaaagatcgcctttgcgtttcggctgtacgatctgagaggcactggattcattggacgcgaagagctgaaggaaatggtgctggccattctgaacgaatcagaattacttctttccgacgacgccgtcgaagaaatcgtggatcagactttcaggcaagcggacatgaacggcgacgggaagatagatcctgatgaatggaaggtgttcgcgagcaaaaacccggcacttctaaagaacatgacgctcccatacctcaagtaaaaacccggtacttctaaagaacattaattacccgcaccgcacatgactgggcggcttgatctgacgacgacgtgttgcattttgttgttgttgttgttgttgttgttgttgttgttgttgttgttgttgtgcatcgtcatcttgtacacgtacagggacataaccatggcgttccccagctttgttctcaactctggagccagtgacgacgagttgtagtagctgcgagcatgcatggccaagctgcgagcgaggaaggaacgctgacctcactcctcagttcactaagtttcagacggagcagcagcaggaggacccctcctgaaaggtgatttggaagctggtggttcactcaagctgctaggatcatctgtggaagaacacacatgctccatacttgcccagcccacagcaac

SEQ ID NO: 20094 - protein, 224 aa, Zea mays subsp. mays
  misc_feature (1)..(224): Ceres Seq. ID no. 12376879
HETIYLEHPNQKNPSSEREREIERERELVCMGCVSSKESRRRPPGYEDPNTLARETTFSVNEVEALYELYKRISYSITKDGLIHKEEFQLALFRNSNKRNLFADRIFDLFDLKRNGVIEFGEFVRSLDVFHPATPVEEKIAFAFRLYDLRGTGFIGREELKEMVLAILNESELLLSDDAVEEIVDQTFRQADMNGDGKIDPDEWKVFASKNPALLKNMTLPYLK

SEQ ID NO: 20095 - protein, 194 aa, Zea mays subsp. mays
  misc_feature (1)..(194): Ceres Seq. ID no. 12376880
MGCVSSKESRRRPPGYEDPNTLARETTFSVNEVEALYELYKRISYSITKDGLIHKEEFQLALFRNSNKRNLFADRIFDLFDLKRNGVIEFGEFVRSLDVFHPATPVEEKIAFAFRLYDLRGTGFIGREELKEMVLAILNESELLLSDDAVEEIVDQTFRQADMNGDGKIDPDEWKVFASKNPALLKNMTLPYLK

SEQ ID NO: 20096 - DNA, 1370 bp, Zea mays subsp. mays
  misc_feature (1)..(1370): Ceres Seq. ID no. 12376881
gcacgagaccattacctagaacatcctaatcgaaaaattttccaagctttctccagatcaaatcagaaaggggaagggaagaacggcccagcaatgccgctctgcagcttctacgcctccacctccgttcccgtcgtcaagccccagcagtccgtcgcctcgtccaagccccccaccacggcggtggcctccgtggcgacaactgtgccgatgcgcagtgcagcgacggtgacgccagccgtggccacaacaacgagcctagcgctgtctctgcacctgccggagctgccgtcgcaggtgaaggacaagatcctgagcctggagctgatgggcgtggactatgggcgcgcgctggagcagaacccggcgctccgcgacgcggcgccggagtccatccacgcggtggtgtcgttcctccagtcccgcgggctccagttcaaggacctgggccgcgtcttcggcatgtgcccgtccgtgctgaccgccagcgtccgcgccgacctccgccccgtgttcgccttcctctccgcggacctgggcgtgccggagtcggcgcaccgggcgcgtggtgatcaagtgcccgcgcgtgctggcctgcagcgtccgcgaccagctccgccccgcgctcatctacctccgccgcctgggcttccgggacagccgcgcgctggcgctgcaggacccgatcctcctcgtctccagcgtggagcgcaccctggcgccgaagctggagtacctggccgggctcggcatgtcccgcgacgacgcggtcgccatggtgctgcgctgcccggcgctcttcaccttcagcatcgagcggaactaccggcccaagttcgagtacctggtggacgccatgggcggcggcgtcgaggacgtcaaggccttcccgcagtacttcgccttcagcctcgagaagcggatcgcgccgcgccaccgcgccgcggaggacgccggcgtcgcgctgccgcttccggacatgctcaaggccaccgacgaggagttcagggagatgctcgacaaggagcgggagctgcacgagcaggcagcgacgacggactgatcgatcggggggctagtacagcggtttgcacctgatccgactatccgaagcatccaaccgccgtcttcgtggcgatcgagtgtcctggccatgacggtagccagcacatgtagtcatttgatttgagtaattagtagcctgtacatatatgcattgacattatttgctatagtcacgattcgtagctcatgagagaatatgtctgttctttctccattattccaagtgaataagcaccgagctggaagtcgtgtctttatgtacacacgtgtaccaagtttacaggaatgaatgtaccaagttcatt

SEQ ID NO: 20097 - protein, 365 aa, Zea mays subsp. mays
  misc_feature (1)..(365): Ceres Seq. ID no. 12376882
ARDHYLEHPNRKIFQAFSRSNQKGEGKNGPAMPLCSFYASTSVPVVKPQQSVASSKPPTTAVASVATTVPMRSAATVTPAVATTTSLALSLHLPELPSQVKDKILSLELMGVDYGRALEQNPALRDAAPESIHAVVSFLQSRGLQFKDLGRVFGMCPSVLTASVRADLRPVFAFLSADLGVPESAHRARGDQVPARAGLQRPRPAPPRAHLPPPPGLPGQPRAGAAGPDPPRLQRGAHPGAEAGVPGRARHVPRRRGRHGAALPGALHLQHRAELPAQVRVPGGRHGRRRRGRQGLPAVLRLQPREADRAAPPRRGGRRRRAAASGHAQGHRRGVQGDARQGAGAARAGSDDGLIDRGASTAVCT

SEQ ID NO: 20098 - protein, 334 aa, Zea mays subsp. mays
  misc_feature (1)..(334): Ceres Seq. ID no. 12376883
MPLCSFYASTSVPVVKPQQSVASSKPPTTAVASVATTVPMRSAATVTPAVATTTSLALSLHLPELPSQVKDKILSLELMGVDYGRALEQNPALRDAAPESIHAVVSFLQSRGLQFKDLGRVFGMCPSVLTASVRADLRPVFAFLSADLGVPESAHRARGDQVPARAGLQRPRPAPPRAHLPPPPGLPGQPRAGAAGPDPPRLQRGAHPGAEAGVPGRARHVPRRRGRHGAALPGALHLQHRAELPAQVRVPGGRHGRRRRGRQGLPAVLRLQPREADRAAPPRRGGRRRRAAASGHAQGHRRGVQGDARQGAGAARAGSDDGLIDRGASTAVCT

SEQ ID NO: 20099 - protein, 295 aa, Zea mays subsp. mays
  misc_feature (1)..(295): Ceres Seq. ID no. 12376884
MRSAATVTPAVATTTSLALSLHLPELPSQVKDKILSLELMGVDYGRALEQNPALRDAAPESIHAVVSFLQSRGLQFKDLGRVFGMCPSVLTASVRADLRPVFAFLSADLGVPESAHRARGDQVPARAGLQRPRPAPPRAHLPPPPGLPGQPRAGAAGPDPPRLQRGAHPGAEAGVPGRARHVPRRRGRHGAALPGALHLQHRAELPAQVRVPGGRHGRRRRGRQGLPAVLRLQPREADRAAPPRRGGRRRRAAASGHAQGHRRGVQGDARQGAGAARAGSDDGLIDRGASTAVCT

SEQ ID NO: 20100 - DNA, 1782 bp, Zea mays subsp. mays
  misc_feature (1)..(1782): Ceres Seq. ID no. 12376897
gcacgagaccattacctagaacatcctaatcgaaaaatacgttcccacttctagcgcccccttgctccttcttccccgagccgcgtgcccgcgtcaagtaaccaaacctgtcataggctgatagctctcctctccactcctctttcctcgttgattcctcataccatctcctgcgccaccgacggcgaatccgcgtggcggcgccccgaatctgcgctctccgcgctcagatctcccgcctccgcgcttccggatgagccgcccccatttgcccaaggacccggccttcccgcgcaccaacgggtccttggacggcggggcccgcggccgcggcgagatcgaggaggttggcgctgcggccaccgtaggacgtcgaacagtcccccctgcagtcctcgtctccgtcggcatcgtcgccaccggcggcgatgtcatcgtgcgggcaatacatgctacaccgggtgcgcaagctggacaccctagcgggcgttgccatcaagtacggtgtcgaggtagccgacattaagaggctgaacggcctctcagctgacctccagatgtttgctcacaagacactgcagattccactcccggggaggcatcctccgtcatcataccagcagaatggctcatatgagagtgacgacagggaatgtactccacaccgcattcacgatgatatcttggattcaatattgaaaacaccaaagcccaaagtttcgccagctatgagtcttctgcagggatactatggccttgcaccacctccaaagagagatcaaacaagcgaaggcactgagatggcagtttacagtaaaggcaaatctgcttttctggatgttgagccgtggctggagccgccaaattccgacccattccctctccagaataggaaaaccaaaagcttgacgataggttctcttgatggtgatactgatgagaatggtgacagtgaaaggttcgtaaggcggcgccagaaagctgatggtgagctgttaccgagggaggaaaatggcggtgactttctggcaagcgccggaaaaggcttggcactgaggccaaagtctagcagtcgaccagacatgaacaagagccagcagaatctttttgcaatggcggagcctttgtttggcagcggcgtgcaaactgtaaggaaatcatccagcactccagagttccaggagccagagaccagcaccagttcatccatatggtcagcaagcaagtggagcataaatacagatgcttttgctcttcctctccccatccctcgttttgacaacattccgaagcccattgctgcttggagaaacaaggcggctcgcgattaataaactgctatataatcttggttatgtgcatgatttttcctgaactccaggaggcccagaacgtgtaattaggttggcaccagcctttacagctttggaagcagagcagagcagagcaggaccgtaattggctcctgcgagctagaacattctgaagatcagacgcatgtcgtccatgtttccagatggtatctagattaggtttacatgattctcatgttatattgggcatgttgcgccaagagtagcaacgttaatattcggtcatataaattatagatgctagatgacatagaggagacttgatatttgcggagggtattcttttgtacacaatgagataatgtagagcatcaaaggaatccacaatgagatatgtgttgtatgtgtgatcccatacccaaacatggaggaggattgctttatttaactacagattttgtttttcttc

SEQ ID NO: 20101 - protein, 300 aa, Zea mays subsp. mays
  misc_feature (1)..(300): Ceres Seq. ID no. 12376898
MSSCGQYMLHRVRKLDTLAGVAIKYGVEVADIKRLNGLSADLQMFAHKTLQIPLPGRHPPSSYQQNGSYESDDRECTPHRIHDDILDSILKTPKPKVSPAMSLLQGYYGLAPPPKRDQTSEGTEMAVYSKGKSAFLDVEPWLEPPNSDPFPLQNRKTKSLTIGSLDGDTDENGDSERFVRRRQKADGELLPREENGGDFLASAGKGLALRPKSSSRPDMNKSQQNLFAMAEPLFGSGVQTVRKSSSTPEFQEPETSTSSSIWSASKWSINTDAFALPLPIPRFDNIPKPIAAWRNKAARD

SEQ ID NO: 20102 - protein, 293 aa, Zea mays subsp. mays
  misc_feature (1)..(293): Ceres Seq. ID no. 12376899
MLHRVRKLDTLAGVAIKYGVEVADIKRLNGLSADLQMFAHKTLQIPLPGRHPPSSYQQNGSYESDDRECTPHRIHDDILDSILKTPKPKVSPAMSLLQGYYGLAPPPKRDQTSEGTEMAVYSKGKSAFLDVEPWLEPPNSDPFPLQNRKTKSLTIGSLDGDTDENGDSERFVRRRQKADGELLPREENGGDFLASAGKGLALRPKSSSRPDMNKSQQNLFAMAEPLFGSGVQTVRKSSSTPEFQEPETSTSSSIWSASKWSINTDAFALPLPIPRFDNIPKPIAAWRNKAARD

SEQ ID NO: 20103 - protein, 257 aa, Zea mays subsp. mays
  misc_feature (1)..(257): Ceres Seq. ID no. 12376900
MFAHKTLQIPLPGRHPPSSYQQNGSYESDDRECTPHRIHDDILDSILKTPKPKVSPAMSLLQGYYGLAPPPKRDQTSEGTEMAVYSKGKSAFLDVEPWLEPPNSDPFPLQNRKTKSLTIGSLDGDTDENGDSERFVRRRQKADGELLPREENGGDFLASAGKGLALRPKSSSRPDMNKSQQNLFAMAEPLFGSGVQTVRKSSSTPEFQEPETSTSSSIWSASKWSINTDAFALPLPIPRFDNIPKPIAAWRNKAARD

SEQ ID NO: 20104 - DNA, 1298 bp, Zea mays subsp. mays
  misc_feature (1)..(1298): Ceres Seq. ID no. 12376925
gagggagacgacgacgacggcgatggcctggctgcggcggacggagacgctggtgctgctgctcgtggtgcttctggcctccgcttcatcccccgcggcggctgcggcggcgggagaggaggaggaaagagtgatcaggctgaagcgctgtgatggtggttattcttataaccatactctggctcatattcttgtcgaatacgcgtctgcggtgtacacatctgacttgacatcacttttctcatggacctgtccaaggtgcaaaggccacacaaagggatttgaggtgatagagatcatagtagatgtggagaactgcttacaggcgtttgttggagttgcacctgaccctcgatccataatcattgcttttagaggcactcaacagcacagtgtctcaaattggatcgaagatcttttctggaagcagcttgatgtgacatacccaggcatgccggatgcaatggtccatcatgggttttattctgcatattataatacaactctgcgatatgagatcctgaagtctattaaatgggcaagaaaaacatatggaaatctacccataaatgttgtgggacactccatgggaggggctttagcttcgttttgtgcccttgatctatctgttaaatttggatcgcaggaggttgaactcatgacctttggacagcctcggataggcaatcctgcatttgctgtatactttggtgaacaagtcccaagaacaatccgtgtgacccatcagaatgatattgtgccgcatttaccaccgtattattattacctaggtgaatggacataccaccacttcgctagagaggtttggcttcatgagagcatagatggaaatgtagttaccagaaacgagacggtatgtgatgattctggtgaagacccgacctgtagcaggtcggtctatgggatgagcgtagcagatcatcttgagtactatgatgtcacactacatgctgattcaagaggaacctgtcaattcgtgattggtgcagccaaccaagtatacaactacgttcgtgaagttgatggatccatcatcctgtcaagatacccgcaagaaccacaagctctagaatctatgtgactttgtatgccacggaatgcacccctgtacagtatttttcattttcattttgtgtacagctcatgaaatgctgggcgctcctggagctctccagaggataaggagaggctcacctttttaaatgtgtcccctttgctcaagtgagaatcgtgcatgtaagctccataagattgtccgcacaattcaatttgtgtat

SEQ ID NO: 20105 - protein, 366 aa, Zea mays subsp. mays
  misc_feature (1)..(366): Ceres Seq. ID no. 12376926
RETTTTAMAWLRRTETLVLLLVVLLASASSPAAAAAAGEEEERVIRLKRCDGGYSYNHTLAHILVEYASAVYTSDLTSLFSWTCPRCKGHTKGFEVIEIIVDVENCLQAFVGVAPDPRSIIIAFRGTQQHSVSNWIEDLFWKQLDVTYPGMPDAMVHHGFYSAYYNTTLRYEILKSIKWARKTYGNLPINVVGHSMGGALASFCALDLSVKFGSQEVELMTFGQPRIGNPAFAVYFGEQVPRTIRVTHQNDIVPHLPPYYYYLGEWTYHHFAREVWLHESIDGNVVTRNETVCDDSGEDPTCSRSVYGMSVADHLEYYDVTLHADSRGTCQFVIGAANQVYNYVREVDGSIILSRYPQEPQALESM

SEQ ID NO: 20106 - protein, 359 aa, Zea mays subsp. mays
  misc_feature (1)..(359): Ceres Seq. ID no. 12376927
MAWLRRTETLVLLLVVLLASASSPAAAAAAGEEEERVIRLKRCDGGYSYNHTLAHILVEYASAVYTSDLTSLFSWTCPRCKGHTKGFEVIEIIVDVENCLQAFVGVAPDPRSIIIAFRGTQQHSVSNWIEDLFWKQLDVTYPGMPDAMVHHGFYSAYYNTTLRYEILKSIKWARKTYGNLPINVVGHSMGGALASFCALDLSVKFGSQEVELMTFGQPRIGNPAFAVYFGEQVPRTIRVTHQNDIVPHLPPYYYYLGEWTYHHFAREVWLHESIDGNVVTRNETVCDDSGEDPTCSRSVYGMSVADHLEYYDVTLHADSRGTCQFVIGAANQVYNYVREVDGSIILSRYPQEPQALESM

SEQ ID NO: 20107 - protein, 216 aa, Zea mays subsp. mays
  misc_feature (1)..(216): Ceres Seq. ID no. 12376928
MPDAMVHHGFYSAYYNTTLRYEILKSIKWARKTYGNLPINVVGHSMGGALASFCALDLSVKFGSQEVELMTFGQPRIGNPAFAVYFGEQVPRTIRVTHQNDIVPHLPPYYYYLGEWTYHHFAREVWLHESIDGNVVTRNETVCDDSGEDPTCSRSVYGMSVADHLEYYDVTLHADSRGTCQFVIGAANQVYNYVREVDGSIILSRYPQEPQALESM

SEQ ID NO: 20108 - DNA, 1001 bp, Zea mays subsp. mays
  misc_feature (1)..(1001): Ceres Seq. ID no. 12377073
agcctgacacccggtccacggcagaatcccattccgattcctccctccccgtcccgtctcccctctcgccctaggggccggggggctagggtttgcttcaccgccggcctccccctccaacgcggcaccggcccccgcgcaccgggcccggatgctatgctgctgagctgcaggaccctctccacctgggtgcgccgcctcgtcgcttgcatgggaggttgctttggatgctgtgctaagccaactccaataatagcagtagacgagccttccaagcggttgaggatccaggggcgatcagtaaggaaggctagcctctcggaggacttttggagcacgagtgcgcatgagatggagaacagcgggatccaatcgcagaggagcatgtcttcgatcagcacgttggctcagtccagcgatcagcatgcgtcaggaagttgcagcaacccgaatgagtttatgaatcaaggtcttatgctctggaaccagaccagacaacagtgggttggaagcaaaaaacgccactctagatctcaacagcctcgagaaccaaagttgagttggaacacaacgtatgaaagtctgctaggaagcaataagccattctcccaaccgatacctcttggcgaaatggtagatttgcttgtggacgcttgggagcaagaaggcctttatgattaggcctgtggagttcattatttgactcggattaatcgcttaatgcagaagctntaggttntcaagcgttatattttntgagcacaatggtgtaccatggatgtatcatgaaacatggcagcatccttatattaagcaattgtaatatattattcctgtcaagcttatgagaacattggatgacattgtacctggtgtttttatatgaaaactttgggtgatctaggcaactggattaaaacaaaaaaggggcatgccttgttgtaaactgagccatgggaagtgaaattaattgaaaacagaagaaatgtgaagttattgcc

SEQ ID NO: 20109 - protein, 226 aa, Zea mays subsp. mays
  misc_feature (1)..(226): Ceres Seq. ID no. 12377074
SLTPGPRQNPIPIPPSPSRLPSRPRGRGARVCFTAGLPLQRGTGPRAPGPDAMLLSCRTLSTWVRRLVACMGGCFGCCAKPTPIIAVDEPSKRLRIQGRSVRKASLSEDFWSTSAHEMENSGIQSQRSMSSISTLAQSSDQHASGSCSNPNEFMNQGLMLWNQTRQQWVGSKKRHSRSQQPREPKLSWNTTYESLLGSNKPFSQPIPLGEMVDLLVDAWEQEGLYD

SEQ ID NO: 20110 - protein, 174 aa, Zea mays subsp. mays
  misc_feature (1)..(174): Ceres Seq. ID no. 12377075
MLLSCRTLSTWVRRLVACMGGCFGCCAKPTPIIAVDEPSKRLRIQGRSVRKASLSEDFWSTSAHEMENSGIQSQRSMSSISTLAQSSDQHASGSCSNPNEFMNQGLMLWNQTRQQWVGSKKRHSRSQQPREPKLSWNTTYESLLGSNKPFSQPIPLGEMVDLLVDAWEQEGLYD

SEQ ID NO: 20111 - protein, 156 aa, Zea mays subsp. mays
  misc_feature (1)..(156): Ceres Seq. ID no. 12377076
MGGCFGCCAKPTPIIAVDEPSKRLRIQGRSVRKASLSEDFWSTSAHEMENSGIQSQRSMSSISTLAQSSDQHASGSCSNPNEFMNQGLMLWNQTRQQWVGSKKRHSRSQQPREPKLSWNTTYESLLGSNKPFSQPIPLGEMVDLLVDAWEQEGLYD

SEQ ID NO: 20112 - DNA, 955 bp, Zea mays subsp. mays
  misc_feature (1)..(955): Ceres Seq. ID no. 12377211
acgcttggcagttggcaagcagcgagtggggggagacagccaactctctatcctcttcccccctcgtccatccccatcccaccgccttgctctcccctctccacttccagctgtccatggctgcagcagcgtgctcctctgcctcgccgctcctcctcccctcagggccgagacatgcgtcggcctccagggcgtggtttctcggcggcaggagcagggcgctgagatcagaggcgccgtgctgctgcaaggccgccgccgcccgtggaagcgctccgcaatgcgggacggtcggtggtggcagcagcagcacccggagggggctgctaggcgtggccctgggagcctctgccttggggctggccgcgtttgacgccgtcgccgccgggttgccgccggaggagaagcccaagctctgcgacgccgcctgcgaaggcgagctcgaaaatgttggttgagcctccgtgcctatggtaactacagaatccggactgcagtacaaggatatcaaagtgggcgaagggcctagcccacccgttggtttccaggttgcagcaaattatgttgctatggtgccaactgggcagatattcgacagttcgctggagaaaggtcagccctacatattccgtgttggatcagggcaggtgatcaaggggcttgatgagggaattttgtcgatgaaggttggaggactacgtcggctgtacatacctgggccattagcgttccctaagggtcttacttctgctcctggaaggccaagagtacccccaagcagccctgtcgttttcgacgtcaatttactgtacataccaggtntcgatgatgagtgaaggcattctgtggcaacagtcatcttttttttgtatacttcattcgagagcaacatactgtacatntagagcacaattctttcaagctataaaatctatgcgaatatctatgttaaccg

SEQ ID NO: 20113 - protein, 151 aa, Zea mays subsp. mays
  misc_feature (1)..(151): Ceres Seq. ID no. 12377212
AWQLASSEWGETANSLSSSPLVHPHPTALLSPLHFQLSMAAAACSSASPLLLPSGPRHASASRAWFLGGRSRALRSEAPCCCKAAAARGSAPQCGTVGGGSSSTRRGLLGVALGASALGLAAFDAVAAGLPPEEKPKLCDAACEGELENVG

SEQ ID NO: 20114 - protein, 123 aa, Zea mays subsp. mays
  misc_feature (1)..(123): Ceres Seq. ID no. 12377213
RLAVGKQRVGGDSQLSILFPPRPSPSHRLALPSPLPAVHGCSSVLLCLAAPPPLRAETCVGLQGVVSRRQEQGAEIRGAVLLQGRRRPWKRSAMRDGRWWQQQHPEGAARRGPGSLCLGAGRV

SEQ ID NO: 20115 - protein, 121 aa, Zea mays subsp. mays
  misc_feature (1)..(121): Ceres Seq. ID no. 12377214
  misc_feature (118)..(118): Xaa is any aa, unknown or other
MVTTESGLQYKDIKVGEGPSPPVGFQVAANYVAMVPTGQIFDSSLEKGQPYIFRVGSGQVIKGLDEGILSMKVGGLRRLYIPGPLAFPKGLTSAPGRPRVPPSSPVVFDVNLLYIPGXDDE

SEQ ID NO: 20116 - protein, 113 aa, Zea mays subsp. mays
  misc_feature (1)..(113): Ceres Seq. ID no. 12377215
MAAAACSSASPLLLPSGPRHASASRAWFLGGRSRALRSEAPCCCKAAAARGSAPQCGTVGGGSSSTRRGLLGVALGASALGLAAFDAVAAGLPPEEKPKLCDAACEGELENVG

SEQ ID NO: 20117 - DNA, 1061 bp, Zea mays subsp. mays
  misc_feature (1)..(1061): Ceres Seq. ID no. 12377591
cgcaattaaccctcactaaagggaacaaaagctggagctccaccgcggtggcggccgctctagaactagtggatcccccgggctgcaggaattcgcacgagaccattacctagaacatcctaatcgaaaagaaactcactcgccatcgccgggcatcgcgggcatcgcacacaaacgcaacctgcagccatggcacagaagctcgcgccaccgacggcggcggtcgtcgtcgtcctgctggcgctcgccttgtcggccgccgcgcagaactgcgggtgcgcgtcgggcctgtgctgcagccggttcgggtactgcgggacgggcgaggactactgcggcgccgggtgccagtcgggcccctgcgacgtgccggagaccaacaacgcgtccgtggccagcatcgtgacgccggccttcttcgacgcgctcctcgcgcaggccgccgcctcgtgcgaggccaacggcttctacacccgcgacgccttcctcgccgccgccggctactacccggcgttcggccgcaccggcaccgtcgacgactccaagcgcgagatcgccgccttcttcggcaacgccaaccacgagaccataaagttctgctacatcaacgagatcgacgggccgagcaagaactactgcgaccggaacaacacgcagtggccgtgccaggcggggaaggggtactacggccgcggcccgctgcagatctcctggaacttcaactacgggcccgcggggcagagcatcggcttcgacgggctgggcgaccccgacgcggtggcgcgcagcgccgtgctcgcgttccgctccgcgctctggtactggatgaacaacgtgcacggggccatcgtctccggccagggcttcggcgccaccatccgggccatcaacggcgcgctcgagtgcgacggcaagaaccccaactccgtcaacaaccgcgtcgcctactacaagcagttctgccaggatttcggcgtcgacccgggcaacaacctcacctgctgaatgatctctctctcattgggttgttgtcctgtacttacacatgtgttggttgatgg

SEQ ID NO: 20118 - protein, 271 aa, Zea mays subsp. mays
  misc_feature (1)..(271): Ceres Seq. ID no. 12377592
MAQKLAPPTAAVVVVLLALALSAAAQNCGCASGLCCSRFGYCGTGEDYCGAGCQSGPCDVPETNNASVASIVTPAFFDALLAQAAASCEANGFYTRDAFLAAAGYYPAFGRTGTVDDSKREIAAFFGNANHETIKFCYINEIDGPSKNYCDRNNTQWPCQAGKGYYGRGPLQISWNFNYGPAGQSIGFDGLGDPDAVARSAVLAFRSALWYWMNNVHGAIVSGQGFGATIRAINGALECDGKNPNSVNNRVAYYKQFCQDFGVDPGNNLTC

SEQ ID NO: 20119 - DNA, 1442 bp, Zea mays subsp. mays
  misc_feature (1)..(1442): Ceres Seq. ID no. 12377630
gcacgagaccattacctagaacatcctaatcgaaaaagggaacccatcttcttcttccccgcgctgcctgctgcctgctcgagcttggagatggcgttggtgcggcgatgcctctgtggatccgaggaagactgcagagcgcttttgggcatggaaaatctccggctgttctcctacagagagatcagagcaggcacaaacaacttcgatcagagtaacaagcttggacgaggtggttttggaactgtctacaagggagttctaagagacggcactgaatttgccgcgaaggttctgtcctcggaatccgagcaggggatcaaggagttcctagctgagatcgagagcatatcccaggtgaagcacgcgaacctcgtcaggcttctgggctgctgcgtacagaggaaaaaaaggatactggtgtacgagtaccttgcgaacaacagcctcgatcatgcgctcaaaggagcagcagcagatctaccctggagcacgaggtcgggcatctgcttgggcaccgccaaggggctgagctacctgcacgaggagcacgagccgaacatcgtgcacagggacatcaaagccagcaatgttcttctcgaccgagactacctgccaaagatcggagatttcgggctcgcgaagctgttcccggacaacatcacccacatcagcaccgcagtggtcggaacgagtggatacttggcgcctgaatacttcgtgcatgggcagctgaccaagaaagccgacgtctacagcttcggggtgcttgtcctggagatcatcagcgggaggagggtctcgcaaacgatccaggtcggacatgttcccggtgcgagaggcatggatgatgtaccagcaaggcaggctgctagagatcgtggacgcgagcatggggagctacccggagaaggaggtgctccggtacatcaaggtggggctggcctgcacgcaggccacgcccagcagccgccccacgatgcgccaggtgcttgccttgctgtcggaacggagatgctcccgccgagtttcgccgagcaccgcggccaccacacggcccctgccctggggggtttgcccgccggtccgctaatccatgcgtcgccgagggcgaggtggccggcggcggcgccgtcagcagcaacgtcgccgaagcaggtcctgagcctgaacgcgcaaccggcaatccggcatgtaactgaaactgatatagtcacgtgtgaggcggcgttcgttctgtcacgtaatcacttgcgttagaatttgattttctagtcttgttcgtgctcgcagtttggaccgggaaaaaagggtaggaggggctaggcaggtccataaacgagcatattgtttttaatctcaatccatatgagttagagaggattgagaatctgttcattttaatctcaattcatgtggattgaaagaaattgagtagattt

SEQ ID NO: 20120 - protein, 419 aa, Zea mays subsp. mays
  misc_feature (1)..(419): Ceres Seq. ID no. 12377631
ARDHYLEHPNRKREPIFFFPALPAACSSLEMALVRRCLCGSEEDCRALLGMENLRLFSYREIRAGTNNFDQSNKLGRGGFGTVYKGVLRDGTEFAAKVLSSESEQGIKEFLAEIESISQVKHANLVRLLGCCVQRKKRILVYEYLANNSLDHALKGAAADLPWSTRSGICLGTAKGLSYLHEEHEPNIVHRDIKASNVLLDRDYLPKIGDFGLAKLFPDNITHISTAVVGTSGYLAPEYFVHGQLTKKADVYSFGVLVLEIISGRRVSQTIQVGHVPGARGMDDVPARQAARDRGREHGELPGEGGAPVHQGGAGLHAGHAQQPPHDAPGACLAVGTEMLPPSFAEHRGHHTAPALGGLPAGPLIHASPRARWPAAAPSAATSPKQVLSLNAQPAIRHVTETDIVTCEAAFVLSRNHLR

SEQ ID NO: 20121 - protein, 389 aa, Zea mays subsp. mays
  misc_feature (1)..(389): Ceres Seq. ID no. 12377632
MALVRRCLCGSEEDCRALLGMENLRLFSYREIRAGTNNFDQSNKLGRGGFGTVYKGVLRDGTEFAAKVLSSESEQGIKEFLAEIESISQVKHANLVRLLGCCVQRKKRILVYEYLANNSLDHALKGAAADLPWSTRSGICLGTAKGLSYLHEEHEPNIVHRDIKASNVLLDRDYLPKIGDFGLAKLFPDNITHISTAVVGTSGYLAPEYFVHGQLTKKADVYSFGVLVLEIISGRRVSQTIQVGHVPGARGMDDVPARQAARDRGREHGELPGEGGAPVHQGGAGLHAGHAQQPPHDAPGACLAVGTEMLPPSFAEHRGHHTAPALGGLPAGPLIHASPRARWPAAAPSAATSPKQVLSLNAQPAIRHVTETDIVTCEAAFVLSRNHLR

SEQ ID NO: 20122 - protein, 369 aa, Zea mays subsp. mays
  misc_feature (1)..(369): Ceres Seq. ID no. 12377633
MENLRLFSYREIRAGTNNFDQSNKLGRGGFGTVYKGVLRDGTEFAAKVLSSESEQGIKEFLAEIESISQVKHANLVRLLGCCVQRKKRILVYEYLANNSLDHALKGAAADLPWSTRSGICLGTAKGLSYLHEEHEPNIVHRDIKASNVLLDRDYLPKIGDFGLAKLFPDNITHISTAVVGTSGYLAPEYFVHGQLTKKADVYSFGVLVLEIISGRRVSQTIQVGHVPGARGMDDVPARQAARDRGREHGELPGEGGAPVHQGGAGLHAGHAQQPPHDAPGACLAVGTEMLPPSFAEHRGHHTAPALGGLPAGPLIHASPRARWPAAAPSAATSPKQVLSLNAQPAIRHVTETDIVTCEAAFVLSRNHLR

SEQ ID NO: 20123 - DNA, 1370 bp, Zea mays subsp. mays
  misc_feature (1)..(1370): Ceres Seq. ID no. 12377688
acacacatacactcactcgtacgccgtcgcttcctgcggtacgtactctctgtccgcagcgttcctccagctagtagcagtagcagctagctagctagctagcaactggccatcggggctgctagcagcgtacgtacgtggcgcgatggctcctccagctcatgataggctccgccgcctggtgctgctcctcgtcgttgccaccgccgcggcggctttgcttctggcgccgacgacggcggatgctgcgctgccgcgggtgcagcacacgcccaccaaggccgacgggtcgctcgccatcctcgtcgtcggcgactggggccgccgtggacagttcaaccagaccttggttgcccagcagatgggcgtggtggggcagaagctggacatcgacttcgtcatctccaccggcgacaacatctacgacgacggcatcgccaacactagcgaccccctcttcaaggaatcgttctccaatatctacactgccaacagccttcagaagccttggtacctggtccttggtaaccatgactacacgggaaacgcgctcgcgcagctcgaccctgccattcgcaaagtggatagccggtacaccgccattgccaagtccttcattgtcaactcagggattgcggattttttcctcgtcgacacaacgccgttcattgtccactactggaacaacaccaagttcgattggagaggcgtcgctcctcgagacacctacatcgcgaatctcctcaaggacttgaagtgtgcactgacagcgtccaaggctccctggaagatcgtcgtgggtcaccaccccatcagcagcgcctgcgggcatgggaacaacactgagctggaggagttgcttctcccggtcctcaggacacacggggttgacatgtacttgaatggccatgaccactgccttcagcgcgtcagcagcagagacagtcgtcttcagctactaaccagcggcggcgggtccaaggcatgggctggcaagttcaagcccaccctcgacaaagtggagttcctctacgacggccaggggttcatgtcgatgcgcctgagcaggacggaagcccgcctcgcgttcttcgacgtcgctggcagcgtcctgcactgctggaccatgcatgcccaaaaattaaagacgacgacgacgacgaccgctgctgctgctgggcactaaattaagctttgctgggtacgatgagttgatgatgcaattaattatttggttttgtcgtcttttcgtgcgtgagagggaagcaataataattaattgctgctgcttctgttgttgtgtgcacatgcatgtgagggtgtcaagtatgttcagcctcttgcaagataaaatctctcgtcttctgtgg

SEQ ID NO: 20124 - protein, 346 aa, Zea mays subsp. mays
  misc_feature (1)..(346): Ceres Seq. ID no. 12377689
MAPPAHDRLRRLVLLLVVATAAAALLLAPTTADAALPRVQHTPTKADGSLAILVVGDWGRRGQFNQTLVAQQMGVVGQKLDIDFVISTGDNIYDDGIANTSDPLFKESFSNIYTANSLQKPWYLVLGNHDYTGNALAQLDPAIRKVDSRYTAIAKSFIVNSGIADFFLVDTTPFIVHYWNNTKFDWRGVAPRDTYIANLLKDLKCALTASKAPWKIVVGHHPISSACGHGNNTELEELLLPVLRTHGVDMYLNGHDHCLQRVSSRDSRLQLLTSGGGSKAWAGKFKPTLDKVEFLYDGQGFMSMRLSRTEARLAFFDVAGSVLHCWTMHAQKLKTTTTTTAAAAGH

SEQ ID NO: 20125 - protein, 274 aa, Zea mays subsp. mays
  misc_feature (1)..(274): Ceres Seq. ID no. 12377690
MGVVGQKLDIDFVISTGDNIYDDGIANTSDPLFKESFSNIYTANSLQKPWYLVLGNHDYTGNALAQLDPAIRKVDSRYTAIAKSFIVNSGIADFFLVDTTPFIVHYWNNTKFDWRGVAPRDTYIANLLKDLKCALTASKAPWKIVVGHHPISSACGHGNNTELEELLLPVLRTHGVDMYLNGHDHCLQRVSSRDSRLQLLTSGGGSKAWAGKFKPTLDKVEFLYDGQGFMSMRLSRTEARLAFFDVAGSVLHCWTMHAQKLKTTTTTTAAAAGH

SEQ ID NO: 20126 - protein, 197 aa, Zea mays subsp. mays
  misc_feature (1)..(197): Ceres Seq. ID no. 12377691
MIGSAAWCCSSSLPPPRRLCFWRRRRRMLRCRGCSTRPPRPTGRSPSSSSATGAAVDSSTRPWLPSRWAWWGRSWTSTSSSPPATTSTTTASPTLATPSSRNRSPISTLPTAFRSLGTWSLVTMTTRETRSRSSTLPFAKWIAGTPPLPSPSLSTQGLRIFSSSTQRRSLSTTGTTPSSIGEASLLETPTSRISSRT

SEQ ID NO: 20127 - DNA, 1439 bp, Zea mays subsp. mays
  misc_feature (1)..(1439): Ceres Seq. ID no. 12377701
gcacgagaccattacctagaacatcctaatcgaaaacgggtcgtcggcgtcctggtggtggtcgtatcttatctctctcactgccatagtgccatcgtgcgagcggcgagaaagtagaaggaagtgtgtcgtactcgtactcataccgggttggttggtttttgagacgtgtgcggtcgggagaggggatggagagaaagggagggtgctgcctcgcgccgaggtacgccgccaccgcggccgcgcagcaggcaggcgcggcctggcagatggggaggatcatgctcaagttccgcccgattgcncctaagccggcggccatggcgcccgcgccggcaccggcatcggcaccggtgaccggatcagccgccggtgccgggagagggaagcgaaaggccgcgtgcggaggcggcgggaggaggggccggaagcccaagaaggcggccaaagttgcgatggtgactgcagcgcctgcggcgacggcggcggcgcaagatgtgggcgactgccgggagcactgcgacaaggagaagtcgtcttcgtcgccgtcctcgtcctcgtcggggacgtcatccgtggactcgtcgccgccaccccggccgcagcagcgccagctcgcaacgctgccgctcatgcccgtgacggcggcggaggataaggccgctgcttgtcctgcgacagtggggccggatcagctcgtgccgtctcaggtggctacggcggcacggccgttggctccgcgcgcgatgcgccccgctgctgctgcagcttacttggtgacggtggaagaggtgaccgcgacgtggcgcgacggcgaggcgccggcctccgcgacgggcgcagacgaggccccggcgttcgtgtcggaccagtgggggcgcgtcacgtggtggaacgccgcgtttgtccgcgctgcatccgcggacgacggcgacgaggcggcggcgcccgtcgtgctcggcggagccctcccggcgtggggcacctgcgcgggattcacgtgccgcgtccgcgcccggcactggagcgcccggcgcntcggttcccccgtggtggcgccctgcgatgtttggcgtctggacgccgccggcagctacctttggcggctggacctgcaggccgcgctcactctcggcggctgcctgtgaaccgtacaccactgtcaagagcaagcaacgaatatgctgtgctactcctctacgtgcggagacgtgttgtattttattctatgagcgttatttactgacgtaaggcatggtttaatcgacggattgctatcctggtcgggcttaattaaggacgttgaagcctggtaaggtatactaagttagcgtccctcggaatgggagtgagtgagttgggaggacttgaaaatgtaagaagaaaaaaaacaaagcatgtgatggatgcttctagatgtgcaagatcagtcttcatcc

SEQ ID NO: 20128 - protein, 319 aa, Zea mays subsp. mays
  misc_feature (1)..(319): Ceres Seq. ID no. 12377702
  misc_feature (39)..(39): Xaa is any aa, unknown or other
  misc_feature (284)..(284): Xaa is any aa, unknown or other
MERKGGCCLAPRYAATAAAQQAGAAWQMGRIMLKFRPIXPKPAAMAPAPAPASAPVTGSAAGAGRGKRKAACGGGGRRGRKPKKAAKVAMVTAAPAATAAAQDVGDCREHCDKEKSSSSPSSSSSGTSSVDSSPPPRPQQRQLATLPLMPVTAAEDKAAACPATVGPDQLVPSQVATAARPLAPRAMRPAAAAAYLVTVEEVTATWRDGEAPASATGADEAPAFVSDQWGRVTWWNAAFVRAASADDGDEAAAPVVLGGALPAWGTCAGFTCRVRARHWSARRXGSPVVAPCDVWRLDAAGSYLWRLDLQAALTLGGCL

SEQ ID NO: 20129 - protein, 292 aa, Zea mays subsp. mays
  misc_feature (1)..(292): Ceres Seq. ID no. 12377703
  misc_feature (12)..(12): Xaa is any aa, unknown or other
  misc_feature (257)..(257): Xaa is any aa, unknown or other
MGRIMLKFRPIXPKPAAMAPAPAPASAPVTGSAAGAGRGKRKAACGGGGRRGRKPKKAAKVAMVTAAPAATAAAQDVGDCREHCDKEKSSSSPSSSSSGTSSVDSSPPPRPQQRQLATLPLMPVTAAEDKAAACPATVGPDQLVPSQVATAARPLAPRAMRPAAAAAYLVTVEEVTATWRDGEAPASATGADEAPAFVSDQWGRVTWWNAAFVRAASADDGDEAAAPVVLGGALPAWGTCAGFTCRVRARHWSARRXGSPVVAPCDVWRLDAAGSYLWRLDLQAALTLGGCL

SEQ ID NO: 20130 - protein, 288 aa, Zea mays subsp. mays
  misc_feature (1)..(288): Ceres Seq. ID no. 12377704
  misc_feature (8)..(8): Xaa is any aa, unknown or other
  misc_feature (253)..(253): Xaa is any aa, unknown or other
MLKFRPIXPKPAAMAPAPAPASAPVTGSAAGAGRGKRKAACGGGGRRGRKPKKAAKVAMVTAAPAATAAAQDVGDCREHCDKEKSSSSPSSSSSGTSSVDSSPPPRPQQRQLATLPLMPVTAAEDKAAACPATVGPDQLVPSQVATAARPLAPRAMRPAAAAAYLVTVEEVTATWRDGEAPASATGADEAPAFVSDQWGRVTWWNAAFVRAASADDGDEAAAPVVLGGALPAWGTCAGFTCRVRARHWSARRXGSPVVAPCDVWRLDAAGSYLWRLDLQAALTLGGCL

SEQ ID NO: 20131 - DNA, 696 bp, Zea mays subsp. mays
  misc_feature (1)..(696): Ceres Seq. ID no. 12377779
aaacactgtcgccgtccttctgtcgacgtacagcagatggagaactgcgaggtactcttcccgggaggcagcagcggggccaacgcgttcaccaggccagagcaggagaggaagcgcgggcagccatggacggaggaggagcacaagttgtttctcttgggcctgaagaaatatggccggggggattggaggaacatatcgcgcaattttgttcagaccaggacgcctactcaggtggtcagccatgcgcagaagtacttcatgaggcacaactccggcggcaaggacaagagaagatccagcatccacgacatcaccacagttaagctgagcgacgaccaggaccagcctccgtcctcgccatcccagtcctctctgatcactgaccagttcaacgcattagctctgacatccggcgctgcgtattcgccctccaattaacctttgcggctttgccggactactgggatatgtatatgccaatctttggaacggggtttgcaagatcaacgcctgcagtgtggcccgttcaattggatggaagctagaacattctgttttttttgggtgcaattcagtctgcagcaccatgaatctatcagatttctatctacttgtatagtacagactggagagaccgggagtgttaacaagtttgttgtatcatcttgtgtggtgtaataaacctgnaatttg

SEQ ID NO: 20132 - protein, 146 aa, Zea mays subsp. mays
  misc_feature (1)..(146): Ceres Seq. ID no. 12377780
KHCRRPSVDVQQMENCEVLFPGGSSGANAFTRPEQERKRGQPWTEEEHKLFLLGLKKYGRGDWRNISRNFVQTRTPTQVVSHAQKYFMRHNSGGKDKRRSSIHDITTVKLSDDQDQPPSSPSQSSLITDQFNALALTSGAAYSPSN

SEQ ID NO: 20133 - protein, 134 aa, Zea mays subsp. mays
  misc_feature (1)..(134): Ceres Seq. ID no. 12377781
MENCEVLFPGGSSGANAFTRPEQERKRGQPWTEEEHKLFLLGLKKYGRGDWRNISRNFVQTRTPTQVVSHAQKYFMRHNSGGKDKRRSSIHDITTVKLSDDQDQPPSSPSQSSLITDQFNALALTSGAAYSPSN

SEQ ID NO: 20134 - protein, 107 aa, Zea mays subsp. mays
  misc_feature (1)..(107): Ceres Seq. ID no. 12377782
TLSPSFCRRTADGELRGTLPGRQQRGQRVHQARAGEEARAAMDGGGAQVVSLGPEEIWPGGLEEHIAQFCSDQDAYSGGQPCAEVLHEAQLRRQGQEKIQHPRHHHS

SEQ ID NO: 20135 - DNA, 902 bp, Zea mays subsp. mays
  misc_feature (1)..(902): Ceres Seq. ID no. 12377811
gagtagtaattagtttgtgcccgtgtccgtgtttggttgaataataaattgacgaaagagggccaagtatagcttagagagagaagctagctagctgaaatggaggctagcagccgccgccgcgtctctcttgtgccactgctggtggtgatcatcgggtgctgtgcctgccgcgcccagatcccgatcccggcgaggacggacgggttcgtgtacggcgggaagccgccggcgtggggcgagacggtggtggtagaggcgttcttggacccagtgtgccccgacagccgcgacgcgtggccggcgctcaagatggtcgtcgagcactatagctcacgcgtgtccgtcgtcgttcacctcttcccgctgccttaccacagctatgccttcattgcgtgccggtcaattcatgcggtgaacaaactaaatccgtcgttcgtgtaccctctgctggagaagttcttcaaataccagaaacgttactataatcagccaacatacgaaaaatcaagagctacagtggttgatgaaataaccaagaaccttgttgtgcccatcatcggtgaaactaatttggcggcattcagagcaggtttcaacgattcacattctgatcaggctacaaggatatctttcaagaacggctgtgcacgaggtgtgaccgggacnccctacttctttgtgaatggcatacccatcaacgattcaggttctcctctggaanacaaggactggatttctatcctgcgtcccttggttggaaagatgtaacgcggttgctagtttgttcatcaataaagtcctagtagagtaaacaaacaaaagctgaataataaataacattaatcagcatcgtcattctcaggaaaaaaaaagagtgctaactcagnaactctcctcgc

SEQ ID NO: 20136 - protein, 223 aa, Zea mays subsp. mays
  misc_feature (1)..(223): Ceres Seq. ID no. 12377812
  misc_feature (190)..(190): Xaa is any aa, unknown or other
  misc_feature (209)..(209): Xaa is any aa, unknown or other
MEASSRRRVSLVPLLVVIIGCCACRAQIPIPARTDGFVYGGKPPAWGETVVVEAFLDPVCPDSRDAWPALKMVVEHYSSRVSVVVHLFPLPYHSYAFIACRSIHAVNKLNPSFVYPLLEKFFKYQKRYYNQPTYEKSRATVVDEITKNLVVPIIGETNLAAFRAGFNDSHSDQATRISFKNGCARGVTGXPYFFVNGIPINDSGSPLEXKDWISILRPLVGKM

SEQ ID NO: 20137 - protein, 152 aa, Zea mays subsp. mays
  misc_feature (1)..(152): Ceres Seq. ID no. 12377813
  misc_feature (119)..(119): Xaa is any aa, unknown or other
  misc_feature (138)..(138): Xaa is any aa, unknown or other
MVVEHYSSRVSVVVHLFPLPYHSYAFIACRSIHAVNKLNPSFVYPLLEKFFKYQKRYYNQPTYEKSRATVVDEITKNLVVPIIGETNLAAFRAGFNDSHSDQATRISFKNGCARGVTGXPYFFVNGIPINDSGSPLEXKDWISILRPLVGKM

SEQ ID NO: 20138 - DNA, 1088 bp, Zea mays subsp. mays
  misc_feature (1)..(1088): Ceres Seq. ID no. 12377821
tacgccaagcccgcaattaaccctcactaaagggaacaaaagctggagctccaccgcggtggcggccgctctagaactagtggatcccccgggctgcaggaattcgcacgagaccattacctagaacatcctaatcgaaaattatccgaggttccgtgcagcagtggaaaagagcagattttagcagagcagcgagggtcggagaagcctccccaagcttcgaatcgctatgcagcccgtcaaggtgtacgccgaccggcggtcgcaaccctcccgagctgtcatcatcttctgcagggtgaaccagatcgatttcgaggaggtcacggtggatctgttcaagtctcagcacctcacacccgaattcaaaaaaataaacccaatgggacaggtacctgcaattgttgatggaagattcaaactatttgaaagtcatgcgattttgaggtatcttgcatcggttttccctggagtagctgaccactggtatccttctgacttgttcaccagagccaaaattgagtcaatcttggattggcatcactcaaatttgcggcgtggtgcagcaacccttgtaatgcacactgcattggctcccttccttggtcttacgacaagtcatgaggctgtgaaacaagcagagaagcttgtgatgcagtcactgggggtgatcgaatccgtatggctgaaaggcgatgccaagttcttgctaggtatcccccagccatcgattgcagatctgagccttgtctgtgagataatgcagttggagatccttggcgatgaggtccgtgaccgattcctgggagctcatgagaggatccttgtctggatggacaaggtgaagaaagccacgagccctcattttgaggaagcccacgagctccttttccaagtgaagaaggcacgcatggtgcaaggcagcagcagcaaggcttttgagtcgagcacaaagctcaaaacagcatcaaagctctgacgaccaaaggcagaataagcgacagacagatccatcttgtgatataatataataaacgggaactattattaattactgttggtattaattacacttattccagaaggcc

SEQ ID NO: 20139 - protein, 249 aa, Zea mays subsp. mays
  misc_feature (1)..(249): Ceres Seq. ID no. 12377822
MQPVKVYADRRSQPSRAVIIFCRVNQIDFEEVTVDLFKSQHLTPEFKKINPMGQVPAIVDGRFKLFESHAILRYLASVFPGVADHWYPSDLFTRAKIESILDWHHSNLRRGAATLVMHTALAPFLGLTTSHEAVKQAEKLVMQSLGVIESVWLKGDAKFLLGIPQPSIADLSLVCEIMQLEILGDEVRDRFLGAHERILVWMDKVKKATSPHFEEAHELLFQVKKARMVQGSSSKAFESSTKLKTASKL

SEQ ID NO: 20140 - protein, 198 aa, Zea mays subsp. mays
  misc_feature (1)..(198): Ceres Seq. ID no. 12377823
MGQVPAIVDGRFKLFESHAILRYLASVFPGVADHWYPSDLFTRAKIESILDWHHSNLRRGAATLVMHTALAPFLGLTTSHEAVKQAEKLVMQSLGVIESVWLKGDAKFLLGIPQPSIADLSLVCEIMQLEILGDEVRDRFLGAHERILVWMDKVKKATSPHFEEAHELLFQVKKARMVQGSSSKAFESSTKLKTASKL

SEQ ID NO: 20141 - protein, 133 aa, Zea mays subsp. mays
  misc_feature (1)..(133): Ceres Seq. ID no. 12377824
MHTALAPFLGLTTSHEAVKQAEKLVMQSLGVIESVWLKGDAKFLLGIPQPSIADLSLVCEIMQLEILGDEVRDRFLGAHERILVWMDKVKKATSPHFEEAHELLFQVKKARMVQGSSSKAFESSTKLKTASKL

SEQ ID NO: 20142 - DNA, 898 bp, Zea mays subsp. mays
  misc_feature (1)..(898): Ceres Seq. ID no. 12377943
gcacgagaccattacctagaacatcctaatcgaaaactacaaggaaaatgaggattggggctgcagctagcaagaagaatacagatgctcagcagacatatgcaactaatggtgcataccagagttctcaaggcaattgttcagagaatgatcccaacaatacaacagtctttgtgggtgggttagattccaatgtagacgaggagtatctaagggaaatttttactccgtacggagaaatttcctatgtgaagattcctgtaggcaagcattgtggatttgttcaatttaccagcaggtcatgtgctgaggaagccatccaaatgctgaatgggagtcagattggtggacagaaagctcggctttcatggggccgtagtactcaaaacagacaggcttctcagcatgatgccaacagccagtataatgggaacaactattatcgataccaacagccgggtaatgaaggttatagctatggtgcacccaatgcacaagacccaagcattcaaaactactatggataccctggttatggtaactatgagcagcagtcaacacaggaacagcagcagcagcagcctccaccagcacaggagcagcctccaccggcaccacagtaacaatcatcgtggtgacgattgcttgggcacttctggaatgctatcagattagagggactacagtcagagcagtgccgtgccgaatgagacgtcctgaagatatggagggcatatagtctcatgggtgttcttgggccggtgttaatctacgatgacactcctgatgtctcttttgtttgtcattgagatcttgacggctgaagtatgcaccgttgaaattgatgtattcgtcgtcgtcggattgtttatttgctcggaaccattttttgcacttt

SEQ ID NO: 20143 - protein, 191 aa, Zea mays subsp. mays
  misc_feature (1)..(191): Ceres Seq. ID no. 12377944
MRIGAAASKKNTDAQQTYATNGAYQSSQGNCSENDPNNTTVFVGGLDSNVDEEYLREIFTPYGEISYVKIPVGKHCGFVQFTSRSCAEEAIQMLNGSQIGGQKARLSWGRSTQNRQASQHDANSQYNGNNYYRYQQPGNEGYSYGAPNAQDPSIQNYYGYPGYGNYEQQSTQEQQQQQPPPAQEQPPPAPQ

SEQ ID NO: 20144 - protein, 114 aa, Zea mays subsp. mays
  misc_feature (1)..(114): Ceres Seq. ID no. 12377945
MGVRLVDRKLGFHGAVVLKTDRLLSMMPTASIMGTTIIDTNSRVMKVIAMVHPMHKTQAFKTTMDTLVMVTMSSSQHRNSSSSSLHQHRSSLHRHHSNNHRGDDCLGTSGMLSD

SEQ ID NO: 20145 - protein, 99 aa, Zea mays subsp. mays
  misc_feature (1)..(99): Ceres Seq. ID no. 12377946
MLNGSQIGGQKARLSWGRSTQNRQASQHDANSQYNGNNYYRYQQPGNEGYSYGAPNAQDPSIQNYYGYPGYGNYEQQSTQEQQQQQPPPAQEQPPPAPQ

SEQ ID NO: 20146 - DNA, 3056 bp, Zea mays subsp. mays
  misc_feature (1)..(3056): Ceres Seq. ID no. 12377950
gcacgagaccattacctagaacatcctaatccaaaaatccaattttctctctctctcccgcctcctgttcagtttcccactcgccggaaccgccgcctctccaatccccgctaaccctcgctccgttttatcgcccccctctgcttccaaatcgaatcgcgtcctctccattctgccgtctcctctcctactcctcccccctgccgccgcaagatccaccagggctctcgaccgcaatggagccgcagctgacgcccggcgcggtggcggcggtctccgcccacgccgacggcaacggcacgctgcagccggtgctgcaggtggtggacgtgcggatggtcaacaacgccaagaacccctccgccgagcgcttccggatggtgctctccgacggcgaacacaccatgcagtccatgctcgccaccgccgagaacgcgcgcgtccgggacggctccatccagaagggctccatcgtccacctcctggagtgcacctgcagcaccatccagtctcgcaggatcattatcgttatcaaacttgatgttctgcaaagtgagtgtgccataattggaaaccccaggccctatgaaatgagaaaccaacctaatgagcagggcaccaacataccggccaatgctgctcaagctaatactggaacgtattccagtggccctggtttgctgggatcacctgctgcttcaaggccagcacaagttgctaataatgtaccatacagtggatcctatggtggttatcatggtacggtggtccctccgattgcccctgcagtagaatctgttcccaatgtggcatcgggtgtcacttatggtacaacttcagcgcataatacaatgaatgcgggcatgacacagtcaaacttgcagcagcgttcactgaactctcacccgaaccaaaggtttgcagttccttccatggctggtggcagtggtgctcctgggaatacatatggacaacctgcacagtcgttttatcagcaaccgcctccagggcatatgaatagaactcctgtgtctaagaacgatgcatatcgtcttgtcccattggctcaattgaacccttatctagataaatggacaatcaaggtcagggtaactgcaaagactgatctcaggttctacaacaatgctagaggtgctggaaaagtcttttcctttgatctccttgatgaacagcgtggagaaatccgtgcaacatgcttcaatacgcaggctgatcagttttttaacctcattgaggttgataaggtgtacctgatatctaaagggtcgttgaaaccagcacagaagaagtttaactccttgaatcacgagtatgagataagtctggattccagaacatctattgaagtttgtgctgatgatgatagcaacatccctaggcagcagtataatttccggaagataagtgaaattgagaacattgagaaagatgctattttggacttgattggaattgtcacatcagttggcccttctgtcacgtttatccgaaaggatggcgtggaaacccagagaagaacacttgaactgaaagacatgtctggtcgaagtgtacaacttaccttatgggggaagttgtgtgttgctgaaggcaaccagctgcagtcgctgtgcgattctggtttgaatcctgttctagctttgaaaggtgcccgcgttactgactacagtggtagatctgtgtcctcagctggctcaactcagttaaaaatagacccagaaattcctgaggctgagagtctgcggcgctggtacgcaactggaggaaagacagctgcttgtgtttctctgtcagtggtaagtatgggtggtacttgtgtccggaaatcaatcgctcagatcaaggatgaaaatctggggcagttagagaagccagactttatcactgttaaagctgcaatttcacatctgatagcagataatttttgttatcctgcttgcaccattgacgtgaatggtaggatgtgcaacaaaaaggtaacagataatggtgatgggacatggcgttgtgacaaatgcgaccagagcttaccaaattgtgagtacagatacgtgctgaatggccagatccaggaccacagtggggtcaccaattttactgcattcgaagatgctgctaaggtgatgattggccacagtggccacgagctcaacaacattagtgtagaagactcggaacgatttgcagagatcttgcaggcggctcgttggcagcagtttctgttcacgctgaaagtcaaggaggagatctataatgatgcgccgcaagtcaagtgcaacattactaaagcagagaagctggatccggcaatagagagttcttaccttctaggggtaatcaatggcctgttgcaggatgacactggctcaccttctggggcgcaaggtgccatggcctacaatgctggtatcagcaacactggcgctggacgaagtgtgccaacctccaacagtgcctacaccaccaatttgagtggtccaaggtatggcgagtctgcaaaccagctcgcgcagcaggaaagcacgtacaccggggtgaccactccagtgtcggcggcacggaatgtgcagcagacctgcgtgtcctgcgggtcaagtgggcacaacgtgcagaactgccctgcaggaacatacaggcagcaggcggctgcaagcgcagcaagctcctacggtacttcgcagcctcgcaatggactgtgcttcaaatgcaatcagcctggacactttgccaactcttgtccactactggctcctgctccccagcagcagcagcagtatcggagcggcggcgctccctcaggcggttatggtaggcagcagccctatgttggggctaccaactactgaaagtcattatctctgtcgagtcagtcgtgatgttggttttgcttagatgcctgtcctgaatggcatcgctgcgtccatgtgaagtagatgcaaaccattcctttttatgtttgtgtgtgaagttagaactatgtatcagtactttatgttttcgtcttataaatcctcgttgccgtgtcagttctgttg

SEQ ID NO: 20147 - protein, 876 aa, Zea mays subsp. mays
  misc_feature (1)..(876): Ceres Seq. ID no. 12377951
MEPQLTPGAVAAVSAHADGNGTLQPVLQVVDVRMVNNAKNPSAERFRMVLSDGEHTMQSMLATAENARVRDGSIQKGSIVHLLECTCSTIQSRRIIIVIKLDVLQSECAIIGNPRPYEMRNQPNEQGTNIPANAAQANTGTYSSGPGLLGSPAASRPAQVANNVPYSGSYGGYHGTVVPPIAPAVESVPNVASGVTYGTTSAHNTMNAGMTQSNLQQRSLNSHPNQRFAVPSMAGGSGAPGNTYGQPAQSFYQQPPPGHMNRTPVSKNDAYRLVPLAQLNPYLDKWTIKVRVTAKTDLRFYNNARGAGKVFSFDLLDEQRGEIRATCFNTQADQFFNLIEVDKVYLISKGSLKPAQKKFNSLNHEYEISLDSRTSIEVCADDDSNIPRQQYNFRKISEIENIEKDAILDLIGIVTSVGPSVTFIRKDGVETQRRTLELKDMSGRSVQLTLWGKLCVAEGNQLQSLCDSGLNPVLALKGARVTDYSGRSVSSAGSTQLKIDPEIPEAESLRRWYATGGKTAACVSLSVVSMGGTCVRKSIAQIKDENLGQLEKPDFITVKAAISHLIADNFCYPACTIDVNGRMCNKKVTDNGDGTWRCDKCDQSLPNCEYRYVLNGQIQDHSGVTNFTAFEDAAKVMIGHSGHELNNISVEDSERFAEILQAARWQQFLFTLKVKEEIYNDAPQVKCNITKAEKLDPAIESSYLLGVINGLLQDDTGSPSGAQGAMAYNAGISNTGAGRSVPTSNSAYTTNLSGPRYGESANQLAQQESTYTGVTTPVSAARNVQQTCVSCGSSGHNVQNCPAGTYRQQAAASAASSYGTSQPRNGLCFKCNQPGHFANSCPLLAPAPQQQQQYRSGGAPSGGYGRQQPYVGATNY

SEQ ID NO: 20148 - protein, 843 aa, Zea mays subsp. mays
  misc_feature (1)..(843): Ceres Seq. ID no. 12377952
MVNNAKNPSAERFRMVLSDGEHTMQSMLATAENARVRDGSIQKGSIVHLLECTCSTIQSRRIIIVIKLDVLQSECAIIGNPRPYEMRNQPNEQGTNIPANAAQANTGTYSSGPGLLGSPAASRPAQVANNVPYSGSYGGYHGTVVPPIAPAVESVPNVASGVTYGTTSAHNTMNAGMTQSNLQQRSLNSHPNQRFAVPSMAGGSGAPGNTYGQPAQSFYQQPPPGHMNRTPVSKNDAYRLVPLAQLNPYLDKWTIKVRVTAKTDLRFYNNARGAGKVFSFDLLDEQRGEIRATCFNTQADQFFNLIEVDKVYLISKGSLKPAQKKFNSLNHEYEISLDSRTSIEVCADDDSNIPRQQYNFRKISEIENIEKDAILDLIGIVTSVGPSVTFIRKDGVETQRRTLELKDMSGRSVQLTLWGKLCVAEGNQLQSLCDSGLNPVLALKGARVTDYSGRSVSSAGSTQLKIDPEIPEAESLRRWYATGGKTAACVSLSVVSMGGTCVRKSIAQIKDENLGQLEKPDFITVKAAISHLIADNFCYPACTIDVNGRMCNKKVTDNGDGTWRCDKCDQSLPNCEYRYVLNGQIQDHSGVTNFTAFEDAAKVMIGHSGHELNNISVEDSERFAEILQAARWQQFLFTLKVKEEIYNDAPQVKCNITKAEKLDPAIESSYLLGVINGLLQDDTGSPSGAQGAMAYNAGISNTGAGRSVPTSNSAYTTNLSGPRYGESANQLAQQESTYTGVTTPVSAARNVQQTCVSCGSSGHNVQNCPAGTYRQQAAASAASSYGTSQPRNGLCFKCNQPGHFANSCPLLAPAPQQQQQYRSGGAPSGGYGRQQPYVGATNY

SEQ ID NO: 20149 - protein, 829 aa, Zea mays subsp. mays
  misc_feature (1)..(829): Ceres Seq. ID no. 12377953
MVLSDGEHTMQSMLATAENARVRDGSIQKGSIVHLLECTCSTIQSRRIIIVIKLDVLQSECAIIGNPRPYEMRNQPNEQGTNIPANAAQANTGTYSSGPGLLGSPAASRPAQVANNVPYSGSYGGYHGTVVPPIAPAVESVPNVASGVTYGTTSAHNTMNAGMTQSNLQQRSLNSHPNQRFAVPSMAGGSGAPGNTYGQPAQSFYQQPPPGHMNRTPVSKNDAYRLVPLAQLNPYLDKWTIKVRVTAKTDLRFYNNARGAGKVFSFDLLDEQRGEIRATCFNTQADQFFNLIEVDKVYLISKGSLKPAQKKFNSLNHEYEISLDSRTSIEVCADDDSNIPRQQYNFRKISEIENIEKDAILDLIGIVTSVGPSVTFIRKDGVETQRRTLELKDMSGRSVQLTLWGKLCVAEGNQLQSLCDSGLNPVLALKGARVTDYSGRSVSSAGSTQLKIDPEIPEAESLRRWYATGGKTAACVSLSVVSMGGTCVRKSIAQIKDENLGQLEKPDFITVKAAISHLIADNFCYPACTIDVNGRMCNKKVTDNGDGTWRCDKCDQSLPNCEYRYVLNGQIQDHSGVTNFTAFEDAAKVMIGHSGHELNNISVEDSERFAEILQAARWQQFLFTLKVKEEIYNDAPQVKCNITKAEKLDPAIESSYLLGVINGLLQDDTGSPSGAQGAMAYNAGISNTGAGRSVPTSNSAYTTNLSGPRYGESANQLAQQESTYTGVTTPVSAARNVQQTCVSCGSSGHNVQNCPAGTYRQQAAASAASSYGTSQPRNGLCFKCNQPGHFANSCPLLAPAPQQQQQYRSGGAPSGGYGRQQPYVGATNY

SEQ ID NO: 20150 - DNA, 2228 bp, Zea mays subsp. mays
  misc_feature (1)..(2228): Ceres Seq. ID no. 12377954
gcacgagaccattacctagaacatcctaatcgaaaaaccttcctccgttgcctcctcttccgcggccccgtcgatgggcttggctttaccagtggcgggttcccacacgggggctagacgccgccaccgctgaccccgtctacaccgaatcccccgcgcgatttaacccctcgcctcgctcgccgcctccgcttccatacaaccgcgcactccaaacgcgcacgcgctgttcgttcctcggccgctctgtccacccccgtccttctccgccctcaacagatctccgccggccgtgcggttccttaattcgccttctccgggactgtcggatctccgcggcggctggggatgggcaactgctgcgtgacgccgaaagcagccgacgacgccggcggcggcaagaagcccaaggagccgaagcagaagaagggtaagaagccgaaccccttctcgatcgattacaaccgctcggggccaggcgagcgcgccaaagctggtggtgctgcgggatcccacggggcgggacatcgcggcgcggtacgagctcggcgcggagctcgggcgcggcgagttcggggttacctacctctgcacagaccgtgcctcaggggaggcgctggcctgcaagtctatctccaagaagaagctccgcaccgccgtcgacctcgaggacgtgcgccgggaggtggagatcatgcgccacctccccaagcaccccaacgtcgtcacgctcagggacacgtacgaggacgacaatgccgtgcacctcgtcatggagctctgcgagggcggtgagctcttcgaccgcatcgtggcgcggggacactacactgagcgtgctgccgccttggtcttacgcactatcgttgaggtcgtgcagatgtgccataagcatggagtgatgcacagggatctcaaaccagaaaatttcttgtttgcaaacaagaaagaatcagcggcacttaaggccattgattttggcctgtctgtatttttcacaccaggcgaacggttttctgagattgttggaagtccttattacatggctccagaggtgctaaagagaaactatggcccagaggttgatgtttggagtgcaggagtgattctgtacattcttctttgtggtgtccccccattctgggcagaaacggaacagggtgttgctcaggcaatcattcgatctgtcattgatttcaaaagagatccatggccaagggtgtctgataatgccaaagaccttgtcagaggaatgctgaatccggacccaaaacgacgattgacagctcaccaagtgcttggtcacccatggttgcagaacattaagaaggctccaaatgtcaatttgggtgaaactgttaaggccagactccaacaattctctgtgatgaacaagttcaagaagcatgcacttagggttatagctgagcatctttcggtagaagaggctgctgacataaaggatatgtttgagaagatggatcttaacaaggatcaaatgcttagtttcgaggagctgaagcttggtctgcataagtttggtcaccagatgcctgatgcagatgttcaaacactaatggaagcggcggatgctgatggaaatggatccttgaattatggagaatttgttacattatttgttcatctaagaaagattggaaatgatgagcatctgcataaggcatttgcatacttcgaccggaaccagagtggttatattgaaattgatgaactccgtgagtcattagctgatgaccttggacaaaaccgtgaagagattatcaatgccatcatccgtgatgtagacaccgataaggatggcaagataagctacgatgagtttgcgacgatgatgaaggccggaacagactggaggaaagcatccagacagtactcgagagagcggttcaccagtctgagccttaagctgcaaaaggatggatcgctgcagatgacgagtacacggtagcccgataacaccataggcaagttgtgaattacagatggaaaccatgtgtagatttttctggttgtttgttgacagctcttctgcttgtcctgatgttccattgctttgtattcttcgcttgcggcctgtttgaaggattaggggggattgtttatgctatgattgtatttagactgcatgatccatgcctcgctcgtttccaaagtgtactgtacaaaagaaagaggagaaagggattatgaggctctgctcatttctt

SEQ ID NO: 20151 - protein, 424 aa, Zea mays subsp. mays
  misc_feature (1)..(424): Ceres Seq. ID no. 12377955
MRHLPKHPNVVTLRDTYEDDNAVHLVMELCEGGELFDRIVARGHYTERAAALVLRTIVEVVQMCHKHGVMHRDLKPENFLFANKKESAALKAIDFGLSVFFTPGERFSEIVGSPYYMAPEVLKRNYGPEVDVWSAGVILYILLCGVPPFWAETEQGVAQAIIRSVIDFKRDPWPRVSDNAKDLVRGMLNPDPKRRLTAHQVLGHPWLQNIKKAPNVNLGETVKARLQQFSVMNKFKKHALRVIAEHLSVEEAADIKDMFEKMDLNKDQMLSFEELKLGLHKFGHQMPDADVQTLMEAADADGNGSLNYGEFVTLFVHLRKIGNDEHLHKAFAYFDRNQSGYIEIDELRESLADDLGQNREEIINAIIRDVDTDKDGKISYDEFATMMKAGTDWRKASRQYSRERFTSLSLKLQKDGSLQMTSTR

SEQ ID NO: 20152 - protein, 398 aa, Zea mays subsp. mays
  misc_feature (1)..(398): Ceres Seq. ID no. 12377956
MELCEGGELFDRIVARGHYTERAAALVLRTIVEVVQMCHKHGVMHRDLKPENFLFANKKESAALKAIDFGLSVFFTPGERFSEIVGSPYYMAPEVLKRNYGPEVDVWSAGVILYILLCGVPPFWAETEQGVAQAIIRSVIDFKRDPWPRVSDNAKDLVRGMLNPDPKRRLTAHQVLGHPWLQNIKKAPNVNLGETVKARLQQFSVMNKFKKHALRVIAEHLSVEEAADIKDMFEKMDLNKDQMLSFEELKLGLHKFGHQMPDADVQTLMEAADADGNGSLNYGEFVTLFVHLRKIGNDEHLHKAFAYFDRNQSGYIEIDELRESLADDLGQNREEIINAIIRDVDTDKDGKISYDEFATMMKAGTDWRKASRQYSRERFTSLSLKLQKDGSLQMTSTR

SEQ ID NO: 20153 - protein, 362 aa, Zea mays subsp. mays
  misc_feature (1)..(362): Ceres Seq. ID no. 12377957
MCHKHGVMHRDLKPENFLFANKKESAALKAIDFGLSVFFTPGERFSEIVGSPYYMAPEVLKRNYGPEVDVWSAGVILYILLCGVPPFWAETEQGVAQAIIRSVIDFKRDPWPRVSDNAKDLVRGMLNPDPKRRLTAHQVLGHPWLQNIKKAPNVNLGETVKARLQQFSVMNKFKKHALRVIAEHLSVEEAADIKDMFEKMDLNKDQMLSFEELKLGLHKFGHQMPDADVQTLMEAADADGNGSLNYGEFVTLFVHLRKIGNDEHLHKAFAYFDRNQSGYIEIDELRESLADDLGQNREEIINAIIRDVDTDKDGKISYDEFATMMKAGTDWRKASRQYSRERFTSLSLKLQKDGSLQMTSTR

SEQ ID NO: 20154 - DNA, 724 bp, Zea mays subsp. mays
  misc_feature (1)..(724): Ceres Seq. ID no. 12378048
ccccagctgccggctgttcggtgcccagagatcgccgcacgatctcctcggcggcggcgccgttgcggatgtggtgctgtggaggaagaaggaggtggccaccgggacgctggcggccgtggtggcctcatgggcgctcttctactgcgtgcccggctacactctgctctccttcctggcccaggtgctcatgatcctgctcaccgtcctcttcgtctgggccaaggctgcgcagctgctcaacagggcacctccgcctatcccattgatgaaaatttctgacgagtcaatgagtgaagcagcagaaatggttggtagcttcatcaacaaggtgctcaaggatttcgaaaacattgcacttgggaaggataacagcctcttctacaaggtggcttttgtgctgttgctggcctccatagttggacgactgaccgatcttatcactttagtatatacaagtgctattattgctctcacggtccctgcattgctggagaaatccgaagaacacattgccagattnttcaagaaaacttcgatatatgttcaggcatttggcagagcatgcaaagagtataaatgtaagatgacgaatatgatatcggaaacgaagaaactgcgttgatgtcaatgtgttttcactagcaaattttgacttgtgagattgcttcttcggaagcgaaatagttgtgacttttggcatcaatcacaatcgtgatcttac

SEQ ID NO: 20155 - protein, 207 aa, Zea mays subsp. mays
  misc_feature (1)..(207): Ceres Seq. ID no. 12378049
  misc_feature (174)..(174): Xaa is any aa, unknown or other
PSCRLFGAQRSPHDLLGGGAVADVVLWRKKEVATGTLAAVVASWALFYCVPGYTLLSFLAQVLMILLTVLFVWAKAAQLLNRAPPPIPLMKISDESMSEAAEMVGSFINKVLKDFENIALGKDNSLFYKVAFVLLLASIVGRLTDLITLVYTSAIIALTVPALLEKSEEHIARXFKKTSIYVQAFGRACKEYKCKMTNMISETKKLR

SEQ ID NO: 20156 - protein, 144 aa, Zea mays subsp. mays
  misc_feature (1)..(144): Ceres Seq. ID no. 12378050
  misc_feature (111)..(111): Xaa is any aa, unknown or other
MILLTVLFVWAKAAQLLNRAPPPIPLMKISDESMSEAAEMVGSFINKVLKDFENIALGKDNSLFYKVAFVLLLASIVGRLTDLITLVYTSAIIALTVPALLEKSEEHIARXFKKTSIYVQAFGRACKEYKCKMTNMISETKKLR

SEQ ID NO: 20157 - protein, 118 aa, Zea mays subsp. mays
  misc_feature (1)..(118): Ceres Seq. ID no. 12378051
  misc_feature (85)..(85): Xaa is any aa, unknown or other
MKISDESMSEAAEMVGSFINKVLKDFENIALGKDNSLFYKVAFVLLLASIVGRLTDLITLVYTSAIIALTVPALLEKSEEHIARXFKKTSIYVQAFGRACKEYKCKMTNMISETKKLR

SEQ ID NO: 20158 - DNA, 1023 bp, Zea mays subsp. mays
  misc_feature (1)..(1023): Ceres Seq. ID no. 12378098
acaaccacaggcaacgcaacccccaaacccaaaaccctaccacggcgcccatggcttcgccgccgcctcctcctgcccggcaccccacctccgcagcaaccgccgctgcggcgggcaatggccacgacacctccgcagcaaccgccgctgcggcgggaaatagccacgccacctccgcttcgccggtggacgccctcttcctccagaacctcatgacccgcgtccagctccgcccgcccttcctcgacaccaactcattcctcacccaggaccttgacgacttcctcctcaacgagttcgccgcgctatccgccgctgcaggggcgtcggatgatgacgaagacgtggaggatgaggatggtgggctcgctggcggggagggctccggggaggcgaggcggcggcggatgctggcgagggaggaggcgaagctggagaaggagattgtgcggatggtgctggccggggaggccgaggacaagctcaagcccaattcgggccagtccgtggctgtcggcgaccaccacctctgcgtcggtttccacgacgatgccagcggggagtatcgcatctgggaatggcatggccacgtcatgctgttcgacgacgaggaaggatactccgcagagtacatttatggcaaccacttcgagccgctcgctgctgccacagccagggccaagaagaaggagaaggagatgagagagaaggaattgagcatgggtcttcgggatttggtcgtggacactgacgacggtggcaatgccaatcgctccaaggagaacggtagcagcggagggcccagggtagtgcgcaggaatgtcgtcaatggcccaaccacgcctgctaggtaatggctttctagagcttgcagtgtgcttggtggaagaagcagtgccgcagtgcatcaatctgtgtgacaaaaacaaataaagatctgttgtccttttctcgcttatagctgtttaagctgtctattgtattctgttgagaaatcaatcacatctatactttgcttctgct

SEQ ID NO: 20159 - protein, 283 aa, Zea mays subsp. mays
  misc_feature (1)..(283): Ceres Seq. ID no. 12378099
NHRQRNPQTQNPTTAPMASPPPPPARHPTSAATAAAAGNGHDTSAATAAAAGNSHATSASPVDALFLQNLMTRVQLRPPFLDTNSFLTQDLDDFLLNEFAALSAAAGASDDDEDVEDEDGGLAGGEGSGEARRRRMLAREEAKLEKEIVRMVLAGEAEDKLKPNSGQSVAVGDHHLCVGFHDDASGEYRIWEWHGHVMLFDDEEGYSAEYIYGNHFEPLAAATARAKKKEKEMREKELSMGLRDLVVDTDDGGNANRSKENGSSGGPRVVRRNVVNGPTTPAR

SEQ ID NO: 20160 - protein, 267 aa, Zea mays subsp. mays
  misc_feature (1)..(267): Ceres Seq. ID no. 12378100
MASPPPPPARHPTSAATAAAAGNGHDTSAATAAAAGNSHATSASPVDALFLQNLMTRVQLRPPFLDTNSFLTQDLDDFLLNEFAALSAAAGASDDDEDVEDEDGGLAGGEGSGEARRRRMLAREEAKLEKEIVRMVLAGEAEDKLKPNSGQSVAVGDHHLCVGFHDDASGEYRIWEWHGHVMLFDDEEGYSAEYIYGNHFEPLAAATARAKKKEKEMREKELSMGLRDLVVDTDDGGNANRSKENGSSGGPRVVRRNVVNGPTTPAR

SEQ ID NO: 20161 - protein, 213 aa, Zea mays subsp. mays
  misc_feature (1)..(213): Ceres Seq. ID no. 12378101
MTRVQLRPPFLDTNSFLTQDLDDFLLNEFAALSAAAGASDDDEDVEDEDGGLAGGEGSGEARRRRMLAREEAKLEKEIVRMVLAGEAEDKLKPNSGQSVAVGDHHLCVGFHDDASGEYRIWEWHGHVMLFDDEEGYSAEYIYGNHFEPLAAATARAKKKEKEMREKELSMGLRDLVVDTDDGGNANRSKENGSSGGPRVVRRNVVNGPTTPAR

SEQ ID NO: 20162 - DNA, 570 bp, Zea mays subsp. mays
  misc_feature (1)..(570): Ceres Seq. ID no. 12378176
tgcatgtttgaagggtctgaatggagttccagacattgtagagtgctcttttgtgcaatcaactgtgacagagttgccattctttgcctccaaggttcggctcggcaagaatggagtggaggaagtgcttggtctgggtgagctcaacgagttcgagaagaagggtctggaaaacctcaagggcgagctcaagtcttccatcgacaagggtatcaagtttgcccacgggaactaggcaccttgcccggcttctaacaattgatgccccttgcatttttgtttgactgcctatttttcctgccccccgtatggttggggcaatgaggcgtagtggtcgataataaaacccagcggaacaaagaaaacgtgtaccagaaactgtttgcaaacaccggtgccttttttttgtgttgaaccaccattagttgagccgtgagggaatggtgaacaagctttccacttgctcatttccgagcgcttctctttgattgtatccatggtttggactcatgactgtacgtcttggcagttggcttggcacccaggaatcnnnncactggagttgctgcc

SEQ ID NO: 20163 - protein, 77 aa, Zea mays subsp. mays
  misc_feature (1)..(77): Ceres Seq. ID no. 12378177
ACLKGLNGVPDIVECSFVQSTVTELPFFASKVRLGKNGVEEVLGLGELNEFEKKGLENLKGELKSSIDKGIKFAHGN

SEQ ID NO: 20164 - protein, 57 aa, Zea mays subsp. mays
  misc_feature (1)..(57): Ceres Seq. ID no. 12378178
MEWRKCLVWVSSTSSRRRVWKTSRASSSLPSTRVSSLPTGTRHLARLLTIDAPCIFV

SEQ ID NO: 20165 - protein, 46 aa, Zea mays subsp. mays
  misc_feature (1)..(46): Ceres Seq. ID no. 12378179
CMFEGSEWSSRHCRVLFCAINCDRVAILCLQGSARQEWSGGSAWSG

SEQ ID NO: 20166 - DNA, 1467 bp, Zea mays subsp. mays
  misc_feature (1)..(1467): Ceres Seq. ID no. 12378238
agcatagcagcagcccattgcctgcctttcgcctctctctctctctctctctctctctctcacacacacaaccactcacactgccggttggtttcccttccgttgtggttggtgcgtacttagtggcggccggccatggcgcggaggaggggcttctcggcggtggtgccgccggcgtggctgccggcggtgctcctgtgcctggcaggcgcggcgtcgggcgagccgctgccgcagtactacaatgccatcttcagcttcggcgactccttctccgacacgggcaacttcgtcatcatcaactcgggcaagctgcccaacatgcccaagttcccgccgccgtacgcgaggtgctccaacggccgcctcgtcatcgacttcctggccgaggcgttcggtctcccgctgctccctccgtcggcgaacaagggcaccaacttcagccagggcgccaacttcgcggtgatgggcgcgacggcgcttgacctcaagtacttcaaggacaacaacgtgtggagcatcccgcccttcaacacgtccatgggcgtgcagctggagtggttccaggaggtgaagcgcagcatctgccccgacgaccccgccgcgtgccgcgccctgttcgggagggccctgttcgtgttcggcgagttcggcggcaacgactacagcttcgcgtggaaggcggactggtcgctggagaaggtgaagacgatggtgccggcggtggtggcgtcgctggtgggcggcgtggagcggctgctggacgagggcgcccgccacgtcgtggtgccgggcaacctccccgccggatgcatccccatcacgctcaccatgtacccgtccgaggaccgctccgagtacgacccgcgcaccggctgcctcaagaagtacaacagcgtcgcgctctaccacaacgccatgctccgcgtcgcgctcgaccgcctgcagcgccgccgcccggagtcccgcgtcgtctacgccgactactacacgccctacatacagttcgcgcgcacaccgcacctctacggctacaagcgcggcgctctgcgggcttgctgcggcggcggcgggccgtacaactacaacgtgagcgcgtcgtgcgggctccccggcgccaccacctgcgaggaccccgacgcgcacgtcagctgggacggcatccacctcaccgaggcgccctaccgcttcatcgccaacacctgggtcaagggcccctacgcgcacccgccgctcgccaccgtcgtgctcgaggacatggtcgactgatcctcttgtggtttggcacaagggaagagctgatatgtaacgtgaattccattcgttcatgtccatgtatattgggtaactaccggagcggagtaacaaaaaaaaatatatatgttagtcttttctgtttttttttcgtcgtgcacctgtgtgccgtgcagtcgcatagatcaatgaagaaaccactccagctgtttg

SEQ ID NO: 20167 - protein, 377 aa, Zea mays subsp. mays
  misc_feature (1)..(377): Ceres Seq. ID no. 12378239
MARRRGFSAVVPPAWLPAVLLCLAGAASGEPLPQYYNAIFSFGDSFSDTGNFVIINSGKLPNMPKFPPPYARCSNGRLVIDFLAEAFGLPLLPPSANKGTNFSQGANFAVMGATALDLKYFKDNNVWSIPPFNTSMGVQLEWFQEVKRSICPDDPAACRALFGRALFVFGEFGGNDYSFAWKADWSLEKVKTMVPAVVASLVGGVERLLDEGARHVVVPGNLPAGCIPITLTMYPSEDRSEYDPRTGCLKKYNSVALYHNAMLRVALDRLQRRRPESRVVYADYYTPYIQFARTPHLYGYKRGALRACCGGGGPYNYNVSASCGLPGATTCEDPDAHVSWDGIHLTEAPYRFIANTWVKGPYAHPPLATVVLEDMVD

SEQ ID NO: 20168 - protein, 315 aa, Zea mays subsp. mays
  misc_feature (1)..(315): Ceres Seq. ID no. 12378240
MPKFPPPYARCSNGRLVIDFLAEAFGLPLLPPSANKGTNFSQGANFAVMGATALDLKYFKDNNVWSIPPFNTSMGVQLEWFQEVKRSICPDDPAACRALFGRALFVFGEFGGNDYSFAWKADWSLEKVKTMVPAVVASLVGGVERLLDEGARHVVVPGNLPAGCIPITLTMYPSEDRSEYDPRTGCLKKYNSVALYHNAMLRVALDRLQRRRPESRVVYADYYTPYIQFARTPHLYGYKRGALRACCGGGGPYNYNVSASCGLPGATTCEDPDAHVSWDGIHLTEAPYRFIANTWVKGPYAHPPLATVVLEDMVD

SEQ ID NO: 20169 - protein, 267 aa, Zea mays subsp. mays
  misc_feature (1)..(267): Ceres Seq. ID no. 12378241
MGATALDLKYFKDNNVWSIPPFNTSMGVQLEWFQEVKRSICPDDPAACRALFGRALFVFGEFGGNDYSFAWKADWSLEKVKTMVPAVVASLVGGVERLLDEGARHVVVPGNLPAGCIPITLTMYPSEDRSEYDPRTGCLKKYNSVALYHNAMLRVALDRLQRRRPESRVVYADYYTPYIQFARTPHLYGYKRGALRACCGGGGPYNYNVSASCGLPGATTCEDPDAHVSWDGIHLTEAPYRFIANTWVKGPYAHPPLATVVLEDMVD

SEQ ID NO: 20170 - DNA, 2022 bp, Zea mays subsp. mays
  misc_feature (1)..(2022): Ceres Seq. ID no. 12378252
gcacgagaccattacctagaacatcctaatcaaaaacccggccgatcccgcacccctgactgtcagccgcgatccgctcttgtaggctccctccctctccgacccgcgtctccctcctcccactccactgctcctggtctctctctctctctccttctcctccccccgtccgtggccggagatcgacggtttccattttccagatcgcagttcattcagttgctctgttacctttacacggtctgcatgcctctattgtgtctgcagttttgcgtgcagcggcggagcaggagagatggcgtcggaggccaaggacgtgggcatcctcgccatggacatctacttcccgcccaactgcgtgctccaggaagagttggaaacacatgatggcgtgagcaaagggaagtataccattgggcttgggcaggaaagtatggcattttgcactgaagttgaggatgttatttcgatgagcttgacagtggtgaagtccctcctgaaaaattataacattgacccaatgtgcattggacgtttggaagttggcagtgaaacagtaatagacaagagcaagtctataaagacatggctgatgcagatatttgaggaatctggcaatactgatattgaaggagttgactcctctaatgcatgttatggtggaacagctgcattgtttaattgtgttaactgggttgaaagcaagtcatgggatggtcgctatggacttgttgtttgcacagacagtgcggtttacgctgaaggtccggctcgccctactggtggtgcggctgctattgcaatgctgattggaccaaatgctcctatttgttttgaaagtaaatatagaggatctcatatggcccatgtatacgacttttacaagcccgatcttgcgagtgaatatccggtggttgatgggaagctatcacaaacatgctacctcatggcattggactcctgctacaatgtattttgcaaaaagtatgaaaaacatgaggggaagcagttttcaatttctgatgcagattatgttgtgttccattctccatacaacaagcttgtacagaaaagcttcgctcgtttgtactacaatgatttcttgagaaactgcagcacggttgatggagagtcaagggaaaaattggcaccctatgcaggcttgtcatctgaagaaagctaccagagtcgcgaccttgaaaaggcatctcagcaagtcgccaagaatctgtacgagaccaaggttcagccaacaacattgatcccaaaacaagttgggaatatgtatacagcatcactctacgcagctcttgcatcggttgtccatagtaggcatgaaactctggcaggccagaggattgttatgttttcgtatggcagtgggttgacatcaacaatgttctctttcatgattaatgaaggccatcaccctttcagtctgctaaacatcgcaaacatactggatatttccaagaagctgaaggcaaggcacgtggttcccccagagaaatttgtggaggcactgaaactgatggagcaccgctatggggcaagagatttcgtgacgaatcaagatacaagtctgctatccgcaggcacatactatctcacgcacgttgactccaagtacagaaggttctacgacgtgaaaggtgacggtgtcgccactgcaatgtccaacggccactgatctttcttctgcccgaagctgcaacaagtcaaataacagaggcaagtgtcctaagcatccttagattattatatctattaagaggggaagctcgagttatagattaatctatgcccagctgtaaggttgtaaagttagttagagctgcgcatgcttgtttagtaaaagctctgctgctcttcagttatttagcgaatcaagcacactgctgggctaataagaattgtaaacaataatctgcagaatcactggctacatccaggttatgctgatgaatgcacgatttcatgtttaacacgatcaatgcatctggttacatccaggttatgctg

SEQ ID NO: 20171 - protein, 464 aa, Zea mays subsp. mays
  misc_feature (1)..(464): Ceres Seq. ID no. 12378253
MASEAKDVGILAMDIYFPPNCVLQEELETHDGVSKGKYTIGLGQESMAFCTEVEDVISMSLTVVKSLLKNYNIDPMCIGRLEVGSETVIDKSKSIKTWLMQIFEESGNTDIEGVDSSNACYGGTAALFNCVNWVESKSWDGRYGLVVCTDSAVYAEGPARPTGGAAAIAMLIGPNAPICFESKYRGSHMAHVYDFYKPDLASEYPVVDGKLSQTCYLMALDSCYNVFCKKYEKHEGKQFSISDADYVVFHSPYNKLVQKSFARLYYNDFLRNCSTVDGESREKLAPYAGLSSEESYQSRDLEKASQQVAKNLYETKVQPTTLIPKQVGNMYTASLYAALASVVHSRHETLAGQRIVMFSYGSGLTSTMFSFMINEGHHPFSLLNIANILDISKKLKARHVVPPEKFVEALKLMEHRYGARDFVTNQDTSLLSAGTYYLTHVDSKYRRFYDVKGDGVATAMSNGH

SEQ ID NO: 20172 - protein, 452 aa, Zea mays subsp. mays
  misc_feature (1)..(452): Ceres Seq. ID no. 12378254
MDIYFPPNCVLQEELETHDGVSKGKYTIGLGQESMAFCTEVEDVISMSLTVVKSLLKNYNIDPMCIGRLEVGSETVIDKSKSIKTWLMQIFEESGNTDIEGVDSSNACYGGTAALFNCVNWVESKSWDGRYGLVVCTDSAVYAEGPARPTGGAAAIAMLIGPNAPICFESKYRGSHMAHVYDFYKPDLASEYPVVDGKLSQTCYLMALDSCYNVFCKKYEKHEGKQFSISDADYVVFHSPYNKLVQKSFARLYYNDFLRNCSTVDGESREKLAPYAGLSSEESYQSRDLEKASQQVAKNLYETKVQPTTLIPKQVGNMYTASLYAALASVVHSRHETLAGQRIVMFSYGSGLTSTMFSFMINEGHHPFSLLNIANILDISKKLKARHVVPPEKFVEALKLMEHRYGARDFVTNQDTSLLSAGTYYLTHVDSKYRRFYDVKGDGVATAMSNGH

SEQ ID NO: 20173 - protein, 418 aa, Zea mays subsp. mays
  misc_feature (1)..(418): Ceres Seq. ID no. 12378255
MAFCTEVEDVISMSLTVVKSLLKNYNIDPMCIGRLEVGSETVIDKSKSIKTWLMQIFEESGNTDIEGVDSSNACYGGTAALFNCVNWVESKSWDGRYGLVVCTDSAVYAEGPARPTGGAAAIAMLIGPNAPICFESKYRGSHMAHVYDFYKPDLASEYPVVDGKLSQTCYLMALDSCYNVFCKKYEKHEGKQFSISDADYVVFHSPYNKLVQKSFARLYYNDFLRNCSTVDGESREKLAPYAGLSSEESYQSRDLEKASQQVAKNLYETKVQPTTLIPKQVGNMYTASLYAALASVVHSRHETLAGQRIVMFSYGSGLTSTMFSFMINEGHHPFSLLNIANILDISKKLKARHVVPPEKFVEALKLMEHRYGARDFVTNQDTSLLSAGTYYLTHVDSKYRRFYDVKGDGVATAMSNGH

SEQ ID NO: 20174 - DNA, 1789 bp, Zea mays subsp. mays
  misc_feature (1)..(1789): Ceres Seq. ID no. 12378521
gacgaggtaggcttttaggcggctacgatccgatttgtacgcctcaactagacctcactcgtacgccgccgccccctccaccgccgtcgtgcgagagggaggagggagctctggacctccgtggggcgtggaggagtgggacgacgcacgcggaggcagccccggtcggttgctgctgtatccgtccaggatcgggggaattccaggaggcaggaaggaaagttggagtgctacatagctgagtaccacaggtgatagattgatggctggcgctttggctgaggacaatgctggggatggtagatcctcatcaactgaagagatgtcaagtgatgaccagattcattccgagaatcctctatctgagtggaggtccagtcagcaagttgagaacagagtaccgcccaccttacggatttacttgggcaatgatgatgatgatgattttagttatggacctaggccttctgaactttatggaaagtttacatggagaattgattatttctcccaaatcaacaggagtgagctaaggagcacttcatttgatgtcggcgcatataagtggtatatattaatatacccgcgaggatgtggtgtctgcgatcacctctctctctttctttgtgctgaccataataagctactcccaggatggagtcactttgcgcaatttacaatagctcttattaataaagaccctaagaaatctaagtattctgatacactgcatcggttttggaagaaagagcatgattgggggtggaaaaagtttatggagctgtcagaattacacgatggctttattgttcaggatgctcttaccatcaaagcccaagttcaagtcattagggagaagatagaccgtccatttcgttgccttgatggccagtaccgaagggaactaattagggtgtatctatcaactgtggaacaaatttatcggcgttttattgatgaaaaaagaaggatgttcagcaggctgattgaggataaactcgggtggtccagtttcagtggattctggctagcaatggatccaagtgtgcgtcggcacatgacacgggaaaagactgaaactatattgaaagttgtagtgaaacagttctttatagagaaagaagttacatcaaccttggtatttgactcgctatatagcggacttaaggcacttgaataccagagcaacaacaaaaaggggatacctaaaataacagaggcagatgctcggagcactccaatggtgcttattgatcaagacatgtttgttttggctgatgatgcgctactgttgtttgaaagagctgcattggacacacaatcacaccaaccattgcccaaaaaagatgataaaggatcaccgaaccgtacaaaggatgacacctcaagtgacgagtttgacaaagattctattgagcgtgatgatagatggcttgaagagctaggctgcaagacactggaactttttgccgtaactcatatattcagccgagcagaagcggcgtaccaagaagcgatggctttgcagctccaagaggaactcattcgtgaagaagcatccgagcgagctggaactgaacttaagccaaagcgtcgtgctgctgataagaaaaggcgtggcaagaacatgtgaagtgttatattttctttttaaaaaactagcaataattcatcggatgctaggctatttcccctcattttttgtgaacagacatatatatgccgccgttcgtagattctagtctcgtgcattccctttgagaatgtaagattgaagtgtgtttttcct

SEQ ID NO: 20175 - protein, 456 aa, Zea mays subsp. mays
  misc_feature (1)..(456): Ceres Seq. ID no. 12378522
MAGALAEDNAGDGRSSSTEEMSSDDQIHSENPLSEWRSSQQVENRVPPTLRIYLGNDDDDDFSYGPRPSELYGKFTWRIDYFSQINRSELRSTSFDVGAYKWYILIYPRGCGVCDHLSLFLCADHNKLLPGWSHFAQFTIALINKDPKKSKYSDTLHRFWKKEHDWGWKKFMELSELHDGFIVQDALTIKAQVQVIREKIDRPFRCLDGQYRRELIRVYLSTVEQIYRRFIDEKRRMFSRLIEDKLGWSSFSGFWLAMDPSVRRHMTREKTETILKVVVKQFFIEKEVTSTLVFDSLYSGLKALEYQSNNKKGIPKITEADARSTPMVLIDQDMFVLADDALLLFERAALDTQSHQPLPKKDDKGSPNRTKDDTSSDEFDKDSIERDDRWLEELGCKTLELFAVTHIFSRAEAAYQEAMALQLQEELIREEASERAGTELKPKRRAADKKRRGKNM

SEQ ID NO: 20176 - protein, 436 aa, Zea mays subsp. mays
  misc_feature (1)..(436): Ceres Seq. ID no. 12378523
MSSDDQIHSENPLSEWRSSQQVENRVPPTLRIYLGNDDDDDFSYGPRPSELYGKFTWRIDYFSQINRSELRSTSFDVGAYKWYILIYPRGCGVCDHLSLFLCADHNKLLPGWSHFAQFTIALINKDPKKSKYSDTLHRFWKKEHDWGWKKFMELSELHDGFIVQDALTIKAQVQVIREKIDRPFRCLDGQYRRELIRVYLSTVEQIYRRFIDEKRRMFSRLIEDKLGWSSFSGFWLAMDPSVRRHMTREKTETILKVVVKQFFIEKEVTSTLVFDSLYSGLKALEYQSNNKKGIPKITEADARSTPMVLIDQDMFVLADDALLLFERAALDTQSHQPLPKKDDKGSPNRTKDDTSSDEFDKDSIERDDRWLEELGCKTLELFAVTHIFSRAEAAYQEAMALQLQEELIREEASERAGTELKPKRRAADKKRRGKNM

SEQ ID NO: 20177 - protein, 285 aa, Zea mays subsp. mays
  misc_feature (1)..(285): Ceres Seq. ID no. 12378524
MELSELHDGFIVQDALTIKAQVQVIREKIDRPFRCLDGQYRRELIRVYLSTVEQIYRRFIDEKRRMFSRLIEDKLGWSSFSGFWLAMDPSVRRHMTREKTETILKVVVKQFFIEKEVTSTLVFDSLYSGLKALEYQSNNKKGIPKITEADARSTPMVLIDQDMFVLADDALLLFERAALDTQSHQPLPKKDDKGSPNRTKDDTSSDEFDKDSIERDDRWLEELGCKTLELFAVTHIFSRAEAAYQEAMALQLQEELIREEASERAGTELKPKRRAADKKRRGKNM

SEQ ID NO: 20178 - DNA, 1104 bp, Zea mays subsp. mays
  misc_feature (1)..(1104): Ceres Seq. ID no. 12379137
tcatgcagttcacacactctcctctgacctctcctctcctctcctctcgacctctcccttctatctagccaccgaagccaagaccaaggaacggcatggctcagctgctgcacctgccggacctcgcggcggcgcggccgccggcgcggaggaggaggggtgtggcggtggcggtggcgggggggcgcgtcaagcagggggaggcggggcgggtgatcagggtcgccgaccccgtgcgggagggccggatgccgcctcctcttcttgccgcgccggccacgccgtcggagtctccgccggtcgcggggaggcgcggggacgaggacgacgaggtgaggcagaggtactacctcaacatggggtacgcgatccggacgctcagggaggagctccccgatgtgctctacaaggagcccagctttgacatctacagagatgacattgtcttcacagaccctttgaatacattcaagggcctggaaaattacaagacgatattctgggcgcttcgttttactggccggatcttcttcaaggcattgtgggttgatgtagttagtatatggcagcctgctgagaacattatcatgattcgctggatcgcccacggcattcctcgagtaccttgggatgggcatggccgcttcgatggtgcttctgtgtataaactcgacaaggatggtaagatctacgagcataaggtccacaatgttgctatgaatccaccaacgaagttcaaggtcctaccagtccatgagctaatcagatcacttggttgcccctctactgcaaaaccaacttattttgaagcttcatcacaatatctgtgcgctgggccatcttatttgagattagcttggataagatgctacatctcattgtgccgcatgctttcgctcgcaaatctgggagaaggatagcctgggtttagtgatacctccaaattttgtattttcagtatgacagcacacatgttactaagtactattgagtcatgacagttgtatatatgaacactgatagtttatagaataagacctcttagttaaggtgtacaacacttgttattgattgttataagcatcagtcagcaaactagtcaag

SEQ ID NO: 20179 - protein, 274 aa, Zea mays subsp. mays
  misc_feature (1)..(274): Ceres Seq. ID no. 12379138
MAQLLHLPDLAAARPPARRRRGVAVAVAGGRVKQGEAGRVIRVADPVREGRMPPPLLAAPATPSESPPVAGRRGDEDDEVRQRYYLNMGYAIRTLREELPDVLYKEPSFDIYRDDIVFTDPLNTFKGLENYKTIFWALRFTGRIFFKALWVDVVSIWQPAENIIMIRWIAHGIPRVPWDGHGRFDGASVYKLDKDGKIYEHKVHNVAMNPPTKFKVLPVHELIRSLGCPSTAKPTYFEASSQYLCAGPSYLRLAWIRCYISLCRMLSLANLGEG

SEQ ID NO: 20180 - protein, 223 aa, Zea mays subsp. mays
  misc_feature (1)..(223): Ceres Seq. ID no. 12379139
MPPPLLAAPATPSESPPVAGRRGDEDDEVRQRYYLNMGYAIRTLREELPDVLYKEPSFDIYRDDIVFTDPLNTFKGLENYKTIFWALRFTGRIFFKALWVDVVSIWQPAENIIMIRWIAHGIPRVPWDGHGRFDGASVYKLDKDGKIYEHKVHNVAMNPPTKFKVLPVHELIRSLGCPSTAKPTYFEASSQYLCAGPSYLRLAWIRCYISLCRMLSLANLGEG

SEQ ID NO: 20181 - protein, 187 aa, Zea mays subsp. mays
  misc_feature (1)..(187): Ceres Seq. ID no. 12379140
MGYAIRTLREELPDVLYKEPSFDIYRDDIVFTDPLNTFKGLENYKTIFWALRFTGRIFFKALWVDVVSIWQPAENIIMIRWIAHGIPRVPWDGHGRFDGASVYKLDKDGKIYEHKVHNVAMNPPTKFKVLPVHELIRSLGCPSTAKPTYFEASSQYLCAGPSYLRLAWIRCYISLCRMLSLANLGEG

SEQ ID NO: 20182 - DNA, 1239 bp, Zea mays subsp. mays
  misc_feature (1)..(1239): Ceres Seq. ID no. 12379187
acgagccttacgacatcagcaacaaaccaaacaaaaggacacttcgtgagagaacacgtcggtggctcggtgtcagcagcgagccagcgacggagccccaccagacaccgcagtaccgcaccgcactgcccatggacgcacgcctcccggcgcgcccaccccgcccgcgtgcgcgtgcccctgtccgcctcccgtttgccgcctccaccgcaacgcggcgcgcggggtggtggtgccctcgcgatcctcgtgtcgatcccagcggcaggggtgcctgtgcctttgcttctcctggccgttgcccgcgcctcgcggtcgcgcacctgaaccggagccccgcgtcaaatctagggttgcatccgcgccgccccctcctcccgagactcccagcggctggaaccagaacgagggtgacaggcgacgaaagctgcgagggacgcccctcgtcgaatgcactggcgaccgttccgtcgaggagcagccggagcacgcaggagttgagggaaaagcttggaaaatgtcatccaccgtgccgaagtcatcaaatatcttctggcacgattgtccagttggcaagactgatcgccagaacgtactcaagcagaaaggctgtgttgtctggattacaggccttagtggttcaggtaaaagtaccttggcatgtacattaggccgtgagctccacacaagagggaagcttgcatatgtccttgacggtgataacttaagacatggtctgaacaaggatcttggcttcaaagctgaagaccgtgctgaaaatataaggagagttgtagcaaagttatttgcagatgcgggccttgtatgtattgcaagtttgatatctccacataggagagaccgtgaatcttgccgtgcattgttgtctgatagtagcttcattgaagttttcttgaacatgtccttggaattatgtgaagcaagagatccaaagggcctctataagcttgctcgtgcaggaaaaataaagggttttacaggaatagatgacccttatgaagcaccactgaattgtgagattgagatcaaagaggtagatggtgtatgccctccgcctgctgagatggcagggcaagttgttacttaccttgaggagaaaggcttcctgcacgagtaggctgaatccaagcaacatctggggaagatttcagtaagactagcgcagaataagtcaaaggcgctggcagttacggtatagcagttgcatagattggcctc

SEQ ID NO: 20183 - protein, 222 aa, Zea mays subsp. mays
  misc_feature (1)..(222): Ceres Seq. ID no. 12379188
EPYDISNKPNKRTLRERTRRWLGVSSEPATEPHQTPQYRTALPMDARLPARPPRPRARAPVRLPFAASTATRRAGWWCPRDPRVDPSGRGACAFASPGRCPRLAVAHLNRSPASNLGLHPRRPLLPRLPAAGTRTRVTGDESCEGRPSSNALATVPSRSSRSTQELREKLGKCHPPCRSHQISSGTIVQLARLIARTYSSRKAVLSGLQALVVQVKVPWHVH

SEQ ID NO: 20184 - protein, 206 aa, Zea mays subsp. mays
  misc_feature (1)..(206): Ceres Seq. ID no. 12379189
MSSTVPKSSNIFWHDCPVGKTDRQNVLKQKGCVVWITGLSGSGKSTLACTLGRELHTRGKLAYVLDGDNLRHGLNKDLGFKAEDRAENIRRVVAKLFADAGLVCIASLISPHRRDRESCRALLSDSSFIEVFLNMSLELCEARDPKGLYKLARAGKIKGFTGIDDPYEAPLNCEIEIKEVDGVCPPPAEMAGQVVTYLEEKGFLHE

SEQ ID NO: 20185 - protein, 179 aa, Zea mays subsp. mays
  misc_feature (1)..(179): Ceres Seq. ID no. 12379190
MDARLPARPPRPRARAPVRLPFAASTATRRAGWWCPRDPRVDPSGRGACAFASPGRCPRLAVAHLNRSPASNLGLHPRRPLLPRLPAAGTRTRVTGDESCEGRPSSNALATVPSRSSRSTQELREKLGKCHPPCRSHQISSGTIVQLARLIARTYSSRKAVLSGLQALVVQVKVPWHVH

SEQ ID NO: 20186 - DNA, 1205 bp, Zea mays subsp. mays
  misc_feature (1)..(1205): Ceres Seq. ID no. 12379329
agcagacaagggaggggactgagaactgggaagccgacgctccgctcggcaaagcctgaggcggcgacgacgcttgatcgcagcccgactcacaccgtgaggagttcgagggatggctttcgctagtagaattggaaatgcgctcaggagaactttagcgcccacttgctccccactgcttcagccagtaagatgcatgtcctcttccaagctctttgttggaggactttcttttgccaccgacgaaaccactctgaaggatgcattttctgagtttgggaatgtacttgaagctcggatcatcattgatcgggaatcagggaggtcaaggggttttggttttataacttttacatccactgaagaagcctcagctgcaatgacttccatggatggcaaggaacttcaaggacgaaatataagggtgaaccatgccaatgaacgcgctggtgggatacgcgggggtggtggattcggatctggtggtggttatggtggtggaggtggatatcctactggtgggtatggcggtggtggagatagttctggtggtggttatagttctgggggttatgctgccaatggttacggtgttggatctggcagtggcaactacagcaatgcatcaggtggtggatattcaggcagtgatggttacggcaatggagctgccagtggtggttatgctaacaacttgagcagcggatacaacagcaatggtaggtacaataccattggcagttctgatggaaacactggtgggtacaattcgtatcccaacccgtatggtgcaggcaactacaatactggaggttcgagttccagtggtggaaccttaggagagtttggtggtggaggttttggtggcaacaactttgctggaaatgttaccgggggggtttctggcggtggggcaagctatggaggctaacaagccgcaatacaatggcgacgacgacctgctgggcgaaggtttcttcgacaaggaagtggcagagtaaatgagggagcggcgtactcgcacctctcgcactgtgctgcggatctttttttcccccaaactgcatctgatcggtcgtgctaaatggagcaaataaaactttgcttgagctcattaggatatagaacataatcctttgttctttttttattctgtttcagacaaggcacgtatgttattttatccactcagctagcgtagcttt

SEQ ID NO: 20187 - protein, 272 aa, Zea mays subsp. mays
  misc_feature (1)..(272): Ceres Seq. ID no. 12379330
MAFASRIGNALRRTLAPTCSPLLQPVRCMSSSKLFVGGLSFATDETTLKDAFSEFGNVLEARIIIDRESGRSRGFGFITFTSTEEASAAMTSMDGKELQGRNIRVNHANERAGGIRGGGGFGSGGGYGGGGGYPTGGYGGGGDSSGGGYSSGGYAANGYGVGSGSGNYSNASGGGYSGSDGYGNGAASGGYANNLSSGYNSNGRYNTIGSSDGNTGGYNSYPNPYGAGNYNTGGSSSSGGTLGEFGGGGFGGNNFAGNVTGGVSGGGASYGG

SEQ ID NO: 20188 - protein, 244 aa, Zea mays subsp. mays
  misc_feature (1)..(244): Ceres Seq. ID no. 12379331
MSSSKLFVGGLSFATDETTLKDAFSEFGNVLEARIIIDRESGRSRGFGFITFTSTEEASAAMTSMDGKELQGRNIRVNHANERAGGIRGGGGFGSGGGYGGGGGYPTGGYGGGGDSSGGGYSSGGYAANGYGVGSGSGNYSNASGGGYSGSDGYGNGAASGGYANNLSSGYNSNGRYNTIGSSDGNTGGYNSYPNPYGAGNYNTGGSSSSGGTLGEFGGGGFGGNNFAGNVTGGVSGGGASYGG

SEQ ID NO: 20189 - protein, 183 aa, Zea mays subsp. mays
  misc_feature (1)..(183): Ceres Seq. ID no. 12379332
MTSMDGKELQGRNIRVNHANERAGGIRGGGGFGSGGGYGGGGGYPTGGYGGGGDSSGGGYSSGGYAANGYGVGSGSGNYSNASGGGYSGSDGYGNGAASGGYANNLSSGYNSNGRYNTIGSSDGNTGGYNSYPNPYGAGNYNTGGSSSSGGTLGEFGGGGFGGNNFAGNVTGGVSGGGASYGG

SEQ ID NO: 20190 - DNA, 958 bp, Zea mays subsp. mays
  misc_feature (1)..(958): Ceres Seq. ID no. 12379360
gtatctctctcctccctggctctcgtcccccccaccgagtcgtcgccccctcgctttcaccccacgcggaagcaagaattcgtcgtcaaattcccagcttgcgcgtgtttctgtggatttcttcccgcttccctgctcctgcctcctatgggcctttgatccggggcttcgtggatcttgggaagaggaggtgtggtgggcgcctcggcggcgatctggcggggaggatatggccagcgggaaggagccgatcgaggtcaggtttcgtctcttcgacggcacggatatcgggcctacgaagtacgatccctccaccacggtctcctcgctcaaggagttcatcctcgctcggtggccgcaagataaggatatagctccaaaaactgttaatgacttgaagcttatcaatggtggaaggatattggagaataaccggacacttgcagagtcccgtgttccagtaggagagatcccaggtggtgtaattacaatgcatgtggtagtgcgacctccacaagctgacaaaaacaagaagcagcttgccaattcccccaagcagaacagatgtggatgcaccattctctgataaggcgtctgcttggtgctgtacaatctgtgtgtacacataagattttgtatgtgctttgctgtgttcacacaagcatggattcgttttgatatccaattcttgaagccatacaaattccagaagtaagatcccacggaatacgaagatttctggatcgttttgttctagagtgtaggattggatgcttcctgctgtataaattgtgttgtcaaaactgaaaaaaaaatctctttcttttctgctatattgacttattatcgattctttctagctcggttgcttttgattcgtgtaacagaaatattgtactcatgtatatgtaacttgcaaaaggagtaatgtatggtgttatggtaattggtaaagggg

SEQ ID NO: 20191 - protein, 194 aa, Zea mays subsp. mays
  misc_feature (1)..(194): Ceres Seq. ID no. 12379361
YLSPPWLSSPPPSRRPLAFTPRGSKNSSSNSQLARVSVDFFPLPCSCLLWAFDPGLRGSWEEEVWWAPRRRSGGEDMASGKEPIEVRFRLFDGTDIGPTKYDPSTTVSSLKEFILARWPQDKDIAPKTVNDLKLINGGRILENNRTLAESRVPVGEIPGGVITMHVVVRPPQADKNKKQLANSPKQNRCGCTIL

SEQ ID NO: 20192 - protein, 123 aa, Zea mays subsp. mays
  misc_feature (1)..(123): Ceres Seq. ID no. 12379362
ISLLPGSRPPHRVVAPSLSPHAEARIRRQIPSLRVFLWISSRFPAPASYGPLIRGFVDLGKRRCGGRLGGDLAGRIWPAGRSRSRSGFVSSTARISGLRSTIPPPRSPRSRSSSSLGGRKIRI

SEQ ID NO: 20193 - protein, 118 aa, Zea mays subsp. mays
  misc_feature (1)..(118): Ceres Seq. ID no. 12379363
MASGKEPIEVRFRLFDGTDIGPTKYDPSTTVSSLKEFILARWPQDKDIAPKTVNDLKLINGGRILENNRTLAESRVPVGEIPGGVITMHVVVRPPQADKNKKQLANSPKQNRCGCTIL

SEQ ID NO: 20194 - DNA, 1219 bp, Zea mays subsp. mays
  misc_feature (1)..(1219): Ceres Seq. ID no. 12379390
agcaccacctccaaatcttctcgggcctgcctctgcctctgcctcctgaggtgctgaacgacagctctgctacttctgatctgcatgatggccgggaaagcagcatgccggagtcatggagccagctgcttcttgggggattagtcggagatcacgagagatacaacgctgccacagctttactgtcaaaaggattagaggagcgacctgcagcttacaattgctatgaccctggacatggtggtggtgaggagatccagacatcggggaccaacattaggtctcatcaggtgagccaggcgctcttagcgtcgtcctctcctaggtcctgcatcaccacaagcctcggcagcaacatgctggacttctcaaacaccaccgtgccgccggcaccggatctgaagaatcatcactccgataactcttctgagggtaacagcgctggaagtggttcggctccaaagaaggctagggttcagacctcttcttcagcacagtctaccctaaaggtaagaaaggagaggcttggggatagaatcactgcacttcaccagatagtgtccccatttggcaaggagactattggctacattagattcctcctgagtcaaatcgaggctctcagcttcccttacttgggccatgacaacggggactccatgcaacaacataatactaataacttgctgctaaaccatagcactagcgatgccatggtacaagttcaaggtcctccgatgaccaatcaggagggggaggtctatggcaatggcattgaggagggcagcaggaaggatttgaggagcagggggctgtgcctggtgccagtgtcgtgcacgtcgcacctcgccgacgacaacggcccctcagacttctgggcggtgtccgcggcgccgtccccgcctcctccgcctccgccattcgccggcatcatctggcgatagagtcgtgtccagaccggcgtcgatccacccatcagtcgcatgcattattcatgcatgcatgacgtaaatatatacatatagtatcatgcatcactataccattggtttttttttaaaaaaaaatgtttggttgcttgccagggttgctagctagctatagctttgtttgaccgatgagctgaggtatccatcgagcatggagctacctgcagcctataccaggctgctgtatactgtacgtatgtagtacaccgtagtatatgtactgtacgttg

SEQ ID NO: 20195 - protein, 313 aa, Zea mays subsp. mays
  misc_feature (1)..(313): Ceres Seq. ID no. 12379391
HHLQIFSGLPLPLPPEVLNDSSATSDLHDGRESSMPESWSQLLLGGLVGDHERYNAATALLSKGLEERPAAYNCYDPGHGGGEEIQTSGTNIRSHQVSQALLASSSPRSCITTSLGSNMLDFSNTTVPPAPDLKNHHSDNSSEGNSAGSGSAPKKARVQTSSSAQSTLKVRKERLGDRITALHQIVSPFGKETIGYIRFLLSQIEALSFPYLGHDNGDSMQQHNTNNLLLNHSTSDAMVQVQGPPMTNQEGEVYGNGIEEGSRKDLRSRGLCLVPVSCTSHLADDNGPSDFWAVSAAPSPPPPPPPFAGIIWR

SEQ ID NO: 20196 - protein, 279 aa, Zea mays subsp. mays
  misc_feature (1)..(279): Ceres Seq. ID no. 12379392
MPESWSQLLLGGLVGDHERYNAATALLSKGLEERPAAYNCYDPGHGGGEEIQTSGTNIRSHQVSQALLASSSPRSCITTSLGSNMLDFSNTTVPPAPDLKNHHSDNSSEGNSAGSGSAPKKARVQTSSSAQSTLKVRKERLGDRITALHQIVSPFGKETIGYIRFLLSQIEALSFPYLGHDNGDSMQQHNTNNLLLNHSTSDAMVQVQGPPMTNQEGEVYGNGIEEGSRKDLRSRGLCLVPVSCTSHLADDNGPSDFWAVSAAPSPPPPPPPFAGIIWR

SEQ ID NO: 20197 - protein, 195 aa, Zea mays subsp. mays
  misc_feature (1)..(195): Ceres Seq. ID no. 12379393
MLDFSNTTVPPAPDLKNHHSDNSSEGNSAGSGSAPKKARVQTSSSAQSTLKVRKERLGDRITALHQIVSPFGKETIGYIRFLLSQIEALSFPYLGHDNGDSMQQHNTNNLLLNHSTSDAMVQVQGPPMTNQEGEVYGNGIEEGSRKDLRSRGLCLVPVSCTSHLADDNGPSDFWAVSAAPSPPPPPPPFAGIIWR

SEQ ID NO: 20198 - DNA, 1701 bp, Zea mays subsp. mays
  misc_feature (1)..(1701): Ceres Seq. ID no. 12379394
aactcgtggaacctacagggctttaacttctcccaacttcctcaaacaaatcctagcatcttcctaccccgtcccgatccatccatggcagcccctaccgtcgtcttactgcccgtgtggggtgctggccacctcatgtccatgctcgacgccggcaagcggctgctcacccgcgggggtcgcgcgctctcgctcaccgtgctcgtcatgcgagcgcccacggagcagctcgcggccgatctcgacgcccacatacgcagggaggaggcatcgggcctcgacgtccgcttcgtccgcctccccgccgttcagcccccgacgcacttccacggcatcgaggagttcatctccaggctggtacagctgcacgcgccccacgtcagggcggctatctccagcctggcttccccggtggcagcggtcgttatggacttcttctgcacggcgctgctcgacgtgacccgcgagctcgccgtgcccgcgtacgtctacttcactgccagcgccgggatgctcgcgttcttcctccgcctcccgtcgctccacgaggaggtgacggtccagttcgaggagatggagggcgcggtggatgtgcccgggctgccgcccgtgccgccgtcttccctgccggtgccagtgatggacaagaaccacccgaattacacgtggttcatgtaccacggcaggcgcttcgccgaggccgacggcatcatcgtcaacacggctgccgagctcgagcagagcgtgcttgctgccatcgccgacgggcggtgcacgccgggtgtccgtgccccgacggtctatccaattggcccggttatctcgttcagcccccccgcccactaacacagaacatccgcacgagtgcgtgcggtggctcgacacgcagcccgcggcctccgtggtgctcctctgcttcgggagccaagggttctccgcggcgccacaggcgcacgagatcgcgcacggcctggagcgtagcggccaccgcttcctctgggtgctgcgcggcccaccggcacccggcgagcggcacccgtcggacgcgaacctctccgagctgctccccgatggattcctcgaaaggaccaagggcagaggcctggtgtggccgacgaaggcgccgcagaaagagatactagcccacgccgccgttggtggtttcgtgacacacggcggctggaactcggtgctcgagagcctgtggttcggggtgccgatggcaccgtggccgctgtacgccgagcagcacctgaacgcgttcacgctggtggcctatgtaggcgtcgccgtggcgatgaaggtggacaggaagaggaacaatttcgtggaggcctcggagctggagcgagcggtgaaggagctgatgggcggtggcgaggaagggaggaaggcgagggagaaggccatggagatgagggatgcctgcaggaacgccgtggaggagggtggctcatcctactcttcactacgaaggctatcagagaagatatgtaaagtcgacaagaacctatgagtctgacgatgagaggcaattttacatcacattctttattgctgtaaactagcagtaagagaggatgtgattgattaaggttgagaataaattcttatcattgaatataaattagatgaatgatatattttatctaaaaataaagtaaaaatcaaacacctataatttggcaatttctattatat

SEQ ID NO: 20199 - protein, 281 aa, Zea mays subsp. mays
  misc_feature (1)..(281): Ceres Seq. ID no. 12379395
NSWNLQGFNFSQLPQTNPSIFLPRPDPSMAAPTVVLLPVWGAGHLMSMLDAGKRLLTRGGRALSLTVLVMRAPTEQLAADLDAHIRREEASGLDVRFVRLPAVQPPTHFHGIEEFISRLVQLHAPHVRAAISSLASPVAAVVMDFFCTALLDVTRELAVPAYVYFTASAGMLAFFLRLPSLHEEVTVQFEEMEGAVDVPGLPPVPPSSLPVPVMDKNHPNYTWFMYHGRRFAEADGIIVNTAAELEQSVLAAIADGRCTPGVRAPTVYPIGPVISFSPPAH

SEQ ID NO: 20200 - protein, 253 aa, Zea mays subsp. mays
  misc_feature (1)..(253): Ceres Seq. ID no. 12379396
MAAPTVVLLPVWGAGHLMSMLDAGKRLLTRGGRALSLTVLVMRAPTEQLAADLDAHIRREEASGLDVRFVRLPAVQPPTHFHGIEEFISRLVQLHAPHVRAAISSLASPVAAVVMDFFCTALLDVTRELAVPAYVYFTASAGMLAFFLRLPSLHEEVTVQFEEMEGAVDVPGLPPVPPSSLPVPVMDKNHPNYTWFMYHGRRFAEADGIIVNTAAELEQSVLAAIADGRCTPGVRAPTVYPIGPVISFSPPAH

SEQ ID NO: 20201 - protein, 236 aa, Zea mays subsp. mays
  misc_feature (1)..(236): Ceres Seq. ID no. 12379397
MSMLDAGKRLLTRGGRALSLTVLVMRAPTEQLAADLDAHIRREEASGLDVRFVRLPAVQPPTHFHGIEEFISRLVQLHAPHVRAAISSLASPVAAVVMDFFCTALLDVTRELAVPAYVYFTASAGMLAFFLRLPSLHEEVTVQFEEMEGAVDVPGLPPVPPSSLPVPVMDKNHPNYTWFMYHGRRFAEADGIIVNTAAELEQSVLAAIADGRCTPGVRAPTVYPIGPVISFSPPAH

SEQ ID NO: 20202 - DNA, 1884 bp, Zea mays subsp. mays
  misc_feature (1)..(1884): Ceres Seq. ID no. 12379414
gcacgagaccattacctagaacatcctaatcaaaaagagctgttcggtgacgatggtagctagctagctactactgtagtaggtaaagcctgcggcgctcgagcgagcaggaagacaaaggcaagcatggccgggggtggcttcgccgtggccgatggcccgtccgtcgactacggcggccgggtgaccttctcggtcgtcgtgacctgcctcatggcggcctccggcggcctcatcttcggttacgacatcggcatctcggggggcgtgacggcgatggagtcgttcctgtcggccttcttcccgggggtgctgcgcaggatggccgcggcgcggcgggacgagtactgcgtctacgacagccacgtcctcacggcgttcacctcgtcgctgtacctggccgggctggccgcctctctcgtcgccagccgcgtcaccagggcgatcggcaggcaggccgtcatgctcgcgggcggcgcgctcttcttcgccggcgccgccgtcaacgccgccgccgtcaacgtcgctatgctcatcgtcggacgcatgctgctgggcttcggcatcggctttaccaaccaggcggcgccggtgtacctggcggagacggcgccggccaagtggcggggcgccttcacgacggggttccagctcttcctcagcatcggcaacctggcggcgaacctggtgaactacggcacctcgcgcatcccggcgtgggggtggcgcctctcgctgggcctggccgcggcgcccgccgccgtcatcctcgcgggggcgctgctcatcccggacacgcccagcagcctcctcgtgcgcgggcgcgcggaggaggcccgcgccgcgctgcggcgcgtcaggggcgccaaggcggacgtggacgcggagctggaggacgtggcccgcgccgtggaggccgcgcgcgcccacgagcagggcgcgttccgcaggatcctccggcgggagcaccggcaccacctggccgtggccgtggcggtcccgctgttccagcagctcacgggggtcatcgtcatcgccttcttctcgcccgtgctgttccagacggccgggttcggcagcaacgccgcgctcatgggcgccgtcatcctcggcgccgtcaacctcgcctccacgctcttgtccatcgtcacggtcgaccggtacggccggcggccgctgttcctcaccggcggcttcgtcatgatcgtttgccaggtcgcggtcgcgtggatcatggggtcccagatcggggccgacggcgggtccgcgatggccaggccctactccctcgcggtgctggcgctgacgtgcgtcttctcggcggcgttcggctggtcgtggggcccgctgacctgggtgatcccaggcgagatattccccgtggagatccggtcggcggggcagggcatcagcgtggccgtcaacctgggcgccacgttcctgctcacgcagacgttcctctccatgctgtgcacgctcaagtacgccaccttcatctactacgcggcctgggtagccgtcatgaccgccttcgtcgtggcgttcctgccggagaccaagggggtgccgctcgaggccatgggcgccatctgggagcgccactggtactggagacggttcgtgcagccttctgttgcggaggacccctgatgagtgactgatgcggccttctgttgtggacgtgacacgcttccggacgttgtgtgtgtcaatggttgcagtttgtctgctgtggtcgtcgtctgaggaagagttgtctgtggacgaaggctggaaatcaatgcgtgtgccctgtccgtggtttttctaatacaggagtacgtcatgcaaggttgttaatgttaagcgaacgttcgcagtgatatagacgttatattttaagtt

SEQ ID NO: 20203 - protein, 507 aa, Zea mays subsp. mays
  misc_feature (1)..(507): Ceres Seq. ID no. 12379415
MAGGGFAVADGPSVDYGGRVTFSVVVTCLMAASGGLIFGYDIGISGGVTAMESFLSAFFPGVLRRMAAARRDEYCVYDSHVLTAFTSSLYLAGLAASLVASRVTRAIGRQAVMLAGGALFFAGAAVNAAAVNVAMLIVGRMLLGFGIGFTNQAAPVYLAETAPAKWRGAFTTGFQLFLSIGNLAANLVNYGTSRIPAWGWRLSLGLAAAPAAVILAGALLIPDTPSSLLVRGRAEEARAALRRVRGAKADVDAELEDVARAVEAARAHEQGAFRRILRREHRHHLAVAVAVPLFQQLTGVIVIAFFSPVLFQTAGFGSNAALMGAVILGAVNLASTLLSIVTVDRYGRRPLFLTGGFVMIVCQVAVAWIMGSQIGADGGSAMARPYSLAVLALTCVFSAAFGWSWGPLTWVIPGEIFPVEIRSAGQGISVAVNLGATFLLTQTFLSMLCTLKYATFIYYAAWVAVMTAFVVAFLPETKGVPLEAMGAIWERHWYWRRFVQPSVAEDP

SEQ ID NO: 20204 - protein, 478 aa, Zea mays subsp. mays
  misc_feature (1)..(478): Ceres Seq. ID no. 12379416
MAASGGLIFGYDIGISGGVTAMESFLSAFFPGVLRRMAAARRDEYCVYDSHVLTAFTSSLYLAGLAASLVASRVTRAIGRQAVMLAGGALFFAGAAVNAAAVNVAMLIVGRMLLGFGIGFTNQAAPVYLAETAPAKWRGAFTTGFQLFLSIGNLAANLVNYGTSRIPAWGWRLSLGLAAAPAAVILAGALLIPDTPSSLLVRGRAEEARAALRRVRGAKADVDAELEDVARAVEAARAHEQGAFRRILRREHRHHLAVAVAVPLFQQLTGVIVIAFFSPVLFQTAGFGSNAALMGAVILGAVNLASTLLSIVTVDRYGRRPLFLTGGFVMIVCQVAVAWIMGSQIGADGGSAMARPYSLAVLALTCVFSAAFGWSWGPLTWVIPGEIFPVEIRSAGQGISVAVNLGATFLLTQTFLSMLCTLKYATFIYYAAWVAVMTAFVVAFLPETKGVPLEAMGAIWERHWYWRRFVQPSVAEDP

SEQ ID NO: 20205 - protein, 457 aa, Zea mays subsp. mays
  misc_feature (1)..(457): Ceres Seq. ID no. 12379417
MESFLSAFFPGVLRRMAAARRDEYCVYDSHVLTAFTSSLYLAGLAASLVASRVTRAIGRQAVMLAGGALFFAGAAVNAAAVNVAMLIVGRMLLGFGIGFTNQAAPVYLAETAPAKWRGAFTTGFQLFLSIGNLAANLVNYGTSRIPAWGWRLSLGLAAAPAAVILAGALLIPDTPSSLLVRGRAEEARAALRRVRGAKADVDAELEDVARAVEAARAHEQGAFRRILRREHRHHLAVAVAVPLFQQLTGVIVIAFFSPVLFQTAGFGSNAALMGAVILGAVNLASTLLSIVTVDRYGRRPLFLTGGFVMIVCQVAVAWIMGSQIGADGGSAMARPYSLAVLALTCVFSAAFGWSWGPLTWVIPGEIFPVEIRSAGQGISVAVNLGATFLLTQTFLSMLCTLKYATFIYYAAWVAVMTAFVVAFLPETKGVPLEAMGAIWERHWYWRRFVQPSVAEDP

SEQ ID NO: 20206 - DNA, 1580 bp, Zea mays subsp. mays
  misc_feature (1)..(1580): Ceres Seq. ID no. 12379450
agttgtatcctctcctcctccttggacctcccatcttccttcctcttcgttcgtttctccaaccgaagcttaccggcattcgctcctggttttccggccaagaaccgatttttttccggttccggcgtagcagcaggcagctagcttgccaccagctgattcattgcctctactagtgtttttcctgagctcggtggggtgatcggtcgatcggccgccgctcgagacacgtacgtacgtacgtacccgatcgagggtcgctccaagatgatgatgagcgggaaccggaagcagagggtggcattgtcgccggtgaaggaggccgccgcggtgcccaaggaggaggtgtgggaggtccggcccggcgggatgctggtgcagaagcggagccccgacgcggacccgccgcctgtgcccaccatccgcgtcaaggtcaagttcaacggcgtctaccacgagatctacatcaattcccaggcatccttcggcgagctgaagaagctggtgtcggagaagacgggcctgcacccggacgaccagaaggtggtgtacaaggacaaggagagggactccaaggcgttcctggacatggccggcgtcaaggaccggtccaagatggtgatgctggaggaccccgccgccaaggccaagcgcctcctggaggagcgccggaccagcaaggccgagcgcgccgccaaggccatcgcccgcgtcgccctcgacgtcgacaagctcgccaccaaggtgtcggcgctggagacggtcgcgagcaagggcggcgaggtcgtggacgcggacgtggcgacgctgacggaggcgctgatgcgcgagctggtggagctggactccatcgccgccgacggggacgccaaggcgcagcggcgggcgcaggagaggcgtgtgcagaggcacgtggagacgctggacgccatccgcgccaagaacaaggcggcggcgcccagcagcaacaggacacggcggccagcgcacctcccgccgcgcccgcagaaccagcagcggcggcagttccagccgccggcgcccaccacggcgacggcgccggcgccgcagacccagacggcggcgagctgggactcgttcgacctcctgtcgtcggtgccgccgtcgacgtcggcggcggccccagtgacgagcaccaccacgccgtccccgcggttggagtgggagctcttctagagggctccaggcgccagcctgcctgtctgggccgtgggcccctggccccctctcctcccgccacatgtgtgcttgtccatcggctcggctcggctgggccggtaccttggccatggtgtgcatgtttgtcaatcgccattctttgctttcccgtcccttttgttctttcgttctttcttttttttcctcatgtcctttttattaagtatattgtgcatgatctccatgcatccactaaaaaaggggcaacaactgcagtagctagctagtagtagtgaacacaacagaagcgtgcgtccatggtgtctgtcgtcgtctgcaaataagtggtgtggccttgttgcaaccgtaccgatgatgatgaaggatttttttttttggcc

SEQ ID NO: 20207 - protein, 309 aa, Zea mays subsp. mays
  misc_feature (1)..(309): Ceres Seq. ID no. 12379451
MMMSGNRKQRVALSPVKEAAAVPKEEVWEVRPGGMLVQKRSPDADPPPVPTIRVKVKFNGVYHEIYINSQASFGELKKLVSEKTGLHPDDQKVVYKDKERDSKAFLDMAGVKDRSKMVMLEDPAAKAKRLLEERRTSKAERAAKAIARVALDVDKLATKVSALETVASKGGEVVDADVATLTEALMRELVELDSIAADGDAKAQRRAQERRVQRHVETLDAIRAKNKAAAPSSNRTRRPAHLPPRPQNQQRRQFQPPAPTTATAPAPQTQTAASWDSFDLLSSVPPSTSAAAPVTSTTTPSPRLEWELF

SEQ ID NO: 20208 - protein, 308 aa, Zea mays subsp. mays
  misc_feature (1)..(308): Ceres Seq. ID no. 12379452
MMSGNRKQRVALSPVKEAAAVPKEEVWEVRPGGMLVQKRSPDADPPPVPTIRVKVKFNGVYHEIYINSQASFGELKKLVSEKTGLHPDDQKVVYKDKERDSKAFLDMAGVKDRSKMVMLEDPAAKAKRLLEERRTSKAERAAKAIARVALDVDKLATKVSALETVASKGGEVVDADVATLTEALMRELVELDSIAADGDAKAQRRAQERRVQRHVETLDAIRAKNKAAAPSSNRTRRPAHLPPRPQNQQRRQFQPPAPTTATAPAPQTQTAASWDSFDLLSSVPPSTSAAAPVTSTTTPSPRLEWELF

SEQ ID NO: 20209 - protein, 307 aa, Zea mays subsp. mays
  misc_feature (1)..(307): Ceres Seq. ID no. 12379453
MSGNRKQRVALSPVKEAAAVPKEEVWEVRPGGMLVQKRSPDADPPPVPTIRVKVKFNGVYHEIYINSQASFGELKKLVSEKTGLHPDDQKVVYKDKERDSKAFLDMAGVKDRSKMVMLEDPAAKAKRLLEERRTSKAERAAKAIARVALDVDKLATKVSALETVASKGGEVVDADVATLTEALMRELVELDSIAADGDAKAQRRAQERRVQRHVETLDAIRAKNKAAAPSSNRTRRPAHLPPRPQNQQRRQFQPPAPTTATAPAPQTQTAASWDSFDLLSSVPPSTSAAAPVTSTTTPSPRLEWELF

SEQ ID NO: 20210 - DNA, 1239 bp, Zea mays subsp. mays
  misc_feature (1)..(1239): Ceres Seq. ID no. 12379487
gcacgagaccattacctagaacatcctaatcgaaaaactcacggtcggaatgagcgttcaccgtcacaatcactgaatcacacaagcacgaccacgcacacgcggtaaacacgcgcgcgctcaaacagttcgaaatggcgctcgccgccgccatcatcgtcgtcttcctgcttcctggccttctcctcacggcgatggcggccacgccgtaccctcacggccgcggcgccgacgctctcgtgggcgcgtccaagaagtacgagggcagctccaacctggtggacctccgctaccacatgtccccgtcctctccgccgcgccgctccgcctctacgtgctctggtacggccgatgggaccccgcgcaccaggtccccgtccgcgacttcctcctctccctctccgacacgtccctgccgcgcccctccgtcgccgactggtgggccaccgccgcgctctacgccgaccagaccctcgccaacgtcacctgccgcgtcgacctggccggggaagccgccgacgagtcggcctcgctgggccgctcgctctcccggctcgacatccagcgcgtgctcgcctctgcggtcgccgcgggccggctccctgccgncacccgcggcggcgcctaccttgttctcacggcgcccggcgtcggcgtccaggacttctgccgcgccgtatgcggcttccactacttcaccttcccgtcgctcgtgggccacacgctgccctacgcgtgggtcgggcacagcggcggccgctgcgccgacgtctgcgcgtacccgttcgcgctgtcgtcgtacatggcccggagcggcatggcggcgctgcggccgcccaacggcgacgcgggcgtcgacggcatggtcagcgtcatcgcgcacgagctggccgagctcgccacgaacccgctcgtcaacgcgtggtacgccggggaggaccccacggcgcccaccgagatcgccgacctgtgcgagggggtgtacggtacgggcggcggcggcgggtacgccgggaaggtgtcggtggacgcgcaggggaggagctggaatgtgaatgggaggaaggggaggaaattcttggtgcagtggctgtggagcccagaggctaaggcgtgcgtggggcccaatgccagtgactaggcttattggccactgctagcatgtaactaccatgtagtagtagtttattattctcagctttactttatattatattatatataaaaaactattatatg

SEQ ID NO: 20211 - protein, 306 aa, Zea mays subsp. mays
  misc_feature (1)..(306): Ceres Seq. ID no. 12379488
  misc_feature (159)..(159): Xaa is any aa, unknown or other
MALAAAIIVVFLLPGLLLTAMAATPYPHGRGADALVGASKKYEGSSNLVDLRYHMSPSSPPRRSASTCSGTADGTPRTRSPSATSSSPSPTRPCRAPPSPTGGPPPRSTPTRPSPTSPAASTWPGKPPTSRPRWAARSPGSTSSACSPLRSPRAGSLPXPAAAPTLFSRRPASASRTSAAPYAASTTSPSRRSWATRCPTRGSGTAAAAAPTSARTRSRCRRTWPGAAWRRCGRPTATRASTAWSASSRTSWPSSPRTRSSTRGTPGRTPRRPPRSPTCARGCTVRAAAAGTPGRCRWTRRGGAGM

SEQ ID NO: 20212 - protein, 286 aa, Zea mays subsp. mays
  misc_feature (1)..(286): Ceres Seq. ID no. 12379489
  misc_feature (139)..(139): Xaa is any aa, unknown or other
MAATPYPHGRGADALVGASKKYEGSSNLVDLRYHMSPSSPPRRSASTCSGTADGTPRTRSPSATSSSPSPTRPCRAPPSPTGGPPPRSTPTRPSPTSPAASTWPGKPPTSRPRWAARSPGSTSSACSPLRSPRAGSLPXPAAAPTLFSRRPASASRTSAAPYAASTTSPSRRSWATRCPTRGSGTAAAAAPTSARTRSRCRRTWPGAAWRRCGRPTATRASTAWSASSRTSWPSSPRTRSSTRGTPGRTPRRPPRSPTCARGCTVRAAAAGTPGRCRWTRRGGAGM

SEQ ID NO: 20213 - protein, 252 aa, Zea mays subsp. mays
  misc_feature (1)..(252): Ceres Seq. ID no. 12379490
  misc_feature (105)..(105): Xaa is any aa, unknown or other
MSPSSPPRRSASTCSGTADGTPRTRSPSATSSSPSPTRPCRAPPSPTGGPPPRSTPTRPSPTSPAASTWPGKPPTSRPRWAARSPGSTSSACSPLRSPRAGSLPXPAAAPTLFSRRPASASRTSAAPYAASTTSPSRRSWATRCPTRGSGTAAAAAPTSARTRSRCRRTWPGAAWRRCGRPTATRASTAWSASSRTSWPSSPRTRSSTRGTPGRTPRRPPRSPTCARGCTVRAAAAGTPGRCRWTRRGGAGM

SEQ ID NO: 20214 - DNA, 1881 bp, Zea mays subsp. mays
  misc_feature (1)..(1881): Ceres Seq. ID no. 12379651
gtcgcgcacacctcagtctcctgccgtgcgtagtgtgtacgggcaaggcggcagagctagctttcactacactcagtggccattgccgttgctagctttcaatagctcttagctgcaatgtcggcggcggcgtcgcagagcagtgtcaaggcaatggcggcggccgcagccgctgtggcaatgctgctctcggccgcggcggcggtggccgcgcagcacgattacggcgacgccctgcacaagtgcatcctcttcttcgaggggcagcgctcggggaggctcccgccggaccagcgcctccgctggcgccgcgactccggcctccacgacggcgccgcggccggggtggatctgaccggagggtactacgacgccggcgacaacgtgaagttcgggttcccgatggcgtttcacggcgacgctcatgtcgtggggcctgatcgacttcgggcgcagcttcgggccccacagggaggaggcccggaaggcggtgcggtgggcgacggactacctgatgaaggcgacggcgaagcggaacacggtgtacgtgcaggtgggcgacgcgttccgcgaccacgcgtgctgggagcggcccgaggacatggacaccccgcgcaccgtgtacaaggtggacccgtcccacccgggctccgacgtcgccgccgagaccgccgccgcgctcgccgccggctccatcgtcttccgcgacgccgaccccgcctactccaagcgcctcctcgaccgcgccgtcgccgtgttcgagttcgcggacaagtaccggggcccctacagcagcagcctccacgcggcggtgtgcccctgctactgcgactactccggataccaggacgagctgctgtggggcgcggcgtggctgcacaaggcgacgcggcggcgggagtaccgcgagtacatcaagaggaacgaggtggtgctcggcgccagcgacgccatcaacgagttcggctgggacaacaagcacgccggcatcaacgtcctcatctcaaaggaggttctgatggggaaggacgagtacttccagtccttccgtgtcaacgccgacaacttcatgtgcaccctcctccccggcatctccaatcacccccagatccagtactccccaggcgggctgctgttcaaggtcgggagcagcaacatgcagcacgtgacgcagctgtcgttcctcctgctggcctactccaactacctgagccacgccggcgggcgcgtctcgtgcggctcgtcgtcggcgtcgccggtgcagctccgccgcgtggccaagcggcaggtggactacatactgggcgacaacccgctgcggatgtcgtacatggttggggtacggcgcgcggttcccgcggcggatccaccaccgccgccagctccgctgccgtccgtggcggcgcacccggcgcggatcggctgcaaggccggcgccgcctactacaccagcccggcgcccaacccgaacctgctcgtgggcgccgtcgtgggcgggcccaccgacgactccgacgccttccccgacgcgcgcgccgtgttccagcagtcctagcccaccacgtacatcaacgcgccgctcatgggcctcctcgcctacttctcggcacatcccaacccagccgagtcgggcggcgactgaaaaaagcctagggagagtgatagatgacgaacgcacgcacgggcctgggtattttagatgggctttggtttgtcttgttcgggcccgattgttgcctggtgtatccgtacgagtagttgtaactagttaaccagagccactcccttgcctgcaaaagaaagaccagggaagaggaattagtaggctccaagattgtattagctgttaagattatatacgctagtagcaaggttaactgt

SEQ ID NO: 20215 - protein, 511 aa, Zea mays subsp. mays
  misc_feature (1)..(511): Ceres Seq. ID no. 12379652
MSAAASQSSVKAMAAAAAAVAMLLSAAAAVAAQHDYGDALHKCILFFEGQRSGRLPPDQRLRWRRDSGLHDGAAAGVDLTGGYYDAGDNVKFGFPMAFHGDAHVVGPDRLRAQLRAPQGGGPEGGAVGDGLPDEGDGEAEHGVRAGGRRVPRPRVLGAARGHGHPAHRVQGGPVPPGLRRRRRDRRRARRRLHRLPRRRPRLLQAPPRPRRRRVRVRGQVPGPLQQQPPRGGVPLLLRLLRIPGRAAVGRGVAAQGDAAAGVPRVHQEERGGARRQRRHQRVRLGQQARRHQRPHLKGGSDGEGRVLPVLPCQRRQLHVHPPPRHLQSPPDPVLPRRAAVQGREQQHAARDAAVVPPAGLLQLPEPRRRARLVRLVVGVAGAAPPRGQAAGGLHTGRQPAADVVHGWGTARGSRGGSTTAASSAAVRGGAPGADRLQGRRRLLHQPGAQPEPARGRRRGRAHRRLRRLPRRARRVPAVLAHHVHQRAAHGPPRLLLGTSQPSRVGRRLKKA

SEQ ID NO: 20216 - protein, 499 aa, Zea mays subsp. mays
  misc_feature (1)..(499): Ceres Seq. ID no. 12379653
MAAAAAAVAMLLSAAAAVAAQHDYGDALHKCILFFEGQRSGRLPPDQRLRWRRDSGLHDGAAAGVDLTGGYYDAGDNVKFGFPMAFHGDAHVVGPDRLRAQLRAPQGGGPEGGAVGDGLPDEGDGEAEHGVRAGGRRVPRPRVLGAARGHGHPAHRVQGGPVPPGLRRRRRDRRRARRRLHRLPRRRPRLLQAPPRPRRRRVRVRGQVPGPLQQQPPRGGVPLLLRLLRIPGRAAVGRGVAAQGDAAAGVPRVHQEERGGARRQRRHQRVRLGQQARRHQRPHLKGGSDGEGRVLPVLPCQRRQLHVHPPPRHLQSPPDPVLPRRAAVQGREQQHAARDAAVVPPAGLLQLPEPRRRARLVRLVVGVAGAAPPRGQAAGGLHTGRQPAADVVHGWGTARGSRGGSTTAASSAAVRGGAPGADRLQGRRRLLHQPGAQPEPARGRRRGRAHRRLRRLPRRARRVPAVLAHHVHQRAAHGPPRLLLGTSQPSRVGRRLKKA

SEQ ID NO: 20217 - protein, 490 aa, Zea mays subsp. mays
  misc_feature (1)..(490): Ceres Seq. ID no. 12379654
MLLSAAAAVAAQHDYGDALHKCILFFEGQRSGRLPPDQRLRWRRDSGLHDGAAAGVDLTGGYYDAGDNVKFGFPMAFHGDAHVVGPDRLRAQLRAPQGGGPEGGAVGDGLPDEGDGEAEHGVRAGGRRVPRPRVLGAARGHGHPAHRVQGGPVPPGLRRRRRDRRRARRRLHRLPRRRPRLLQAPPRPRRRRVRVRGQVPGPLQQQPPRGGVPLLLRLLRIPGRAAVGRGVAAQGDAAAGVPRVHQEERGGARRQRRHQRVRLGQQARRHQRPHLKGGSDGEGRVLPVLPCQRRQLHVHPPPRHLQSPPDPVLPRRAAVQGREQQHAARDAAVVPPAGLLQLPEPRRRARLVRLVVGVAGAAPPRGQAAGGLHTGRQPAADVVHGWGTARGSRGGSTTAASSAAVRGGAPGADRLQGRRRLLHQPGAQPEPARGRRRGRAHRRLRRLPRRARRVPAVLAHHVHQRAAHGPPRLLLGTSQPSRVGRRLKKA

SEQ ID NO: 20218 - protein, 376 aa, Zea mays subsp. mays
  misc_feature (1)..(376): Ceres Seq. ID no. 12379655
MSWGLIDFGRSFGPHREEARKAVRWATDYLMKATAKRNTVYVQVGDAFRDHACWERPEDMDTPRTVYKVDPSHPGSDVAAETAAALAAGSIVFRDADPAYSKRLLDRAVAVFEFADKYRGPYSSSLHAAVCPCYCDYSGYQDELLWGAAWLHKATRRREYREYIKRNEVVLGASDAINEFGWDNKHAGINVLISKEVLMGKDEYFQSFRVNADNFMCTLLPGISNHPQIQYSPGGLLFKVGSSNMQHVTQLSFLLLAYSNYLSHAGGRVSCGSSSASPVQLRRVAKRQVDYILGDNPLRMSYMVGVRRAVPAADPPPPPAPLPSVAAHPARIGCKAGAAYYTSPAPNPNLLVGAVVGGPTDDSDAFPDARAVFQQS

SEQ ID NO: 20219 - DNA, 783 bp, Zea mays subsp. mays
  misc_feature (1)..(783): Ceres Seq. ID no. 12379672
agattccaactctgcgagaaaagctaaaataatcggacccatctcttggaccgtgcgatcgcccccctccgccgccgcccacggatcaacgccacgccaccacgccggaagaccgggatcgtgacggccacatggacatggctacggcggccgccgcgttgccatggggaggcggttccccggcgtggatcgacgtgcctgagcggagcaagagcgcgttcatggagctgaagcggaggaaggtccaccggtatgtgatcttcaagatcgacgacagtagagaggaggtcgtcgtcgacaagatcggcgcgcccggggagagctacgacgacttcacggcgtcgctaccgaccgatgattgccggtacgccgtctacgatctggatttcgtaagcgacgacaactgccggaaaagcaagattttcttcatctcctggtctccttcagattctcgcatccgtgccaagaccatatatgccgtgtcaaggaaccaattccgtcatgagcttgacggagtgcacttcgagatccaagccaccgatcccgatgacatgaatctagaagttctcagggggcgtgctaacagaacctgattcactagcgagcaacccaaaatgcagctcggaggtcgctgatctgatgaggcatgacgtagaagtataggctgccgatcacacccgggcatgcattgtttctttttacttcttcctttccttttggagttatacttccgtgatgtttgcctaactacataggttccctctaatatgatgtggactgtgg

SEQ ID NO: 20220 - protein, 153 aa, Zea mays subsp. mays
  misc_feature (1)..(153): Ceres Seq. ID no. 12379673
MDMATAAAALPWGGGSPAWIDVPERSKSAFMELKRRKVHRYVIFKIDDSREEVVVDKIGAPGESYDDFTASLPTDDCRYAVYDLDFVSDDNCRKSKIFFISWSPSDSRIRAKTIYAVSRNQFRHELDGVHFEIQATDPDDMNLEVLRGRANRT

SEQ ID NO: 20221 - protein, 151 aa, Zea mays subsp. mays
  misc_feature (1)..(151): Ceres Seq. ID no. 12379674
MATAAAALPWGGGSPAWIDVPERSKSAFMELKRRKVHRYVIFKIDDSREEVVVDKIGAPGESYDDFTASLPTDDCRYAVYDLDFVSDDNCRKSKIFFISWSPSDSRIRAKTIYAVSRNQFRHELDGVHFEIQATDPDDMNLEVLRGRANRT

SEQ ID NO: 20222 - protein, 123 aa, Zea mays subsp. mays
  misc_feature (1)..(123): Ceres Seq. ID no. 12379675
MELKRRKVHRYVIFKIDDSREEVVVDKIGAPGESYDDFTASLPTDDCRYAVYDLDFVSDDNCRKSKIFFISWSPSDSRIRAKTIYAVSRNQFRHELDGVHFEIQATDPDDMNLEVLRGRANRT

SEQ ID NO: 20223 - DNA, 778 bp, Zea mays subsp. mays
  misc_feature (1)..(778): Ceres Seq. ID no. 12379700
accgcgagccgaaccggagcgtcaagcaaacatccgtcgatcccgattccgaccactgcgctcgcgccatcgcgccatccacccggcattgtgcgcccgagccgggctcgttggatggcgtccggaggcgccgcccgcggtcgccttgctgaggagcgcaaggcgtggcgcaagagccatcccctcggctttgtggccaagccggcgatgctgccggatggttctgtcaatctcatgctctgggactgcgtcgtccccggcaaggaaggcactgattgggaaggtggatatttcccggtcactctccatttcactgaaaattacccaagtaaccccccaacctgcaagttcccacgaaggtttttccatgtcaatgtctatgattctggggatgtatgcctgtcaatacttggtgatgcatgggcgccttctatcacagtgcggcaaattctaataggcatccaggagctgctggagaacccaaacccagcctctcccgcacaggattttgcttacgatgtttttgcagagaatatgccagaatacaagagacgcgtccgtgagcaagccaagaggtatccgtcgctcgtgtagccgtggacctctgcaacacaattgctgctaaccaagtagtcactcactttggtgtagtggaacttgttcatgacgtgcttaactatggtgtctagttagccgtacgcttgttggaactgctaaagtgcagcttattggaactgctaaaatgcccttgactacgtcttattattatggtttatct

SEQ ID NO: 20224 - protein, 197 aa, Zea mays subsp. mays
  misc_feature (1)..(197): Ceres Seq. ID no. 12379701
TASRTGASSKHPSIPIPTTALAPSRHPPGIVRPSRARWMASGGAARGRLAEERKAWRKSHPLGFVAKPAMLPDGSVNLMLWDCVVPGKEGTDWEGGYFPVTLHFTENYPSNPPTCKFPRRFFHVNVYDSGDVCLSILGDAWAPSITVRQILIGIQELLENPNPASPAQDFAYDVFAENMPEYKRRVREQAKRYPSLV

SEQ ID NO: 20225 - protein, 159 aa, Zea mays subsp. mays
  misc_feature (1)..(159): Ceres Seq. ID no. 12379702
MASGGAARGRLAEERKAWRKSHPLGFVAKPAMLPDGSVNLMLWDCVVPGKEGTDWEGGYFPVTLHFTENYPSNPPTCKFPRRFFHVNVYDSGDVCLSILGDAWAPSITVRQILIGIQELLENPNPASPAQDFAYDVFAENMPEYKRRVREQAKRYPSLV

SEQ ID NO: 20226 - protein, 150 aa, Zea mays subsp. mays
  misc_feature (1)..(150): Ceres Seq. ID no. 12379703
PRAEPERQANIRRSRFRPLRSRHRAIHPALCARAGLVGWRPEAPPAVALLRSARRGARAIPSALWPSRRCCRMVLSISCSGTASSPARKALIGKVDISRSLSISLKITQVTPQPASSHEGFSMSMSMILGMYACQYLVMHGRLLSQCGKF

SEQ ID NO: 20227 - DNA, 847 bp, Zea mays subsp. mays
  misc_feature (1)..(847): Ceres Seq. ID no. 12379704
gagacccctctgctccaactccaatccgccgctccactccaagtcacacggaggcagccatcgcagcctcgcccgactccgcttcccctgttctttgggcatggagctgatcacaaatgtcaccgagtacgagaagctcgcgaaggagaggctgccgaagatggtgtacgactactacgcctccggcgcagaagatcagtggacgctcaaggagaaccgggaggccttctccagaattctgtttaggccacgggtactgatcgacgtctcccgtatcgacatggccacaaacgttctgggcttcagcatttccatgcctatcatgatcgctccttcagccatgcagaaaatggctcatcctgatggagagcttgccacggcaagagctgcagcctctgcaggaacaataatgacattgtcctcatggtctacttccagcgttgaagaggtcaactcagttgggccgggcatacgtttcttccagctctatgtctacaaggacaggaacatcgtacggcaactcgtgaaaagggctgagatggctggcttcaaggccattgcactcacggtagacactccaatacttggccgcagggaagctgacattaagaacaggttcgccttacctccacatctggtgttgaaaaacttccaagcgctggatcttggcacgatggacaagacaaatgattccggccttgcttcctacgttgctggtcaagttgaccgcaccctttcctggaaggacgtcaagtggctgcagacaattaccacgttgccgatcctagtgaaagggatagtgactgcagaagacactaggcttgcgatcgaatatggcgctgctggg

SEQ ID NO: 20228 - protein, 282 aa, Zea mays subsp. mays
  misc_feature (1)..(282): Ceres Seq. ID no. 12379705
RPLCSNSNPPLHSKSHGGSHRSLARLRFPCSLGMELITNVTEYEKLAKERLPKMVYDYYASGAEDQWTLKENREAFSRILFRPRVLIDVSRIDMATNVLGFSISMPIMIAPSAMQKMAHPDGELATARAAASAGTIMTLSSWSTSSVEEVNSVGPGIRFFQLYVYKDRNIVRQLVKRAEMAGFKAIALTVDTPILGRREADIKNRFALPPHLVLKNFQALDLGTMDKTNDSGLASYVAGQVDRTLSWKDVKWLQTITTLPILVKGIVTAEDTRLAIEYGAAG

SEQ ID NO: 20229 - protein, 249 aa, Zea mays subsp. mays
  misc_feature (1)..(249): Ceres Seq. ID no. 12379706
MELITNVTEYEKLAKERLPKMVYDYYASGAEDQWTLKENREAFSRILFRPRVLIDVSRIDMATNVLGFSISMPIMIAPSAMQKMAHPDGELATARAAASAGTIMTLSSWSTSSVEEVNSVGPGIRFFQLYVYKDRNIVRQLVKRAEMAGFKAIALTVDTPILGRREADIKNRFALPPHLVLKNFQALDLGTMDKTNDSGLASYVAGQVDRTLSWKDVKWLQTITTLPILVKGIVTAEDTRLAIEYGAAG

SEQ ID NO: 20230 - protein, 229 aa, Zea mays subsp. mays
  misc_feature (1)..(229): Ceres Seq. ID no. 12379707
MVYDYYASGAEDQWTLKENREAFSRILFRPRVLIDVSRIDMATNVLGFSISMPIMIAPSAMQKMAHPDGELATARAAASAGTIMTLSSWSTSSVEEVNSVGPGIRFFQLYVYKDRNIVRQLVKRAEMAGFKAIALTVDTPILGRREADIKNRFALPPHLVLKNFQALDLGTMDKTNDSGLASYVAGQVDRTLSWKDVKWLQTITTLPILVKGIVTAEDTRLAIEYGAAG

SEQ ID NO: 20231 - DNA, 1618 bp, Zea mays subsp. mays
  misc_feature (1)..(1618): Ceres Seq. ID no. 12380103
ataaaaaaatggcgaaatgaaattcacggtaccagggtcaaccgagcacggacgcgtaaagccaacaaggggggaccgggggagcacgaggaaaccgaggagactgacccaacccgtgcttgcggcggcgctgcgctggtgccggccacggccatgatcggcggcgggcgggcagcggatagccacccggcgtcctgctcgtcctcgtcctcgtcttcctcctcgccgtcaggcccgtcgacggggggctcccgccttcaccgcagcaagaggcgtcccgacatcctcaacatgctcatgagtgcagcatgtctcagttcatcatcttctgatactggaaaaggacaaagcaagttttcaagcaacaaagtaacacacggatttcacttagtggaaggaagatctggccatgatatggaagactaccatgtagcagagtatagatatgaaaatgatcacgaacttggtctttttgctatttatgatggacatctgggagatagtgtggccagttatttgaaagctaatctttttgacaacatactgaaagagcctctcttttggtcagaccctcaagaagcaattaaaaacgcatacagctctacaaacaaatatattctggaaaacactaggcaactaggaccaggggggtcaacagcagtcactgctattgtagttgatggtacagatatgtggattgcaaatgtaggtgattcaagagctgttttgtctgaaactggtactgccagccaggttactgttgatcacgaacctcataccactaatgaacgaaagaggatagaagaaaaaggtggttttgtctctacgttccccggtaagcatctagttgcctagctctcaggtcattgttctctccaatagctatggaatttgtcccaatgcattttctagttgctgataggtgacgttcctcgtgtaaacggccaacttgcggttgcaagagcatttggtgatcagagcctcaaggcacacttgagctcagagcctgatgttaagcatataaagataaattcaagcacagagtttgtcatacttgccagtgacgggttatggaaggtatgtgtcttccttgcgtatttcactttacgttgccgtcgccttccctatatagttcaagatttcgatatccaatctgaatcgttttctcttagttctctcttttctcgttgttcatattcactcttttaccctgtttctggtgaaggtaatgaagaaccaggaagccgttgatctggtgaagtcaaccaaggacccgcaaacagcggcgaagcgactgacgtccgaggccctgggaaggatgagcaaggacgatatctcatgcattgtcatccgttttcgatgctgactcttgggtaatccagctcatccattgccctaagctgcctgtgtgcatcagcagaactgtttcctccgtatcgtagctggtagcgtctggatctgtttgcagctcaggatcagattggtgattggactggacaggttattgaccaaagaatagaagaatgctgggtttgggtgttttcagcgtctgcaggctgttctttttttcttcttctgtgcatatatacacgttggaatcaaatatataccgtcggac

SEQ ID NO: 20232 - protein, 284 aa, Zea mays subsp. mays
  misc_feature (1)..(284): Ceres Seq. ID no. 12380104
IKKWRNEIHGTRVNRARTRKANKGGPGEHEETEETDPTRACGGAALVPATAMIGGGRAADSHPASCSSSSSSSSSPSGPSTGGSRLHRSKRRPDILNMLMSAACLSSSSSDTGKGQSKFSSNKVTHGFHLVEGRSGHDMEDYHVAEYRYENDHELGLFAIYDGHLGDSVASYLKANLFDNILKEPLFWSDPQEAIKNAYSSTNKYILENTRQLGPGGSTAVTAIVVDGTDMWIANVGDSRAVLSETGTASQVTVDHEPHTTNERKRIEEKGGFVSTFPGKHLVA

SEQ ID NO: 20233 - protein, 233 aa, Zea mays subsp. mays
  misc_feature (1)..(233): Ceres Seq. ID no. 12380105
MIGGGRAADSHPASCSSSSSSSSSPSGPSTGGSRLHRSKRRPDILNMLMSAACLSSSSSDTGKGQSKFSSNKVTHGFHLVEGRSGHDMEDYHVAEYRYENDHELGLFAIYDGHLGDSVASYLKANLFDNILKEPLFWSDPQEAIKNAYSSTNKYILENTRQLGPGGSTAVTAIVVDGTDMWIANVGDSRAVLSETGTASQVTVDHEPHTTNERKRIEEKGGFVSTFPGKHLVA

SEQ ID NO: 20234 - protein, 187 aa, Zea mays subsp. mays
  misc_feature (1)..(187): Ceres Seq. ID no. 12380106
MLMSAACLSSSSSDTGKGQSKFSSNKVTHGFHLVEGRSGHDMEDYHVAEYRYENDHELGLFAIYDGHLGDSVASYLKANLFDNILKEPLFWSDPQEAIKNAYSSTNKYILENTRQLGPGGSTAVTAIVVDGTDMWIANVGDSRAVLSETGTASQVTVDHEPHTTNERKRIEEKGGFVSTFPGKHLVA

SEQ ID NO: 20235 - DNA, 764 bp, Zea mays subsp. mays
  misc_feature (1)..(764): Ceres Seq. ID no. 12380968
gcacgagaccattacctagaacatcctaatcgaaaactcttcttcgcattgcctttcccttcagttgcaccgacctccagacgaaaccacccaagacgcgtgcttccattcctagcccaacagaagcgaagcacgccaccgaccaccggcctcgaagggatcatcttctctacaactcgtcctcgtggccttgttcctcctcttgtataggggactgcggcggagtggagatccgtgccgacatagtccgacttcttcgctcgctgcctacgattgatggcctcaccttcaccaaccgaagagttcagcagggaagcagctcgtcagtctctgatcgcgatctccgagtccactccggagacaccttcaccgcagacggtgaggacaccgccgatctccagcgcagagaacgggaagccgggcgatggggcggacaagttcagatcgaagctgatgtccatcacagacctgtcttctgatgcccaacctgcgcagtgccctcccgaggatgtcgctgcttaatcaatcgtgtgattctctgctcgacttgcggacacgatgtatcagtgcttgccgatcctctgaactggacatttggctgtcgtgctttaaactggacgtccttatggcttatgttattactggtcgtttttatttgataaataaatattcaggggaacgggtggaaatatactgtacaagtttcctgacttgttgatgaggaaccggtttgtctgaacatgctgccatgcactcatgctcgg

SEQ ID NO: 20236 - protein, 81 aa, Zea mays subsp. mays; identical to SEQ ID NO: 14843
  misc_feature (1)..(81): Ceres Seq. ID no. 12380969

SEQ ID NO: 20237 - protein, 79 aa, Zea mays subsp. mays
  misc_feature (1)..(79): Ceres Seq. ID no. 12380970
MPNLRSALPRMSLLNQSCDSLLDLRTRCISACRSSELDIWLSCFKLDVLMAYVITGRFYLINKYSGERVEIYCTSFLTC

SEQ ID NO: 20238 - protein, 69 aa, Zea mays subsp. mays
  misc_feature (1)..(69): Ceres Seq. ID no. 12380971
MSLLNQSCDSLLDLRTRCISACRSSELDIWLSCFKLDVLMAYVITGRFYLINKYSGERVEIYCTSFLTC

SEQ ID NO: 20239 - DNA, 1116 bp, Zea mays subsp. mays
  misc_feature (1)..(1116): Ceres Seq. ID no. 12381029
aatacaaaccaggcttgctcgtggcggcaaaaaccaacgtgctcgatctccctccgccactccatccatctcctcgctcccagtccccgggaagctacgaagcatggcgtccgtcaccgcccgcgccccggtcgcggcccttcgcccgtcgtcggcatcgctcaagtcgtcgtcggccttccttggccactctagccgcctcggccgcaccgcgtcgcccacgaggcgcagcctcaaggcggaggccaagggcgagtggctccccggccttccctccccctcctacctcgacggcagcctggcgggtgacaatggcttcgacccgttgggcctggcggaggaccccgagaacctgcggtggttcgtgcaggcggagctggtgaacggccggtgggccatgcttggcgtggccgggatgctcatcccggaggtgctgaccaaagccgggctgatcaacgcgccgcagtggtacgacgccggcaagtcggagtacttcgcgtcgtcgtccacgctgttcgtggtcgagttcatcctgttccactacgtggagatccggcggtggcaggacatcaagaaccccggcagcgtcaaccaggaccccatcttcaagagctacagcctgccgccgcacgagtgcggctacccgggcagcgtcttcaacccgctcaacttcgcgcccacgctcgaggccaaggagaaggagctcgccaacgggaggctggcgatgctggcgttcctgggcttcctgatccagcacaacgtcaccggcaaggggcccttcgacaacctgctgcagcacctgtctgacccatggcacaacaccatcatccagaccttctccggttgagtcgaggtcgaggagggatacgatccatcgctggtgagctgatatggactggaaggcaaacattgaaaccttaaattcctttctggatcagtttgtgtgtgttaatctatctggagggtacagattcgggccgtgttgcaatgcatgcatggtctgaagggagcgagggctgaggagtgactggtatgtacattagctgaaggggaggttaagggtagagatcgtttgatcagtatcatctgtatatccccatgcatggggtttcgttt

SEQ ID NO: 20240 - protein, 281 aa, Zea mays subsp. mays
  misc_feature (1)..(281): Ceres Seq. ID no. 12381030
IQTRLARGGKNQRARSPSATPSISSLPVPGKLRSMASVTARAPVAALRPSSASLKSSSAFLGHSSRLGRTASPTRRSLKAEAKGEWLPGLPSPSYLDGSLAGDNGFDPLGLAEDPENLRWFVQAELVNGRWAMLGVAGMLIPEVLTKAGLINAPQWYDAGKSEYFASSSTLFVVEFILFHYVEIRRWQDIKNPGSVNQDPIFKSYSLPPHECGYPGSVFNPLNFAPTLEAKEKELANGRLAMLAFLGFLIQHNVTGKGPFDNLLQHLSDPWHNTIIQTFSG

SEQ ID NO: 20241 - protein, 247 aa, Zea mays subsp. mays
  misc_feature (1)..(247): Ceres Seq. ID no. 12381031
MASVTARAPVAALRPSSASLKSSSAFLGHSSRLGRTASPTRRSLKAEAKGEWLPGLPSPSYLDGSLAGDNGFDPLGLAEDPENLRWFVQAELVNGRWAMLGVAGMLIPEVLTKAGLINAPQWYDAGKSEYFASSSTLFVVEFILFHYVEIRRWQDIKNPGSVNQDPIFKSYSLPPHECGYPGSVFNPLNFAPTLEAKEKELANGRLAMLAFLGFLIQHNVTGKGPFDNLLQHLSDPWHNTIIQTFSG

SEQ ID NO: 20242 - protein, 149 aa, Zea mays subsp. mays
  misc_feature (1)..(149): Ceres Seq. ID no. 12381032
MLGVAGMLIPEVLTKAGLINAPQWYDAGKSEYFASSSTLFVVEFILFHYVEIRRWQDIKNPGSVNQDPIFKSYSLPPHECGYPGSVFNPLNFAPTLEAKEKELANGRLAMLAFLGFLIQHNVTGKGPFDNLLQHLSDPWHNTIIQTFSG

SEQ ID NO: 20243 - DNA, 1099 bp, Zea mays subsp. mays
  misc_feature (1)..(1099): Ceres Seq. ID no. 12381037
acccagacctagccactccccagcaggcaagcaacctcgccaaaaccctacgccgctcaactatgctcatccggcgaccgctccaaaccctcaccctccccctcctccgccgccacttctccgccgccaccgtcgaggcctttgtgtctcccgaccaagccaccgacccgctctccccgccgtacgactacctcccgggccacccgagccagacgctaagcacaatgaggtgatcctcgccgtcccgcgcgcctcttcggggcgccacgtagccgccaaggagcgcaaggccgggcgggtccccgccatcgtgttcgagcaggagaacggacaggagggcggcaacaagcgcctcatctccgttcgggccaatcagatccgcaagctcgtcgaccacctcggccggtccttcttcctctccaggctgttcagtctccaggtctggtcagaacatgccgggcagggcgaactcatcgaaagcgtccgcgtcctacccagaaaggtacacctgcatgcaggcactgatgaaccgctgaatatcacatttatgagagcaccttcttctgcacttctcaaaatagatgttcctctgatgttcattggagaggatgcctcacctggtctcaggaaaggagcttacttcaacaccataaaacgaacagccaagtatctgtgccctgctgacatagtaccaccatacattaaagtggatctaagtgagttggatgtaggacagaaattgctgatgcgtgatctgaaagttcatcctgcgttgaagctgcttcattcgccagatcagcccatctgtaactttaccggatcaaggtctccagaatagaagaagggaaaataacttgcttctttgtatgagctgttttgagcacaataaggttttgtttcgtacttgagtgattcaggtgttacttgtcctactgttaggatgaattgtagccagagacacctatttttacctcaggaagggatcttttgagcaggtagatgctactacagctagacgcacttgcaaagtttcctaaatatggtcatctagtgttaacagaaacttatggtgctgtgagcaatattgaaaattgtttgc

SEQ ID NO: 20244 - protein, 278 aa, Zea mays subsp. mays
  misc_feature (1)..(278): Ceres Seq. ID no. 12381038
PRPSHSPAGKQPRQNPTPLNYAHPATAPNPHPPPPPPPLLRRHRRGLCVSRPSHRPALPAVRLPPGPPEPDAKHNEVILAVPRASSGRHVAAKERKAGRVPAIVFEQENGQEGGNKRLISVRANQIRKLVDHLGRSFFLSRLFSLQVWSEHAGQGELIESVRVLPRKVHLHAGTDEPLNITFMRAPSSALLKIDVPLMFIGEDASPGLRKGAYFNTIKRTAKYLCPADIVPPYIKVDLSELDVGQKLLMRDLKVHPALKLLHSPDQPICNFTGSRSPE

SEQ ID NO: 20245 - DNA, 1392 bp, Zea mays subsp. mays
  misc_feature (1)..(1392): Ceres Seq. ID no. 12381052
gcacgagaccattacctagaacatcctaatcaaaaagtttcttcgccgtcgctttgcgagtgtggacgggacggatacatgagggagaacggcgccgccagggacgagggccccgccttgtgcaaggccgctgcggcggacgggggcggggatgtgggcgccgcctccgcccgccgccgccgccggctcgggcgtgccacggaggggcctgctccgacgaagagaatccggtcggggtcgcagaggtcgccgtacgactcgtctctggagacggcgacggacggctgctgctggccggcgcgcctatcgcatggcgccgtgtcggtgatcgggcggcggagggagatggaggacgcgttcgccgtcgcgctctcgttcctggcctcggaggcggtgggcggcgagcaggagcaggagctggacttcttcgccgtgtacgatggccacggcggtgcaagggtggcggaggcgtgccgggagcggatgcacgtggtgctggccgaggaggtcagcctgcgccgccgccgcagcggcagcgacgacctgcgctgggaggaggccatggcggccagcttcgcccgagtggacggcgaggtgaccggcggcttgtcgtccccgcaccatgacgacgccggcagcagcttgccctaccgcaccgtcgggtccaccgccgtcgtcgccgtcgtgggccggcgccgcatcgtcgtcggcaactgcggcgactcccgcgccgtgctctcacgcggcggcgtcgcggtgccgctctccagcgatcacaagccggaccgtccggacgagatgcagagggtggaagcagccggcggcagagtcgtcaactggaacggctaccgcgtgctgggagtcctggcaacctccaggtccatcggcgactactacctgaagccgtacgtgagcgcggagccggaggtgacggtggtggagcggacggagcgggacgagttcctcatcctggccagcgacgggctgtgggacgtggtctccaacgaggcggcgtgcaagatcgccaggagctgcctgagcgggcgcgcggcctccaggttccccgggtccgtggccggccgcaccgccgcggacgccgccgcgctgctcgcggagctggccttgtcccgcggcagcagggacaacatcagcgtcgtcgtggtcgagctgcggcggctccagacggaccagatgacgagggtttagtttgctgagactgagttgagttgagttgagagcgtaccgagtagtagatgatgatgacattgttaagtatttgagcagcctgtgctgagaagctgtggggggattaagagagtctccctcccgccttcagcacttgggtgccgtttggttcacatatttgtaacgtaatgggtaacggataacgtt

SEQ ID NO: 20246 - protein, 401 aa, Zea mays subsp. mays
  misc_feature (1)..(401): Ceres Seq. ID no. 12381053
ARDHYLEHPNQKVSSPSLCECGRDGYMRENGAARDEGPALCKAAAADGGGDVGAASARRRRRLGRATEGPAPTKRIRSGSQRSPYDSSLETATDGCCWPARLSHGAVSVIGRRREMEDAFAVALSFLASEAVGGEQEQELDFFAVYDGHGGARVAEACRERMHVVLAEEVSLRRRRSGSDDLRWEEAMAASFARVDGEVTGGLSSPHHDDAGSSLPYRTVGSTAVVAVVGRRRIVVGNCGDSRAVLSRGGVAVPLSSDHKPDRPDEMQRVEAAGGRVVNWNGYRVLGVLATSRSIGDYYLKPYVSAEPEVTVVERTERDEFLILASDGLWDVVSNEAACKIARSCLSGRAASRFPGSVAGRTAADAAALLAELALSRGSRDNISVVVVELRRLQTDQMTRV

SEQ ID NO: 20247 - protein, 375 aa, Zea mays subsp. mays
  misc_feature (1)..(375): Ceres Seq. ID no. 12381054
MRENGAARDEGPALCKAAAADGGGDVGAASARRRRRLGRATEGPAPTKRIRSGSQRSPYDSSLETATDGCCWPARLSHGAVSVIGRRREMEDAFAVALSFLASEAVGGEQEQELDFFAVYDGHGGARVAEACRERMHVVLAEEVSLRRRRSGSDDLRWEEAMAASFARVDGEVTGGLSSPHHDDAGSSLPYRTVGSTAVVAVVGRRRIVVGNCGDSRAVLSRGGVAVPLSSDHKPDRPDEMQRVEAAGGRVVNWNGYRVLGVLATSRSIGDYYLKPYVSAEPEVTVVERTERDEFLILASDGLWDVVSNEAACKIARSCLSGRAASRFPGSVAGRTAADAAALLAELALSRGSRDNISVVVVELRRLQTDQMTRV

SEQ ID NO: 20248 - protein, 286 aa, Zea mays subsp. mays
  misc_feature (1)..(286): Ceres Seq. ID no. 12381055
MEDAFAVALSFLASEAVGGEQEQELDFFAVYDGHGGARVAEACRERMHVVLAEEVSLRRRRSGSDDLRWEEAMAASFARVDGEVTGGLSSPHHDDAGSSLPYRTVGSTAVVAVVGRRRIVVGNCGDSRAVLSRGGVAVPLSSDHKPDRPDEMQRVEAAGGRVVNWNGYRVLGVLATSRSIGDYYLKPYVSAEPEVTVVERTERDEFLILASDGLWDVVSNEAACKIARSCLSGRAASRFPGSVAGRTAADAAALLAELALSRGSRDNISVVVVELRRLQTDQMTRV

SEQ ID NO: 20249 - DNA, 1585 bp, Zea mays subsp. mays
  misc_feature (1)..(1585): Ceres Seq. ID no. 12381056
gcacgagaccattacctagaacatcctaatcgaaaaaaaatcacttcaggtaagggcgaagaagagcattccctctcccggtctccccatctcccgaaccgcgtgagccaaaccctcccagctcgcgcgccctcgatggatgcctccgccgccacccccgcccccgggccttccttctctggcgccgagtcctccgcggccgccgcccagccgccggcggaggctccgcagttgcgcgtccacggcgccggcagcggcagcggcgtcgcgcgagcctgccgccaccacgcgtacagccgcaagcagaagtcgctcggccttctctgctccaacttcgtggcgctgtacgaccgggaggacgtggaggtgattgggctggacgacgcggccaagcgtctcggcgtcgagcgacgctgatctacgacatagtcaacgttctcgagagcgtcgggattcttgtgcggagggccaagaatcggtatacatggctcggattcgggggagtccctgctgcgctgaaagaactcaaggagagggcgctaaggaagatgtccggatcaccggtgttactgtcaatggaggactcctctactgccaacttatcagatgatgaggatgatgaaaaattgggcgatgctgatgaagatgctgagagcgagaagctcagccaacctgttgacaatacgtctgataagcctgacgcacccagctgccgccttagatctgatcatcggaaggagaagtcccttgggctcctcactcagaattttgtcaagctcttcctcaacatggaggttgggacaatctcacttgacgaagctgcaaggcttctccttggagagggacatgcagacagcaacatgagaaccaaagttcgtcgattgtatgacattgccaatgtgctgtcttctttgaacctcattgagaagacgcagcaagcagacacaagaaaacctgcattccggtggctaggccaggcaaagcgaaagcaagataacaatgtcatggtttctgtacctccatcgatgaaggcaatgcccaataagagagcatttggtactgatcttacaaacattgacaataagcgaggcaagttagactcagcagcggagaacaaagtcaagctcatgcagggtgctggtaacatagtgaagacttttgagaggcagctggtgcaagggaaaaggagtgactttgtttatgggcccttccaccctgctggtgcaaagaaacacgaaactgatgatcaaactgttaagcagcaggagaggaagaacattcaggactgggaaaaccttgctgtgtccttccgtccacaatatcagaatcaagcactgaatgatctttttggtcattatgtggaagcatggaaatcatggtacgtggatcttacccaggaaacggcatcatgaagcagaatgttggcaggtcagttgtaacttgtaagccgtttccagtagttagatcaactgagttgttgatgcttgcttagggaaccaccctgtacaagatggaataaaaacacgaaggcaattttgtctttcgactgtanntnctcgaatgctagaagtgaggccattttttc

SEQ ID NO: 20250 - protein, 287 aa, Zea mays subsp. mays
  misc_feature (1)..(287): Ceres Seq. ID no. 12381057
MSGSPVLLSMEDSSTANLSDDEDDEKLGDADEDAESEKLSQPVDNTSDKPDAPSCRLRSDHRKEKSLGLLTQNFVKLFLNMEVGTISLDEAARLLLGEGHADSNMRTKVRRLYDIANVLSSLNLIEKTQQADTRKPAFRWLGQAKRKQDNNVMVSVPPSMKAMPNKRAFGTDLTNIDNKRGKLDSAAENKVKLMQGAGNIVKTFERQLVQGKRSDFVYGPFHPAGAKKHETDDQTVKQQERKNIQDWENLAVSFRPQYQNQALNDLFGHYVEAWKSWYVDLTQETAS

SEQ ID NO: 20251 - protein, 278 aa, Zea mays subsp. mays
  misc_feature (1)..(278): Ceres Seq. ID no. 12381058
MEDSSTANLSDDEDDEKLGDADEDAESEKLSQPVDNTSDKPDAPSCRLRSDHRKEKSLGLLTQNFVKLFLNMEVGTISLDEAARLLLGEGHADSNMRTKVRRLYDIANVLSSLNLIEKTQQADTRKPAFRWLGQAKRKQDNNVMVSVPPSMKAMPNKRAFGTDLTNIDNKRGKLDSAAENKVKLMQGAGNIVKTFERQLVQGKRSDFVYGPFHPAGAKKHETDDQTVKQQERKNIQDWENLAVSFRPQYQNQALNDLFGHYVEAWKSWYVDLTQETAS

SEQ ID NO: 20252 - protein, 207 aa, Zea mays subsp. mays
  misc_feature (1)..(207): Ceres Seq. ID no. 12381059
MEVGTISLDEAARLLLGEGHADSNMRTKVRRLYDIANVLSSLNLIEKTQQADTRKPAFRWLGQAKRKQDNNVMVSVPPSMKAMPNKRAFGTDLTNIDNKRGKLDSAAENKVKLMQGAGNIVKTFERQLVQGKRSDFVYGPFHPAGAKKHETDDQTVKQQERKNIQDWENLAVSFRPQYQNQALNDLFGHYVEAWKSWYVDLTQETAS

SEQ ID NO: 20253 - DNA, 1771 bp, Zea mays subsp. mays
  misc_feature (1)..(1771): Ceres Seq. ID no. 12381090
gcacgagaccattacctagaacatcctaatcgaaaaatcgaatcgcgaccaaaccaaatcctccaccccggcgcgctgccccatcacccttcccgctgtgctcacgcaccaaaccccactccgttcctcactgcaatccaccgccccagctctttcgcgcaatggcggccgtcgcggcgccggcgccgccaccgccggcggcagctgagcctggaggacctcaaggtggtgtccgtgctcgggcgcggcgccaagggcgtcgtgttccacgtcgtgcacgctcccggggaaccggacggcgagggcgagggcgccgccgcagccgcggccatggcgctcaaggcggtctcgcgggaggcagcgcggcacaagaaggcggccagcggggacggggacggccaccgccggatctggttcgagcgggatgtgctcctggcgctgcgccacccgctgctcccttccctgcgaggcatcctcgccaccgacgcgatcgtcggcttcgccatggaccgctgcggcggcggggacctcaactcgctgcggcggcggcagacggagaagatgttctccgactccgtcatacggttctacgcggcggagctggtgctggcgctcgagtacctgcacagtctcggcgtcgtgtaccgggacctcaagccggagaacgtcctcatccaggacagcggccacatcatgctcgtcgacttcgacctctccacgcggctcccggccgcagccgcaggagccagacgcgccggccaccagtcccaagccggcgcctccggtcgccgcgccgtccccgagccgcggcagagcaaggaagccggcgggcgccgccctgtgcttcccattccgcaccaccggcagcgctgcgaagcctgccgcggactcgccgtcgccgctgtccacctcgcggacggcctcgtcgtcgtcgtcgtcctcgacggcgaccacggcctcctcctcggcggcgtcggccggcacgcggactcccgcgaagtcgaactcgttcgtggggacggaggactacgtggcgccggagatcatcgccgggcgcgggcacgacttcgccgtggactggtggggcctgggcgtggtgctctacgagatgctctacggccgcacgccgttccgggggcagaaccgcaaggagaccttctaccgcgtcctcgccaagcagccggagctcgtcggcgagcagacgccgctgcgcgacctcatcgcccgcctcctcgagaaggaccccgagaggcgcatcggcgcgcgcggcgtcaaggcccaccccttcttcggcggcgtcgactggaacgcatcctgcaggtggcgcgcccgccgttcatcccggcgccgccgcaggacgaggacggcgacgaggcgctcgacgtcgagaaggtcgtccgcgaggtgttcgcgtccaaggagggcgagggagggaaggcttcgcctgtggcagacggaggccctgtgggcggcgacggcgacgggaggagagatcattccaaagatggtgatttctcagtgtttttctgagctatttattttctttagatttgttctttctttttctttagatttgtactgtatgaacatgatggcatttagcaactgaggttaggagtgagtacggcgcaatggccggtggagtacataaattaaagaggtgcaggtgctcccgctcaatggggtatagccaatatatagggtttttttttgctgtgtactttgcttgatcataataaataataatgatagcgcagttgtgctcaaacgc

SEQ ID NO: 20254 - protein, 509 aa, Zea mays subsp. mays
  misc_feature (1)..(509): Ceres Seq. ID no. 12381091
ARDHYLEHPNRKIESRPNQILHPGALPHHPSRCAHAPNPTPFLTAIHRPSSFAQWRPSRRRRRHRRRQLSLEDLKVVSVLGRGAKGVVFHVVHAPGEPDGEGEGAAAAAAMALKAVSREAARHKKAASGDGDGHRRIWFERDVLLALRHPLLPSLRGILATDAIVGFAMDRCGGGDLNSLRRRQTEKMFSDSVIRFYAAELVLALEYLHSLGVVYRDLKPENVLIQDSGHIMLVDFDLSTRLPAAAAGARRAGHQSQAGASGRRAVPEPRQSKEAGGRRPVLPIPHHRQRCEACRGLAVAAVHLADGLVVVVVLDGDHGLLLGGVGRHADSREVELVRGDGGLRGAGDHRRARARLRRGLVGPGRGALRDALRPHAVPGAEPQGDLLPRPRQAAGARRRADAAARPHRPPPREGPREAHRRARRQGPPLLRRRRLERILQVARPPFIPAPPQDEDGDEALDVEKVVREVFASKEGEGGKASPVADGGPVGGDGDGRRDHSKDGDFSVFF

SEQ ID NO: 20255 - protein, 449 aa, Zea mays subsp. mays
  misc_feature (1)..(449): Ceres Seq. ID no. 12381092
MAAVAAPAPPPPAAAEPGGPQGGVRARARRQGRRVPRRARSRGTGRRGRGRRRSRGHGAQGGLAGGSAAQEGGQRGRGRPPPDLVRAGCAPGAAPPAAPFPARHPRHRRDRRLRHGPLRRRGPQLAAAAADGEDVLRLRHTVLRGGAGAGARVPAQSRRRVPGPQAGERPHPGQRPHHARRLRPLHAAPGRSRRSQTRRPPVPSRRLRSPRRPRAAAEQGSRRAPPCASHSAPPAALRSLPRTRRRRCPPRGRPRRRRRPRRRPRPPPRRRRPARGLPRSRTRSWGRRTTWRRRSSPGAGTTSPWTGGAWAWCSTRCSTAARRSGGRTARRPSTASSPSSRSSSASRRRCATSSPASSRRTPRGASARAASRPTPSSAASTGTHPAGGAPAVHPGAAAGRGRRRGARRREGRPRGVRVQGGRGREGFACGRRRPCGRRRRREERSFQRW

SEQ ID NO: 20256 - protein, 399 aa, Zea mays subsp. mays
  misc_feature (1)..(399): Ceres Seq. ID no. 12381093
MALKAVSREAARHKKAASGDGDGHRRIWFERDVLLALRHPLLPSLRGILATDAIVGFAMDRCGGGDLNSLRRRQTEKMFSDSVIRFYAAELVLALEYLHSLGVVYRDLKPENVLIQDSGHIMLVDFDLSTRLPAAAAGARRAGHQSQAGASGRRAVPEPRQSKEAGGRRPVLPIPHHRQRCEACRGLAVAAVHLADGLVVVVVLDGDHGLLLGGVGRHADSREVELVRGDGGLRGAGDHRRARARLRRGLVGPGRGALRDALRPHAVPGAEPQGDLLPRPRQAAGARRRADAAARPHRPPPREGPREAHRRARRQGPPLLRRRRLERILQVARPPFIPAPPQDEDGDEALDVEKVVREVFASKEGEGGKASPVADGGPVGGDGDGRRDHSKDGDFSVFF

SEQ ID NO: 20257 - DNA, 1844 bp, Zea mays subsp. mays
  misc_feature (1)..(1844): Ceres Seq. ID no. 12381094
gcacgagaccatcacctagaacatcctaatcgaaaaaaaacgttagccttttccaatcagggagagagctcaaacatggcactcgaacccgtcgctctcctgctcacggtcctcgtcgccgcgccgctcacggtcctcctcctcctcctcttcctcgtcgccggcaacaagaggcccgctcgtgctgcttctcccacgccgcgccaccgcttgaggctgccgctgccgccgtcgccgcggggcctcccgctgctgggccacctgcacctgctgggctcgctgccgcaccgcgcgctggcgtctctggcgcgcgcgcacggccccgtgctgctgctccgcctgggccgcgtgcccaccgtggtcgtgtcctccgctgccgccgccgaggaggtgatgcgggcgcgggacctggcgttcgcgaaccggcccgcgagcgccatgggccgtgcgcctcctctacggccgcgacgtcgcgttcgcgccctacggcgagtactggcgccaggcgcgccgcgtctgcgtcgtccacctcctcagcgcgcgtcacgtcgggtccttccgccgtgtccgagagcaggaggccgccgcgctggtcgcacgcgtcgcccgggacagcgccggtggcgcggccgtcggcctcagcgatctcctcaccgagtacgccaacgccgtcgtgtcgcgcgccgcgttcggcgacgagagcgcgcgcgggctgttgggcgaattcgactccggccgtcggcagaggaaagtgctcaccgacttccagaagctcgtggggacgacgcccgtcggggagctgctgccgtggctgggctgggtggacgccgtcacggggctggaggggaagatcaggcggacgttcgaggcgctcgacgggttgctcgagaaggtgatcgatgaccaccggcggcggcctcgcagcggggaggagggcggtgaccgggacttcgtggacgtgttgctggacgtccacaacaaggaccaagagcacggcatccaactagagaccaacgaaatcaaggccatcatcttggacatgttcgcggcaggcacggacacgatagccacggcgatggaatgggccatggcggagctcgtcacccacccgcgtgccatgcggagagcccaggacgaggtccgcgcggcggcggccggctcaaccggcgtgaacgaggaccacgtcgcgcagctggactacctcaaggccgtgctgaaggagacgctccggttgcacgcgccgttgccactgctggtgccccgggagccggcggcggacaccgagatcctggggtaccacgtcccggcgcgcacgcgcgtgctggtcaacgcctgggctattggccgggaccccgcgacgtgggagcgcgccgaggaattcgtgccagagaggttcttgggcggcgccgccgcagctgacgtcggcttcaaggggcagcacttcgagctcctgccgttcggcggcggcaggaggatgtgccccggaatcgcgtttgcggagggaagcgccgagatggccctggcgagcctgctgtatcattttgactgggaggcggcgagccggggccagaacgggaaagggacgctgtcgctggacatgaccgagatgaacggattagccgtgcatatcaactccggtcttccgcttgtagccaagccgtggatccccttcaagaactaggagaagatattggagatatttggttttttactgcaaacaatgtgcttgattttaatgttattttagacatttttgctcttcttcgtccttctccctttttccctttttgtgtgtgtacgcttgtaaaaaaagacaaaatatcaaaataatctctactaccccg

SEQ ID NO: 20258 - protein, 300 aa, Zea mays subsp. mays
  misc_feature (1)..(300): Ceres Seq. ID no. 12381095
ARDHHLEHPNRKKTLAFSNQGESSNMALEPVALLLTVLVAAPLTVLLLLLFLVAGNKRPARAASPTPRHRLRLPLPPSPRGLPLLGHLHLLGSLPHRALASLARAHGPVLLLRLGRVPTVVVSSAAAAEEVMRARDLAFANRPASAMGRAPPLRPRRRVRALRRVLAPGAPRLRRPPPQRASRRVLPPCPRAGGRRAGRTRRPGQRRWRGRRPQRSPHRVRQRRRVARRVRRRERARAVGRIRLRPSAEESAHRLPEARGDDARRGAAAVAGLGGRRHGAGGEDQADVRGARRVAREGDR

SEQ ID NO: 20259 - protein, 275 aa, Zea mays subsp. mays
  misc_feature (1)..(275): Ceres Seq. ID no. 12381096
MALEPVALLLTVLVAAPLTVLLLLLFLVAGNKRPARAASPTPRHRLRLPLPPSPRGLPLLGHLHLLGSLPHRALASLARAHGPVLLLRLGRVPTVVVSSAAAAEEVMRARDLAFANRPASAMGRAPPLRPRRRVRALRRVLAPGAPRLRRPPPQRASRRVLPPCPRAGGRRAGRTRRPGQRRWRGRRPQRSPHRVRQRRRVARRVRRRERARAVGRIRLRPSAEESAHRLPEARGDDARRGAAAVAGLGGRRHGAGGEDQADVRGARRVAREGDR

SEQ ID NO: 20260 - protein, 213 aa, Zea mays subsp. mays
  misc_feature (1)..(213): Ceres Seq. ID no. 12381097
MFAAGTDTIATAMEWAMAELVTHPRAMRRAQDEVRAAAAGSTGVNEDHVAQLDYLKAVLKETLRLHAPLPLLVPREPAADTEILGYHVPARTRVLVNAWAIGRDPATWERAEEFVPERFLGGAAAADVGFKGQHFELLPFGGGRRMCPGIAFAEGSAEMALASLLYHFDWEAASRGQNGKGTLSLDMTEMNGLAVHINSGLPLVAKPWIPFKN

SEQ ID NO: 20261 - DNA, 1504 bp, Zea mays subsp. mays
  misc_feature (1)..(1504): Ceres Seq. ID no. 12381098
aagccaacacggtcacacgactgcataattgtgctcgctcgccgggccccgggacgtgacacatcgcacggccgaagcagcttgccggctgccgcgtttcgcctcccgcctgccgtgccgcccgtgaccgcgagaaggccggcagctttgcatgaggaggaggaggatgggggcactgcacgtcgtcggcgagcccaggatcagcttccgccagcagcctgcagcagtcgtcgcgaagaacggcggccacggcgccgtcgtcgaggagatccacggcctgatccgcgtctacaaggacggacacgtggagcggctcccggcgatcccagccgtgccctgcacgtggggcggcacggcccccggacgcgccgggcggcgtcgtcgcgagggacgtggtggtggaccccgcgacgggggtgtgggcgcggctgtacgcgccgacgtcggcgggggacggagccaggcgccccgtcgtggtgtacttccacggcggcgggttctgcgtcgggtccgcggcctggagctgctaccacgagttcctcgcccagctcgcggcgcgcgcgggctgcgccgtgatgtccgtggactaccggctggcgcccgagcaccgcctgccggccgcgttcgacgacgggctggccgcggtgcggtggctgcggcaccaggccgcagcgtcagcgtcagcgtcagcgtgctgcaacgacgacctgtcgtggtggcgggcccgctgcggctttgaccgcgtgttcctcatgggcgacagcgcgggcgccagcatcgccttgcacgtggccgcgaggctcgggcagggccagcttggcgcgctgccccccttgaccgtcaggggccccgtcctgatccagccattcctgggcggcgaggggcgtaccgcgtccgagaagaacgtggcgcagccgccacggtcggcgctgacgctggccacctccgactgctactggcggctggcgctgccggccggagccagccgcgagcacccctggtgcaacccgctgtcgggccgcgccgcgccgcgcctggagaccactccgctgcccccgctcctggtgtgcgtctcggagacggacatcctgcgggaccgcaacctggagctgtgcagggcgttgcgcgaggcgggcaagcgcgtggagcaggccgtgtacggcggcgtcgggcacgcgttccaggtgctccacaactgccacctgtcccagccgcggacgcaggagatgctcgcgcacatcaaggccttcgtcagcgccaggtagcaggcgccgcagcagcagccgcctcctccattcgtcgttggtccctaacaaacagacactcgccatgttaattaatccactacctaatcctaatccaatcgaagagtagatgccgtgtaagcaaccagaaccagccttgtgcagtactgtatcagtagtgtgtgacttggagcagaaagcgtccaatgcccagcccgggttgttgttgtagcggtgtcggaaagcaaaagcttatcact

SEQ ID NO: 20262 - protein, 229 aa, Zea mays subsp. mays
  misc_feature (1)..(229): Ceres Seq. ID no. 12381099
MSVDYRLAPEHRLPAAFDDGLAAVRWLRHQAAASASASACCNDDLSWWRARCGFDRVFLMGDSAGASIALHVAARLGQGQLGALPPLTVRGPVLIQPFLGGEGRTASEKNVAQPPRSALTLATSDCYWRLALPAGASREHPWCNPLSGRAAPRLETTPLPPLLVCVSETDILRDRNLELCRALREAGKRVEQAVYGGVGHAFQVLHNCHLSQPRTQEMLAHIKAFVSAR

SEQ ID NO: 20263 - protein, 195 aa, Zea mays subsp. mays
  misc_feature (1)..(195): Ceres Seq. ID no. 12381100
MRRRRMGALHVVGEPRISFRQQPAAVVAKNGGHGAVVEEIHGLIRVYKDGHVERLPAIPAVPCTWGGTAPGRAGRRRREGRGGGPRDGGVGAAVRADVGGGRSQAPRRGVLPRRRVLRRVRGLELLPRVPRPARGARGLRRDVRGLPAGARAPPAGRVRRRAGRGAVAAAPGRSVSVSVSVLQRRPVVVAGPLRL

SEQ ID NO: 20264 - protein, 191 aa, Zea mays subsp. mays
  misc_feature (1)..(191): Ceres Seq. ID no. 12381101
KPTRSHDCIIVLARRAPGRDTSHGRSSLPAAAFRLPPAVPPVTARRPAALHEEEEDGGTARRRRAQDQLPPAACSSRREERRPRRRRRGDPRPDPRLQGRTRGAAPGDPSRALHVGRHGPRTRRAASSRGTWWWTPRRGCGRGCTRRRRRGTEPGAPSWCTSTAAGSASGPRPGAATTSSSPSSRRARAAP

SEQ ID NO: 20265 - DNA, 1100 bp, Zea mays subsp. mays
  misc_feature (1)..(1100): Ceres Seq. ID no. 12381112
atcttaacagccaggaagctggcgtcttgcttgtccttgttcttttcccacccggctacccccgtcgtcgccgccgctttccccgtggtttcagagctcgagtcggctagctaggccgcctggctaatctccctgccttctataagtacaggttcattgtgtgctgtgctcccagctccatcactgacacaagagagcacgctactactcatcactcgccaacgtgcagagatcagggaggcggcacactccatccactgaccgctcatggcgaaggtccacctctacgtcgccgcggcctgcgccgtcgtcctcgcgctcgccgccccggccctcgccggcgaccccgacatgctgcaggacgtctgcccggctgactacgcctccccggtgaagctgaacgggttcgcgtgcaaggcgaacttttcggcggacgacttcttcttcgacgggctgaggaaccccggcaacaccaacaacccggcgggctccgtggtgacggcggccaacgtggagaagttcccgggcgtgaacacgctgggcgtctccatggcgcgcatcgactacgcgccgggcggccagaacccgccgcacacgcacccgcgcgccaccgagatcatcttcgtcctcgagggcacgctcgaggtcggcttcatcaccaccgccaacgcgctcttcaccaagaccgtcaccaagggcgacgtcttcgtcttcccgcgcggcctcgtccacttccagcagaacaggggccacggccccgccgccgtcgtcgccgccttcaacagccagctccagggcacgcaggccatcgccatgacgctcttcggcgccgtgccgcccgtgccctccgacatcctcgccaaggccttccgcatcagcagcggcgaggtggaccacatcaaggccaacttcgcgcccaagtagagatccaatgtctgcattcccttgattttctcaataataaatccccgcggtgtgcagttcgatttgttcgtcttcggttggtttggttcgagacattgctgaccacgcttgttactgctaatttgtgcggagcggagttgcttgnnctccgataaataatcaattctatcgtcgtc

SEQ ID NO: 20266 - protein, 218 aa, Zea mays subsp. mays
  misc_feature (1)..(218): Ceres Seq. ID no. 12381113
MAKVHLYVAAACAVVLALAAPALAGDPDMLQDVCPADYASPVKLNGFACKANFSADDFFFDGLRNPGNTNNPAGSVVTAANVEKFPGVNTLGVSMARIDYAPGGQNPPHTHPRATEIIFVLEGTLEVGFITTANALFTKTVTKGDVFVFPRGLVHFQQNRGHGPAAVVAAFNSQLQGTQAIAMTLFGAVPPVPSDILAKAFRISSGEVDHIKANFAPK

SEQ ID NO: 20267 - protein, 190 aa, Zea mays subsp. mays
  misc_feature (1)..(190): Ceres Seq. ID no. 12381114
MLQDVCPADYASPVKLNGFACKANFSADDFFFDGLRNPGNTNNPAGSVVTAANVEKFPGVNTLGVSMARIDYAPGGQNPPHTHPRATEIIFVLEGTLEVGFITTANALFTKTVTKGDVFVFPRGLVHFQQNRGHGPAAVVAAFNSQLQGTQAIAMTLFGAVPPVPSDILAKAFRISSGEVDHIKANFAPK

SEQ ID NO: 20268 - protein, 124 aa, Zea mays subsp. mays
  misc_feature (1)..(124): Ceres Seq. ID no. 12381115
MARIDYAPGGQNPPHTHPRATEIIFVLEGTLEVGFITTANALFTKTVTKGDVFVFPRGLVHFQQNRGHGPAAVVAAFNSQLQGTQAIAMTLFGAVPPVPSDILAKAFRISSGEVDHIKANFAPK

SEQ ID NO: 20269 - DNA, 1622 bp, Zea mays subsp. mays
  misc_feature (1)..(1622): Ceres Seq. ID no. 12381158
gcacgagaccattacctagaacatcctaatcgaaaaaaaacccaccaccacaaggaagggaagcgtatcagtatcaccagttcaccatcctcggatccttcgccttaatcgcccgcgtcagccatctcacgtaccggtcctccagtttcctcccatctttcacacacaccacgccacgacccggccccggggtataaaagcactagggcgaagccgcgcaacgactcgatcggctgcagccagggctcgcctcgggggaccgcgtgttgctagcgagctcggtgtcggtgctaccggctgccgccccagtgcgaggcgatggggaggaggctggacgtgctgctggggcggacgacgaagcagacggcgcggctcaagtcgctgctggggctggcggcgacgcgcctcggcgtggtgcggggccaccgccaggtgcggtgcgggcaggcgcgcggggacgtcgagcagctgctccgcctcggccacgcggaccgcgcgctggcccgcgccgagcacgtcgtgcgggagcagaacgcgctcgacgtcctcgccgagctcgaggcctgctgcaacctcatcgccgagcgggccgcgctcgtcgaccacgcgcacaggggggagtgccccgaggagctgcgggaggcggcggcggggctggtatacgccgcggccaggtgcggggaccttccggagctgcaagaggtccgggccatcctcgccgccaagttcggcagggagttcgtctccgccgcgtccaacctccgcagcgggtgcggggtcaaccccaagatcgtgcagaagctgtcgaccaagcagccgagcctggagagccgacagctggtgctacaggagatcgccgccgacaaagggatcgccgtgcgcatctacgagccgcctcctccctacgaggactcggggagctccaaccacagccataggaagacggagcacgatggcgagaggatcagtaggacgccaccagttgatggccgcgacgaagacatctccggccactcggcgcagaggtacaaggacgtggaagcggcagctcaggccgcgttcgagtcggccgcctcggcagccgccgccgcgaaggcggccatggagctctcgcgtggggagcccagggggcccggtgacaggaggagggcagggaggacgcaaatggatgatcctgagatcgagaaacaagatgaggtgcttcatggaaacaaacccgagaagattgggcatggccggaattacagttcagatgttgagatcacgccggaggacgacgaggcaaaccacggcaacgttgcagtggacgaaccgaaacagcgggagcctgccaggggaaagccggcatcggtcagaacaaagtggggattttagcggcatccagatcgcaacggaggagatggtttcttcgtcttgtcaatatattggcatggaagttgttttttttcactgtagtagtatgtaattaacgacggttaccaaaaaaacacatgagcgatttgatttattgccaacagtttgcacactagtacactatgcctgtactaatgctatgttctgttaatgtgtagcgttaattgtagtacatgttctttggaggaaaaatattgatgttgcaatcc

SEQ ID NO: 20270 - protein, 351 aa, Zea mays subsp. mays
  misc_feature (1)..(351): Ceres Seq. ID no. 12381159
MGRRLDVLLGRTTKQTARLKSLLGLAATRLGVVRGHRQVRCGQARGDVEQLLRLGHADRALARAEHVVREQNALDVLAELEACCNLIAERAALVDHAHRGECPEELREAAAGLVYAAARCGDLPELQEVRAILAAKFGREFVSAASNLRSGCGVNPKIVQKLSTKQPSLESRQLVLQEIAADKGIAVRIYEPPPPYEDSGSSNHSHRKTEHDGERISRTPPVDGRDEDISGHSAQRYKDVEAAAQAAFESAASAAAAAKAAMELSRGEPRGPGDRRRAGRTQMDDPEIEKQDEVLHGNKPEKIGHGRNYSSDVEITPEDDEANHGNVAVDEPKQREPARGKPASVRTKWGF

SEQ ID NO: 20271 - DNA, 1602 bp, Zea mays subsp. mays
  misc_feature (1)..(1602): Ceres Seq. ID no. 12381160
gcacgagaccattacctagaacatcctaatcgaaaagatactgatacacggctcagtggctcacccaagccaagaccaagaaccccgggcggacgaaaagatggccgccgatgccgcacgcacgccggcgccgcacgcgctgctgctcccttacccagcgcagggccacgtgatcccgttcatggagctggccgaccgcctcctcgacaggggcttcgccgtcaccttcgtcaacaccgagttcaaccaccgccgcgtcgtcgtggccgccgccggcggccgggcgcccgatggccggctncggctcgttggtgtcgctgacgggatgggcgacggcgaggaccgcgacaacttcgtccgcctcaacgcctgcatgaaggaggccatgccgctgcggctcgacgcgctcctcgacgccgacgacgagcgcctcggcagggtcacgtgcgtcgtggtcgacgtcggcatgtcctgggcgctggacgcggtcaagcggcgtgggctcccggccgccgcactctggcccgcgtcggcggccgtgctcgccgtcctgttcggcgccaagaagctcatacgcgatggcgtcatcgatgacgacggagctccagtgaagctggagaaccactcgttccggctggccgagtcgatgccccccatggacgccgtcttcctggcgtggaactacatgggcaaccgcgacgtcgagcgcatggtcttccactacctgaccaccactgcgtgggccgccgtggctaaggcggacgtcgtcctctgcaacaccttcgaggacctcgagccggacatcttcggcgcccactccccggcggccgcctccatcctcccgatcggcccgctgcgcacctggcagcgccggacgagcgaggcgccggccgggcacttttggcgcgccgacgacgaggcctgcgcgtccttcctggacgcgcagccccgtgggtccgtgacgtacgtggcgttcgggagcctgacggtcatgagccccgcgcagctccaggagctcgcgctggccctgctggcctccgcccgccccttcctgtgggtgttccggccagggctggcggccgagctcccgcccgcgttcacggatctcctgccacgccatgcgaggggcaaggtggtggagtgggcgccgcaggagaaagtgctcgcgcaccctgctgtcggctgcttcctgacgcattgcgggtggaactcgacgctggagggcgtccgccatggcgtgcctttgctttgttggccctactttagcgaccagttcacgaaccaggcatacatttgtgatatctggaaggtggggttaagggtggtgcccgacggtggtgatggcattgtcgccaaggaaaggatcatggagaggttgacgagcctaatgggtgacagtggtgtgaaggaaagggtgaaaagattgaaggaattggcagagaggagcatggggcctgagggcaaatctttgaagaacatcaacgccttcatggaatccatgacgaagtgattgttattgtgttattgttttattttcgggaatgactaccactgatgtccaacgcatgttccaacatccaacaagatcatacaagatatctg

SEQ ID NO: 20272 - protein, 469 aa, Zea mays subsp. mays
  misc_feature (1)..(469): Ceres Seq. ID no. 12381161
  misc_feature (67)..(67): Xaa is any aa, unknown or other
MAADAARTPAPHALLLPYPAQGHVIPFMELADRLLDRGFAVTFVNTEFNHRRVVVAAAGGRAPDGRXRLVGVADGMGDGEDRDNFVRLNACMKEAMPLRLDALLDADDERLGRVTCVVVDVGMSWALDAVKRRGLPAAALWPASAAVLAVLFGAKKLIRDGVIDDDGAPVKLENHSFRLAESMPPMDAVFLAWNYMGNRDVERMVFHYLTTTAWAAVAKADVVLCNTFEDLEPDIFGAHSPAAASILPIGPLRTWQRRTSEAPAGHFWRADDEACASFLDAQPRGSVTYVAFGSLTVMSPAQLQELALALLASARPFLWVFRPGLAAELPPAFTDLLPRHARGKVVEWAPQEKVLAHPAVGCFLTHCGWNSTLEGVRHGVPLLCWPYFSDQFTNQAYICDIWKVGLRVVPDGGDGIVAKERIMERLTSLMGDSGVKERVKRLKELAERSMGPEGKSLKNINAFMESMTK

SEQ ID NO: 20273 - protein, 442 aa, Zea mays subsp. mays
  misc_feature (1)..(442): Ceres Seq. ID no. 12381162
  misc_feature (40)..(40): Xaa is any aa, unknown or other
MELADRLLDRGFAVTFVNTEFNHRRVVVAAAGGRAPDGRXRLVGVADGMGDGEDRDNFVRLNACMKEAMPLRLDALLDADDERLGRVTCVVVDVGMSWALDAVKRRGLPAAALWPASAAVLAVLFGAKKLIRDGVIDDDGAPVKLENHSFRLAESMPPMDAVFLAWNYMGNRDVERMVFHYLTTTAWAAVAKADVVLCNTFEDLEPDIFGAHSPAAASILPIGPLRTWQRRTSEAPAGHFWRADDEACASFLDAQPRGSVTYVAFGSLTVMSPAQLQELALALLASARPFLWVFRPGLAAELPPAFTDLLPRHARGKVVEWAPQEKVLAHPAVGCFLTHCGWNSTLEGVRHGVPLLCWPYFSDQFTNQAYICDIWKVGLRVVPDGGDGIVAKERIMERLTSLMGDSGVKERVKRLKELAERSMGPEGKSLKNINAFMESMTK

SEQ ID NO: 20274 - protein, 394 aa, Zea mays subsp. mays
  misc_feature (1)..(394): Ceres Seq. ID no. 12381163
MGDGEDRDNFVRLNACMKEAMPLRLDALLDADDERLGRVTCVVVDVGMSWALDAVKRRGLPAAALWPASAAVLAVLFGAKKLIRDGVIDDDGAPVKLENHSFRLAESMPPMDAVFLAWNYMGNRDVERMVFHYLTTTAWAAVAKADVVLCNTFEDLEPDIFGAHSPAAASILPIGPLRTWQRRTSEAPAGHFWRADDEACASFLDAQPRGSVTYVAFGSLTVMSPAQLQELALALLASARPFLWVFRPGLAAELPPAFTDLLPRHARGKVVEWAPQEKVLAHPAVGCFLTHCGWNSTLEGVRHGVPLLCWPYFSDQFTNQAYICDIWKVGLRVVPDGGDGIVAKERIMERLTSLMGDSGVKERVKRLKELAERSMGPEGKSLKNINAFMESMTK

SEQ ID NO: 20275 - DNA, 1249 bp, Zea mays subsp. mays
  misc_feature (1)..(1249): Ceres Seq. ID no. 12381193
gcacgagaccattacctagaacatcctaatcgaaaaaaaccccaactccacaatgaggccgtcgctgatgagatccacctcccagctcctccgccgccggagctactcctccgcatccgggcagcccgagcggaaggtggccatcctcggggcggcggggggcatcgggcagccgctgtcgctgctcatgaagctcaacccactggtctcctccctctcgctctacgatatcgctggcaccccaggtgtcgcggccgacgtctcccacatcaactcccccgcactggtgaagggtttcatgggtgatgagcaacttggggaagcgctagagggctcggacgtggtgatcataccggccggcgtcccgaggaagcccggcatgaccagggacgacctattcaatatcaacgctggcatcgttaagaacctcagcaccgccatcgccaagtactgccccaatgcccttgtcaacatgatcagcaaccctgtgaattcaactgtaccaattgctgctgaggttttcaagaaggctgggacatatgatgagaagaagttgtttggcgtgaccacccttgatgttgttcgtgctaagactttctatgctgggaaggctaatttaccagttaccgatgtgaatgtccctgttgttggtggtcatgcgggtatcactatcctgccgttgttctcacaggccacccctgcaaccaacgcattgtccgatgaagacatcaaggctctcaccaagaggacacaggatggtggaactgaagttgtcgaggcaaaggctgggaagggctctgcaaccttgtccatggcgtatgctggtgctgtttttgcagatgcatgcttgaagggtctcaatggagttccggatattgttgagtgctcttttgttcaatcaactgtaacagagcttccattctttgcatctaaggtaaggcttgggaagaatggagttgaggaagtgcttggattaggtgagctgtgcggactttgagaaagaagggttggagaagctcaagagcgagctcaagtcttcgattgagaagggtatcaagtttgcaaatgataactagataaggccattttgcagattatagcaacaattgaaacctttagtagcaattgaaacctttagttgcgggatcttctgatttcattctacccttttctgtccctttttgtgagggagtggaaggtattacaataaaaaacctgatgggcaaagcttacatgagggatttattcc

SEQ ID NO: 20276 - protein, 314 aa, Zea mays subsp. mays
  misc_feature (1)..(314): Ceres Seq. ID no. 12381194
MRPSLMRSTSQLLRRRSYSSASGQPERKVAILGAAGGIGQPLSLLMKLNPLVSSLSLYDIAGTPGVAADVSHINSPALVKGFMGDEQLGEALEGSDVVIIPAGVPRKPGMTRDDLFNINAGIVKNLSTAIAKYCPNALVNMISNPVNSTVPIAAEVFKKAGTYDEKKLFGVTTLDVVRAKTFYAGKANLPVTDVNVPVVGGHAGITILPLFSQATPATNALSDEDIKALTKRTQDGGTEVVEAKAGKGSATLSMAYAGAVFADACLKGLNGVPDIVECSFVQSTVTELPFFASKVRLGKNGVEEVLGLGELCGL

SEQ ID NO: 20277 - protein, 309 aa, Zea mays subsp. mays
  misc_feature (1)..(309): Ceres Seq. ID no. 12381195
MRSTSQLLRRRSYSSASGQPERKVAILGAAGGIGQPLSLLMKLNPLVSSLSLYDIAGTPGVAADVSHINSPALVKGFMGDEQLGEALEGSDVVIIPAGVPRKPGMTRDDLFNINAGIVKNLSTAIAKYCPNALVNMISNPVNSTVPIAAEVFKKAGTYDEKKLFGVTTLDVVRAKTFYAGKANLPVTDVNVPVVGGHAGITILPLFSQATPATNALSDEDIKALTKRTQDGGTEVVEAKAGKGSATLSMAYAGAVFADACLKGLNGVPDIVECSFVQSTVTELPFFASKVRLGKNGVEEVLGLGELCGL

SEQ ID NO: 20278 - protein, 269 aa, Zea mays subsp. mays
  misc_feature (1)..(269): Ceres Seq. ID no. 12381196
MKLNPLVSSLSLYDIAGTPGVAADVSHINSPALVKGFMGDEQLGEALEGSDVVIIPAGVPRKPGMTRDDLFNINAGIVKNLSTAIAKYCPNALVNMISNPVNSTVPIAAEVFKKAGTYDEKKLFGVTTLDVVRAKTFYAGKANLPVTDVNVPVVGGHAGITILPLFSQATPATNALSDEDIKALTKRTQDGGTEVVEAKAGKGSATLSMAYAGAVFADACLKGLNGVPDIVECSFVQSTVTELPFFASKVRLGKNGVEEVLGLGELCGL

SEQ ID NO: 20279 - DNA, 1392 bp, Zea mays subsp. mays
  misc_feature (1)..(1392): Ceres Seq. ID no. 12381199
aaaacacccccaatcccacccagaatccggcggaagtcaagccaacctccgtcctccatccatgggcgagcaatccctctcccagcccaaggcccagcctctctccccgttcccgtcgcctcccgcctccgccgcgttgccgccccccgcctctgcctcatgcctcatgcctctgctgcctccacctcccgcaccaccagcgccgcggcctcgcgccccaagaagaaggtgacgaacccatcgcccgaccgtaacccggcaaagaagccccgcctgacgttctcgatcccgggccggcccctgtccgcagtcggcgaggtgggcgtggccatccgctacctgcgcgccgcggaccccgtcctcgccgccgtcatcgacgcgcacgagccccccgtgttccagtgcccgcaccgcccgttccactccctcgtccgatccatcctgtaccagcagctcgccttcaaggccgccgcctccgtctactcccgcttcctcgcgcttctcggcggcgagtcctgcgtggcccccgatgccgtcctcgcgctcaccccgcaccagctccgccagatcggggtctccccgcgcaaggcttcctacctccacgacctcgcccgcaagtatgcctccgggatcctctccgacgccgccatcgtcaacatggacgaccgctccctcgccgccatgcttaccatggtcaagggcatcggctcctggagcgtccacatgttcatgatcttctctctcgcgcgccccgacgtgctcccctccgccgacctcggcgtgcgcaagggcgtgcagatgctctacgccctcgaggacgtgcctcgtccgtcgcagatggacaagctgtgcgagcggtggcgcccctatcgctcagttggggcttggtacatgtggcggctcattgaatccaaggtgccccagccagcgccggccatccctgttggatcacttgctttcccttcgccggacggcgcagagtatgctacagcagcaagaacaacagcaacagcagactgtcatccaaatgatcgacccccttcagatgctcccagggatggggtgaattcggtatcacgtctactaattagttactctactccgtcttagatcaatcaatggttactctgtgcatctgatagtcagctccacacgttgttgttctggaatggaaccgcaggagggtagaattggatatgaaatgaggtttgggcccaacttattaagttgtcaatttggtttgtgttgtttatctgtgtcaagaatctgtgaagatgatggttggctgttgtttacattgtaaaatccacctagcagtattttagaaccttctggaattgttccatgcttgtagttcacctgtgataaaatgattaagaccatgcttaacgc

SEQ ID NO: 20280 - protein, 369 aa, Zea mays subsp. mays
  misc_feature (1)..(369): Ceres Seq. ID no. 12381200
KTPPIPPRIRRKSSQPPSSIHGRAIPLPAQGPASLPVPVASRLRRVAAPRLCLMPHASAASTSRTTSAAASRPKKKVTNPSPDRNPAKKPRLTFSIPGRPLSAVGEVGVAIRYLRAADPVLAAVIDAHEPPVFQCPHRPFHSLVRSILYQQLAFKAAASVYSRFLALLGGESCVAPDAVLALTPHQLRQIGVSPRKASYLHDLARKYASGILSDAAIVNMDDRSLAAMLTMVKGIGSWSVHMFMIFSLARPDVLPSADLGVRKGVQMLYALEDVPRPSQMDKLCERWRPYRSVGAWYMWRLIESKVPQPAPAIPVGSLAFPSPDGAEYATAARTTATADCHPNDRPPSDAPRDGVNSVSRLLISYSTPS

SEQ ID NO: 20281 - protein, 316 aa, Zea mays subsp. mays
  misc_feature (1)..(316): Ceres Seq. ID no. 12381201
MPHASAASTSRTTSAAASRPKKKVTNPSPDRNPAKKPRLTFSIPGRPLSAVGEVGVAIRYLRAADPVLAAVIDAHEPPVFQCPHRPFHSLVRSILYQQLAFKAAASVYSRFLALLGGESCVAPDAVLALTPHQLRQIGVSPRKASYLHDLARKYASGILSDAAIVNMDDRSLAAMLTMVKGIGSWSVHMFMIFSLARPDVLPSADLGVRKGVQMLYALEDVPRPSQMDKLCERWRPYRSVGAWYMWRLIESKVPQPAPAIPVGSLAFPSPDGAEYATAARTTATADCHPNDRPPSDAPRDGVNSVSRLLISYSTPS

SEQ ID NO: 20282 - DNA, 1502 bp, Zea mays subsp. mays
  misc_feature (1)..(1502): Ceres Seq. ID no. 12381206
ctcaatctcctctccttgtccactggcttgggcgtgcctttgcgtgcgacgggagctaggaatccacggcatcggaaaagtggccgcctgaagaaccgatttctccaagatttttttgtccatcctatcgcttgcaggatcggattcgccgtctctggccatggttctcgccggcctccgccggcacgtcggccagttcttgaccagcagtaatgagcttatggcggcgtcgctctcggccgtgagctgcgcggacgaggtgcagaaggcggagggggcggggtgccgtgacgacgccgcggcgctgcggctcaagaaggtggccatggcggcgatactggtggccggggtgctcggggtggtcctgccgctcgcagggcggaagcggcgcgcgctgcgcacggacagcgccgcgttcctggcggccaaggcgttcgccgccggggtcatcctggccacggggttcgtccacatgcttcacgacgccgagcacgcgctgtccagcccgtgcctccccgccgcgccgtggcgacggttcccagtccccgggttcgtcgccatggccgccgcgctagccacgctggtgctcgacttcctggccaccaggttttacgaggccaagcatcgcgacgaggccgcgcgcgtcaaggtggccgccgccgccgcactggttgcgacctcctctgggagcgacgaggacatcaccgtggtcaccgtcgacgaggacgagcgcaaggccccgctgttgcaaacgcactgccatggacacggtcacagccacagccacagccatgtgcatgagccggtgcaagtagagggtagcgagggggaggtgtcggcacatgtgcgctctattgtcgtgtcacagatactggagatggggattgtgtcacactctgtgatcatcggattgtcactgggagtgtcgcggagcccatgcacaatcaggccacttgtcgcagcacttgcattccaccagttcttcgaggggtttgcactaggtgggtgcattgctcaggcacaattcaagaacctttcagcagttctaatggcatctttcttcgccatcacaacaccggcaggaatagctgctggggcaggcatgaccacattctacaatcccaatagcccaagggcccttgtggtcgagggcattcttgactcggtatctgctggcattctcatatacatgtcactagtggatctcattgctgtagatttcttgggtggaaagatgacagggaccctgcgacagcaagtgatggcatacatcgcattgttcctcggtgcgctctctatgtcatcacttgcaatatgggcttgagacctgcccttgatgaaatatcagacaaaagatgaagtagtgtccatatatagaatgtctgtggtatatgtacagttttaatgtgtagtattcatgcactgttttttaagggcatgaaaaaaaaaaacaccgctgatgtactcaagggtgaactatgtggtttctttaatcgatgatc

SEQ ID NO: 20283 - protein, 387 aa, Zea mays subsp. mays
  misc_feature (1)..(387): Ceres Seq. ID no. 12381207
MVLAGLRRHVGQFLTSSNELMAASLSAVSCADEVQKAEGAGCRDDAAALRLKKVAMAAILVAGVLGVVLPLAGRKRRALRTDSAAFLAAKAFAAGVILATGFVHMLHDAEHALSSPCLPAAPWRRFPVPGFVAMAAALATLVLDFLATRFYEAKHRDEAARVKVAAAAALVATSSGSDEDITVVTVDEDERKAPLLQTHCHGHGHSHSHSHVHEPVQVEGSEGEVSAHVRSIVVSQILEMGIVSHSVIIGLSLGVSRSPCTIRPLVAALAFHQFFEGFALGGCIAQAQFKNLSAVLMASFFAITTPAGIAAGAGMTTFYNPNSPRALVVEGILDSVSAGILIYMSLVDLIAVDFLGGKMTGTLRQQVMAYIALFLGALSMSSLAIWA

SEQ ID NO: 20284 - protein, 367 aa, Zea mays subsp. mays
  misc_feature (1)..(367): Ceres Seq. ID no. 12381208
MAASLSAVSCADEVQKAEGAGCRDDAAALRLKKVAMAAILVAGVLGVVLPLAGRKRRALRTDSAAFLAAKAFAAGVILATGFVHMLHDAEHALSSPCLPAAPWRRFPVPGFVAMAAALATLVLDFLATRFYEAKHRDEAARVKVAAAAALVATSSGSDEDITVVTVDEDERKAPLLQTHCHGHGHSHSHSHVHEPVQVEGSEGEVSAHVRSIVVSQILEMGIVSHSVIIGLSLGVSRSPCTIRPLVAALAFHQFFEGFALGGCIAQAQFKNLSAVLMASFFAITTPAGIAAGAGMTTFYNPNSPRALVVEGILDSVSAGILIYMSLVDLIAVDFLGGKMTGTLRQQVMAYIALFLGALSMSSLAIWA

SEQ ID NO: 20285 - protein, 332 aa, Zea mays subsp. mays
  misc_feature (1)..(332): Ceres Seq. ID no. 12381209
MAAILVAGVLGVVLPLAGRKRRALRTDSAAFLAAKAFAAGVILATGFVHMLHDAEHALSSPCLPAAPWRRFPVPGFVAMAAALATLVLDFLATRFYEAKHRDEAARVKVAAAAALVATSSGSDEDITVVTVDEDERKAPLLQTHCHGHGHSHSHSHVHEPVQVEGSEGEVSAHVRSIVVSQILEMGIVSHSVIIGLSLGVSRSPCTIRPLVAALAFHQFFEGFALGGCIAQAQFKNLSAVLMASFFAITTPAGIAAGAGMTTFYNPNSPRALVVEGILDSVSAGILIYMSLVDLIAVDFLGGKMTGTLRQQVMAYIALFLGALSMSSLAIWA

SEQ ID NO: 20286 - DNA, 1498 bp, Zea mays subsp. mays
  misc_feature (1)..(1498): Ceres Seq. ID no. 12381221
gcacgagaccattacctagaacatcctaatcgaaaaaaaaaccaaagcaaagcaaacccagggcggccagcggacggaacccaaggcgaaaaggaagccagcggaagcagcgaaaagcccacgccaccttccaatcccccccaaattcccttgcattccattcccttcttcccttcccacacacctcctcctcctcctcctccgcgtctcttccccggcccccacatccgtccccccctctctctctcttcgccggccgccattgcgctcccgcattgcgccgggtcctaccagtccagcgcgggtccgtgccggcggcgggcatgatgccgcggcgcgtggcgtcggtgccggtgcccgactggctggaggcgctgctggccacgcgcttcttcctcgcctgcgccgcgcacccggcgtccccgcgcaacgagtgcaacatgttctgcctcgactgcacgggcgcgccgccgccgccgccgccggccttctgctactactgccgcgcgcaccgacactcgtcgcaccgcgtcatccagataaggcggtcctcctaccacgacgtcgtccgcgtgtcggaggtggaggacgtgctcgacatctccggcgtgcagacctacgtcatcaacagcgcccgggtgctcttcctcaacgagaggccccagccgcgcggcgccggcgcggccgcgggcaaggccgccgcgtccccctacaactgcgagatctgcggccgcgcgctgctcgaccccntccgcttctgctcgctcggatgcaagctggtggacaccaagaggagcaacggccacgcggctagttccgcggacggaggcggcggcggcggcggcgcagccagtggcaatgacgagacgacggaggccggcgggagcaagaacggcccgggggcgcggccgcacggacggcggcggaaggggaccccacaccgcgcgcccttctggtcctgacccaccaccggcaatggcgatcggtcgagttactccactagcgagcatcgaggcaatcaagagatcgataggggaataatggagggaggggacgatcgccgtctctcctccgcgccgccccgcgcttcttcggttcggttcggtttggttgtccttatatatacgtaattagaaacagaaaagcaaaggagagagaaaaagatactgcccgcccaactagagaaaggaaggaaggttatagataaacagatagaaaagcgagctgaggtcggcaccctcgcgcgcatcccccctcaaccaccggagggagggagagagggagccggcccggggccgcgcgctcgctggactgcagtaagcaacttgtctgtccccatccctctctcaccataccatggcgccatttggtacggtaggtgtgcatgatggcatgcctgatcatctcctcctcctcctcctcctagtcatcatattcatagatgatgctggtgaacttgagctagcaggaaatggatttaattctttctttttttttg

SEQ ID NO: 20287 - protein, 212 aa, Zea mays subsp. mays
  misc_feature (1)..(212): Ceres Seq. ID no. 12381222
  misc_feature (143)..(143): Xaa is any aa, unknown or other
MMPRRVASVPVPDWLEALLATRFFLACAAHPASPRNECNMFCLDCTGAPPPPPPAFCYYCRAHRHSSHRVIQIRRSSYHDVVRVSEVEDVLDISGVQTYVINSARVLFLNERPQPRGAGAAAGKAAASPYNCEICGRALLDPXRFCSLGCKLVDTKRSNGHAASSADGGGGGGGAASGNDETTEAGGSKNGPGARPHGRRRKGTPHRAPFWS

SEQ ID NO: 20288 - protein, 211 aa, Zea mays subsp. mays
  misc_feature (1)..(211): Ceres Seq. ID no. 12381223
  misc_feature (142)..(142): Xaa is any aa, unknown or other
MPRRVASVPVPDWLEALLATRFFLACAAHPASPRNECNMFCLDCTGAPPPPPPAFCYYCRAHRHSSHRVIQIRRSSYHDVVRVSEVEDVLDISGVQTYVINSARVLFLNERPQPRGAGAAAGKAAASPYNCEICGRALLDPXRFCSLGCKLVDTKRSNGHAASSADGGGGGGGAASGNDETTEAGGSKNGPGARPHGRRRKGTPHRAPFWS

SEQ ID NO: 20289 - protein, 173 aa, Zea mays subsp. mays
  misc_feature (1)..(173): Ceres Seq. ID no. 12381224
  misc_feature (104)..(104): Xaa is any aa, unknown or other
MFCLDCTGAPPPPPPAFCYYCRAHRHSSHRVIQIRRSSYHDVVRVSEVEDVLDISGVQTYVINSARVLFLNERPQPRGAGAAAGKAAASPYNCEICGRALLDPXRFCSLGCKLVDTKRSNGHAASSADGGGGGGGAASGNDETTEAGGSKNGPGARPHGRRRKGTPHRAPFWS

SEQ ID NO: 20290 - DNA, 1460 bp, Zea mays subsp. mays
  misc_feature (1)..(1460): Ceres Seq. ID no. 12381233
aactattataaaaagtcgggcgcgccggcctcatctgacccgtccgtgtccgtgtccgagtccgcccccgcaaggcccagctcctcactccacagcgccgcgcaatggcggccaagcagcggcaccggcagctgccactcctgcccctcctcgccgcggccgtcgcgtggtcgctactgcgcgccgccgccgccgcgggcacgggcactggcacgctcggcctccggcacaagcccgcgaggcagcacaacagcacgcggcacgggggagggcggcgcgcccagcgtggtggcgctcccggcactggcatggcgtcgtgcaacctgttccagggcagctgggtgtacgacgacacgctgccgatgtacgacgcggcggggtgccccttcgtggagccggagttcgactgccagaagtacggccgccccgacaagctgtacctcaagtaccggtggcgcccggcgtcctgcgagctcccgaggttcaacgggcaggacttgctgaggcggtggaaggggaagaagatactgttcgtgggggactccatcagcctgaaccagtgggagtcgcttgcgtgcatgctgcgcgcggccgcgccggcctcctccagggtcgcctacgccaggggcaaccccgtctccagcgtcacgttccaggactacggggtgtcggtggcctactaccggagcacctacctggtggacatcgtcgaggagtccgtcggtcgggtgctcaagctcgactccatcaccggcgacgcgtggctcggcgccgacgtcctcgtcttcaacacgtggcactggtggacgcacaccggcagggaccaaccgtgggactacgtccaagacggagggcaggtgatgaaggacatggaccggctcacggccttctccaaggggatgtccacatgggccaggtgggtcgactccagcgtcgacacctccaggaccaaggtctacttccagggaatctcgccgacccactacaacggagccgactggggcgagggctcgcggagctgcgcgcagcagacgcagccggtcgccgggccggcgtaccccgccggccccgtcccggcgcaggccgccgtgcgggccgcgctggccgccatgtccaagccggtgtacctgctcgacgtcacgctgctgtcgcagctcaggcgcgacggccacccctcggcctacagcggcggccacccgggcaacgattgcagccactggtgcctcgccggcgtgccggacacgtggaaccagatcctctacgcgtcgctcctcctggcataggaccggggagaaaaaaaacgcacactgtataccaattggcgcaggctataggcatttcgtatttaaaaattggtgattcgattgtttctttttttcttcttcttcttggaaaaatcaatgttatgtcatatcagcatataagaagcagcagcaaacgagtttataatgttgtataat

SEQ ID NO: 20291 - protein, 485 aa, Zea mays subsp. mays
  misc_feature (1)..(485): Ceres Seq. ID no. 12381234
TIIKSRARRPHLTRPCPCPSPPPQGPAPHSTAPRNGGQAAAPAAATPAPPRRGRRVVATARRRRRGHGHWHARPPAQAREAAQQHAARGRAARPAWWRSRHWHGVVQPVPGQLGVRRHAADVRRGGVPLRGAGVRLPEVRPPRQAVPQVPVAPGVLRAPEVQRAGLAEAVEGEEDTVRGGLHQPEPVGVACVHAARGRAGLLQGRLRQGQPRLQRHVPGLRGVGGLLPEHLPGGHRRGVRRSGAQARLHHRRRVARRRRPRLQHVALVDAHRQGPTVGLRPRRRAGDEGHGPAHGLLQGDVHMGQVGRLQRRHLQDQGLLPGNLADPLQRSRLGRGLAELRAADAAGRRAGVPRRPRPGAGRRAGRAGRHVQAGVPARRHAAVAAQARRPPLGLQRRPPGQRLQPLVPRRRAGHVEPDPLRVAPPGIGPGRKKTHTVYQLAQAIGISYLKIGDSIVSFFLLLLGKINVMSYQHIRSSSKRVYNVV

SEQ ID NO: 20292 - protein, 392 aa, Zea mays subsp. mays
  misc_feature (1)..(392): Ceres Seq. ID no. 12381235
MAAKQRHRQLPLLPLLAAAVAWSLLRAAAAAGTGTGTLGLRHKPARQHNSTRHGGGRRAQRGGAPGTGMASCNLFQGSWVYDDTLPMYDAAGCPFVEPEFDCQKYGRPDKLYLKYRWRPASCELPRFNGQDLLRRWKGKKILFVGDSISLNQWESLACMLRAAAPASSRVAYARGNPVSSVTFQDYGVSVAYYRSTYLVDIVEESVGRVLKLDSITGDAWLGADVLVFNTWHWWTHTGRDQPWDYVQDGGQVMKDMDRLTAFSKGMSTWARWVDSSVDTSRTKVYFQGISPTHYNGADWGEGSRSCAQQTQPVAGPAYPAGPVPAQAAVRAALAAMSKPVYLLDVTLLSQLRRDGHPSAYSGGHPGNDCSHWCLAGVPDTWNQILYASLLLA

SEQ ID NO: 20293 - protein, 324 aa, Zea mays subsp. mays
  misc_feature (1)..(324): Ceres Seq. ID no. 12381236
MASCNLFQGSWVYDDTLPMYDAAGCPFVEPEFDCQKYGRPDKLYLKYRWRPASCELPRFNGQDLLRRWKGKKILFVGDSISLNQWESLACMLRAAAPASSRVAYARGNPVSSVTFQDYGVSVAYYRSTYLVDIVEESVGRVLKLDSITGDAWLGADVLVFNTWHWWTHTGRDQPWDYVQDGGQVMKDMDRLTAFSKGMSTWARWVDSSVDTSRTKVYFQGISPTHYNGADWGEGSRSCAQQTQPVAGPAYPAGPVPAQAAVRAALAAMSKPVYLLDVTLLSQLRRDGHPSAYSGGHPGNDCSHWCLAGVPDTWNQILYASLLLA

SEQ ID NO: 20294 - DNA, 1347 bp, Zea mays subsp. mays
  misc_feature (1)..(1347): Ceres Seq. ID no. 12381237
ccggaacgcccgtcccgtccgtcctctccccatccacatccatcccgtgtgctcctactgctcctcgatttgatcaccgattaggggaggcggtttaccagtgagcacgcgcgagagataggataggaggaaagggaagctagcggcttcgctctcgcggggagatggcgcaggcggtggaggagtggtaccggcagatgcccatcatcacgcgctcctacctcaccgccgctgtcgtcaccaccgtcggctgcaccctcgaaatcatttcgccgtatcacctgtaccttaacccgaagctcgtggtgcagcactacgagatttggcgcctcgtcaccaacttcctctacttccgcaagatggatttggattttctattccacatgttctttcttgcacgatactgcaagcttctggaggaaaactcatttagaggaagaactgctgactttttttacatgctcttgtttggtgctactgtcctaactggcattgttctgatcggagggatgataccttacatttctgagacatttgccagaattctgttcttgagcaattcattgacatttatgatggtttatgtctggagcaagcacaacccttttatccatatgagctttctgggcctgtttacctttacggctgcgtacttaccatgggttctgttgggcttctctatcctcgttggaagcagcacatgggtggacctcttgggtatgattgctggacatatgtactacttcctggaagatgtatacccacgtatgactgggcgtcgccccctaaagacaccgtccttcatcaaggcgctatttgctgatgacaatgttgtggtggcacagccacccaatgctgggattggtgctggtgcaaggttcggtgctattggtgtagatccccaggctcaatgatgaattactttcagtgacctgagggccgaggctgtgactgatctgggatgcggcagtttgtattctctgcgcaaattgcggaactgtacaagccattgttcttgtgtatttatacaggctagatgagagttattgtgcataacaaaaagattagtagtatcggaggcggctaagtttgtcacctgttggcagggcccggaggaaaatggatcgtgatgggcaaacaggccaacccctgttgcagaaacttgttcatgtgacggtttaacatctgacctgctaccctttcatgcatcggtgaatttagtctaggaaactgtttgaagtggggaaatttggtgctttggcagcgagaatttggatggagcgctgtaattgcagaatggtgcaaggaatgactcctaacattgtggacgcctggatggtgttcgtc

SEQ ID NO: 20295 - protein, 249 aa, Zea mays subsp. mays
  misc_feature (1)..(249): Ceres Seq. ID no. 12381238
MAQAVEEWYRQMPIITRSYLTAAVVTTVGCTLEIISPYHLYLNPKLVVQHYEIWRLVTNFLYFRKMDLDFLFHMFFLARYCKLLEENSFRGRTADFFYMLLFGATVLTGIVLIGGMIPYISETFARILFLSNSLTFMMVYVWSKHNPFIHMSFLGLFTFTAAYLPWVLLGFSILVGSSTWVDLLGMIAGHMYYFLEDVYPRMTGRRPLKTPSFIKALFADDNVVVAQPPNAGIGAGARFGAIGVDPQAQ

SEQ ID NO: 20296 - protein, 238 aa, Zea mays subsp. mays
  misc_feature (1)..(238): Ceres Seq. ID no. 12381239
MPIITRSYLTAAVVTTVGCTLEIISPYHLYLNPKLVVQHYEIWRLVTNFLYFRKMDLDFLFHMFFLARYCKLLEENSFRGRTADFFYMLLFGATVLTGIVLIGGMIPYISETFARILFLSNSLTFMMVYVWSKHNPFIHMSFLGLFTFTAAYLPWVLLGFSILVGSSTWVDLLGMIAGHMYYFLEDVYPRMTGRRPLKTPSFIKALFADDNVVVAQPPNAGIGAGARFGAIGVDPQAQ

SEQ ID NO: 20297 - protein, 184 aa, Zea mays subsp. mays
  misc_feature (1)..(184): Ceres Seq. ID no. 12381240
MDLDFLFHMFFLARYCKLLEENSFRGRTADFFYMLLFGATVLTGIVLIGGMIPYISETFARILFLSNSLTFMMVYVWSKHNPFIHMSFLGLFTFTAAYLPWVLLGFSILVGSSTWVDLLGMIAGHMYYFLEDVYPRMTGRRPLKTPSFIKALFADDNVVVAQPPNAGIGAGARFGAIGVDPQAQ

SEQ ID NO: 20298 - DNA, 1505 bp, Zea mays subsp. mays
  misc_feature (1)..(1505): Ceres Seq. ID no. 12381259
atctctctctctctctcttcctgcgcccacacgcacgtttccactccgaccgggccagagccccgccgggcagtttccgttcgctgttgcgatccacctcctgcctgcacatcccctcccccgagttcgagccggagggccgaatagtagatctgcggcggcggcggccagaggatggccgtcaactgggagctgcggggctgctgcgaccacgaccagaggatcttcatcgccgccgtcggcgtctccaccgtcgtcatcctcctcctctggaggacgttcctgctcacgccgttcaagctcatcaccgtcttcctccacgagaccagccacgcgcttgcctgcaagctcacttgcggcgatgtagaaggcatgcaggtccatgcgaatgagggtggcgttactcaaacccggggtggcatatattggataatcttgccccgctggatatctgggttcatcattttggggaatggtcttcatacttgcatccacaaatctccttactacaagaattgcagcgggttgtttcatacttgcgttgtttattgttctttttgttgcagaaaattggtttcttcgctggctctgccttggattcattgtgttcattgctgttgtttgggtcatacaagaatttacatctttccatattctgaaatatgtgatcttattcataggtgagacggaagatgtcgtacaatcatgtcctctttattttaatttctggaatgcaaattgtatgcttgaaatttaatctttatgtttatttatgtgcaacaggtgtgatgaacagcttattttcagtttacggtaaagaaaccaaaaaaaaaacatttttcttgttattccatgttagaataatccatgtgttactctcaatgaaatattctcaaattatatagatatttatgatgacttgatatcccgaagagttaacacaagtgatgctgaaaagtttgctgaaatctgcccttgcccctgcaatggttttgcatggggtgttatatggtctgctccaagtttcgatagttatatttttctgtataccttgatggtgtgttaagatattcctgatgtaacgacaccaatggtaacgttttctgttctttgtttcaggggattcatctcgtttatctttctctgcgcttcaatataccttggactggtcatattgtcttgagggttcgccattttgatctgacaatctactctgattggctttttcgaagcttcgttgctcgaggttttggttcaagcttacatggttctggtggttgtacagtatacatgtgcagggtaaacatgtacatccattataagttaatttgttggggattattcatgggattcttcgattttagtggttctatagagtaccattttacttaccattaccagttgcatttatggtctgtagcctcttcaatttatgtacctgtatatcatatattgctcatttatccatttcaaaatgtattcagagatgcaatattgtgcatctt

SEQ ID NO: 20299 - protein, 169 aa, Zea mays subsp. mays
  misc_feature (1)..(169): Ceres Seq. ID no. 12381260
MAVNWELRGCCDHDQRIFIAAVGVSTVVILLLWRTFLLTPFKLITVFLHETSHALACKLTCGDVEGMQVHANEGGVTQTRGGIYWIILPRWISGFIILGNGLHTCIHKSPYYKNCSGLFHTCVVYCSFCCRKLVSSLALPWIHCVHCCCLGHTRIYIFPYSEICDLIHR

SEQ ID NO: 20300 - protein, 129 aa, Zea mays subsp. mays
  misc_feature (1)..(129): Ceres Seq. ID no. 12381261
LSLSLFLRPHARFHSDRARAPPGSFRSLLRSTSCLHIPSPEFEPEGRIVDLRRRRPEDGRQLGAAGLLRPRPEDLHRRRRRLHRRHPPPLEDVPAHAVQAHHRLPPRDQPRACLQAHLRRCRRHAGPCE

SEQ ID NO: 20301 - protein, 121 aa, Zea mays subsp. mays
  misc_feature (1)..(121): Ceres Seq. ID no. 12381262
SLSLSLPAPTRTFPLRPGQSPAGQFPFAVAIHLLPAHPLPRVRAGGPNSRSAAAAARGWPSTGSCGAAATTTRGSSSPPSASPPSSSSSSGGRSCSRRSSSSPSSSTRPATRLPASSLAAM

SEQ ID NO: 20302 - DNA, 818 bp, Zea mays subsp. mays
  misc_feature (1)..(818): Ceres Seq. ID no. 12381267
ggactcacgaagcagcacactctgcactctcggcaacaactgacggccggaggaagaaggcgcagacgacaagcagaagcttgtgccatcgatcaatggcggcggtgacaaagatctacgtcgtgtactactcgacgtacggccacgtggcgaggctggcggaggagatcaagaagggcgccgactccgtggacggcgtcgaggcaaccatctggcaggtggcggagacgctgccggaggaggcgctggcgaagatgcgcgcgccggcgaggagcgaggagcacccggtgatctcgggcaagcagctggtggacgcggacggcatcctgttcggcttcccggcgcggttcggcatgatggcggcgcagatgaaggcgctgttcgactccacgggcggcctctggcagcggcaggcgctggcgggcaagcccgcggggttcttcttcgcgctgggcacccagggcggcgggcaggaggagacggcgctcacggccgtgtcgcagctcacgcaccacggcatggtgttcgtgcccgtgggctacacgttcggcgccggcatgttcgacatggacgaggtcaggtgctgcagcccgtacggggccggcacgttcgccggcgccgacgggaggagcaggctgcccagcgacgccgagctgcagatggccgcgcaccagggcagctatttcgccgccttcgccaagaagctcaaggcgggagcggccgtcgtggcctgagcctgcctgagtagtgctctctcctctctgcccatcgatgccagctgctcttgtctgcggaaataaaataaagctccattacgc

SEQ ID NO: 20303 - protein, 243 aa, Zea mays subsp. mays
  misc_feature (1)..(243): Ceres Seq. ID no. 12381268
THEAAHSALSATTDGRRKKAQTTSRSLCHRSMAAVTKIYVVYYSTYGHVARLAEEIKKGADSVDGVEATIWQVAETLPEEALAKMRAPARSEEHPVISGKQLVDADGILFGFPARFGMMAAQMKALFDSTGGLWQRQALAGKPAGFFFALGTQGGGQEETALTAVSQLTHHGMVFVPVGYTFGAGMFDMDEVRCCSPYGAGTFAGADGRSRLPSDAELQMAAHQGSYFAAFAKKLKAGAAVVA

SEQ ID NO: 20304 - protein, 212 aa, Zea mays subsp. mays
  misc_feature (1)..(212): Ceres Seq. ID no. 12381269
MAAVTKIYVVYYSTYGHVARLAEEIKKGADSVDGVEATIWQVAETLPEEALAKMRAPARSEEHPVISGKQLVDADGILFGFPARFGMMAAQMKALFDSTGGLWQRQALAGKPAGFFFALGTQGGGQEETALTAVSQLTHHGMVFVPVGYTFGAGMFDMDEVRCCSPYGAGTFAGADGRSRLPSDAELQMAAHQGSYFAAFAKKLKAGAAVVA

SEQ ID NO: 20305 - protein, 159 aa, Zea mays subsp. mays
  misc_feature (1)..(159): Ceres Seq. ID no. 12381270
MRAPARSEEHPVISGKQLVDADGILFGFPARFGMMAAQMKALFDSTGGLWQRQALAGKPAGFFFALGTQGGGQEETALTAVSQLTHHGMVFVPVGYTFGAGMFDMDEVRCCSPYGAGTFAGADGRSRLPSDAELQMAAHQGSYFAAFAKKLKAGAAVVA

SEQ ID NO: 20306 - DNA, 1052 bp, Zea mays subsp. mays
  misc_feature (1)..(1052): Ceres Seq. ID no. 12381283
aaatagccattcaatcattcaagcgaagcagccaccactctctccactgtgactccgtgacctgcctgccctgctgcgacaagcacagcacacacaccccgcacaccgcaccagctcagctcagctcaccaagacaatcaatcatggctcgtccgcgcagtgtcgctgccgctgcccccctcctcctgctgctcgccgccgccgcagcggggctcgtgtccgccgcgtcgccggcagccagcgacttcgtccgcaagtcgtgccgcacgacgcagtacccttcggtgtgcgagcagagcctggcgtcgtacggcgggtcgccgccgccacggagcccgcgggagctggcgcgcgccgcgctgtcggtgagcgcggaccgcgcgcgcgccgcgtcggcgtacgtgggccgcctgtgcggcgccagcaacggcaaaggcgcgaagaaggggtcgggatcggcgtcggcgtcggcaggtcccgtgcgcgactgcctggacaatctggcggacagcgtgggccacctccgcgacgcggcgcaggagatgggcggcgccgggatgggccgcgcggggacgccggcgttcaggtggcacctcagcaacgtgcagacctggtgcagcgccgcgctcaccgacgaggacacctgcctcgacggcctctcgtcccgcgccgtcgacgccggcacgcgcgccgccatccggggcaaggtcgtcgaggtcgcgcaggtcaccagcaacgcgctcgcgctcgtcaataaggtcgggcctgggtactaacacgggaaggggacccaagatccaggcccaggcccaggcccaggcccagcccagataccacacccgctactagtatagtactaggcgcctccacctccacggcgttgggtgtttctcgtccgttaatagctcggtttgctttgcttgtgtttgtgtaagatatacattagttaagggcaataagcttgtactattatgagtggcggccgaggagtacagtacgttctcctctgtccgatcatgccaccatattaatgtgggagatatcttttgtcc

SEQ ID NO: 20307 - protein, 257 aa, Zea mays subsp. mays
  misc_feature (1)..(257): Ceres Seq. ID no. 12381284
IAIQSFKRSSHHSLHCDSVTCLPCCDKHSTHTPHTAPAQLSSPRQSIMARPRSVAAAAPLLLLLAAAAAGLVSAASPAASDFVRKSCRTTQYPSVCEQSLASYGGSPPPRSPRELARAALSVSADRARAASAYVGRLCGASNGKGAKKGSGSASASAGPVRDCLDNLADSVGHLRDAAQEMGGAGMGRAGTPAFRWHLSNVQTWCSAALTDEDTCLDGLSSRAVDAGTRAAIRGKVVEVAQVTSNALALVNKVGPGY

SEQ ID NO: 20308 - protein, 210 aa, Zea mays subsp. mays
  misc_feature (1)..(210): Ceres Seq. ID no. 12381285
MARPRSVAAAAPLLLLLAAAAAGLVSAASPAASDFVRKSCRTTQYPSVCEQSLASYGGSPPPRSPRELARAALSVSADRARAASAYVGRLCGASNGKGAKKGSGSASASAGPVRDCLDNLADSVGHLRDAAQEMGGAGMGRAGTPAFRWHLSNVQTWCSAALTDEDTCLDGLSSRAVDAGTRAAIRGKVVEVAQVTSNALALVNKVGPGY

SEQ ID NO: 20309 - DNA, 1523 bp, Zea mays subsp. mays
  misc_feature (1)..(1523): Ceres Seq. ID no. 12381293
atcgtggcctcatctcgcgctcaagctgctccccgtagtcccattgagaccaacggcagcgcgcgcgttcgtgtacgtttatattatttttttataagggagcaagagggctcggcggcagcggcgacggcgaccgcgacggcagtggcagtggcagtggcaggctgtcagccgtccctatcttgtgtgtcaagcgcgaactccctatctcgtgtgtcaagcgcgttcgcgtgcgttctaggcacaggcagccgaggcgagccccttccgctcagtggccgccgccggaccgtggacgcagctagcccatcagcccatggcagggacggacgtcgcaggctccgcacgcggctccgatgccgcgctcgggaagacgggcgaaccacccgccgcggcgcgctctggcgcagccaagaaggtggctctcgctctgctagcctccttctcggcgctgctgtacagccagattcagccgccgccgtctaagatccccggcatgccgggcgggcctccggtcacggcgcccagaacaaggctcaaggacggccggcacttggcgtacctggaatctggcgtcccaaaggagaaggccaagtacaagatcatattcgttcacggcttcgactgctgtagatacgacgtgctgaatgtctcccaggggctgttggaagagctgggaatctacctgttgtccttcgaccggccccgggtacgccgagagcgacgcccacccggcccggacagagaagagcatcgcccttgacatcgcggagctggcggacaatctccagctcggccccaagttccatctcatcggcttctccatgggcggcgagatcatgtggagctgcctcaagtacatcccgcacaggctcgccggcgtggcgattcttgccccggtgggcaactactggtggtccggcttcccgccggacgtgttcaaggaggcgtggcgcgtgcagtttccgcaagaccagcgcgcggtctgggtcgctcaccacctgccgtggctgacgcactggtggaacacccagaagctgttccgcggatccagcgtcaaggacggcgaccctgccatgctatccaaggaggacaggcttgtagctgacaagttcgagaagcgaacctatgagaagcaggtcagacagcagggagagcacgactcgctccaccgcgacatgatggtcggtttcgggaagtgggactggagcccgctggagatggagaacccgttcgccggcggcctagacgaggtgaaggtgcacctgtggcacggcgtcgaggacctctacgtgccggttcaactgtcgcggtacatcagcgagaggctcccatgggtcatctaccatgagctcccgacggccggccacctcttcccggtcgccgacggcatgcccgacgctatcgtcaggtcgcttctgctcggagatgagtgatcagtatttaggatgcgcggatccaggacttgtgcactttttgcagcttcatcagtaataaaaatacactcggaggtcgagatctgt

SEQ ID NO: 20310 - protein, 262 aa, Zea mays subsp. mays
  misc_feature (1)..(262): Ceres Seq. ID no. 12381294
MSPRGCWKSWESTCCPSTGPGYAESDAHPARTEKSIALDIAELADNLQLGPKFHLIGFSMGGEIMWSCLKYIPHRLAGVAILAPVGNYWWSGFPPDVFKEAWRVQFPQDQRAVWVAHHLPWLTHWWNTQKLFRGSSVKDGDPAMLSKEDRLVADKFEKRTYEKQVRQQGEHDSLHRDMMVGFGKWDWSPLEMENPFAGGLDEVKVHLWHGVEDLYVPVQLSRYISERLPWVIYHELPTAGHLFPVADGMPDAIVRSLLLGDE

SEQ ID NO: 20311 - protein, 203 aa, Zea mays subsp. mays
  misc_feature (1)..(203): Ceres Seq. ID no. 12381295
MGGEIMWSCLKYIPHRLAGVAILAPVGNYWWSGFPPDVFKEAWRVQFPQDQRAVWVAHHLPWLTHWWNTQKLFRGSSVKDGDPAMLSKEDRLVADKFEKRTYEKQVRQQGEHDSLHRDMMVGFGKWDWSPLEMENPFAGGLDEVKVHLWHGVEDLYVPVQLSRYISERLPWVIYHELPTAGHLFPVADGMPDAIVRSLLLGDE

SEQ ID NO: 20312 - protein, 198 aa, Zea mays subsp. mays
  misc_feature (1)..(198): Ceres Seq. ID no. 12381296
MWSCLKYIPHRLAGVAILAPVGNYWWSGFPPDVFKEAWRVQFPQDQRAVWVAHHLPWLTHWWNTQKLFRGSSVKDGDPAMLSKEDRLVADKFEKRTYEKQVRQQGEHDSLHRDMMVGFGKWDWSPLEMENPFAGGLDEVKVHLWHGVEDLYVPVQLSRYISERLPWVIYHELPTAGHLFPVADGMPDAIVRSLLLGDE

SEQ ID NO: 20313 - DNA, 1726 bp, Zea mays subsp. mays
  misc_feature (1)..(1726): Ceres Seq. ID no. 12381349
gcacgagaccattacctagaacatcctaatcgaaaaggaactgaatactacaatggagctctcgtgggacgaatgggatgtcattatactggctgcctgcagcttcctcatccctctcgtgttcctctgcaatgctacgaagcggcggcggcggcgcgcgccccctggcccggccaccgtacccatcatcgggaacctggcgtggctaacgttgcgcgacgggttgggtgagctggacatcctgcgacgactgcactcgcgctttggcccgctgctgtcggtccgcttgggttcatcggagcaggtgaacgtggcggaccgccgtctcgcacacgccttgctcgtggagcgtggcgccgctgtggctgaccgctcgccgctgctggtgtccaccgagaggttcggggccttcggctctttcagcatacacgtgtccagctacggcccacgctggagtgttctccgccgcaacttcgcggcggaggtcgtgagcccagcgcggttccggcagatggcggcctcgcgggagctggcgcttgccgacctcatccggaagctgaagctgcaggagggcgtcgtcgtctgcagggacgcgttccagcacgccatgtccagcctcttcatcgccatgtgcttcggcaaggtcctcgacgactcgtccgtggacagcatcggcgtcgcgctgcgcgacttcgtcctccacggcggcgcgtcggggatggggatggcgctattcttgttcctccctgctctcaccacgcgactcttccgtggcctcctgcggtctaaggaggccaagcgccagaagctcgaaaacgtgtactgcctgccattgatccatgagcggagagagcgcaggaagacgaagcagctgacgcaggagcacccgcactgctacgttgacacgttgctcgacctcaggctcgacgaggaacaggatggtggccgccttctcacagaccacgagatagcaagcctgtgcatcgagatcctcatcgttggctcggagctaccggcgacggcgctggagtggatcatggcggagctagtaaagaacccaggcgtgcaggacaagctctacgaggagatgatggtgaaagccaaagccaccactgacgcttctgctggcgtgctcccgttctcggaggatgacttgcccaagataccctacctgagagcggtggtgctggagggtctccggcgccatccgccggggcaccagatgccgccacgcagggtgagggaggacgtggaggtgggtgactacgtggtgcccaagggctcagcgatcaacttcatgctgtacgacctgggcatggacgacgccacgtgggaccgcccagcagtgttcatgccggagaggttcctgcccggcggggaagccgaggcgctggacatcaccggcaccaaggagatgaagatgataccgtttggggcgggcagaaggatctgcccgggcctcaggatcgctctcctgctcctcgagtacttcgtcgccaacctcgtagcgaccttccactggaaagaggtggaagagggcgacgtcgatgtcaccaccgaggacgctcagctcaccgtcctcatggggaagccgctccgggcgcgcctgcttccaagactgcattcgtctgcttaattttcttcatcatcatggtgtatgtcagtgtgtcaccgaataattaattaatgcgaataaagatcaagcttcaaagactcttcaccgttc

SEQ ID NO: 20314 - protein, 527 aa, Zea mays subsp. mays
  misc_feature (1)..(527): Ceres Seq. ID no. 12381350
MELSWDEWDVIILAACSFLIPLVFLCNATKRRRRRAPPGPATVPIIGNLAWLTLRDGLGELDILRRLHSRFGPLLSVRLGSSEQVNVADRRLAHALLVERGAAVADRSPLLVSTERFGAFGSFSIHVSSYGPRWSVLRRNFAAEVVSPARFRQMAASRELALADLIRKLKLQEGVVVCRDAFQHAMSSLFIAMCFGKVLDDSSVDSIGVALRDFVLHGGASGMGMALFLFLPALTTRLFRGLLRSKEAKRQKLENVYCLPLIHERRERRKTKQLTQEHPHCYVDTLLDLRLDEEQDGGRLLTDHEIASLCIEILIVGSELPATALEWIMAELVKNPGVQDKLYEEMMVKAKATTDASAGVLPFSEDDLPKIPYLRAVVLEGLRRHPPGHQMPPRRVREDVEVGDYVVPKGSAINFMLYDLGMDDATWDRPAVFMPERFLPGGEAEALDITGTKEMKMIPFGAGRRICPGLRIALLLLEYFVANLVATFHWKEVEEGDVDVTTEDAQLTVLMGKPLRARLLPRLHSSA

SEQ ID NO: 20315 - protein, 374 aa, Zea mays subsp. mays
  misc_feature (1)..(374): Ceres Seq. ID no. 12381351
MAASRELALADLIRKLKLQEGVVVCRDAFQHAMSSLFIAMCFGKVLDDSSVDSIGVALRDFVLHGGASGMGMALFLFLPALTTRLFRGLLRSKEAKRQKLENVYCLPLIHERRERRKTKQLTQEHPHCYVDTLLDLRLDEEQDGGRLLTDHEIASLCIEILIVGSELPATALEWIMAELVKNPGVQDKLYEEMMVKAKATTDASAGVLPFSEDDLPKIPYLRAVVLEGLRRHPPGHQMPPRRVREDVEVGDYVVPKGSAINFMLYDLGMDDATWDRPAVFMPERFLPGGEAEALDITGTKEMKMIPFGAGRRICPGLRIALLLLEYFVANLVATFHWKEVEEGDVDVTTEDAQLTVLMGKPLRARLLPRLHSSA

SEQ ID NO: 20316 - protein, 342 aa, Zea mays subsp. mays
  misc_feature (1)..(342): Ceres Seq. ID no. 12381352
MSSLFIAMCFGKVLDDSSVDSIGVALRDFVLHGGASGMGMALFLFLPALTTRLFRGLLRSKEAKRQKLENVYCLPLIHERRERRKTKQLTQEHPHCYVDTLLDLRLDEEQDGGRLLTDHEIASLCIEILIVGSELPATALEWIMAELVKNPGVQDKLYEEMMVKAKATTDASAGVLPFSEDDLPKIPYLRAVVLEGLRRHPPGHQMPPRRVREDVEVGDYVVPKGSAINFMLYDLGMDDATWDRPAVFMPERFLPGGEAEALDITGTKEMKMIPFGAGRRICPGLRIALLLLEYFVANLVATFHWKEVEEGDVDVTTEDAQLTVLMGKPLRARLLPRLHSSA

SEQ ID NO: 20317 - DNA, 1058 bp, Zea mays subsp. mays
  misc_feature (1)..(1058): Ceres Seq. ID no. 12381373
acacccttctactagagcagctgagctgagagtgacagcagcggagcggcaatggcgcagatgctcctcctcctcctcctccttgccgcacccacagtgccagcggaggcagcagccaccgcctccactccgacgctcgtgttcctcctggccgggcagtccaacatgggcggccgcggcggcgccaccaacggcacctgggacggcgtggtgccgcccgcgtgcgcgccttccccgcgcatcctccgcctctccccgtccctgcgctgggaggaggccagggagccgctgcacgccggcattgacctgcacaacgtgctcggcgtgggccccgggatgcccttcgcgcacgcgctcctccgctcctggcgccgctccggccgccgccccgccgtggtggggctggtcccctgcgcgcagggcgccacgcccatcgccagctggtcccgcggcacgccgctgtacgaccgcatgctcgcgcgcgcaagggccgccgtcgcccgcgggcccgccaccaggctggccgcgctgctctggtaccagggcgaggccgacaccatcaggcgccaggacgccgacgcctacacgccccgcatggaggccttggtccgcgacgtccgccgggacctgggcatgccggacctgctggtcatccaggtggggctggccacggggcagggcaggttcgtggacatcgtcagggaggcgcagaggagggtcagcctccgcaacgtcaggtacgtggacgccaagggcctgcccgtcgccaacgactacacgcatctgacaacgccggcgcaggtcaagctcggcaacatgctcgccgccgcctacatggcagcgacacacacgcactgactgagccatctactacctcgattcttaatcaattctacttgactactcagtaattgagccagcaagcagcaagcaacgctacgccgttctactttaattttgttctgcacatgtccttactatgcataacatcctttgctttgacgatgatgatttagcatcctttgatgatggtactcaaatagaatattcttcttttt

SEQ ID NO: 20318 - protein, 268 aa, Zea mays subsp. mays
  misc_feature (1)..(268): Ceres Seq. ID no. 12381374
MAQMLLLLLLLAAPTVPAEAAATASTPTLVFLLAGQSNMGGRGGATNGTWDGVVPPACAPSPRILRLSPSLRWEEAREPLHAGIDLHNVLGVGPGMPFAHALLRSWRRSGRRPAVVGLVPCAQGATPIASWSRGTPLYDRMLARARAAVARGPATRLAALLWYQGEADTIRRQDADAYTPRMEALVRDVRRDLGMPDLLVIQVGLATGQGRFVDIVREAQRRVSLRNVRYVDAKGLPVANDYTHLTTPAQVKLGNMLAAAYMAATHTH

SEQ ID NO: 20319 - protein, 265 aa, Zea mays subsp. mays
  misc_feature (1)..(265): Ceres Seq. ID no. 12381375
MLLLLLLLAAPTVPAEAAATASTPTLVFLLAGQSNMGGRGGATNGTWDGVVPPACAPSPRILRLSPSLRWEEAREPLHAGIDLHNVLGVGPGMPFAHALLRSWRRSGRRPAVVGLVPCAQGATPIASWSRGTPLYDRMLARARAAVARGPATRLAALLWYQGEADTIRRQDADAYTPRMEALVRDVRRDLGMPDLLVIQVGLATGQGRFVDIVREAQRRVSLRNVRYVDAKGLPVANDYTHLTTPAQVKLGNMLAAAYMAATHTH

SEQ ID NO: 20320 - protein, 261 aa, Zea mays subsp. mays
  misc_feature (1)..(261): Ceres Seq. ID no. 12381376
HPSTRAAELRVTAAERQWRRCSSSSSSLPHPQCQRRQQPPPPLRRSCSSWPGSPTWAAAAAPPTAPGTAWCRPRARLPRASSASPRPCAGRRPGSRCTPALTCTTCSAWAPGCPSRTRSSAPGAAPAAAPPWWGWSPARRAPRPSPAGPAARRCTTACSRAQGPPSPAGPPPGWPRCSGTRARPTPSGARTPTPTRPAWRPWSATSAGTWACRTCWSSRWGWPRGRAGSWTSSGRRRGGSASATSGTWTPRACPSPTTTRI

SEQ ID NO: 20321 - DNA, 1413 bp, Zea mays subsp. mays
  misc_feature (1)..(1413): Ceres Seq. ID no. 12381429
acgactttatacatccgcttcctccagtcatcaaagaaacagagcgagcctagactgtgaggaagaaaggactaccatgggcgacgtcgctgccggcgctgccgccctgagtccacccccgatgaccaaggagaccaacctcttcatgcaaatcgtcggcaacccggacggcacggtcacgcgccccgaggtccccctcgtcccggcctcagccgaagccactggcggcgtcatctccagggacgtgcccctcgacgcctccgccggcacgtacctccgcctctacctgcccgacccatcctccgcgccagccgccaagcttcccgtcgtcctctacttccacggcggcggcttcgtgatcctctccgccgccaccgtattctaccacggccactgcgaggcgatggccgccgcggtgcccgccatcgtggcgtccctcgagtaccgcctcgcgccggagcaccgcctgcccgcggcctacgaggacgccgccgcggccgtggcgtggctccgcgacggcgcgccgggggacccctgggtcgcggcgcacggcgacctctcccgctgcttcctcatgggcagcagctcgggcggcaacatggctttcttcgcggcgctccggaccggaggcctcgacctgggccccgccacggtgcgcggcctcctgctgcaccagccctacctcggcggcgtcgaccggacgccctcggaggccaggtccgtcgacgacgccatgctgccgctggaggccaacgacaggctctggagcctcgcgctgcccgtgggcgccgaccgggaccacgagttctgcaaccccgtcaaggccatggcgccggaagcccttgccggcctgccgcgctgcctggtcaccgcaacttgggcgacccgctgatcgacaggcagcgggagttcgctcggtggctgcaggaccgcggcggcgcggaggcggaggtcgtcgtgaagttggacgtcgcggggttccacgcgtcggagctgttcgtgccggagatcgccgaggtgctgttcgccgcgatgcgcgagttcgtgtacaccggcgacgcttgacacgttgaatttcgtgccggccggtgacaagtggacatacgtgttgcatcgttgtggattgtgtgaccgtgcgcaataattctcggccgtgttgaatttgaatcttgacaaactggcaccagccaccaggcggcgactactatgtaacacgtgagcactgtagcagctaccgcaacgcacctgacgtccggacgtgtagttttcgcgacgcgtgcagctatcggccacggcaacgaaaataggagatgttttgttcggatttttttttggcccgcgaccattcacagcgctatctgaaactatcttcatcacatctcttatcaaatcatctatctcatcctctatttc

SEQ ID NO: 20322 - protein, 296 aa, Zea mays subsp. mays
  misc_feature (1)..(296): Ceres Seq. ID no. 12381430
RLYTSASSSHQRNRASLDCEEERTTMGDVAAGAAALSPPPMTKETNLFMQIVGNPDGTVTRPEVPLVPASAEATGGVISRDVPLDASAGTYLRLYLPDPSSAPAAKLPVVLYFHGGGFVILSAATVFYHGHCEAMAAAVPAIVASLEYRLAPEHRLPAAYEDAAAAVAWLRDGAPGDPWVAAHGDLSRCFLMGSSSGGNMAFFAALRTGGLDLGPATVRGLLLHQPYLGGVDRTPSEARSVDDAMLPLEANDRLWSLALPVGADRDHEFCNPVKAMAPEALAGLPRCLVTATWATR

SEQ ID NO: 20323 - protein, 271 aa, Zea mays subsp. mays
  misc_feature (1)..(271): Ceres Seq. ID no. 12381431
MGDVAAGAAALSPPPMTKETNLFMQIVGNPDGTVTRPEVPLVPASAEATGGVISRDVPLDASAGTYLRLYLPDPSSAPAAKLPVVLYFHGGGFVILSAATVFYHGHCEAMAAAVPAIVASLEYRLAPEHRLPAAYEDAAAAVAWLRDGAPGDPWVAAHGDLSRCFLMGSSSGGNMAFFAALRTGGLDLGPATVRGLLLHQPYLGGVDRTPSEARSVDDAMLPLEANDRLWSLALPVGADRDHEFCNPVKAMAPEALAGLPRCLVTATWATR

SEQ ID NO: 20324 - protein, 256 aa, Zea mays subsp. mays
  misc_feature (1)..(256): Ceres Seq. ID no. 12381432
MTKETNLFMQIVGNPDGTVTRPEVPLVPASAEATGGVISRDVPLDASAGTYLRLYLPDPSSAPAAKLPVVLYFHGGGFVILSAATVFYHGHCEAMAAAVPAIVASLEYRLAPEHRLPAAYEDAAAAVAWLRDGAPGDPWVAAHGDLSRCFLMGSSSGGNMAFFAALRTGGLDLGPATVRGLLLHQPYLGGVDRTPSEARSVDDAMLPLEANDRLWSLALPVGADRDHEFCNPVKAMAPEALAGLPRCLVTATWATR

SEQ ID NO: 20325 - DNA, 1464 bp, Zea mays subsp. mays
  misc_feature (1)..(1464): Ceres Seq. ID no. 12381445
aagtcacatcagcgcgtccgccttcacctatcatcatcgtctcaatctccggccggtctcagccgggcacccaaactgagatggcgtccgtccggtggtcccgccgtgggccctgatcgcctccttcctcgtcgtcgcggcagtgggagcccagccgatggacccgaagaaccccatctcgtcggaccccaacgtgatccccgtatacatgagccccggctcgccccccacctacgtgagctgttacaacagcacccatgggcagcaagggtcggaacccacgtgctccatcctcgcgcgccagtgtccccgcggttgccgggacacctgctacgtccactgcccgtcctgcaagctcgtctgcctgtgcgagctgaccggctcggagtgctacgacccgcgcttcgtgggaggcgacggcaacaagttcctgttccacggccggcgcgacgccgacttctgtctggtgtcggacgccaacctgcacatcaacgcgcacttcatcggcaagcgcaacgacgcgcgcgccgccgcgccggcgcgggacttcacgtgggtgcaggcgctgggcatccggttcggcgggcaccggctgtacctgggcgtccggaggacggccgtctgggacgacgccgaggaccggctggccatcaccttcgacggggtgcccgtggcgctggacgccgtggccggcgccagctggagccccgcggcggcgcccgcgctgtccgtgttccgcacgggccccgccaacggcgtggtggtgcgcctggacgggcggttccgggccgtggccaacgccgtgccggtgaccgcggaggactcgagggtccacggctacggcctgcgccccggggacggcagcctcgcgcacctcaacgtggcgttcaggttctacgccctcagcgccgacgtgcacggcgtgctgggccagacctaccgcccgggctacgtcagcgccgccggggtggacgcgggcgccagggtccccgtcatgggcggcgccggaaggttccaggtgtacggcggcatcttcgacaccagctgcgaggtcgggcggttcgctggcgaggaccacgggcccgtgggcggcgtcatcaccgtggaggagccgaccgacgcgctctgcggcagcggcaaggccagcactggcctggtctgcaagaagtgacgactgacgaggccggcggcgtgaggtcccgctccgcttgtgtagtgtttttgcttgtgtgtacgtgcgtgctgacgtatatcggtatatatagctgctgctgctgctgcgaagtatagtagcaatggttctatgtatggcggggcggccgaataaaagactgtgacgcgtctcttgtgctatagtcgtgtggacaacactggaaaaaatgccgtgttggtctggtcacgtaagaagtgtgtattattattattattattattattattattattattactaaaaaaaaaaaa

SEQ ID NO: 20326 - protein, 429 aa, Zea mays subsp. mays
  misc_feature (1)..(429): Ceres Seq. ID no. 12381446
KSHQRVRLHLSSSSQSPAGLSRAPKLRWRPSGGPAVGPDRLLPRRRGSGSPADGPEEPHLVGPQRDPRIHEPRLAPHLRELLQQHPWAARVGTHVLHPRAPVSPRLPGHLLRPLPVLQARLPVRADRLGVLRPALRGRRRQQVPVPRPARRRLLSGVGRQPAHQRALHRQAQRRARRRAGAGLHVGAGAGHPVRRAPAVPGRPEDGRLGRRRGPAGHHLRRGARGAGRRGRRQLEPRGGARAVRVPHGPRQRRGGAPGRAVPGRGQRRAGDRGGLEGPRLRPAPRGRQPRAPQRGVQVLRPQRRRARRAGPDLPPGLRQRRRGGRGRQGPRHGRRRKVPGVRRHLRHQLRGRAVRWRGPRARGRRHHRGGADRRALRQRQGQHWPGLQEVTTDEAGGVRSRSACVVFLLVCTCVLTYIGIYSCCCCCEV

SEQ ID NO: 20327 - protein, 337 aa, Zea mays subsp. mays
  misc_feature (1)..(337): Ceres Seq. ID no. 12381447
MDPKNPISSDPNVIPVYMSPGSPPTYVSCYNSTHGQQGSEPTCSILARQCPRGCRDTCYVHCPSCKLVCLCELTGSECYDPRFVGGDGNKFLFHGRRDADFCLVSDANLHINAHFIGKRNDARAAAPARDFTWVQALGIRFGGHRLYLGVRRTAVWDDAEDRLAITFDGVPVALDAVAGASWSPAAAPALSVFRTGPANGVVVRLDGRFRAVANAVPVTAEDSRVHGYGLRPGDGSLAHLNVAFRFYALSADVHGVLGQTYRPGYVSAAGVDAGARVPVMGGAGRFQVYGGIFDTSCEVGRFAGEDHGPVGGVITVEEPTDALCGSGKASTGLVCKK

SEQ ID NO: 20328 - protein, 320 aa, Zea mays subsp. mays
  misc_feature (1)..(320): Ceres Seq. ID no. 12381448
MSPGSPPTYVSCYNSTHGQQGSEPTCSILARQCPRGCRDTCYVHCPSCKLVCLCELTGSECYDPRFVGGDGNKFLFHGRRDADFCLVSDANLHINAHFIGKRNDARAAAPARDFTWVQALGIRFGGHRLYLGVRRTAVWDDAEDRLAITFDGVPVALDAVAGASWSPAAAPALSVFRTGPANGVVVRLDGRFRAVANAVPVTAEDSRVHGYGLRPGDGSLAHLNVAFRFYALSADVHGVLGQTYRPGYVSAAGVDAGARVPVMGGAGRFQVYGGIFDTSCEVGRFAGEDHGPVGGVITVEEPTDALCGSGKASTGLVCKK

SEQ ID NO: 20329 - DNA, 2219 bp, Zea mays subsp. mays
  misc_feature (1)..(2219): Ceres Seq. ID no. 12381521
gttttctgcttctttctctctcccctccctcctctattctgttcccccctttccacctccctccctcctcgctaaccccacccaccggccaccgccccgcctccagcctcgccggtccccgccggaaccctagctccggagagtgccccggcctccccagccgccgatcggttccgggggcccggcgcccctccgcacgatcgcgcgagatccggggtcgccgccggccggggagcagaagccatatgtcgggggtcggcagcggcaggccgccggccgcccagaagatcctgcagtcgctgcgcccgccgctgtccttcgccacggccgtcgcgggccgccccttcgccgcgcccgacgactaccaccgctttccgacaccggctgcggcgacggcccccgccgccacctcaggcggcgtcggtgcgggggctcctcctcgtgatactattgaggaggggctggtcatacggactccgctgaaaaggaaagctacaagtgaagaaaatgatgctgctgctgagccaagcgattgtatcattaccagtccaatgcccacttcggtctctggtaaaactgttaaagcttctaaggcaaaagctaagaacagtaaaactgggcctcagacacctacatcaaatgttggttcaccactcaatccaccaactcctgttggcacgtgccgctatgacagttcactaggacttctgacaaaaaagttcattaacttgctcaagcaagcgccagatggcattctcgatttgaacaatgctgcagaaacactagaggttcaaaagcgacgcatatatgacattactaatgtccttgaaggcattggactaatagagaagacacttaagaataggatccgttggaaggccctggatgattcaagtgttcaattagataatggtatttccgctttgcaggcagaagttgaaaatcttagtctgcaggagcaagcactagatgagcgtataagtgacatgcgtgaaaaactaagggggttaactgaagatgaaaataataaaaggtggctctatgtgactgaagacgacatcaagggattacccagctttcagaatgaaacactaattgcgattaaagcacctcatggtactacacttgaagtacccgatccagatgaggcgggtgattatctccaaaggagatatagaattgtattaagaagtacgatgggaccaatagatgtttacttagttagtcaatttgacgagaaatttgaggaactgggtggtgttgcgacacccgtcaagcattccaatgtgcccagacatcaacccgtggaagatttcaatacttatgctggacaaagtagcacaccaatggacgtggcgcatgatgtacagcatggccagaagattccccaggatcctagtgctttgcatgactttggagggatgacaaggattagtccttccgacgtccatacggattctgattactggctcctaacagagggggatgttagcatgactgatatgtggaaaacaggacaagaagtgcagtgggaccagatagatttcttgtcagaagatgttgtcacccctcgagcccataatcagcagccggtcacagttgacgggccacatatggaggttccaagcatggacccataatatcataatggcccaacaaaattgacatctggagcggtgagttttgaatgagggattctcgtgtgacagcaaatgcttattgcaacagaagggccagacggtttcatgagcgtatgtcatctggagtgtagtcagggcagagcagtccacaacttcagattggtgcacgcccggcacctctgttgtgaagactgacgagctcaactgactaagttaacagtctactgcctgattagtaagcgcagcactttagcttagcagacactgaggcgccagcttcttcgtgactttggtgctgtgcacttgctctcatattcaccaccgctccattcgcttaccaagctaacattatcataccagatcagtggacctccaccgaaaaatgctgcaaaatgtataaaacatcaggacaaaacagtgcacagtgcaaggggtgttggcgttacaggataagctatcgattgaaggcaggaaattctttgtacaattgtttgatgccccagaacagaacaaagcagagctgttcgcttgtagacaaatgtttctatgcatgtatttaaaaggagactcgattttttg

SEQ ID NO: 20330 - protein, 545 aa, Zea mays subsp. mays
  misc_feature (1)..(545): Ceres Seq. ID no. 12381522
FLLLSLSPPSSILFPPFHLPPSSLTPPTGHRPASSLAGPRRNPSSGECPGLPSRRSVPGARRPSARSREIRGRRRPGSRSHMSGVGSGRPPAAQKILQSLRPPLSFATAVAGRPFAAPDDYHRFPTPAAATAPAATSGGVGAGAPPRDTIEEGLVIRTPLKRKATSEENDAAAEPSDCIITSPMPTSVSGKTVKASKAKAKNSKTGPQTPTSNVGSPLNPPTPVGTCRYDSSLGLLTKKFINLLKQAPDGILDLNNAAETLEVQKRRIYDITNVLEGIGLIEKTLKNRIRWKALDDSSVQLDNGISALQAEVENLSLQEQALDERISDMREKLRGLTEDENNKRWLYVTEDDIKGLPSFQNETLIAIKAPHGTTLEVPDPDEAGDYLQRRYRIVLRSTMGPIDVYLVSQFDEKFEELGGVATPVKHSNVPRHQPVEDFNTYAGQSSTPMDVAHDVQHGQKIPQDPSALHDFGGMTRISPSDVHTDSDYWLLTEGDVSMTDMWKTGQEVQWDQIDFLSEDVVTPRAHNQQPVTVDGPHMEVPSMDP

SEQ ID NO: 20331 - protein, 464 aa, Zea mays subsp. mays
  misc_feature (1)..(464): Ceres Seq. ID no. 12381523
MSGVGSGRPPAAQKILQSLRPPLSFATAVAGRPFAAPDDYHRFPTPAAATAPAATSGGVGAGAPPRDTIEEGLVIRTPLKRKATSEENDAAAEPSDCIITSPMPTSVSGKTVKASKAKAKNSKTGPQTPTSNVGSPLNPPTPVGTCRYDSSLGLLTKKFINLLKQAPDGILDLNNAAETLEVQKRRIYDITNVLEGIGLIEKTLKNRIRWKALDDSSVQLDNGISALQAEVENLSLQEQALDERISDMREKLRGLTEDENNKRWLYVTEDDIKGLPSFQNETLIAIKAPHGTTLEVPDPDEAGDYLQRRYRIVLRSTMGPIDVYLVSQFDEKFEELGGVATPVKHSNVPRHQPVEDFNTYAGQSSTPMDVAHDVQHGQKIPQDPSALHDFGGMTRISPSDVHTDSDYWLLTEGDVSMTDMWKTGQEVQWDQIDFLSEDVVTPRAHNQQPVTVDGPHMEVPSMDP

SEQ ID NO: 20332 - protein, 362 aa, Zea mays subsp. mays
  misc_feature (1)..(362): Ceres Seq. ID no. 12381524
MPTSVSGKTVKASKAKAKNSKTGPQTPTSNVGSPLNPPTPVGTCRYDSSLGLLTKKFINLLKQAPDGILDLNNAAETLEVQKRRIYDITNVLEGIGLIEKTLKNRIRWKALDDSSVQLDNGISALQAEVENLSLQEQALDERISDMREKLRGLTEDENNKRWLYVTEDDIKGLPSFQNETLIAIKAPHGTTLEVPDPDEAGDYLQRRYRIVLRSTMGPIDVYLVSQFDEKFEELGGVATPVKHSNVPRHQPVEDFNTYAGQSSTPMDVAHDVQHGQKIPQDPSALHDFGGMTRISPSDVHTDSDYWLLTEGDVSMTDMWKTGQEVQWDQIDFLSEDVVTPRAHNQQPVTVDGPHMEVPSMDP

SEQ ID NO: 20333 - DNA, 1757 bp, Zea mays subsp. mays
  misc_feature (1)..(1757): Ceres Seq. ID no. 12381532
aaatcaatgcagatttgagcgtccttccaaggacgcccaaacgatctctgtaccgcacctgcacggctgcacctaccccacttggtggtcgtctgggtggcgacgccggcgatgatacgcgccgggtcgacgaccgacgtcatgatcgtgctgctgacggcgttcctgctggagtacctgcccaagatctaccacgccgtccgcgtcctgcgccggatgcagggcgtctccggctacctcttcggcaccatctggtgggggatcgcgctcaacctcatggcctacttcgtcgccgctcacgcggtgggcgcgtgttggtacctgctcggcgcgcagcgggccaccaagtgcctcagggagcagtgcgcccaggccgggagcgggtgcgcgccctgggcgctggcgttcgcggagccgctctactacggcgccaccgccagcagcgtgggggcgccggccaggctcgcctgggccggcaacgccacggctaggggcacgtgcctcgacagcgccgacaactaccagtacggggcctaccagtggactgtcatgctggtggccaaccccagcagggtcgagagggttctgctccccatcttctggggactaatgactctcagcacctttgggaatctggagagcacgacggagtggctggagatcgtgttcaacatcgtcaccatcaccggcgggctgattctcgtgacaatgctcatagggaacatcaaggtgttcctgaacgcgacgacgtcgaagaagcaggcgatgcacacgcggctgcgcagcgtggagctgtggatgaagcgcaaggacctgcccaggagctaccggcaccgggtgcgccagtacaagcggcagcggtgggcggccacgcgcggcgtcgacgagtgccgcatcgtccgtgacctgccggaggggctccgccgggacatcaagtaccacctctgcctcggcctcgtgcgccaggtgccgctgttccaacacatggacgacctggtgctcgagaacatctgcgacagggtcaagtccctcattttccccaaaggagaagttattgtcagagaaggagacccagtgaagaggatgctgttcatcgtgcgcggccacctgcagagcagccaggtgctccgcaacggcgccgagagctgctgcatgctggggccgggcaacttcagcggcgacgagctcctgtcgtggtgcctgcgccggccgttcctggagcggctgccggcgtcgtcgtccacgctggccacgctggagagcacggaggccttcgggctggacgccgcggacgtcaagtacgtcacgcagcacttccggtacaccttcaccaacgacaaggtgcggcgcagcgcgcgctactactcgcccgggtggcgcacgtgggcggccgtggcggtgcagctcgcgtggcgccgctacaagcaccgcaagacgctcgcgtcgctgtcgttcatccgcccgcgccgcccgctctcgcggtgctcgtcgctcggcgaggagaagctacgcctctataccgcgctgctcacgtcgcccaagcccaaccaagacgacctgctgtgactgagatgcatgcctgcagtctgaacaacgcgcgtctgttcagcggagttgaagcaaaatgcagcgagatggaagaagctggttctctatagtaaacgtgcatgtcagaaagaactcgagcattggagctccagcctctatgtgtacggtactggttgacaggttctctgtgacatgtgtctcgaattgct

SEQ ID NO: 20334 - protein, 484 aa, Zea mays subsp. mays
  misc_feature (1)..(484): Ceres Seq. ID no. 12381533
MIRAGSTTDVMIVLLTAFLLEYLPKIYHAVRVLRRMQGVSGYLFGTIWWGIALNLMAYFVAAHAVGACWYLLGAQRATKCLREQCAQAGSGCAPWALAFAEPLYYGATASSVGAPARLAWAGNATARGTCLDSADNYQYGAYQWTVMLVANPSRVERVLLPIFWGLMTLSTFGNLESTTEWLEIVFNIVTITGGLILVTMLIGNIKVFLNATTSKKQAMHTRLRSVELWMKRKDLPRSYRHRVRQYKRQRWAATRGVDECRIVRDLPEGLRRDIKYHLCLGLVRQVPLFQHMDDLVLENICDRVKSLIFPKGEVIVREGDPVKRMLFIVRGHLQSSQVLRNGAESCCMLGPGNFSGDELLSWCLRRPFLERLPASSSTLATLESTEAFGLDAADVKYVTQHFRYTFTNDKVRRSARYYSPGWRTWAAVAVQLAWRRYKHRKTLASLSFIRPRRPLSRCSSLGEEKLRLYTALLTSPKPNQDDLL

SEQ ID NO: 20335 - protein, 474 aa, Zea mays subsp. mays
  misc_feature (1)..(474): Ceres Seq. ID no. 12381534
MIVLLTAFLLEYLPKIYHAVRVLRRMQGVSGYLFGTIWWGIALNLMAYFVAAHAVGACWYLLGAQRATKCLREQCAQAGSGCAPWALAFAEPLYYGATASSVGAPARLAWAGNATARGTCLDSADNYQYGAYQWTVMLVANPSRVERVLLPIFWGLMTLSTFGNLESTTEWLEIVFNIVTITGGLILVTMLIGNIKVFLNATTSKKQAMHTRLRSVELWMKRKDLPRSYRHRVRQYKRQRWAATRGVDECRIVRDLPEGLRRDIKYHLCLGLVRQVPLFQHMDDLVLENICDRVKSLIFPKGEVIVREGDPVKRMLFIVRGHLQSSQVLRNGAESCCMLGPGNFSGDELLSWCLRRPFLERLPASSSTLATLESTEAFGLDAADVKYVTQHFRYTFTNDKVRRSARYYSPGWRTWAAVAVQLAWRRYKHRKTLASLSFIRPRRPLSRCSSLGEEKLRLYTALLTSPKPNQDDLL

SEQ ID NO: 20336 - protein, 449 aa, Zea mays subsp. mays
  misc_feature (1)..(449): Ceres Seq. ID no. 12381535
MQGVSGYLFGTIWWGIALNLMAYFVAAHAVGACWYLLGAQRATKCLREQCAQAGSGCAPWALAFAEPLYYGATASSVGAPARLAWAGNATARGTCLDSADNYQYGAYQWTVMLVANPSRVERVLLPIFWGLMTLSTFGNLESTTEWLEIVFNIVTITGGLILVTMLIGNIKVFLNATTSKKQAMHTRLRSVELWMKRKDLPRSYRHRVRQYKRQRWAATRGVDECRIVRDLPEGLRRDIKYHLCLGLVRQVPLFQHMDDLVLENICDRVKSLIFPKGEVIVREGDPVKRMLFIVRGHLQSSQVLRNGAESCCMLGPGNFSGDELLSWCLRRPFLERLPASSSTLATLESTEAFGLDAADVKYVTQHFRYTFTNDKVRRSARYYSPGWRTWAAVAVQLAWRRYKHRKTLASLSFIRPRRPLSRCSSLGEEKLRLYTALLTSPKPNQDDLL

SEQ ID NO: 20337 - DNA, 1211 bp, Zea mays subsp. mays
  misc_feature (1)..(1211): Ceres Seq. ID no. 12381600
aaaactgtcgtccccatccccttgctccagcgcgcggtgtgcacaggcagctaggctcatggcggccgctacccctagtccccacagcgcaagggtcgccgttgtcaccggcgggaacaaagggatcgggctggaggtgtgcaggcagctggccagcaacggcatcaccgtcgtcctaacagccagagacgagaagcggggcgccgcagccgtagaggagctcgcggacgcgggcctctccggcgtcgttttccatcagctggaggtcaccgacgcccagagcattgctagattggccggtttcctgaaggcgtggtttgggaagctagacatcctggtaaacaatgccgctatcggtggggttcagtcacttcccgttgaaaatgttggcgaaaagatcaagggcatggacgcgtcccagatggcggagctgatgtggaagagctgccgagagacaaacgacgccgcgaaggcaggcgtccagacgaactactacggggtgaagaacgtgaccgaggcgctgctgcccctgctcctgcaggcctcctcctccggcggaggaagggtcgtcaacgtctcctccgacttcgggctgctacgctatctcaggaacgaggaggtgaagcgtgagctggacgacattgagggcctgacggaggagaggctggacgagctgctgagcacgttcctccgggacttcgaggccggcgcgctggagtcccgcgggtggccgacggagttcgccgcgtacaaggtggccaaggccgccctgaactcctactcgagggtcctggcgaggcggcaccccgagctgcgcgtcaactgcgcgcacccgggctacgtcaagaccgacatgaccaggcagacgggcctgctgacgcccgcgcagggcgcggccaacgtcgtcaaggtggcgctgctcccggaaggcggccccaccggcgctttcttcgcgctaggcaaggaggcgccgttcgtgtgacgctgccgtactgggctggcggtggtgggttcacggtccggcgctaatgcgccgactctccgacttgcctgacgcctgctatctactacctctctctctgtgctgcgcagcgtagtttgctggtttgggacggcgaataaagaaaggatcgctgctgcctcttagttagttgggttctgttagtactaagcttcggtaataaaataaaatccccccagatagatatggc

SEQ ID NO: 20338 - protein, 326 aa, Zea mays subsp. mays
  misc_feature (1)..(326): Ceres Seq. ID no. 12381601
KLSSPSPCSSARCAQAARLMAAATPSPHSARVAVVTGGNKGIGLEVCRQLASNGITVVLTARDEKRGAAAVEELADAGLSGVVFHQLEVTDAQSIARLAGFLKAWFGKLDILVNNAAIGGVQSLPVENVGEKIKGMDASQMAELMWKSCRETNDAAKAGVQTNYYGVKNVTEALLPLLLQASSSGGGRVVNVSSDFGLLRYLRNEEVKRELDDIEGLTEERLDELLSTFLRDFEAGALESRGWPTEFAAYKVAKAALNSYSRVLARRHPELRVNCAHPGYVKTDMTRQTGLLTPAQGAANVVKVALLPEGGPTGAFFALGKEAPFV

SEQ ID NO: 20339 - protein, 307 aa, Zea mays subsp. mays
  misc_feature (1)..(307): Ceres Seq. ID no. 12381602
MAAATPSPHSARVAVVTGGNKGIGLEVCRQLASNGITVVLTARDEKRGAAAVEELADAGLSGVVFHQLEVTDAQSIARLAGFLKAWFGKLDILVNNAAIGGVQSLPVENVGEKIKGMDASQMAELMWKSCRETNDAAKAGVQTNYYGVKNVTEALLPLLLQASSSGGGRVVNVSSDFGLLRYLRNEEVKRELDDIEGLTEERLDELLSTFLRDFEAGALESRGWPTEFAAYKVAKAALNSYSRVLARRHPELRVNCAHPGYVKTDMTRQTGLLTPAQGAANVVKVALLPEGGPTGAFFALGKEAPFV

SEQ ID NO: 20340 - protein, 191 aa, Zea mays subsp. mays
  misc_feature (1)..(191): Ceres Seq. ID no. 12381603
MDASQMAELMWKSCRETNDAAKAGVQTNYYGVKNVTEALLPLLLQASSSGGGRVVNVSSDFGLLRYLRNEEVKRELDDIEGLTEERLDELLSTFLRDFEAGALESRGWPTEFAAYKVAKAALNSYSRVLARRHPELRVNCAHPGYVKTDMTRQTGLLTPAQGAANVVKVALLPEGGPTGAFFALGKEAPFV

SEQ ID NO: 20341 - DNA, 1596 bp, Zea mays subsp. mays
  misc_feature (1)..(1596): Ceres Seq. ID no. 12381657
gcacgagaccattacctagaacatcctaatcgaaaagatgagagagatctttgatgcactgaagttgttaaggatcgtggttgacatcccgttctggaaaaagaatctctgtagagaagtgtagcttcagccgctttgatgactagttcaagaaggatgtcacggggtttcacaatgcaagcggcagccgcaagtggcctactggagcttgtgtgcttcggactggcttgaggaattccgaatcaaaggggccccggcgacggctagcgtgctgcgtgccatgacgagtcgatgaggtcccagttgttgattggccttggatgacgacgttgggcaactggcacggtgatggatgcgtccatgactgcaatgagcactgaatggaggtgataacatctatggtgctgattcaactgatgcagccaagtctatggatgcagcaattgctccagccattgacatgaaactgccttgggctgctgtgatcgggaaccatgaccaagagggtacgctatcgcgtgagggtgtgatgcgtcaccttgtgggcatgaaaaacacccttgcaagcttcaatccggaaggaattgaaattgatggttacggaaattacaatttggaagtttccggggttgaagggacatccatggatgaaaaatcagtgctcaacctgtatttcctggacagcggtgactattccactgtgccgtcaatcaatggttatggttggatcaaggcttcacagcaagtctggttccaacaaacatcttcaagtctacaggcaaagtatatgaataagaacccgaaacagaaggaaccagcacctggccttgtgttcttccacattccactaccagagttcagcagttttacggcatccaatttcacaggagtaaagcaggagggtatcagctcagcatcaattaactctgggttctttgcctccatggtggaggctggagatgtgagagctgcctttgtgggacatgatcacattaatgacttctgtgggaagctcagtggtattcagctctgctatgctggtggatttggttaccatgcctatgggaaagctgggtggtcaagaagagcgagggtactgtctgtgcaacttgagaaaacagacagcggtgaatggcgaggtgtcaagtccatcaagacatggaagaggcttgatgataaacatctgagcacaattgactctgaggttctctggaacagaggctctaatgggaggcgcaggaaaaatcctgatggtagttaacttttgatgcagacaggaatggtgctccataagggatctctacatcggtgtgtattgttggatggccagtttactatagaatcagaaatgcagaagtgtgtacatgggggagaaggtctatacagacacatacacgcaggtttctgctgttgcatttttccatgttattagaaaataagtaatcaaaattcagtgccgttgtcaattattgcaggtggtctcatagactagtatatagtgtggtcaaaggaaaacgagaatgcaatgtcattgtagtccatctctcgtgtattgttaaactcggtcggaaagggaaaaactgttctcccggtatt

SEQ ID NO: 20342 - protein, 276 aa, Zea mays subsp. mays
  misc_feature (1)..(276): Ceres Seq. ID no. 12381658
MDAAIAPAIDMKLPWAAVIGNHDQEGTLSREGVMRHLVGMKNTLASFNPEGIEIDGYGNYNLEVSGVEGTSMDEKSVLNLYFLDSGDYSTVPSINGYGWIKASQQVWFQQTSSSLQAKYMNKNPKQKEPAPGLVFFHIPLPEFSSFTASNFTGVKQEGISSASINSGFFASMVEAGDVRAAFVGHDHINDFCGKLSGIQLCYAGGFGYHAYGKAGWSRRARVLSVQLEKTDSGEWRGVKSIKTWKRLDDKHLSTIDSEVLWNRGSNGRRRKNPDGS

SEQ ID NO: 20343 - protein, 266 aa, Zea mays subsp. mays
  misc_feature (1)..(266): Ceres Seq. ID no. 12381659
MKLPWAAVIGNHDQEGTLSREGVMRHLVGMKNTLASFNPEGIEIDGYGNYNLEVSGVEGTSMDEKSVLNLYFLDSGDYSTVPSINGYGWIKASQQVWFQQTSSSLQAKYMNKNPKQKEPAPGLVFFHIPLPEFSSFTASNFTGVKQEGISSASINSGFFASMVEAGDVRAAFVGHDHINDFCGKLSGIQLCYAGGFGYHAYGKAGWSRRARVLSVQLEKTDSGEWRGVKSIKTWKRLDDKHLSTIDSEVLWNRGSNGRRRKNPDGS

SEQ ID NO: 20344 - protein, 243 aa, Zea mays subsp. mays
  misc_feature (1)..(243): Ceres Seq. ID no. 12381660
MRHLVGMKNTLASFNPEGIEIDGYGNYNLEVSGVEGTSMDEKSVLNLYFLDSGDYSTVPSINGYGWIKASQQVWFQQTSSSLQAKYMNKNPKQKEPAPGLVFFHIPLPEFSSFTASNFTGVKQEGISSASINSGFFASMVEAGDVRAAFVGHDHINDFCGKLSGIQLCYAGGFGYHAYGKAGWSRRARVLSVQLEKTDSGEWRGVKSIKTWKRLDDKHLSTIDSEVLWNRGSNGRRRKNPDGS

SEQ ID NO: 20345 - DNA, 1354 bp, Zea mays subsp. mays
  misc_feature (1)..(1354): Ceres Seq. ID no. 12381669
gcacgagaccattacctagaacatcctaatcgaaaacaataaaggacttcccctcaaaatccaggtctggtgttgatcagcattcatatctacaggttgacgctaatggaggagtttcattctctgccatacgtagacctcgtcctcttcttgaagctgatttgcctggatctggtgatggtttttatgatcataagtcatccaagaggtcactggagaaagaaccaatgcttgcagccagaataaccgttgaagattctcttcgtcttcttctggttgttgatgatattgatcggtttttacagtctagccagccacaggacagcagtttccaactgaagcgaaggcgagaggtcctgcttgaaggcttagctacatcactccagcttgttgacccttttggccccaacaaacatggccattcgggtgggttggcccctaaggatgacctaatttttcttcgtattatttctctgcccaaaggacgtaagcttttggcacgctatcttcgacttcttttctctggaagtgagctgacccgaatagtctgcatggctgttttccgacaccttaggagcttgtttggtggcttaccgtcagactatagtgctgcagaaacaaccatcgttcttgccaaggctgtttcctcttgtgtgcgccatatggaactcagtgctctcagtgcctgtctcgcagctgttgtctgttcttcgcagcagccacctctccggccactcggtagtgcctctggtgatggggcctctctgataattaaatctgtgctggatagagcgaccgagctactggcggatccccattccgcagccaactacagcagatcagcacgttcgctttggcatgcgtcatttgatgctttctttggactgctgacgaagtactgtgacagcaagtatgaaagtatcgtgcagaggtttgccatgcagggatccaactccatgggaggacctgaaaccaccaaagcagtcagcagggagatgcccgttgagctgttacgtgcgagtcttcctcatactaatgagcagcatcgtcagacactgctagattttgctcggaaatctacgcatctgcctggtttcagccctactgctaaccgtggacttgtcaattctgaatcagttccaggttaacgccactgaagaggcctgatggtcgtctgttttgatttatatatggcacgtaaggtgtgagcttggagaagttccattggctcagcgaagctggcattcaggatatgactgtgtaggatgttatttatttatatatagaaaaccaactttatgtatgtatcctgctgtaactgtgtagtgctgaacagaacatctgttggatttgg

SEQ ID NO: 20346 - protein, 306 aa, Zea mays subsp. mays
  misc_feature (1)..(306): Ceres Seq. ID no. 12381670
MLAARITVEDSLRLLLVVDDIDRFLQSSQPQDSSFQLKRRREVLLEGLATSLQLVDPFGPNKHGHSGGLAPKDDLIFLRIISLPKGRKLLARYLRLLFSGSELTRIVCMAVFRHLRSLFGGLPSDYSAAETTIVLAKAVSSCVRHMELSALSACLAAVVCSSQQPPLRPLGSASGDGASLIIKSVLDRATELLADPHSAANYSRSARSLWHASFDAFFGLLTKYCDSKYESIVQRFAMQGSNSMGGPETTKAVSREMPVELLRASLPHTNEQHRQTLLDFARKSTHLPGFSPTANRGLVNSESVPG

SEQ ID NO: 20347 - protein, 198 aa, Zea mays subsp. mays
  misc_feature (1)..(198): Ceres Seq. ID no. 12381671
MAVFRHLRSLFGGLPSDYSAAETTIVLAKAVSSCVRHMELSALSACLAAVVCSSQQPPLRPLGSASGDGASLIIKSVLDRATELLADPHSAANYSRSARSLWHASFDAFFGLLTKYCDSKYESIVQRFAMQGSNSMGGPETTKAVSREMPVELLRASLPHTNEQHRQTLLDFARKSTHLPGFSPTANRGLVNSESVPG

SEQ ID NO: 20348 - protein, 161 aa, Zea mays subsp. mays
  misc_feature (1)..(161): Ceres Seq. ID no. 12381672
MELSALSACLAAVVCSSQQPPLRPLGSASGDGASLIIKSVLDRATELLADPHSAANYSRSARSLWHASFDAFFGLLTKYCDSKYESIVQRFAMQGSNSMGGPETTKAVSREMPVELLRASLPHTNEQHRQTLLDFARKSTHLPGFSPTANRGLVNSESVPG

SEQ ID NO: 20349 - DNA, 1705 bp, Zea mays subsp. mays
  misc_feature (1)..(1705): Ceres Seq. ID no. 12381724
gcacgagaccattacctagaacatcctaatcgaaaaaagttgcaaccggagtccggagcatagcaacctcgctgggctcgggcccgcggcgccgggatatactccagggaagtcgagcaaggagagtgtggactgtggacgacaggggtaaagatcgagtgagcatcgctgcaccatgcgcccttctctctgctgtgcacctctttttcttctgctactattacatttggcatttgctagacctctctttcctctaccgagtaagacaaagaatgaagagaagaagcccatacagacgtttcggccatataacattgctcatcgtggatcaaatggggaaattcccgaggaaacagctgctgcatacatgagagctattgaagaaggggccgattttatagagtctgacatccttgctagcaaagatggggccttgatttgttttcatgatgtaacacttgatgatacaactgatgttgccaagcgtaaggaatttgccaatcgaagaagaacctatgaagtggagtggtttaatgttactggatggtttgtagtggacttcacactggaggaacttaaaacacttagagtgaagcagagatactcgtttagagatcaacaatacaatggtatgttttcaatcatcacgtttgaagaattcatttcaattgccctagatgcagacagaactgtcggcatatatcccgagattaaagatccagtttttatcaacaagcatgtcaagtgggctgatgggaagaagtttgaggacaaatttgtggataccttgcttaaatatggatacaaaggtcaatatatgtcagagaattggctgaagcagccattgtttatacaatcctttgctcccacctccattgtacatgtatcagattttattgactctcccaaggtatttttgattgatgatatcagtgtgagaacacaagacacgaaccagtcatactgggaaattacttcagatgaataccttgcatacattagtaaatatgtcgttggccttggtccatggaaggacactattgttccagcttcaggaaactacttgatgccacctagtgatcttgtcgcacgggcacatgctcataatctccaggtacatccatacacgtacaggaacgagaaccagttcctgcacttcaacttttttcaagatccctacaatgaatacgacttctggataaacactgtgggggttgatggactgtttacagatttcaccggaacccttcacaggtaccaagaattgacatccccacaccggaaggatgagactgcaaatagcctcctagtaaaaattagccaaatgatctcagcatatgaaggtctctgatcagcacgacgttgctgaaaattgtttgtgcttttgttaatcgatctgcaagagcacacgatccattcatcacggacggactgcgactttgcaaggtgaaataaacgagttgtttctggttgggacttgttagcacgagccgtactctccattaaagctcttaaaccctgtgagaaatttctagtgtgggaatacttgttttcgggaaggtactgtaatgactagttcacgatagaaaccgtatcatggtttagcgtgccaggatggacgagttggtctcgggtctttgcacagttggcctacaattgtacttgccggagtgttgaaatttctagtgtgggaataatcgttttc

SEQ ID NO: 20350 - protein, 391 aa, Zea mays subsp. mays
  misc_feature (1)..(391): Ceres Seq. ID no. 12381725
MRPSLCCAPLFLLLLLHLAFARPLFPLPSKTKNEEKKPIQTFRPYNIAHRGSNGEIPEETAAAYMRAIEEGADFIESDILASKDGALICFHDVTLDDTTDVAKRKEFANRRRTYEVEWFNVTGWFVVDFTLEELKTLRVKQRYSFRDQQYNGMFSIITFEEFISIALDADRTVGIYPEIKDPVFINKHVKWADGKKFEDKFVDTLLKYGYKGQYMSENWLKQPLFIQSFAPTSIVHVSDFIDSPKVFLIDDISVRTQDTNQSYWEITSDEYLAYISKYVVGLGPWKDTIVPASGNYLMPPSDLVARAHAHNLQVHPYTYRNENQFLHFNFFQDPYNEYDFWINTVGVDGLFTDFTGTLHRYQELTSPHRKDETANSLLVKISQMISAYEGL

SEQ ID NO: 20351 - protein, 327 aa, Zea mays subsp. mays
  misc_feature (1)..(327): Ceres Seq. ID no. 12381726
MRAIEEGADFIESDILASKDGALICFHDVTLDDTTDVAKRKEFANRRRTYEVEWFNVTGWFVVDFTLEELKTLRVKQRYSFRDQQYNGMFSIITFEEFISIALDADRTVGIYPEIKDPVFINKHVKWADGKKFEDKFVDTLLKYGYKGQYMSENWLKQPLFIQSFAPTSIVHVSDFIDSPKVFLIDDISVRTQDTNQSYWEITSDEYLAYISKYVVGLGPWKDTIVPASGNYLMPPSDLVARAHAHNLQVHPYTYRNENQFLHFNFFQDPYNEYDFWINTVGVDGLFTDFTGTLHRYQELTSPHRKDETANSLLVKISQMISAYEGL

SEQ ID NO: 20352 - protein, 239 aa, Zea mays subsp. mays
  misc_feature (1)..(239): Ceres Seq. ID no. 12381727
MFSIITFEEFISIALDADRTVGIYPEIKDPVFINKHVKWADGKKFEDKFVDTLLKYGYKGQYMSENWLKQPLFIQSFAPTSIVHVSDFIDSPKVFLIDDISVRTQDTNQSYWEITSDEYLAYISKYVVGLGPWKDTIVPASGNYLMPPSDLVARAHAHNLQVHPYTYRNENQFLHFNFFQDPYNEYDFWINTVGVDGLFTDFTGTLHRYQELTSPHRKDETANSLLVKISQMISAYEGL

SEQ ID NO: 20353 - DNA, 1453 bp, Zea mays subsp. mays
  misc_feature (1)..(1453): Ceres Seq. ID no. 12381732
gcacgagaccattacctagaacatcctaatcgaaaaattactgcacttgctctccggctccgggcagccacgagtatcagccccggcgagcggcggcgatgcagaacctgctgtccggcgcgtcccacgagacgctcccggacagcttcatcttcccggccgagcagcgcccgccggcgtcggcagccgccgtcgcgctccccgtcatcgacctgtccgggccccgcgacgaggtccggcgagccgttcttgaagctggcaaggagctaggcttcttccaggtggtgaaccacggcgtgccggagcaggtggtgcgggacatggaggcgtgctgcgaggagttcttccgcctccccgcggaggacaaggcggccttctactcggaggacacaagcaagcccaaccgcctcttcaccagcaccacctacggcaccggcggcgagcgctactggcgggactgcctccgcctggcctgcggcttccccgtcgccgccgacgccagggacgcctggcccgacaagcccgacggcctcagggaggcggcggagaggttcgtcgcgtcgacgaggcgcctgaacctggagctgctgcggctgctgtgcgagggcgtgggcctccgcgcggactacttcgagggggacctcagcgccggcgacgtggtcgtgaatgtcaaccactacccgccgtgcccggacccggcgcgcacgctgggcctgccgccgcactgcgaccgcaacctcatcacgctgctgctccagggcagcgtcgccggcctccaggtgtcctaccgcggcgactggatccgcgtccagcccgtgcccggcgccttcgtcgtcaactttggccaccagctcgagatcgccacgaacgggctgctgaagagcatcgagcaccgcgcggtggccagcgcggcggtgccgcgcacctcggtggcgacgttcatcatgcccaccgacgactgccttgtcgcccccgccgcggagctcgccggcggcggagacaagccgccgccgcggtaccgcgccgtcacgttccgggatttcatgaaggtgtacaagaccgtcggcgcgcgcagggagagcgtcgagaaggccttcaagatctgatggacgcgtatacatgctcgacatgcgttctgctcggcagagatctggtagttgttatctgcactgaataaaaggatgggagaaaaaacagaaaacgtcgcaagcagttcgcggcacaaactctctgtctctttcgttccaatttgcaactgtgtgtgtgagccgatgatagtgagtagagagcttcgttcccaactccggtgagtgccagaagagccaacaagtcctgcacgaacaccagtcgtcaccggagagcttcctgccggtgtcggcaaggatgcaaaggtgccaagagaatcgctttgtgtgtgaccttgtgccccgaaataaagggattgttcttgttt

SEQ ID NO: 20354 - protein, 335 aa, Zea mays subsp. mays
  misc_feature (1)..(335): Ceres Seq. ID no. 12381733
MQNLLSGASHETLPDSFIFPAEQRPPASAAAVALPVIDLSGPRDEVRRAVLEAGKELGFFQVVNHGVPEQVVRDMEACCEEFFRLPAEDKAAFYSEDTSKPNRLFTSTTYGTGGERYWRDCLRLACGFPVAADARDAWPDKPDGLREAAERFVASTRRLNLELLRLLCEGVGLRADYFEGDLSAGDVVVNVNHYPPCPDPARTLGLPPHCDRNLITLLLQGSVAGLQVSYRGDWIRVQPVPGAFVVNFGHQLEIATNGLLKSIEHRAVASAAVPRTSVATFIMPTDDCLVAPAAELAGGGDKPPPRYRAVTFRDFMKVYKTVGARRESVEKAFKI

SEQ ID NO: 20355 - protein, 261 aa, Zea mays subsp. mays
  misc_feature (1)..(261): Ceres Seq. ID no. 12381734
MEACCEEFFRLPAEDKAAFYSEDTSKPNRLFTSTTYGTGGERYWRDCLRLACGFPVAADARDAWPDKPDGLREAAERFVASTRRLNLELLRLLCEGVGLRADYFEGDLSAGDVVVNVNHYPPCPDPARTLGLPPHCDRNLITLLLQGSVAGLQVSYRGDWIRVQPVPGAFVVNFGHQLEIATNGLLKSIEHRAVASAAVPRTSVATFIMPTDDCLVAPAAELAGGGDKPPPRYRAVTFRDFMKVYKTVGARRESVEKAFKI

SEQ ID NO: 20356 - DNA, 1372 bp, Zea mays subsp. mays
  misc_feature (1)..(1372): Ceres Seq. ID no. 12381735
gcacgagaccattacctagaacatcctaatcaaaaaaccgacgagcaccccctgagcctccgccgtcgagttcgagacgagacggtaccactatggagagtgagcaccacctgttcgagatcgcggccgcccggctcgagcgtagttctgccttcttggacgaggactactcttcatggtctccctgcatacagggctaccactggcgatgcgtctgctccgctgatcccgccgctggtacggcgtccttcaccgtctctcttccctacagcagcacccgcgagcccctcaacgcctcgttcaagctcagcctgctggaccgaggaggcctgccggtgccgtccaggacccgagccaccttgttccagaactgcctgatccagcagatgtggcagttggagtgtccgggcttcctcaccagggacgacctggagcggcaggagtactacctcgacaacgacggcggccgctgcttccacgtccgctgtgacatcgccatcaagcccttcgccgcggccacggccggcgacggcgacggcgacgtcgcggtgcccccgtccgacgacctccaccggcacctcggcgacctgctggcgcgcaaggacggcgcggacgtcacgttccagctggtcgacgccggcgagacgttctccgcgcaccggtgcgtgctcgcggcgcggtcgcccgtgttcagagcgcagctgttcggcgagatgatggagagcaacaagggcaccggcgtcgtcataccggttgaggacatggaagcccaggtgttcagcgccctgctggccttcatctacaccgactcgttgccgccggagaccgacagcgacgacgacgacgacgaagaagccatggtgcactatcagcttctgcttgccgccgcggacaggtacggcgtcgacaggatgaagctggtttgccaggagaagctgtgcaagcacatacgcgcggactcggtggcgacgatgctggttttagctgaccgacaccattgccctgcgctcaaggaggcgtgctttcgtttcctctcttctagcgccaatcttgcctccttcactgagacgacggatggcttcgaggtgctcaacgccagctgccctgctgttctcaaggagctactggcccaagcttgccaccgttttgatcttctgagtaaccatggccgacggtttccagtttcatacaatgcaggttgctctgctcgtttctcaaaagcgatgcacttctttgatgaattagtacgtgcaggttttgaacgcattttccggtggtctgcgaaaacgaaaaatcgctcgaaattcgttgaatttcgtaaatctcgagcactttgtaacttcaaatttgaaaaccccgattttcattgctc

SEQ ID NO: 20357 - protein, 426 aa, Zea mays subsp. mays
  misc_feature (1)..(426): Ceres Seq. ID no. 12381736
MESEHHLFEIAAARLERSSAFLDEDYSSWSPCIQGYHWRCVCSADPAAGTASFTVSLPYSSTREPLNASFKLSLLDRGGLPVPSRTRATLFQNCLIQQMWQLECPGFLTRDDLERQEYYLDNDGGRCFHVRCDIAIKPFAAATAGDGDGDVAVPPSDDLHRHLGDLLARKDGADVTFQLVDAGETFSAHRCVLAARSPVFRAQLFGEMMESNKGTGVVIPVEDMEAQVFSALLAFIYTDSLPPETDSDDDDDEEAMVHYQLLLAAADRYGVDRMKLVCQEKLCKHIRADSVATMLVLADRHHCPALKEACFRFLSSSANLASFTETTDGFEVLNASCPAVLKELLAQACHRFDLLSNHGRRFPVSYNAGCSARFSKAMHFFDELVRAGFERIFRWSAKTKNRSKFVEFRKSRALCNFKFENPDFHC

SEQ ID NO: 20358 - protein, 328 aa, Zea mays subsp. mays
  misc_feature (1)..(328): Ceres Seq. ID no. 12381737
MWQLECPGFLTRDDLERQEYYLDNDGGRCFHVRCDIAIKPFAAATAGDGDGDVAVPPSDDLHRHLGDLLARKDGADVTFQLVDAGETFSAHRCVLAARSPVFRAQLFGEMMESNKGTGVVIPVEDMEAQVFSALLAFIYTDSLPPETDSDDDDDEEAMVHYQLLLAAADRYGVDRMKLVCQEKLCKHIRADSVATMLVLADRHHCPALKEACFRFLSSSANLASFTETTDGFEVLNASCPAVLKELLAQACHRFDLLSNHGRRFPVSYNAGCSARFSKAMHFFDELVRAGFERIFRWSAKTKNRSKFVEFRKSRALCNFKFENPDFHC

SEQ ID NO: 20359 - protein, 219 aa, Zea mays subsp. mays
  misc_feature (1)..(219): Ceres Seq. ID no. 12381738
MMESNKGTGVVIPVEDMEAQVFSALLAFIYTDSLPPETDSDDDDDEEAMVHYQLLLAAADRYGVDRMKLVCQEKLCKHIRADSVATMLVLADRHHCPALKEACFRFLSSSANLASFTETTDGFEVLNASCPAVLKELLAQACHRFDLLSNHGRRFPVSYNAGCSARFSKAMHFFDELVRAGFERIFRWSAKTKNRSKFVEFRKSRALCNFKFENPDFHC

SEQ ID NO: 20360 - DNA, 1729 bp, Zea mays subsp. mays
  misc_feature (1)..(1729): Ceres Seq. ID no. 12381747
gcacgagaccattacctagaacatcctaatcgaaaagattgattgattgggttcctggcgttagtttgcgcgattcgggcagaggagtagacggttccagcaaatttggtccaacaattctttgtttggccgcttgggctccggtctctcgattcttcgtagcttggtgggagggcgccggatccagcggccatcatggttgtcgacacggtcagcgcgagcacctccataatagccccccacctgttcgaccacaggtccaggggcgccggcgcttcccaccaccacctccgccggacgttccatgtcgtcgcctgccgacccctgcccaccgccttcgccggccgccgcctcgtggcccgggtcaccaggcagccgtcgtcgcgcctcgccgattggccggtcagggcgctggctatgggggtcacgaaggaggtcagggccagccctcgcagggagtaccgggggatccccggggatggtggagacatgggggacgttggggtcaccagccccacgccgtcatggcctccgcggaacagggcagatgaccccaagctgcataacccgctgctccgcctcgagcgcatgggctgcgggtggctcggcgtcatcttcgagtgggagggggtcatcgttgaggatgatgccgaattggaaaggcaggcgtggttgaccctggcacaggaggagggcaagtcgccgcctcccgcttttctgttgcggagagtcgaagggatgaagaacgagcaggcgatttctgaggttctctgctggtctcgggatccctccgagcttaggagattggccctgaggaaggacgagatccacagcagccttcgaggtggctcctaccaccagatgaggaacggttccagggagttcatgagcacgctcgccaattacaagatccctatcgctgtggtgaccacacgcccacggaaggttattgaggaagccattgaagctgtaggcgtgcgcagcttcttcgatgcggttgtgacagcagaagacgtgtaccggggcaagcctgacccagaaatgttcctgtacgctgctcagcttctcagtttcatcccggagaggtgcatcgtgtttgggaactccaattcggcggtggaagctgcgcatgacgcacgtatgaagtgtgtcgcggtcgcaagcaagcacaagatctacgagcttagcgctgcagaccttgtggtgaagcaactagacgagctatccgtcgttgacttgaagaaccttgctgatattgagtccccggagtttggcatggaacctgaaccagagatggaggaggaggaagtgcccccaccatcgacgtctgtgggtatagatgatctattctggtaagagaccaaattgtacatttgattgattcctctccagaacacagatgtattgttgtcaactgtcatagtgatcagaaagaagggcttatcatccttctgtaatcagtagaatgtgatatgtaaaaaatgttgtctagagctcacacactgtatatacatactcagaaagaaagctgggaactgaatatatgaatcagaacatttgaatctgcagttcctgaaacaatgtaacaccacaaggtttctgtcgccgaatcagtattccggatgctgattatattgttctctgcagtcttcttgccaaaaaaaaaaaaaaaaaaaaaaaaaaaaaaagaaaaaaaaaaaaaaaaaacggcacgagaagccggcacgag

SEQ ID NO: 20361 - protein, 386 aa, Zea mays subsp. mays
  misc_feature (1)..(386): Ceres Seq. ID no. 12381748
MVVDTVSASTSIIAPHLFDHRSRGAGASHHHLRRTFHVVACRPLPTAFAGRRLVARVTRQPSSRLADWPVRALAMGVTKEVRASPRREYRGIPGDGGDMGDVGVTSPTPSWPPRNRADDPKLHNPLLRLERMGCGWLGVIFEWEGVIVEDDAELERQAWLTLAQEEGKSPPPAFLLRRVEGMKNEQAISEVLCWSRDPSELRRLALRKDEIHSSLRGGSYHQMRNGSREFMSTLANYKIPIAVVTTRPRKVIEEAIEAVGVRSFFDAVVTAEDVYRGKPDPEMFLYAAQLLSFIPERCIVFGNSNSAVEAAHDARMKCVAVASKHKIYELSAADLVVKQLDELSVVDLKNLADIESPEFGMEPEPEMEEEEVPPPSTSVGIDDLFW

SEQ ID NO: 20362 - protein, 312 aa, Zea mays subsp. mays
  misc_feature (1)..(312): Ceres Seq. ID no. 12381749
MGVTKEVRASPRREYRGIPGDGGDMGDVGVTSPTPSWPPRNRADDPKLHNPLLRLERMGCGWLGVIFEWEGVIVEDDAELERQAWLTLAQEEGKSPPPAFLLRRVEGMKNEQAISEVLCWSRDPSELRRLALRKDEIHSSLRGGSYHQMRNGSREFMSTLANYKIPIAVVTTRPRKVIEEAIEAVGVRSFFDAVVTAEDVYRGKPDPEMFLYAAQLLSFIPERCIVFGNSNSAVEAAHDARMKCVAVASKHKIYELSAADLVVKQLDELSVVDLKNLADIESPEFGMEPEPEMEEEEVPPPSTSVGIDDLFW

SEQ ID NO: 20363 - protein, 288 aa, Zea mays subsp. mays
  misc_feature (1)..(288): Ceres Seq. ID no. 12381750
MGDVGVTSPTPSWPPRNRADDPKLHNPLLRLERMGCGWLGVIFEWEGVIVEDDAELERQAWLTLAQEEGKSPPPAFLLRRVEGMKNEQAISEVLCWSRDPSELRRLALRKDEIHSSLRGGSYHQMRNGSREFMSTLANYKIPIAVVTTRPRKVIEEAIEAVGVRSFFDAVVTAEDVYRGKPDPEMFLYAAQLLSFIPERCIVFGNSNSAVEAAHDARMKCVAVASKHKIYELSAADLVVKQLDELSVVDLKNLADIESPEFGMEPEPEMEEEEVPPPSTSVGIDDLFW

SEQ ID NO: 20364 - DNA, 1795 bp, Zea mays subsp. mays
  misc_feature (1)..(1795): Ceres Seq. ID no. 12381755
gcacgagaccattacctagaacatcctaatcaaaactcccgatctcaccaccgcctcgcgatctcccccccgccgccatggctttctccgcgcggaggagcctcgccaccagcctgtcacaccacttctccggccgcctctacccctctatctcgcacctcgttccttcccaccacgagcactccgaccccgctccctccccctcccccgtgccgcagcctcggccccaatcgtcgcagcaatccgcaccaccgttcccctccgcgcttcctcggccgtcgagatcccgggccctggcccccttccccctccctttcgctctccacctcgcggcccaccgctactcctccgccccggcccccgactcggaggtcttggcggactccgccgccgcggcccctgtgtcggagctgctctccgatggggtggcgtcagctgccgcgtccgtctccacgccgccgttgccgtaccccggggaggtcgctgccgccgcggccgaatcatttccacccgtcgcggcgctgcagcacctgctggacgccgttcaatccttcaccggcctcaactggtgggcgactattgcgctgacgacgttgatgatccggctggcgactgtcccgctgctgatcaaccagatgaagtccatgatgaagttaaatgagatgagaccagaaattgaagccatcaatgaagagatgcgaaattcaactgatccaaggtcaatggaagtggggaaacagaaactgggggagctattccttagacatggagtgactccattgacaccattgaagggtctattcatacagggacctatatttatgagctttttctttgctatatcaaatatggttgagaaagtcccttctatgaaaggaggtggtgtgtattggtttactgatttgacaactcctgataatttattaatcctcccagtgttaacatcactgacctttttggctacagtagagcttaatatgcaagatggcatggaagggaatcatatgttaaaaccaatgaaaaagttctcccggttttttggagttttgtttgttccatttacaataggctttccaaaggcaattttcttttactgggtcacatcaaactttttctcacttgtttacggcgctgttctccggaatccggctgtaagacttttcttaaatcttcctcgcttggaatctcagcccacaactgcagaagtccagcccttaaacctatcgggcggaccagagccaagtcctggagtcgattctcctatcacagataaggaaactgagcagtcgagttctgtgctaagtcctggagtcgattctcctatagcagacaaggaatgtgagcagtcgagtcctgcggtgagtcctgaagtcaattctcctatggtggacaaggaaagtgagcagtcgagttctgtgttatgtgaccgtatcagagatcttgagatcagggctaaagcaacgggtgaatctcgagagtaaattcgtgatttgtccacatggaagtaagcaagcacatctcctttgggggtttctggtacttttttttttttgttgggagcaaaggatacccagtagcgaggtataattttgaagagtccgcggtttttcgaaatataacggcccaccatgtttccgtgaataaattggtgtagtatattggcttgtaaaatcgttgcacggtatgatataaccttgtactactagctaacattagccatgatgttccttggattaagcatattgttgctattgagcggcacacgacatgtttgtctaatatttgcttcatgcgg

SEQ ID NO: 20365 - protein, 467 aa, Zea mays subsp. mays
  misc_feature (1)..(467): Ceres Seq. ID no. 12381756
MAFSARRSLATSLSHHFSGRLYPSISHLVPSHHEHSDPAPSPSPVPQPRPQSSQQSAPPFPSALPRPSRSRALAPFPLPFALHLAAHRYSSAPAPDSEVLADSAAAAPVSELLSDGVASAAASVSTPPLPYPGEVAAAAAESFPPVAALQHLLDAVQSFTGLNWWATIALTTLMIRLATVPLLINQMKSMMKLNEMRPEIEAINEEMRNSTDPRSMEVGKQKLGELFLRHGVTPLTPLKGLFIQGPIFMSFFFAISNMVEKVPSMKGGGVYWFTDLTTPDNLLILPVLTSLTFLATVELNMQDGMEGNHMLKPMKKFSRFFGVLFVPFTIGFPKAIFFYWVTSNFFSLVYGAVLRNPAVRLFLNLPRLESQPTTAEVQPLNLSGGPEPSPGVDSPITDKETEQSSSVLSPGVDSPIADKECEQSSPAVSPEVNSPMVDKESEQSSSVLCDRIRDLEIRAKATGESRE

SEQ ID NO: 20366 - protein, 294 aa, Zea mays subsp. mays
  misc_feature (1)..(294): Ceres Seq. ID no. 12381757
MIRLATVPLLINQMKSMMKLNEMRPEIEAINEEMRNSTDPRSMEVGKQKLGELFLRHGVTPLTPLKGLFIQGPIFMSFFFAISNMVEKVPSMKGGGVYWFTDLTTPDNLLILPVLTSLTFLATVELNMQDGMEGNHMLKPMKKFSRFFGVLFVPFTIGFPKAIFFYWVTSNFFSLVYGAVLRNPAVRLFLNLPRLESQPTTAEVQPLNLSGGPEPSPGVDSPITDKETEQSSSVLSPGVDSPIADKECEQSSPAVSPEVNSPMVDKESEQSSSVLCDRIRDLEIRAKATGESRE

SEQ ID NO: 20367 - protein, 281 aa, Zea mays subsp. mays
  misc_feature (1)..(281): Ceres Seq. ID no. 12381758
MKSMMKLNEMRPEIEAINEEMRNSTDPRSMEVGKQKLGELFLRHGVTPLTPLKGLFIQGPIFMSFFFAISNMVEKVPSMKGGGVYWFTDLTTPDNLLILPVLTSLTFLATVELNMQDGMEGNHMLKPMKKFSRFFGVLFVPFTIGFPKAIFFYWVTSNFFSLVYGAVLRNPAVRLFLNLPRLESQPTTAEVQPLNLSGGPEPSPGVDSPITDKETEQSSSVLSPGVDSPIADKECEQSSPAVSPEVNSPMVDKESEQSSSVLCDRIRDLEIRAKATGESRE

SEQ ID NO: 20368 - DNA, 2076 bp, Zea mays subsp. mays
  misc_feature (1)..(2076): Ceres Seq. ID no. 12381770
gcacgagaccattacctagaacatcctaatcgaaaaatcaaaccgctctcctctccttccctgcccccccctcgcaaccccgaagaagcccccacacgcaaggccgcaaacgcgccgcgcaccgcaaggtcccagggagcgacacgaggcggcctcattgcagcatggctgctatggccgccgccgccgccgccgccgctggcggcgtcgggctccatctcattggcgctgccacggccacgctcatcgcggcggtccttgttgcggccgtgctggggcgccgccgccgggcccgggcccgggcccaggcgcctccggtggaagggaaacccgcgccggaggcaggctgcgcggtcggtgacggcgcgggtcccgacggcgggacggacgtcatcatcgtcggcgccggagtggctggatctgcgctggcgttacacgctcggaaaggatggccgccgggtgcatgtcatcgagagggatctgacagaacctgacagaattgtgggcgagctgttgcaacctggaggttacttgaaattaattgagttaggcctccaagattgtgtggaagaaattgatgcccaacgggtgcttggttacgcattattcaaagatggaagaaacacaaagcttgcttatcccttagagaagttccattctgatgttgctggtaggagctttcacaatgggaggtttatacagaggatgcgtcagaaagctgcgtctttgcccaatgttcaattagaacaaggaactgttacatcacttcttgaagaaaatggtactgttaaaggtgttcaatacaaaaccaagtcaggtgaagaactaaaagcttatgcgcccttgacgattgtatgtgatggctgcttttcaaatctacggcgtgccctttgctctccaaaagttgatgttccatcatgttttgttgggctggtattggagaattgccaacttccacatccaaaccatggccatgttatcttggccaatccttcgccaatactattttacccaattagcagcacagaggtgcgctgtttggttgatgtccctggtcagaaggtgccttccatagctagcggtgaaatggcaaattatctcaaaaccgtcgttgcaccccagattcctccagaaatctatgactctttcatagcggccattgataagggaagcataagaacaatgccaaacaggagcatgccagcggctccacttcctacccctggcgcacttctgatgggggatgctttcaatatgagacaccctttaactggtggaggaatgaccgttgcattatccgacatcgttgtcctacgcaatcttctcaagcctctccgcaatctccacgacgcatcttccctgtgcaagtacctcgaatcgttctatacgctgcggaagccggttgcctccaccataaacacgttgtccggtgctctgtacaaggtcttcagcgcctcgcctgatgaagctaggaacgagatgcgccaggcctgttttgattacttgagcctcggaggcgtcttctcgaatgggcctattgccttactctcgggtcttaatcctcggccactgagtttagttgcacacttcttcgctgtcgctatctacggtgtcggtcgcttgatgctccctcttccttcacctaaacggatgtggattggagccaggctgatttctggtgcatgcggcatcatcctcccgatcatcaaagctgaaggcgtgagacagatgttcttccctgccactgtacccgcatattaccgggctgcgcctacgggagaataagtaaagcgcgcgagaaccgattccggggctgctgctcatcccaccatgatctgatggcaactgatgtgtcatggatggcaatttttttccctgtgttagtggttgttaggtggttggttgtgcttctgtcattggaatgaggaacctgtatagtgtgcccctggatagtggtcaaagttgggtcctacccatgtcgattactgccaagttgtatatgattctgttgaactagtgaaacctgcccccatctataacgcgtatcaatcttggttgctcccctgccccccgagc

SEQ ID NO: 20369 - protein, 594 aa, Zea mays subsp. mays
  misc_feature (1)..(594): Ceres Seq. ID no. 12381771
ARDHYLEHPNRKIKPLSSPSLPPPRNPEEAPTRKAANAPRTARSQGATRGGLIAAWLLWPPPPPPPLAASGSISLALPRPRSSRRSLLRPCWGAAAGPGPGPRRLRWKGNPRRRQAARSVTARVPTAGRTSSSSAPEWLDLRWRYTLGKDGRRVHVIERDLTEPDRIVGELLQPGGYLKLIELGLQDCVEEIDAQRVLGYALFKDGRNTKLAYPLEKFHSDVAGRSFHNGRFIQRMRQKAASLPNVQLEQGTVTSLLEENGTVKGVQYKTKSGEELKAYAPLTIVCDGCFSNLRRALCSPKVDVPSCFVGLVLENCQLPHPNHGHVILANPSPILFYPISSTEVRCLVDVPGQKVPSIASGEMANYLKTVVAPQIPPEIYDSFIAAIDKGSIRTMPNRSMPAAPLPTPGALLMGDAFNMRHPLTGGGMTVALSDIVVLRNLLKPLRNLHDASSLCKYLESFYTLRKPVASTINTLSGALYKVFSASPDEARNEMRQACFDYLSLGGVFSNGPIALLSGLNPRPLSLVAHFFAVAIYGVGRLMLPLPSPKRMWIGARLISGACGIILPIIKAEGVRQMFFPATVPAYYRAAPTGE

SEQ ID NO: 20370 - protein, 359 aa, Zea mays subsp. mays
  misc_feature (1)..(359): Ceres Seq. ID no. 12381772
MRQKAASLPNVQLEQGTVTSLLEENGTVKGVQYKTKSGEELKAYAPLTIVCDGCFSNLRRALCSPKVDVPSCFVGLVLENCQLPHPNHGHVILANPSPILFYPISSTEVRCLVDVPGQKVPSIASGEMANYLKTVVAPQIPPEIYDSFIAAIDKGSIRTMPNRSMPAAPLPTPGALLMGDAFNMRHPLTGGGMTVALSDIVVLRNLLKPLRNLHDASSLCKYLESFYTLRKPVASTINTLSGALYKVFSASPDEARNEMRQACFDYLSLGGVFSNGPIALLSGLNPRPLSLVAHFFAVAIYGVGRLMLPLPSPKRMWIGARLISGACGIILPIIKAEGVRQMFFPATVPAYYRAAPTGE

SEQ ID NO: 20371 - DNA, 1174 bp, Zea mays subsp. mays
  misc_feature (1)..(1174): Ceres Seq. ID no. 12381799
acgcggtcgttctcacgttggcggctggccaccattccctgtctcgtgctcacggcgggcggcagaccgccaggcgccaccgcgccagaccagctgaccagcaggcggcagtgcaggccatcagccgtcacggctctccctcaggtcggcagtgcaggccatcagccgccaaccgatctagtagtgcagaccgccagaggccaggtgaccaggtcggcagtgcagccgtgcaggcggccagccctctccaggcgtccagctaccaccacacacacgaagagcaggcgatgaaaatgtccgcttccgttgcggccgcctcccccaccctccgcttctcctccgccactcatcctctccaccgaccgctccgccggcggctcccgtcggttcgatgctccctcgccgccgccgccggccccggtgtccgggcgccccctgagctcgtcgactccatcctctccaaggtgaagggaactgaccgaggagtgctgctgccaaaagatgggcaccaggaagtggctgaggtcgcgctgcagctggggaagtactgcatagacgaccccgtcaagtccccgcttatattcggagaatgggaggttgtgtactgctcggtgccaacctcgccgggagggctctaccggacgccccttggccgcctggtattcaaaaccgacgagatggtccaggcggtggaagcgcctgacgtggtcaggaacaaggtgtcgttctccgtctttggcctagagggcgcagtgtcattgaaaggtaagctgaatgtgctggacagtaaatggattcaggtcgtgttcgaagcaccagaactgaaggtcggctccttggggtttcagtacggtggcgagagcgaagtcaagctggagatcacctatgtcgatgagaagatcaggctagggagagggtccagaggctcgcttttcgtcttccttagacgatgatagaatggcatgcatgtgtgttgagacttcagacccacaagcaccgatgaggggtggcgctgacgcggtcgtttgtacaatactgtgttcaggacttctatacgtttatgtaaaaattctggcgtccagctgggtaattctggcgtttcagtacggtggcctgatgaatgttgttgtgtagtttgtagcatccattattagtgctgtaagatgatgttttg

SEQ ID NO: 20372 - protein, 316 aa, Zea mays subsp. mays
  misc_feature (1)..(316): Ceres Seq. ID no. 12381800
AVVLTLAAGHHSLSRAHGGRQTARRHRARPADQQAAVQAISRHGSPSGRQCRPSAANRSSSADRQRPGDQVGSAAVQAASPLQASSYHHTHEEQAMKMSASVAAASPTLRFSSATHPLHRPLRRRLPSVRCSLAAAAGPGVRAPPELVDSILSKVKGTDRGVLLPKDGHQEVAEVALQLGKYCIDDPVKSPLIFGEWEVVYCSVPTSPGGLYRTPLGRLVFKTDEMVQAVEAPDVVRNKVSFSVFGLEGAVSLKGKLNVLDSKWIQVVFEAPELKVGSLGFQYGGESEVKLEITYVDEKIRLGRGSRGSLFVFLRR

SEQ ID NO: 20373 - protein, 221 aa, Zea mays subsp. mays
  misc_feature (1)..(221): Ceres Seq. ID no. 12381801
MKMSASVAAASPTLRFSSATHPLHRPLRRRLPSVRCSLAAAAGPGVRAPPELVDSILSKVKGTDRGVLLPKDGHQEVAEVALQLGKYCIDDPVKSPLIFGEWEVVYCSVPTSPGGLYRTPLGRLVFKTDEMVQAVEAPDVVRNKVSFSVFGLEGAVSLKGKLNVLDSKWIQVVFEAPELKVGSLGFQYGGESEVKLEITYVDEKIRLGRGSRGSLFVFLRR

SEQ ID NO: 20374 - protein, 219 aa, Zea mays subsp. mays
  misc_feature (1)..(219): Ceres Seq. ID no. 12381802
MSASVAAASPTLRFSSATHPLHRPLRRRLPSVRCSLAAAAGPGVRAPPELVDSILSKVKGTDRGVLLPKDGHQEVAEVALQLGKYCIDDPVKSPLIFGEWEVVYCSVPTSPGGLYRTPLGRLVFKTDEMVQAVEAPDVVRNKVSFSVFGLEGAVSLKGKLNVLDSKWIQVVFEAPELKVGSLGFQYGGESEVKLEITYVDEKIRLGRGSRGSLFVFLRR

SEQ ID NO: 20375 - DNA, 1663 bp, Zea mays subsp. mays
  misc_feature (1)..(1663): Ceres Seq. ID no. 12381819
actactggtagaactagagcttagaagtgccggttttccacgaggcgagcgcgcggtcatggggtcactgtcgacggcggaggggcagcggccgcacgccgtgtgcatgccgtacccggcgcagggccacgtgacgcccatgctcaagctcgccaagctcctccacgcgcggggcttccagatcaccttcgtcaacaccgagttcaaccaccgccgcctgctccactcgcgcgggcccgacgcgctcgaccgcgtgcccgggttccgcttcgacgccattcccgacggcctcccgccgtccgacgccgacgccacgcaggacatccccgcgctctgctactccaccatgaccacctgcctcccgcacctcctcgcgctcctcgccagggtcgacgccgacgccgggtccccgccggtcacctgcctcgtcgtggacgccgtcatgtcgttcggcttcgacgccgccaggcagatcggcgtgcccgtcgccgcgctctggaccgccagcgcctgcgggttcatgggctaccggaactacagaaacctcatcgactggggcctcgtgccattcaagagcgccgcggacctccaggacaacgtcggcggcggccacctcgccaccgtggtcaccggcgcgcgcggcatgtgcgacggcgtgcagctgcgcgacttccccaacttcatccgcaccacggaccgcgcggacttcatgttcaacttcctcatgcgcgagtccgagcggctgtcgctccccgacggcgtcatcgtcaacaccttcgaggacctcgagggagccacgctggacgccatgcgcgctatcctcccgacggtgtaccccgtcggcccgctcctcctccgcgagcgcctggagatccccgctagcagcccgctcgcggtcctcggctccaacctctggaaggaggaggaaggcctcctggagtggctcgctggccgcgcgccgcgatccgtggtgtacgtgaactacggcagcatcacggtgatgaccaactcgcagctgctcgagttcgcgtggggcctggccaacagcgggtacccgttcgtgtggaacatccggccggacctggtgaagggcgactccgccgtgctgccgccggagttcgcgtccgccgtcgagggccgcgcgttgctgacgacgtggtgcccgcaggaggcggcgatccagcatgaggcggtcggggtgttcctgactcactccggctggaactccaccctggagagcctctgcgcgggggtgcccatgctgagctggcccttcttcgcggagcagcagaccaactgccggtacaagcgcacggagtggggagtcgggatggagatcggcggcgaggtgcggcgcgacgaggtgacggtcgttctaaaggaggccatggacggggagaaggggagggagatgcgccggcgcgcagaggagtggaaggagaaggccgtgaaggtgacgctgccgggtgggcctgcggagactaacctcgagagggtcatccacgaggtgctgctctcccagaaaaagggatagactgccaacgcgtgatcgtcgtgggagtatcatgttcgggagcatcatgccttgcccctcgctttgctgtgttttcttatttacgtgtgttagctttgaataattaattatctcaactttcagctctcg

SEQ ID NO: 20376 - protein, 510 aa, Zea mays subsp. mays
  misc_feature (1)..(510): Ceres Seq. ID no. 12381820
LLVELELRSAGFPRGERAVMGSLSTAEGQRPHAVCMPYPAQGHVTPMLKLAKLLHARGFQITFVNTEFNHRRLLHSRGPDALDRVPGFRFDAIPDGLPPSDADATQDIPALCYSTMTTCLPHLLALLARVDADAGSPPVTCLVVDAVMSFGFDAARQIGVPVAALWTASACGFMGYRNYRNLIDWGLVPFKSAADLQDNVGGGHLATVVTGARGMCDGVQLRDFPNFIRTTDRADFMFNFLMRESERLSLPDGVIVNTFEDLEGATLDAMRAILPTVYPVGPLLLRERLEIPASSPLAVLGSNLWKEEEGLLEWLAGRAPRSVVYVNYGSITVMTNSQLLEFAWGLANSGYPFVWNIRPDLVKGDSAVLPPEFASAVEGRALLTTWCPQEAAIQHEAVGVFLTHSGWNSTLESLCAGVPMLSWPFFAEQQTNCRYKRTEWGVGMEIGGEVRRDEVTVVLKEAMDGEKGREMRRRAEEWKEKAVKVTLPGGPAETNLERVIHEVLLSQKKG

SEQ ID NO: 20377 - protein, 491 aa, Zea mays subsp. mays
  misc_feature (1)..(491): Ceres Seq. ID no. 12381821
MGSLSTAEGQRPHAVCMPYPAQGHVTPMLKLAKLLHARGFQITFVNTEFNHRRLLHSRGPDALDRVPGFRFDAIPDGLPPSDADATQDIPALCYSTMTTCLPHLLALLARVDADAGSPPVTCLVVDAVMSFGFDAARQIGVPVAALWTASACGFMGYRNYRNLIDWGLVPFKSAADLQDNVGGGHLATVVTGARGMCDGVQLRDFPNFIRTTDRADFMFNFLMRESERLSLPDGVIVNTFEDLEGATLDAMRAILPTVYPVGPLLLRERLEIPASSPLAVLGSNLWKEEEGLLEWLAGRAPRSVVYVNYGSITVMTNSQLLEFAWGLANSGYPFVWNIRPDLVKGDSAVLPPEFASAVEGRALLTTWCPQEAAIQHEAVGVFLTHSGWNSTLESLCAGVPMLSWPFFAEQQTNCRYKRTEWGVGMEIGGEVRRDEVTVVLKEAMDGEKGREMRRRAEEWKEKAVKVTLPGGPAETNLERVIHEVLLSQKKG

SEQ ID NO: 20378 - protein, 475 aa, Zea mays subsp. mays
  misc_feature (1)..(475): Ceres Seq. ID no. 12381822
MPYPAQGHVTPMLKLAKLLHARGFQITFVNTEFNHRRLLHSRGPDALDRVPGFRFDAIPDGLPPSDADATQDIPALCYSTMTTCLPHLLALLARVDADAGSPPVTCLVVDAVMSFGFDAARQIGVPVAALWTASACGFMGYRNYRNLIDWGLVPFKSAADLQDNVGGGHLATVVTGARGMCDGVQLRDFPNFIRTTDRADFMFNFLMRESERLSLPDGVIVNTFEDLEGATLDAMRAILPTVYPVGPLLLRERLEIPASSPLAVLGSNLWKEEEGLLEWLAGRAPRSVVYVNYGSITVMTNSQLLEFAWGLANSGYPFVWNIRPDLVKGDSAVLPPEFASAVEGRALLTTWCPQEAAIQHEAVGVFLTHSGWNSTLESLCAGVPMLSWPFFAEQQTNCRYKRTEWGVGMEIGGEVRRDEVTVVLKEAMDGEKGREMRRRAEEWKEKAVKVTLPGGPAETNLERVIHEVLLSQKKG

SEQ ID NO: 20379 - DNA, 1094 bp, Zea mays subsp. mays
  misc_feature (1)..(1094): Ceres Seq. ID no. 12381845
gcacgagaccattacctagaacatcctaatcgaaaaaggagatacttgaagcctcaccagagaccacaaggagggatattcgcaggacccggtttttgcagcacgaggtgtggaggctgctctgccataccaaaaagcagacagaggaccaaggaaggaagcagggatccggctttgctctgcaaccatgagctccctgtacgacgtctcctgcttcgcggctggccttgctgggaacgtcttcgccctcgccctcttcctgtcgccggtgccgacgttcaagagggtcctcaaggccaagtcgacggagcagttcgatgggctgccctacctgctgtccctgctcaactgctgcatctgcctctggtacggcctcccgtgggtctccgacggcggcagggccctcgtcgccaccgtcaactgcaccggcgccctgttccagctcgcctacatctcgctcttcatcttctacgccgacagcaggaccactcggctcaaggtcgcggggcttctggtgctagtggtcttcgcgttcgcgctcatcgcacacgccagcatcgccttcttcgaccagccgctccggcagctgttcgttggcagcgtcagcatggcgtccctggtctccatgttcgcttccccgctggctgtcatgggtgtggtggtccgcaccgagtgcgtggagttcatgcccttctacctctctctgtccacgttcctgatgagcgcatccttcgcagtgtacgggcttctcctgcgtgatttcttcatatacttcccgaatgggctcggagtcatcctgggagcaatgcagctggtgctgtacgcgtactacagccggagatggaaaagcagcgactcgtcagcaccgttgcttgcctgatcatgtagccgagttcgtcagtccaattgcccgtgccgtgctttctgttgttctctgttctgccatcctgtaattctaggagaggagctaggcggtgttttggaacagattaatcgtactgctacgaaatatattttttgagatagattattttaaatagagatggtcataaagtttattcgtcttctaagagaattttgaatacgatcatttt

SEQ ID NO: 20380 - protein, 252 aa, Zea mays subsp. mays
  misc_feature (1)..(252): Ceres Seq. ID no. 12381846
ARDHYLEHPNRKRRYLKPHQRPQGGIFAGPGFCSTRCGGCSAIPKSRQRTKEGSRDPALLCNHELPVRRLLLRGWPCWERLRPRPLPVAGADVQEGPQGQVDGAVRWAALPAVPAQLLHLPLVRPPVGLRRRQGPRRHRQLHRRPVPARLHLALHLLRRQQDHSAQGRGASGASGLRVRAHRTRQHRLLRPAAPAAVRWQRQHGVPGLHVRFPAGCHGCGGPHRVRGVHALLPLSVHVPDERILRSVRASPA

SEQ ID NO: 20381 - protein, 230 aa, Zea mays subsp. mays
  misc_feature (1)..(230): Ceres Seq. ID no. 12381847
MSSLYDVSCFAAGLAGNVFALALFLSPVPTFKRVLKAKSTEQFDGLPYLLSLLNCCICLWYGLPWVSDGGRALVATVNCTGALFQLAYISLFIFYADSRTTRLKVAGLLVLVVFAFALIAHASIAFFDQPLRQLFVGSVSMASLVSMFASPLAVMGVVVRTECVEFMPFYLSLSTFLMSASFAVYGLLLRDFFIYFPNGLGVILGAMQLVLYAYYSRRWKSSDSSAPLLA

SEQ ID NO: 20382 - DNA, 2712 bp, Zea mays subsp. mays
  misc_feature (1)..(2712): Ceres Seq. ID no. 12382014
gcacgagaccattacctagaacatcctaatcaaaaaaaaaaccataagaacgcacgcgagtggccagtgggaaccaggaaacaagaaagtgagagggggaagctgcggccgacggccgagctcttgccgtccctatccacccctctcgcctttcgctcttgcctttcgctccgtccagccgccgcgtaaaatccgcggaaccagatgcccttatccgccctctgatcgaatccggccagaaagcccggttctttgtcgtcgtcctcggcatcgccgacgaccttgatggcactggaggcgggtagtagcggcggcggcgggaggggatggggtggcgggttccgaagtctgatgcggcggaagcaggtggactccgatcgggtccgcgccgagggccagccgcagctcgccaaggagctcaacgtgccggagctggtcgcgatcggggttggttccacagttggaccaggagtatatgttcttgttggaacagttgctagggagcacgctggtccagcattgacaatttcatttctgatagctggaatagcagccgcgctttcagctttctgttatgctgagcttgctagtcgttgcccctcagctggaagtgcttaccattattcatatatctgtgttggagaaggtgttgcctggttgattggctgggctctagtgctggaatatactattggtgggtctgctgttgcccgtggtatatctccaaatttagccttgttttttggaggacaggatagtgtgccatggattttagcacgccatcagcttccatggtttgatatcattgttgatccctgtgcagccgctcttgtttttgttgtcactgttttactatgtgtgggaattaaagagagttcatttgcacaaggagtcgtaacagttctcaatgcctgtgtaatgatatttgttattgtagctgggagttatattggcttccaaataggatgggtgggctacaaggtttctgacgggtatttcccacatggagtaaatggaatgcttgctggatcagcaactgtcttctttgcatacataggctttgatacagtcgctagtacagctgaagaggtaaagaatccacagagagatttgccattgggaattggagttgcattggctatttgttgtgcgttgtatatggctgtttctgttgttattgttgggctggtgccatatttcgccatggatccagatactcctatttcatctgcctttgcaaggcatggaatgcaatgggctatgtacgttgtgacaagtggtgctgttcttgcactctgctcgaccttgatgggctcacttcttccacagcctagaatacttatggccatggcacgagatggtctgttgccatccttcttctctgatgttaacaagcaaactcaagtacctgttaagagcacaattgtgactggcatctgtgcagctgctctggcttttgcaatggatgtttcacagttagcaggaatggtcagtgtaggcacactccttgcattcaccgtagttgctgtctcgatcttgatactcagatatgtccctccatatgaggtccctttgccgccttctatgcaagaatcattccgtttgaaccaggaatgtgatgaggaaagggataggggtcttcttggagttgggaactgtaacttatctcagacaaaggatgtgattgtggtagtagaatcagtgaaggatcctctcattgataaaagactgcataaaggcaagatggatgagacgaagcgccgaaagatagcctctttaagcatagggtctgtgtgtgtaggggttctgatccttgcttcttcagcctctgccacatggttgccttttctcccgatatgtattggctgcaccattggagttgtgctccttctggctggcctcagcttgctctcctggatcgaccaagatgctggcaggcactcttttggtcattccggaggattcacatgcccttttgttccagtgctaccagttttgtgtatcctgataaatacgtatctgttaataaacctgagtggtgacacatggatgagagttggcatatggctgctgctgggtgttcttgtgtacgctttctacggacgaacccacagctccttaatagatgttgtctacgttccggcagcgcaagctgatgagatatacaggagttcatcaggatatgtatcatagaaaagaacagctgcagctgcagtcatgtgacacgatagagccacagaaagaccgagcggatgacagttacttaaaaggtggttgtccatcagctgtagaaaattggttatcagccggggaagacggaactgactgttatttctttcatgctcggctagcatgatctcgtggatgcaacttggcaagatatatatgctgctcacgagccaggtcaatttatacattgttggagtgtgtgtagatgtggtgtatataaaaccaactgggtggagtatgtgatgcgatacataataatttgtctaattcatgtaaaagccctttgtgcggaaatgtgagtgcatttaaaggacctattgaaaacagtacacggacggcaaaagaagccaccttttttatatatcatgtatatgtcgtccacaaacattctcttcatgtgtcatgtatatttgaccttggtcaggggttcatgaatgtactttgtttcttggtgtggcttttattagggataaaaagtccact

SEQ ID NO: 20383 - protein, 635 aa, Zea mays subsp. mays
  misc_feature (1)..(635): Ceres Seq. ID no. 12382015
MALEAGSSGGGGRGWGGGFRSLMRRKQVDSDRVRAEGQPQLAKELNVPELVAIGVGSTVGPGVYVLVGTVAREHAGPALTISFLIAGIAAALSAFCYAELASRCPSAGSAYHYSYICVGEGVAWLIGWALVLEYTIGGSAVARGISPNLALFFGGQDSVPWILARHQLPWFDIIVDPCAAALVFVVTVLLCVGIKESSFAQGVVTVLNACVMIFVIVAGSYIGFQIGWVGYKVSDGYFPHGVNGMLAGSATVFFAYIGFDTVASTAEEVKNPQRDLPLGIGVALAICCALYMAVSVVIVGLVPYFAMDPDTPISSAFARHGMQWAMYVVTSGAVLALCSTLMGSLLPQPRILMAMARDGLLPSFFSDVNKQTQVPVKSTIVTGICAAALAFAMDVSQLAGMVSVGTLLAFTVVAVSILILRYVPPYEVPLPPSMQESFRLNQECDEERDRGLLGVGNCNLSQTKDVIVVVESVKDPLIDKRLHKGKMDETKRRKIASLSIGSVCVGVLILASSASATWLPFLPICIGCTIGVVLLLAGLSLLSWIDQDAGRHSFGHSGGFTCPFVPVLPVLCILINTYLLINLSGDTWMRVGIWLLLGVLVYAFYGRTHSSLIDVVYVPAAQADEIYRSSSGYVS

SEQ ID NO: 20384 - protein, 613 aa, Zea mays subsp. mays
  misc_feature (1)..(613): Ceres Seq. ID no. 12382016
MRRKQVDSDRVRAEGQPQLAKELNVPELVAIGVGSTVGPGVYVLVGTVAREHAGPALTISFLIAGIAAALSAFCYAELASRCPSAGSAYHYSYICVGEGVAWLIGWALVLEYTIGGSAVARGISPNLALFFGGQDSVPWILARHQLPWFDIIVDPCAAALVFVVTVLLCVGIKESSFAQGVVTVLNACVMIFVIVAGSYIGFQIGWVGYKVSDGYFPHGVNGMLAGSATVFFAYIGFDTVASTAEEVKNPQRDLPLGIGVALAICCALYMAVSVVIVGLVPYFAMDPDTPISSAFARHGMQWAMYVVTSGAVLALCSTLMGSLLPQPRILMAMARDGLLPSFFSDVNKQTQVPVKSTIVTGICAAALAFAMDVSQLAGMVSVGTLLAFTVVAVSILILRYVPPYEVPLPPSMQESFRLNQECDEERDRGLLGVGNCNLSQTKDVIVVVESVKDPLIDKRLHKGKMDETKRRKIASLSIGSVCVGVLILASSASATWLPFLPICIGCTIGVVLLLAGLSLLSWIDQDAGRHSFGHSGGFTCPFVPVLPVLCILINTYLLINLSGDTWMRVGIWLLLGVLVYAFYGRTHSSLIDVVYVPAAQADEIYRSSSGYVS

SEQ ID NO: 20385 - protein, 424 aa, Zea mays subsp. mays
  misc_feature (1)..(424): Ceres Seq. ID no. 12382017
MIFVIVAGSYIGFQIGWVGYKVSDGYFPHGVNGMLAGSATVFFAYIGFDTVASTAEEVKNPQRDLPLGIGVALAICCALYMAVSVVIVGLVPYFAMDPDTPISSAFARHGMQWAMYVVTSGAVLALCSTLMGSLLPQPRILMAMARDGLLPSFFSDVNKQTQVPVKSTIVTGICAAALAFAMDVSQLAGMVSVGTLLAFTVVAVSILILRYVPPYEVPLPPSMQESFRLNQECDEERDRGLLGVGNCNLSQTKDVIVVVESVKDPLIDKRLHKGKMDETKRRKIASLSIGSVCVGVLILASSASATWLPFLPICIGCTIGVVLLLAGLSLLSWIDQDAGRHSFGHSGGFTCPFVPVLPVLCILINTYLLINLSGDTWMRVGIWLLLGVLVYAFYGRTHSSLIDVVYVPAAQADEIYRSSSGYVS

SEQ ID NO: 20386 - DNA, 1351 bp, Zea mays subsp. mays
  misc_feature (1)..(1351): Ceres Seq. ID no. 12382032
aagccacggcccaatcgccggccgacactcacaagaacctgcctccctctggatcgctatctcttttctagtgcccagggaaagctagctagctcacagctgagctgagggaagaaagcaaggagagggagccagggaggaaggggaaaaacacgcggagagggtgagcaagaaagaaccgaggcggatcgccttctgttcctcctgccggctccgcgagaggaggcactgctcagtcccgtgattcctacaggggggaagaaagaggtggaacaacgccccggggcagagcagagatgatgcgggagacgtacatggacgtgctgccgccggtggaccacatagccgcacggagcaactggttcccggcggcggcgcgtctgtggacggcggcggagaacaagcagttcgagcgggcgctcgccgggctcgacctctgccgcccggactgggaggaggtggcgcgggccatcccccggccggacggtgcgcgaggtcgtcagccacttcaagcacctcgaggtcgacgtccagcagatcgagagcgggcaggtgcccttgccggcctacggcggcggggccagctcgttcaccctgcagtgggacggctacggccccggtccgggggacttcaggcacgggtaccgcttcgccggaggctgcgggaggcggcaccacggccgcacgccggagcaggagcggaagaagggcgtgccatggacggaggaggagcacaggttgttcctcctaggcctgaagaaatacggcaagggtgactggaggaacatttcgcgcaacttcgtccagaccaggacgcccacccaggtggccagccacgcgcagaagtacttcatcaggctcaactccggcggcaaggacaagaggaggtccagcatccacgacatcaccacggtcaacctgacggacgaccagccgccctcgccgtcccagtcctccctaatcaccagccaatcgaacgcaccagctccagctccggccgcggggatatgccaggtcccattggcggccgacgccaagcgacacggtgccggaactctgcccttcagctcaccgaaccggacctctgcggcgccggcctacaggatggagtttcatgaccaacaaggcctgcagtgtggccctctgcatgatcagttgctcgccagccagagcgtcctgttctaggcgcggtggcagcccaccctgcggcatggatcgaccaggtgcctagtgtataatacttgtggtatcgctctagcttcagcgcctgtattgaagggattagccttttgggagcataacagaaaggaggtcttcatttcatggtggtccataatttgttggagaatgc

SEQ ID NO: 20387 - protein, 159 aa, Zea mays subsp. mays
  misc_feature (1)..(159): Ceres Seq. ID no. 12382033
MMRETYMDVLPPVDHIAARSNWFPAAARLWTAAENKQFERALAGLDLCRPDWEEVARAIPRPDGARGRQPLQAPRGRRPADRERAGALAGLRRRGQLVHPAVGRLRPRSGGLQARVPLRRRLREAAPRPHAGAGAEEGRAMDGGGAQVVPPRPEEIRQG

SEQ ID NO: 20388 - protein, 158 aa, Zea mays subsp. mays
  misc_feature (1)..(158): Ceres Seq. ID no. 12382034
MRETYMDVLPPVDHIAARSNWFPAAARLWTAAENKQFERALAGLDLCRPDWEEVARAIPRPDGARGRQPLQAPRGRRPADRERAGALAGLRRRGQLVHPAVGRLRPRSGGLQARVPLRRRLREAAPRPHAGAGAEEGRAMDGGGAQVVPPRPEEIRQG

SEQ ID NO: 20389 - protein, 153 aa, Zea mays subsp. mays
  misc_feature (1)..(153): Ceres Seq. ID no. 12382035
MDVLPPVDHIAARSNWFPAAARLWTAAENKQFERALAGLDLCRPDWEEVARAIPRPDGARGRQPLQAPRGRRPADRERAGALAGLRRRGQLVHPAVGRLRPRSGGLQARVPLRRRLREAAPRPHAGAGAEEGRAMDGGGAQVVPPRPEEIRQG

SEQ ID NO: 20390 - DNA, 1301 bp, Zea mays subsp. mays
  misc_feature (1)..(1301): Ceres Seq. ID no. 12382069
cagcttctggaaccttcctttcgctatacgacctgagttcgcttcaggcagccgccgctctctctctctcccgcgtccgtcccaccttcgcaagccagccacctccctgagaggcctgaccgtgatttcggcgtggcatccaaaggcggtcaagattcgagaggccggaggaaccaagcgtagggcctccgaccccacgtcgtcgtccgcgcgcgccgcccgccgccgcagggagatgggggccgattactacaaggtcctcggcgtcgaccgcggcgccagcgacgacgacctcaagaaggcctatcggaagctcgccatgcgatggcaccccgacaagaactccaccaataagaaggaggcagaaaccaagttcaaggagatctctgtggcatacgaggtccttagcgatcccaagaaacgtgcaatctatgatcagctaggggaagaagggctcaaggggcagccgcccccaggagcaggaggtcctggcacatctcccttcttccctggcggggctcattccaccgctcaccattttaacccgaggagcgcggacgatatatttaaagagttctttggatcccctggcatgggtggcatgagaacggaaccaggatttcaaaggtcaatgtttggcaacgatatcttctcttcgcgcttccgcgctgagggttccaccagtatgcagcagccattgcgcaaggcagctgcaattgagaatccacttccagtcggccttgcagatctctacaagggtgtgacaaaaaagatgaaaatctcaagagagactattgatgccagcgggagaatctcaaacacagaggatattctgacaatacaagtaaaggctggttggaagaagggaacaaggattacatttcctgacaagggaaatgaagctccaaatatgaaacctgctgatattgttttcatcattgatgagaagccccatgatgttttcactcgggagggaaatgatcttgtcgtgactgagaagatctcactggtggaagcactgactggctataccgcacgtgtcactacgcttgacgggcggagcctatcattgcacatcaactcaataatccatccaaagtacgaagaggtgatgcctggagagggcatgccagtgcccaaggaccccacaaagaagggaaatctgcggattaagttcaacataatgttcccctctaggctgacttctgatcagaaggccgggatcaagaggctattgggttcttaggccgccacctcaaatgacatcttctttatgatgaaagttgtttgtgaatattgcc

SEQ ID NO: 20391 - protein, 414 aa, Zea mays subsp. mays
  misc_feature (1)..(414): Ceres Seq. ID no. 12382070
SFWNLPFAIRPEFASGSRRSLSLPRPSHLRKPATSLRGLTVISAWHPKAVKIREAGGTKRRASDPTSSSARAARRRREMGADYYKVLGVDRGASDDDLKKAYRKLAMRWHPDKNSTNKKEAETKFKEISVAYEVLSDPKKRAIYDQLGEEGLKGQPPPGAGGPGTSPFFPGGAHSTAHHFNPRSADDIFKEFFGSPGMGGMRTEPGFQRSMFGNDIFSSRFRAEGSTSMQQPLRKAAAIENPLPVGLADLYKGVTKKMKISRETIDASGRISNTEDILTIQVKAGWKKGTRITFPDKGNEAPNMKPADIVFIIDEKPHDVFTREGNDLVVTEKISLVEALTGYTARVTTLDGRSLSLHINSIIHPKYEEVMPGEGMPVPKDPTKKGNLRIKFNIMFPSRLTSDQKAGIKRLLGS

SEQ ID NO: 20392 - protein, 336 aa, Zea mays subsp. mays
  misc_feature (1)..(336): Ceres Seq. ID no. 12382071
MGADYYKVLGVDRGASDDDLKKAYRKLAMRWHPDKNSTNKKEAETKFKEISVAYEVLSDPKKRAIYDQLGEEGLKGQPPPGAGGPGTSPFFPGGAHSTAHHFNPRSADDIFKEFFGSPGMGGMRTEPGFQRSMFGNDIFSSRFRAEGSTSMQQPLRKAAAIENPLPVGLADLYKGVTKKMKISRETIDASGRISNTEDILTIQVKAGWKKGTRITFPDKGNEAPNMKPADIVFIIDEKPHDVFTREGNDLVVTEKISLVEALTGYTARVTTLDGRSLSLHINSIIHPKYEEVMPGEGMPVPKDPTKKGNLRIKFNIMFPSRLTSDQKAGIKRLLGS

SEQ ID NO: 20393 - protein, 308 aa, Zea mays subsp. mays
  misc_feature (1)..(308): Ceres Seq. ID no. 12382072
MRWHPDKNSTNKKEAETKFKEISVAYEVLSDPKKRAIYDQLGEEGLKGQPPPGAGGPGTSPFFPGGAHSTAHHFNPRSADDIFKEFFGSPGMGGMRTEPGFQRSMFGNDIFSSRFRAEGSTSMQQPLRKAAAIENPLPVGLADLYKGVTKKMKISRETIDASGRISNTEDILTIQVKAGWKKGTRITFPDKGNEAPNMKPADIVFIIDEKPHDVFTREGNDLVVTEKISLVEALTGYTARVTTLDGRSLSLHINSIIHPKYEEVMPGEGMPVPKDPTKKGNLRIKFNIMFPSRLTSDQKAGIKRLLGS

SEQ ID NO: 20394 - DNA, 1388 bp, Zea mays subsp. mays
  misc_feature (1)..(1388): Ceres Seq. ID no. 12382081
gcacgagaccattacctagaacatcctaatcgaaaagaaaacgtaagggagtcctacttgtctgcttcccgagttcagagttcagactcagcacatcacccttctctagtctcaaatggcgtgctcactcccgctccacgcccccttctcctcgtcgccccgcatcctctcctaccgcgccgcgcccagaaccctccctctgttccgccgagggctcagggttccgtaccaccgctccccttccccgcctcgcgcgctcccggacgttgctgcgggggccgtggcgggcatccgggacgcgctcgccgacgccttcttgacgtcgccgccgacgtggcggtccgccgctgccagcaacctcgctgtctttgtctccggatcgccgttgcttctctcgggactgtccgcctccggcttcgccgccgcctatctcttgggcaccctgacgtgggcgcgcgttcggagcccagggtttcctcctcgttgtcgcatacttcgttgtgggcacagcggttactaagttgaggataagacagaaggaagctctgggagtagcagaaaaaagaggaggaagaagagggcctggaagtgttattggttctagcgctgccggttgtgtttgtgccctactatcgatatatcatgctggtggtacagcgtcctctgagctctggagactgggttttgttgctagtttctgtactaaactaagtgatacagtttcaagtgaaatagggaaggcttttggaagaacaacgtacctggtgacaacattaaaggttgttcctagaggtacagaaggtgcaatcagtattgagggtactattgctggaattctagcgtctgtgtttcttgcaggtgctggttatcttcttgggcaggtggatgtatcacaagttgtgttatgcgttcttgcttctcagattgcaaattatgttgagagctatattggggccactttacaagacaaggaaggttttgaatggctgaataacgatattgtcaatgtactgaatatctctattggtgccatattggctgttctaacgcagcagctgctcgtcagttggagatcttaatttttccttttgacttaggtctgcatccactattcgaattttattcttgtagtagctgccatattttgcccatctgaaatgtaatcatagattcacatttgggcccatcctaactttctctaggttccggtctttgttatgcctactgtgaaaatgcaaaactgtctttccttcagttacattgaggagttctctaattatgctgttaacttaggcagatgttgattaggatctgtttgatagagctctcaaagtgttttttgggagctgaaaacaattttttttattaagaagtgggtgattttatgc

SEQ ID NO: 20395 - protein, 174 aa, Zea mays subsp. mays
  misc_feature (1)..(174): Ceres Seq. ID no. 12382082
ARDHYLEHPNRKENVRESYLSASRVQSSDSAHHPSLVSNGVLTPAPRPLLLVAPHPLLPRRAQNPPSVPPRAQGSVPPLPFPASRAPGRCCGGRGGHPGRARRRLLDVAADVAVRRCQQPRCLCLRIAVASLGTVRLRLRRRLSLGHPDVGARSEPRVSSSLSHTSLWAQRLLS

SEQ ID NO: 20396 - protein, 134 aa, Zea mays subsp. mays
  misc_feature (1)..(134): Ceres Seq. ID no. 12382083
MACSLPLHAPFSSSPRILSYRAAPRTLPLFRRGLRVPYHRSPSPPRALPDVAAGAVAGIRDALADAFLTSPPTWRSAAASNLAVFVSGSPLLLSGLSASGFAAAYLLGTLTWARVRSPGFPPRCRILRCGHSGY

SEQ ID NO: 20397 - DNA, 1491 bp, Zea mays subsp. mays
  misc_feature (1)..(1491): Ceres Seq. ID no. 12382090
agtggcacagtggcagtggctggccacccaatcgtctcgttcgtcatctacctctccctcctccaacccaagctaagctaaacagcttacagctcgctccgccatcaccgtatcgagagagacagagacaggctagcgagggaatggagaggatgctggccaggctgatgcagcggcggagctccgtccccctgtccggcctcctccaccacggaggagcgcccgccccgctgcaggccgccggcgccactggggcctccccgctgatcttctcgcaccagcagcagcagcagcacacggccgcctccgccgtcctgccggggctcaagatcagggactccgcgtcccagctgatcgggaggactccgatggtgtacctgaacaaggtgaccgaggggtgcggcgcccgggtggctgccaagctcgagttcctgcagccgtccttcagcgtcaaagacagaccggcgatctcgatgctggaagacgccgaaaagagggggctcatcactccaggaaagaccacgttgatcgagcccacgtcggggaacatgggcatcgggctggcgttcatggcggcgctcaaggggtacgagctcgtgctcaccatgccgtcctacaccagcctggagaggagggtgacgatgcgggcgttcggcgccaacctggtgctgaccgacccggccaaagggatgggcgggacggtgaggaaggcgacggagctgtacgagagacatcccagcgcgcacatgctccagcagttccagaaccctgccaacgtcaaggtgcactacgacacgacgggaccggagatctgggaggacacgcttggccaggtcgatatcttcgtcatggggatcgggagcggcggcaccgtcacgggagtcggcaagtacctcaaggagaaaaaccctaacgcaaagatctatggagttgaacctgccgaggcaaatgttctgaatggtggaaagccaggacctcacctcatcactggaaacggagtagggttcaagccagatattctggacatggacgtgatggaaaaggtgctcgaggtgaaaggtgaggacgccgtcaagatggctcgagagctggcagtcaaggagggtcttttggtcgggatatcatcgggagccaacaccgttgctgctctcgagctagccaagaggccggagaacaaggggaagctcatcgtgaccgttcttccgagccttggcgagcggtacctgtcgtccgcgctgttcgatgagctgaggaaggaggcacaagccatggaaccggtcgcggtggattgatctcgccggtcaagctagctagcctgccgggcacgctggagatctggttcctatcgtcacagctgccagccaagccaattgtacttccattcccccctcatccagttttttattttattttaccgtcagtgtgtcacctcatctatgaaccttgcgaaaaggaaaaaaaaagtgcatgaataatgatgggaaaatgttg

SEQ ID NO: 20398 - protein, 429 aa, Zea mays subsp. mays
  misc_feature (1)..(429): Ceres Seq. ID no. 12382091
WHSGSGWPPNRLVRHLPLPPPTQAKLNSLQLAPPSPYRERQRQASEGMERMLARLMQRRSSVPLSGLLHHGGAPAPLQAAGATGASPLIFSHQQQQQHTAASAVLPGLKIRDSASQLIGRTPMVYLNKVTEGCGARVAAKLEFLQPSFSVKDRPAISMLEDAEKRGLITPGKTTLIEPTSGNMGIGLAFMAALKGYELVLTMPSYTSLERRVTMRAFGANLVLTDPAKGMGGTVRKATELYERHPSAHMLQQFQNPANVKVHYDTTGPEIWEDTLGQVDIFVMGIGSGGTVTGVGKYLKEKNPNAKIYGVEPAEANVLNGGKPGPHLITGNGVGFKPDILDMDVMEKVLEVKGEDAVKMARELAVKEGLLVGISSGANTVAALELAKRPENKGKLIVTVLPSLGERYLSSALFDELRKEAQAMEPVAVD

SEQ ID NO: 20399 - protein, 382 aa, Zea mays subsp. mays
  misc_feature (1)..(382): Ceres Seq. ID no. 12382092
MERMLARLMQRRSSVPLSGLLHHGGAPAPLQAAGATGASPLIFSHQQQQQHTAASAVLPGLKIRDSASQLIGRTPMVYLNKVTEGCGARVAAKLEFLQPSFSVKDRPAISMLEDAEKRGLITPGKTTLIEPTSGNMGIGLAFMAALKGYELVLTMPSYTSLERRVTMRAFGANLVLTDPAKGMGGTVRKATELYERHPSAHMLQQFQNPANVKVHYDTTGPEIWEDTLGQVDIFVMGIGSGGTVTGVGKYLKEKNPNAKIYGVEPAEANVLNGGKPGPHLITGNGVGFKPDILDMDVMEKVLEVKGEDAVKMARELAVKEGLLVGISSGANTVAALELAKRPENKGKLIVTVLPSLGERYLSSALFDELRKEAQAMEPVAVD

SEQ ID NO: 20400 - protein, 379 aa, Zea mays subsp. mays
  misc_feature (1)..(379): Ceres Seq. ID no. 12382093
MLARLMQRRSSVPLSGLLHHGGAPAPLQAAGATGASPLIFSHQQQQQHTAASAVLPGLKIRDSASQLIGRTPMVYLNKVTEGCGARVAAKLEFLQPSFSVKDRPAISMLEDAEKRGLITPGKTTLIEPTSGNMGIGLAFMAALKGYELVLTMPSYTSLERRVTMRAFGANLVLTDPAKGMGGTVRKATELYERHPSAHMLQQFQNPANVKVHYDTTGPEIWEDTLGQVDIFVMGIGSGGTVTGVGKYLKEKNPNAKIYGVEPAEANVLNGGKPGPHLITGNGVGFKPDILDMDVMEKVLEVKGEDAVKMARELAVKEGLLVGISSGANTVAALELAKRPENKGKLIVTVLPSLGERYLSSALFDELRKEAQAMEPVAVD

SEQ ID NO: 20401 - DNA, 769 bp, Zea mays subsp. mays
  misc_feature (1)..(769): Ceres Seq. ID no. 12382102
atgcgtgcatggcgtgctagctaggtaccttgcggccaagagcgaggcggaccactacaagcgggagatgagaagggagcaggaggagatcatcgccgtcccagacaccgaggccgctgagattggagagatcatgtcacggtatgggctcgagccgcaggagtacggccctgtcgtcgccgggctcaggcggaaccctcaagcttggctagacttcatgatgaggttcgagctgggactggagagaccggatcccagaagggctctgcagagcgccttcacgatcgcactgtcctacgtggtcggcgggctggtccctctcctgccctacgtgctcgtctccgccgcgcaggatgccatgctcacatccgtcggagtcacgctggccgcgctgcttttcttcggctacgtcaagggccgcttcacgggggaaccggccgttcgccagtgccgtccagaccgctgtcattggagcgctcgcttcggcggcggcgtacgggatggcgaaggctgttcaggcgaggtagttgtttgttggtgaggcggcgtcaggcgttttgggaaccagggctgcggtaaaactgaagaaagctgcatacttctgatcctttggggacttctcgttacagtgttaatcgcgggatctaatgctagtctactcttttgaataaatctagggaaggagataatcatagataaaatatatcttcgcctcactttggttaatgtaaagactctgaactacatattcaatcattattacaagcct

SEQ ID NO: 20402 - protein, 179 aa, Zea mays subsp. mays
  misc_feature (1)..(179): Ceres Seq. ID no. 12382103
CVHGVLARYLAAKSEADHYKREMRREQEEIIAVPDTEAAEIGEIMSRYGLEPQEYGPVVAGLRRNPQAWLDFMMRFELGLERPDPRRALQSAFTIALSYVVGGLVPLLPYVLVSAAQDAMLTSVGVTLAALLFFGYVKGRFTGEPAVRQCRPDRCHWSARFGGGVRDGEGCSGEVVVCW

SEQ ID NO: 20403 - protein, 157 aa, Zea mays subsp. mays
  misc_feature (1)..(157): Ceres Seq. ID no. 12382104
MRREQEEIIAVPDTEAAEIGEIMSRYGLEPQEYGPVVAGLRRNPQAWLDFMMRFELGLERPDPRRALQSAFTIALSYVVGGLVPLLPYVLVSAAQDAMLTSVGVTLAALLFFGYVKGRFTGEPAVRQCRPDRCHWSARFGGGVRDGEGCSGEVVVCW

SEQ ID NO: 20404 - protein, 135 aa, Zea mays subsp. mays
  misc_feature (1)..(135): Ceres Seq. ID no. 12382105
MSRYGLEPQEYGPVVAGLRRNPQAWLDFMMRFELGLERPDPRRALQSAFTIALSYVVGGLVPLLPYVLVSAAQDAMLTSVGVTLAALLFFGYVKGRFTGEPAVRQCRPDRCHWSARFGGGVRDGEGCSGEVVVCW

SEQ ID NO: 20405 - DNA, 695 bp, Zea mays subsp. mays
  misc_feature (1)..(695): Ceres Seq. ID no. 12382109
gcacgagaccattacctagaacatcctaatcgaaaaaacactcaatcaactagctcaacaacacctgacctgatacaaaaggagccctagagttccagagacgaagaaaggagaagaagccaatcagccaccagccatgatgagtgccaagagacttgttcagatgtcaagtagtaggtggcgaagaatggcggccctcgcgaggaagaggctcgcatcgacacctgtgaaagaaactgacgggtcgtcatgcagcacttcgtcggtggctggcaaaggccactgtgccatgtactcggctgatggtcggcggtttgaggtcccgttggtgttcctcggaacggctctcttcggtgagctcctgagcatgtcgcaggaggagttcggcttcgctggtgatgacggcaggatcaccttgccatgtgagtctttggtgatggagtacatgatgtgtttgcttacaagagatgcctctgaagaggtcaaaaggttgtttttgagctccatggcaaggccttgccactatggatctggactggtgcaaaccatgcatcatacccagcgaactgttgttcctagcttctgaagattagcatatatgcgcagtagcaagcagattgttttcaccttttcgtgtttgatgtaaatgtttacataatgtagattgggatggaatggaactaaccatatggttc

SEQ ID NO: 20406 - protein, 149 aa, Zea mays subsp. mays
  misc_feature (1)..(149): Ceres Seq. ID no. 12382110
MMSAKRLVQMSSSRWRRMAALARKRLASTPVKETDGSSCSTSSVAGKGHCAMYSADGRRFEVPLVFLGTALFGELLSMSQEEFGFAGDDGRITLPCESLVMEYMMCLLTRDASEEVKRLFLSSMARPCHYGSGLVQTMHHTQRTVVPSF

SEQ ID NO: 20407 - protein, 148 aa, Zea mays subsp. mays
  misc_feature (1)..(148): Ceres Seq. ID no. 12382111
MSAKRLVQMSSSRWRRMAALARKRLASTPVKETDGSSCSTSSVAGKGHCAMYSADGRRFEVPLVFLGTALFGELLSMSQEEFGFAGDDGRITLPCESLVMEYMMCLLTRDASEEVKRLFLSSMARPCHYGSGLVQTMHHTQRTVVPSF

SEQ ID NO: 20408 - protein, 140 aa, Zea mays subsp. mays
  misc_feature (1)..(140): Ceres Seq. ID no. 12382112
MSSSRWRRMAALARKRLASTPVKETDGSSCSTSSVAGKGHCAMYSADGRRFEVPLVFLGTALFGELLSMSQEEFGFAGDDGRITLPCESLVMEYMMCLLTRDASEEVKRLFLSSMARPCHYGSGLVQTMHHTQRTVVPSF

SEQ ID NO: 20409 - DNA, 1759 bp, Zea mays subsp. mays
  misc_feature (1)..(1759): Ceres Seq. ID no. 12382113
atcatctacaccgccgaggcgccgacaaccacttggcgaccatgagcacgggcacggacgccgtcccggtcgccgtggcgccggcgaagcgcccgcccatcaacaagtacgccttcgcctgcgccctgctcgcctccatgaactccgtcctcctcggctatgacatctcggtgatgagcggcgcgcagctgttcatgaaggaggacctcaagatcacggacacgcagatcgagatcctcgccggcgtcatcaacatctactcgctcttcggctccctcgccgcgggcctcacctccgactggctcggccgccgctacaccatggtgctggcggccgccatcttcttcacgggcgcgctcctcatgggcctcgccccggactacgggttcctcatggcgggccgcttcgtggccggcatcggcgtcggcttcgcgctcatgatcgcccccgtgtacaccgccgaggtggcgcccacctccgcgcgcggcttcctcacctccttcccggaggtcttcaacaacttcggcatcctcctcggctacgtctccaacttcgccttcgcgcgcctgcccgtccacctcagctggcgcgccatgttcctggtcggcgccgtgccgcccgtcttcctcggcgtcgccgtcctcgccatgccggagtcgccgcgctggctcgtcatgcggggccgcatcgacgacgcgcgccgcgtgctgcagaagacctccgactcccccgccgaggccgaggagcgtctgctcgacatcaagaaggtggtcggcatccccgagggcgtgaccgacgccgacgacgtggccgccatcgtccgcgccagcagcaaggcatcgtcgtcgtcgtcgtcgtcgcgccacgacggggtgtggaaggagctgctcatcaacccttcccgccccgtgcgccgcatgctcgtggcggggctcggcctcatgttcatccagcaggccacgggcgtggactgcgtggtgatgtacagcccgcgggtgttcgagcgggcgggcatcaagtccaagaccaactcgctgggcgcgtccatggcggtgggcgcgtgcaagaccttcttcatacccatctccacgctgctcctggaccgcatcggccgccgcccgctgctgctggccagcggcggcgggatgaccatcttcctcttcacgctggccacgtccttgcacatgatggaccggcgccccgagggggaggccgcggcactgggcgcggtgagcatcgcggccatgctgtcgttcgtggcgtcgttcgcgtccggcctgggccccgtcgcctgggtctactgctccgagatctacccgctgcggctgcgcgcgcaggctgctgccatcggcacggggctcaaccggatcatgagcggcgccaccaccatgtccttcctctcgctctccaacgccatcaccatcgccggcagcttctacctctacgcgtgcatcgccgccgcaggctgggtgttcatgtacttcttcctgccggagaccatgggcaggagcctggaggacaccgtgaagctcttcggcaaggacgcggacgacgaggacgtcggcgacagccgtcgtcacgcgcccagtaagaagccctccacttccactgagcttgagctcagtgctcagcactgagtgatgtgccatgcaacacgtgtcctcccgagtgtgaccgaagcttatgtctaaagcttcgatgatacagtctactcctagtatcttgtgtgctcgaactgtggtgaatcttttgtagatcc

SEQ ID NO: 20410 - protein, 544 aa, Zea mays subsp. mays
  misc_feature (1)..(544): Ceres Seq. ID no. 12382114
HLHRRGADNHLATMSTGTDAVPVAVAPAKRPPINKYAFACALLASMNSVLLGYDISVMSGAQLFMKEDLKITDTQIEILAGVINIYSLFGSLAAGLTSDWLGRRYTMVLAAAIFFTGALLMGLAPDYGFLMAGRFVAGIGVGFALMIAPVYTAEVAPTSARGFLTSFPEVFNNFGILLGYVSNFAFARLPVHLSWRAMFLVGAVPPVFLGVAVLAMPESPRWLVMRGRIDDARRVLQKTSDSPAEAEERLLDIKKVVGIPEGVTDADDVAAIVRASSKASSSSSSSRHDGVWKELLINPSRPVRRMLVAGLGLMFIQQATGVDCVVMYSPRVFERAGIKSKTNSLGASMAVGACKTFFIPISTLLLDRIGRRPLLLASGGGMTIFLFTLATSLHMMDRRPEGEAAALGAVSIAAMLSFVASFASGLGPVAWVYCSEIYPLRLRAQAAAIGTGLNRIMSGATTMSFLSLSNAITIAGSFYLYACIAAAGWVFMYFFLPETMGRSLEDTVKLFGKDADDEDVGDSRRHAPSKKPSTSTELELSAQH

SEQ ID NO: 20411 - protein, 531 aa, Zea mays subsp. mays
  misc_feature (1)..(531): Ceres Seq. ID no. 12382115
MSTGTDAVPVAVAPAKRPPINKYAFACALLASMNSVLLGYDISVMSGAQLFMKEDLKITDTQIEILAGVINIYSLFGSLAAGLTSDWLGRRYTMVLAAAIFFTGALLMGLAPDYGFLMAGRFVAGIGVGFALMIAPVYTAEVAPTSARGFLTSFPEVFNNFGILLGYVSNFAFARLPVHLSWRAMFLVGAVPPVFLGVAVLAMPESPRWLVMRGRIDDARRVLQKTSDSPAEAEERLLDIKKVVGIPEGVTDADDVAAIVRASSKASSSSSSSRHDGVWKELLINPSRPVRRMLVAGLGLMFIQQATGVDCVVMYSPRVFERAGIKSKTNSLGASMAVGACKTFFIPISTLLLDRIGRRPLLLASGGGMTIFLFTLATSLHMMDRRPEGEAAALGAVSIAAMLSFVASFASGLGPVAWVYCSEIYPLRLRAQAAAIGTGLNRIMSGATTMSFLSLSNAITIAGSFYLYACIAAAGWVFMYFFLPETMGRSLEDTVKLFGKDADDEDVGDSRRHAPSKKPSTSTELELSAQH

SEQ ID NO: 20412 - protein, 499 aa, Zea mays subsp. mays
  misc_feature (1)..(499): Ceres Seq. ID no. 12382116
MNSVLLGYDISVMSGAQLFMKEDLKITDTQIEILAGVINIYSLFGSLAAGLTSDWLGRRYTMVLAAAIFFTGALLMGLAPDYGFLMAGRFVAGIGVGFALMIAPVYTAEVAPTSARGFLTSFPEVFNNFGILLGYVSNFAFARLPVHLSWRAMFLVGAVPPVFLGVAVLAMPESPRWLVMRGRIDDARRVLQKTSDSPAEAEERLLDIKKVVGIPEGVTDADDVAAIVRASSKASSSSSSSRHDGVWKELLINPSRPVRRMLVAGLGLMFIQQATGVDCVVMYSPRVFERAGIKSKTNSLGASMAVGACKTFFIPISTLLLDRIGRRPLLLASGGGMTIFLFTLATSLHMMDRRPEGEAAALGAVSIAAMLSFVASFASGLGPVAWVYCSEIYPLRLRAQAAAIGTGLNRIMSGATTMSFLSLSNAITIAGSFYLYACIAAAGWVFMYFFLPETMGRSLEDTVKLFGKDADDEDVGDSRRHAPSKKPSTSTELELSAQH

SEQ ID NO: 20413 - DNA, 1641 bp, Zea mays subsp. mays
  misc_feature (1)..(1641): Ceres Seq. ID no. 12382117
aaattagaaaacctgaaaacctatcctacaagatacactcttcatccaccccttacgctcagacgtcactagctagccatcatcacacaggcagcatggtgatgaaagaagcagccgaagagcacgatggccgccgcgacgtgaccgtcacggtggagccggcgctgccggtgcagcaacaccgcctgccgctgtccaacctggacctcctcctgccgccgctcgacgtcagcctcttcttctgctacctccacccggcgcccaccgcgatcgctctcaaggaggcactggccaagacgctggtggcgtactacccgttggccggggaggtggtggccaacggcgatggggagccggagctgctctgcagcggccgcggcgtggacttcacggagacggccgcggccggagtcgagctgcgggaggtccggctgggcgccgtggacgaaggcgttgagaagctggtccctgtcaagaagaccggcgtgacgatggcggtcaagctgagcaagttcacgtgcggcggcgccgtcgtcggctgcaccttcgaccaccgcgtctgcgacgcctactccttcaacatgttcctcgtcgcgtgggccgcagccgcccgtggcagctctgcgccaccaccgccggacccgtgcttccgccgctccctagtcgccccacgcgacacaccacatcggcgcgcgccgtccaccgacgccctcatcaaccgcctcttctctcctcgaagcgccgcgccaccgcctccacccgccgccgcaggctccgtcaaccggatctaccgcatagccgccgaggacatcgccgcgctgaaggcctcggcggggccggggcgcacgaagatggaggcgttcacggcgctcctgtggcagctctgcgcaagggcggcctccccgcgccagagccagtgctgcatgggcgtggtcgtggacgggcgcacccggatgttcccggacggcgccatgaaggcctacttcggaaacgtgctcaccatcccgtacggcgtcatcggctccgaagacctgcgctgcatggccctcgctgacgtggccgacgacgtgcaccggtgggtggcggaggccgccaccggcgaccatttccgcgggctcgtggactgggtggaggcgctgcggcctaagccggccgcggcgagggcgtacctgggagggaccggcggcaacgaggcgatggcgtgcatcgtgtcgtccggtatgagcttcccggtgggcaaggccgacttcgggactggcctccccgcgttcgcgtcgtaccatttcccgtggcccgccggcgccgggtacgtgatgccgatgccgagcgcgcgcgggaacggcgattgggtggtgtacgtgcacgtggcgccggaggtggcgaaggtgatggaggagtccaccgtgttccaagccctggtgaacagctatgcgtttgaatgatgatggagatgggccggcatattcgtggatgcgcgcgcgttgccgtccacgcgtgtgtctagagctagtgttgatgtgcatacggcatggagttctcactactcagcagtgctaccaatttgcctcgttggttactatgtttgccagaaaataataatagtaactccatgcatatatgtcacgtgacatatgtgtaatt

SEQ ID NO: 20414 - protein, 479 aa, Zea mays subsp. mays
  misc_feature (1)..(479): Ceres Seq. ID no. 12382118
IRKPENLSYKIHSSSTPYAQTSLASHHHTGSMVMKEAAEEHDGRRDVTVTVEPALPVQQHRLPLSNLDLLLPPLDVSLFFCYLHPAPTAIALKEALAKTLVAYYPLAGEVVANGDGEPELLCSGRGVDFTETAAAGVELREVRLGAVDEGVEKLVPVKKTGVTMAVKLSKFTCGGAVVGCTFDHRVCDAYSFNMFLVAWAAAARGSSAPPPPDPCFRRSLVAPRDTPHRRAPSTDALINRLFSPRSAAPPPPPAAAGSVNRIYRIAAEDIAALKASAGPGRTKMEAFTALLWQLCARAASPRQSQCCMGVVVDGRTRMFPDGAMKAYFGNVLTIPYGVIGSEDLRCMALADVADDVHRWVAEAATGDHFRGLVDWVEALRPKPAAARAYLGGTGGNEAMACIVSSGMSFPVGKADFGTGLPAFASYHFPWPAGAGYVMPMPSARGNGDWVVYVHVAPEVAKVMEESTVFQALVNSYAFE

SEQ ID NO: 20415 - protein, 448 aa, Zea mays subsp. mays
  misc_feature (1)..(448): Ceres Seq. ID no. 12382119
MVMKEAAEEHDGRRDVTVTVEPALPVQQHRLPLSNLDLLLPPLDVSLFFCYLHPAPTAIALKEALAKTLVAYYPLAGEVVANGDGEPELLCSGRGVDFTETAAAGVELREVRLGAVDEGVEKLVPVKKTGVTMAVKLSKFTCGGAVVGCTFDHRVCDAYSFNMFLVAWAAAARGSSAPPPPDPCFRRSLVAPRDTPHRRAPSTDALINRLFSPRSAAPPPPPAAAGSVNRIYRIAAEDIAALKASAGPGRTKMEAFTALLWQLCARAASPRQSQCCMGVVVDGRTRMFPDGAMKAYFGNVLTIPYGVIGSEDLRCMALADVADDVHRWVAEAATGDHFRGLVDWVEALRPKPAAARAYLGGTGGNEAMACIVSSGMSFPVGKADFGTGLPAFASYHFPWPAGAGYVMPMPSARGNGDWVVYVHVAPEVAKVMEESTVFQALVNSYAFE

SEQ ID NO: 20416 - protein, 446 aa, Zea mays subsp. mays
  misc_feature (1)..(446): Ceres Seq. ID no. 12382120
MKEAAEEHDGRRDVTVTVEPALPVQQHRLPLSNLDLLLPPLDVSLFFCYLHPAPTAIALKEALAKTLVAYYPLAGEVVANGDGEPELLCSGRGVDFTETAAAGVELREVRLGAVDEGVEKLVPVKKTGVTMAVKLSKFTCGGAVVGCTFDHRVCDAYSFNMFLVAWAAAARGSSAPPPPDPCFRRSLVAPRDTPHRRAPSTDALINRLFSPRSAAPPPPPAAAGSVNRIYRIAAEDIAALKASAGPGRTKMEAFTALLWQLCARAASPRQSQCCMGVVVDGRTRMFPDGAMKAYFGNVLTIPYGVIGSEDLRCMALADVADDVHRWVAEAATGDHFRGLVDWVEALRPKPAAARAYLGGTGGNEAMACIVSSGMSFPVGKADFGTGLPAFASYHFPWPAGAGYVMPMPSARGNGDWVVYVHVAPEVAKVMEESTVFQALVNSYAFE

SEQ ID NO: 20417 - DNA, 1072 bp, Zea mays subsp. mays
  misc_feature (1)..(1072): Ceres Seq. ID no. 12382121
cccgtccacgcatcgccaccgcgccatatcggcatatccgcaagaagcacccggcacatcgcgtcgcccccaccttccccctcccaccaccgcaagcccggacacgcccagggcgcaaatccggacaagcgctgccccggtcgcggcaggcatgggtttcccggtgggctactcggagctggtgctcccgaagcagctgctccacctcctgctgctgctggggtacatccgccgcttcctcctctgggcgttcgacgccgtggggctcggcgacctgctggatctcggggacgaccaccaggcgctgctgcaggaccaccagcagcagcagcacggcgccgccgcgcaggggcgggacctgccgcagcaggcggcgatgctgcagcaccggcgcccggagttccggncggtgccggcgatggtcatcgaggaggtcctccccgtggtgcggttcgacgagctggagctggagccggagcccggagactgcgcggtgtgcctgagcggcatcggcggccgcgacgaggtgcggcggctcagcaactgccgccacgtcttccaccgggcctgcctcgaccgctggatggagcacgaccagcgcacgtgcccgctctgccgcgcgccgctcatccccgacgagatggccggcgcgctctgggccgccgccgccggcgtccccgacgcctccgacttcgacttctcctacctcggcgcgccgctggcgcccgtgccctccccgacgctgctgcggccgcacgagctgctgctcaccggcctgggcggctaccagtgagagctcaccaccgcccgccacttcccccgtggggaatgcgcgtctgcctggatccatcgacgcttgcttgcttgcttccgttccgtgggagggacggggacggacagcagccgaggcagagaagaaacccaaggctctcgaattgtacataggcaaaatgagtaaagcggccacccccccaaaaaaaggctaggagattagatccctcttgtgcataggtagattccgtcttccaagtttgtggagttgtgaatctttgcgcggattaaatttttgtcg

SEQ ID NO: 20418 - protein, 314 aa, Zea mays subsp. mays
  misc_feature (1)..(314): Ceres Seq. ID no. 12382122
  misc_feature (136)..(136): Xaa is any aa, unknown or other
PVHASPPRHIGISARSTRHIASPPPSPSHHRKPGHAQGANPDKRCPGRGRHGFPGGLLGAGAPEAAAPPPAAAGVHPPLPPLGVRRRGARRPAGSRGRPPGAAAGPPAAAARRRRAGAGPAAAGGDAAAPAPGVPXGAGDGHRGGPPRGAVRRAGAGAGARRLRGVPERHRRPRRGAAAQQLPPRLPPGLPRPLDGARPAHVPALPRAAHPRRDGRRALGRRRRRPRRLRLRLLLPRRAAGARALPDAAAAARAAAHRPGRLPVRAHHRPPLPPWGMRVCLDPSTLACLLPFRGRDGDGQQPRQRRNPRLSNCT

SEQ ID NO: 20419 - protein, 263 aa, Zea mays subsp. mays
  misc_feature (1)..(263): Ceres Seq. ID no. 12382123
  misc_feature (136)..(136): Xaa is any aa, unknown or other
PSTHRHRAISAYPQEAPGTSRRPHLPPPTTASPDTPRAQIRTSAAPVAAGMGFPVGYSELVLPKQLLHLLLLLGYIRRFLLWAFDAVGLGDLLDLGDDHQALLQDHQQQQHGAAAQGRDLPQQAAMLQHRRPEFRXVPAMVIEEVLPVVRFDELELEPEPGDCAVCLSGIGGRDEVRRLSNCRHVFHRACLDRWMEHDQRTCPLCRAPLIPDEMAGALWAAAAGVPDASDFDFSYLGAPLAPVPSPTLLRPHELLLTGLGGYQ

SEQ ID NO: 20420 - protein, 213 aa, Zea mays subsp. mays
  misc_feature (1)..(213): Ceres Seq. ID no. 12382124
  misc_feature (86)..(86): Xaa is any aa, unknown or other
MGFPVGYSELVLPKQLLHLLLLLGYIRRFLLWAFDAVGLGDLLDLGDDHQALLQDHQQQQHGAAAQGRDLPQQAAMLQHRRPEFRXVPAMVIEEVLPVVRFDELELEPEPGDCAVCLSGIGGRDEVRRLSNCRHVFHRACLDRWMEHDQRTCPLCRAPLIPDEMAGALWAAAAGVPDASDFDFSYLGAPLAPVPSPTLLRPHELLLTGLGGYQ

SEQ ID NO: 20421 - DNA, 1535 bp, Zea mays subsp. mays
  misc_feature (1)..(1535): Ceres Seq. ID no. 12382136
atgaagctcacatttctcaatggcattccattcttgcacaatcattccagccagccaccatagctccatgtcgtcgtcgacctcacaaatggcgtcgctcgccgtgctcgtcttcctggtggtctgcgcaacgcttgcgtccggcgccgccagcgtccgcgttgggctcacgcgcatccactccgacccggacaccaccgcgccccagttcgtgcgcgacgcgctgcgccgcgacatgcaccggcagcggtcccggtcgttcggccgcgaccgcgaccgcgagctcgcggagtccgacgggcgcaccagcaccacggtgtccgcgcgcacccgcaaggacctgcccaacggcggggagtacctcatgacgctggccatcggcacgccgccgctgccgtacgcggccgtcgccgacacgggcagcgacctcatctggacgcagtgcgcgccctgcggcacccagtgcttcgagcagccggcgccgctgtacaacccagcgagctcgaccacgttcagcgtgctcccgtgcaacagctccctgagcatgtgcgcgggggcgctggcgggggccgcgccgccgcccgggtgcgcctgcatgtactaccagacgtacggcaccgggtggacggcgggcgtgcagggctccgagaccttcaccttcggctcgtccgccgccgaccaggcccgcgtccccggcgtcgccttcggctgcagcaacgccagcagcagcgactggaacgggtcggcggggctggtggggctgggcaggggcagcctgtcgctcgtctcgcagctcggcgccggcaggttctcctactgcctgacgccgttccaggacaccaacagcaccagcaccctcctcctcggcccgtcggcggcgctcaacggcaccggcgtccgctccacgccgttcgtcgctagcccggccagggcgcccatgagcacctactactacctcaacctgacgggcatatccctgggcgcgaaggcgctgcccatctctcccggcgcattctccctgaagcccgacggcacgggcggcctcatcatcgactccggcacgaccatcacctcgctggccaacgcggcgtaccagcaggtccgcgccgcggtaaagtcccagctggtcacgacgctgccaacggtcgacgggtcggactccacggggctcgacctgtgcttcgcgctgccggccccgacgtcggcgccgccggccgtgctgccgagcatgacgctccacttcgacggcgccgacatggtgctccccgcggacagctacatgatctcggggtccggcgtgtggtgcctggccatgcggaaccagacggacggcgcgatgagcacgttcgggaactaccagcagcagaacatgcacatcctctacgacgtccgggaggagacgctgtcgttcgctccggccaagtgcagcactctttgacgatgcgatagttgtacatatgtatatgtgtgcatatataggattcgtgatttttttgtatacagtggattgttaaccgaacacgctaattaattcc

SEQ ID NO: 20422 - protein, 472 aa, Zea mays subsp. mays
  misc_feature (1)..(472): Ceres Seq. ID no. 12382137
MAFHSCTIIPASHHSSMSSSTSQMASLAVLVFLVVCATLASGAASVRVGLTRIHSDPDTTAPQFVRDALRRDMHRQRSRSFGRDRDRELAESDGRTSTTVSARTRKDLPNGGEYLMTLAIGTPPLPYAAVADTGSDLIWTQCAPCGTQCFEQPAPLYNPASSTTFSVLPCNSSLSMCAGALAGAAPPPGCACMYYQTYGTGWTAGVQGSETFTFGSSAADQARVPGVAFGCSNASSSDWNGSAGLVGLGRGSLSLVSQLGAGRFSYCLTPFQDTNSTSTLLLGPSAALNGTGVRSTPFVASPARAPMSTYYYLNLTGISLGAKALPISPGAFSLKPDGTGGLIIDSGTTITSLANAAYQQVRAAVKSQLVTTLPTVDGSDSTGLDLCFALPAPTSAPPAVLPSMTLHFDGADMVLPADSYMISGSGVWCLAMRNQTDGAMSTFGNYQQQNMHILYDVREETLSFAPAKCSTL

SEQ ID NO: 20423 - protein, 456 aa, Zea mays subsp. mays
  misc_feature (1)..(456): Ceres Seq. ID no. 12382138
MSSSTSQMASLAVLVFLVVCATLASGAASVRVGLTRIHSDPDTTAPQFVRDALRRDMHRQRSRSFGRDRDRELAESDGRTSTTVSARTRKDLPNGGEYLMTLAIGTPPLPYAAVADTGSDLIWTQCAPCGTQCFEQPAPLYNPASSTTFSVLPCNSSLSMCAGALAGAAPPPGCACMYYQTYGTGWTAGVQGSETFTFGSSAADQARVPGVAFGCSNASSSDWNGSAGLVGLGRGSLSLVSQLGAGRFSYCLTPFQDTNSTSTLLLGPSAALNGTGVRSTPFVASPARAPMSTYYYLNLTGISLGAKALPISPGAFSLKPDGTGGLIIDSGTTITSLANAAYQQVRAAVKSQLVTTLPTVDGSDSTGLDLCFALPAPTSAPPAVLPSMTLHFDGADMVLPADSYMISGSGVWCLAMRNQTDGAMSTFGNYQQQNMHILYDVREETLSFAPAKCSTL

SEQ ID NO: 20424 - protein, 449 aa, Zea mays subsp. mays
  misc_feature (1)..(449): Ceres Seq. ID no. 12382139
MASLAVLVFLVVCATLASGAASVRVGLTRIHSDPDTTAPQFVRDALRRDMHRQRSRSFGRDRDRELAESDGRTSTTVSARTRKDLPNGGEYLMTLAIGTPPLPYAAVADTGSDLIWTQCAPCGTQCFEQPAPLYNPASSTTFSVLPCNSSLSMCAGALAGAAPPPGCACMYYQTYGTGWTAGVQGSETFTFGSSAADQARVPGVAFGCSNASSSDWNGSAGLVGLGRGSLSLVSQLGAGRFSYCLTPFQDTNSTSTLLLGPSAALNGTGVRSTPFVASPARAPMSTYYYLNLTGISLGAKALPISPGAFSLKPDGTGGLIIDSGTTITSLANAAYQQVRAAVKSQLVTTLPTVDGSDSTGLDLCFALPAPTSAPPAVLPSMTLHFDGADMVLPADSYMISGSGVWCLAMRNQTDGAMSTFGNYQQQNMHILYDVREETLSFAPAKCSTL

SEQ ID NO: 20425 - DNA, 1258 bp, Zea mays subsp. mays
  misc_feature (1)..(1258): Ceres Seq. ID no. 12382152
gcacgagaccattacctagaacatcctaatcgaaaaatagaactagagccagctccttgttgcccatggccatgacgagagcactggccatggtggccatgttggccactgctgccttgttcttcatgtccgctcgcgcacagcagtgcggtatgcaggccggcggcgcgctctgccccgactgcctctgctgcagccagtggggctattgcggctccactcccgactactgtaccggcggctgccagagccagtgcatcggcagcggctgcggcggcggcggcggtggtacccctgctactcccccgagcggcccggtgtctgaaatcatctccgagtccctgttcaacgagatgctgctgcaccgcaacgacgtggcgtgcccggccaccggcttctacacctacgacgcgttcatcgcggccgcgaacgcgttcccgggcttcggcaccacgggcggcgccgacacgcagaagcgcgagctggcggcgttcctggcgcagacgtcgcacgagaccacgggcgggtgggacacggcgcccgacgggccctacacctgggcctactgcttcaaggaggaggtcggcggcgtgtgggggccggactactgccagcccagcccccagtggccgtgcgccgacggccagaagtactacggccgcgggcccatccagctatcctggaactacaactacgggcccgccggggaggccatcggccaggaccttctgggcaacccaggtctggttgccgccgactccactgtctccttcgagacggcgctctggtactggatgacggccgcagccgcccaagccgtcctgccacgacgtcatcacgggccagtgggcgccctcgcccgacgacgtggccgcagggaggctgccggggtatggcgtcctcaccaacatcatcaacggcggcctcgagtgcggccacggcgccgacgctcgtgttgccagccggatcggcttctacaaacgctactgcgacatgtttggtctcagctacggcgacaacttggactgctacgaccagagccccttcggaaacacaatcttaagcaccaccaataataccacctcatatcacgttgacgcctaataagtaacaagagctacctgttactacaactgcaagacacagacatcgtgtagtgcacatgtgcgtcaaatctctaaactttgtacacccagaataaaactctgtaatctgaaactttgcacacccagaataaaagttttcgatttcaaactcc

SEQ ID NO: 20426 - protein, 336 aa, Zea mays subsp. mays
  misc_feature (1)..(336): Ceres Seq. ID no. 12382153
MAMTRALAMVAMLATAALFFMSARAQQCGMQAGGALCPDCLCCSQWGYCGSTPDYCTGGCQSQCIGSGCGGGGGGTPATPPSGPVSEIISESLFNEMLLHRNDVACPATGFYTYDAFIAAANAFPGFGTTGGADTQKRELAAFLAQTSHETTGGWDTAPDGPYTWAYCFKEEVGGVWGPDYCQPSPQWPCADGQKYYGRGPIQLSWNYNYGPAGEAIGQDLLGNPGLVAADSTVSFETALWYWMTAAAAQAVLPRRHHGPVGALARRRGRREAAGVWRPHQHHQRRPRVRPRRRRSCCQPDRLLQTLLRHVWSQLRRQLGLLRPEPLRKHNLKHHQ

SEQ ID NO: 20427 - protein, 334 aa, Zea mays subsp. mays
  misc_feature (1)..(334): Ceres Seq. ID no. 12382154
MTRALAMVAMLATAALFFMSARAQQCGMQAGGALCPDCLCCSQWGYCGSTPDYCTGGCQSQCIGSGCGGGGGGTPATPPSGPVSEIISESLFNEMLLHRNDVACPATGFYTYDAFIAAANAFPGFGTTGGADTQKRELAAFLAQTSHETTGGWDTAPDGPYTWAYCFKEEVGGVWGPDYCQPSPQWPCADGQKYYGRGPIQLSWNYNYGPAGEAIGQDLLGNPGLVAADSTVSFETALWYWMTAAAAQAVLPRRHHGPVGALARRRGRREAAGVWRPHQHHQRRPRVRPRRRRSCCQPDRLLQTLLRHVWSQLRRQLGLLRPEPLRKHNLKHHQ

SEQ ID NO: 20428 - protein, 328 aa, Zea mays subsp. mays
  misc_feature (1)..(328): Ceres Seq. ID no. 12382155
MVAMLATAALFFMSARAQQCGMQAGGALCPDCLCCSQWGYCGSTPDYCTGGCQSQCIGSGCGGGGGGTPATPPSGPVSEIISESLFNEMLLHRNDVACPATGFYTYDAFIAAANAFPGFGTTGGADTQKRELAAFLAQTSHETTGGWDTAPDGPYTWAYCFKEEVGGVWGPDYCQPSPQWPCADGQKYYGRGPIQLSWNYNYGPAGEAIGQDLLGNPGLVAADSTVSFETALWYWMTAAAAQAVLPRRHHGPVGALARRRGRREAAGVWRPHQHHQRRPRVRPRRRRSCCQPDRLLQTLLRHVWSQLRRQLGLLRPEPLRKHNLKHHQ

SEQ ID NO: 20429 - DNA, 1761 bp, Zea mays subsp. mays
  misc_feature (1)..(1761): Ceres Seq. ID no. 12382163
gcacgagaccattacctagaacatcctaatcaaaaaagaaggaacatcgaagaaaggaaggaggtgggcggcaatggaggatgcgatggcggcggacgggaagagcgtgctgcaggggcggtacgagctggggcgggtgctggggcacggcaacttcgggcgggtgcacgcggcgcgggacctgcgcacgggccgcagcgtcgcggtcaaggtggtggccaaggacaagctggagcgcgcgggcatggcggagcagatcaagcgggagatcgccgtcatgaagatggtgtcccaccccaacatcgtggagctgcacgaggtgatggccacccgctccaagatctacctcgcgctcgagctcgtccgcggcggggagctcttctcccgcatcgcgcgcgcggggcgggtccgggaggacgtggcgcgctgttacttccggcagctcgtcgccgcggtcgacttctgccacggccgcggggtgttccaccgagacctgaagctcgagaacctgctcctcgacgaggtaggcaacctcaaagtggcggactttgggctcagcgcgctcgccgggcacgcgcgctccgacgggctgctccataccgcctgtggcacgccgtcatacgtcgcccccgaggtgctcggcgggaagggctacgacggcgccaaggcggacctctggtcctgtggcgtcatcctctacgtgctcctcgttggcagcttgccattccacgaggacaacctcatggtcatgtaccggaagatgcagcgcggcgagttcctctgcccgccgtgggtctcagcggacgcccggaagctcatcggcgagctgctcgaccccgacccgagcacgcgcatcaccgtcgctcgcctcgtcgagacgccgtggtaccggaagccgttgcccgtcctgccgccgctcaacctcaaggagccaaccccggacgcgcgccgcgccacctctgacaaggaagagcccgaggtgctgaacgcgttccacctcatctctttctcggagggcttcgacctgtccccgctcttcgaccagggccgtggcggcggcgtagggaggtctagcgcgggcggcatccgtttcgtgacgcgcgaggccgccagcagcgtggtctcccgtctggagtcgctggtcaccggccgcggagccaacatgcgcgtgacaaagagcggctcgcggggcgttcgtttggaggccgtgtcgcgcgggcgctcgggggcgcggctggcagtggccgcggagatcttcagcgtggcgccgtcggtgctcctggtggacgtgaagaaggacggcggcgacacgatggagtaccggtcgttctgttgcgaggagctccggccggcgctcaaggacatcgtctgggcctccagccaggacacaccgggcgccgcttgatgtcgtcgctgtcgctcctgccaccattattgtccttgcccatcaattgctgttggtgtccgtgtagggggggtcgtgctcgtgcattattgtttggtgacgaagtgatgtttgtttgtcgtttgccactctcgtagttggtttctgctgtggtgcagcggctgctggcagttgcagttgggctgttgcccgcggggcgcgagcaaagcagaatcagcgggaactagcattcgtatcctgcatgcacgcccataccgtgtcagctctgaagtgggaagaactgtaacaagtagtagtacgaatgtaccagggtgatgtgctttcgagtcacttgtgtatatattcatttttttagc

SEQ ID NO: 20430 - protein, 443 aa, Zea mays subsp. mays
  misc_feature (1)..(443): Ceres Seq. ID no. 12382164
MEDAMAADGKSVLQGRYELGRVLGHGNFGRVHAARDLRTGRSVAVKVVAKDKLERAGMAEQIKREIAVMKMVSHPNIVELHEVMATRSKIYLALELVRGGELFSRIARAGRVREDVARCYFRQLVAAVDFCHGRGVFHRDLKLENLLLDEVGNLKVADFGLSALAGHARSDGLLHTACGTPSYVAPEVLGGKGYDGAKADLWSCGVILYVLLVGSLPFHEDNLMVMYRKMQRGEFLCPPWVSADARKLIGELLDPDPSTRITVARLVETPWYRKPLPVLPPLNLKEPTPDARRATSDKEEPEVLNAFHLISFSEGFDLSPLFDQGRGGGVGRSSAGGIRFVTREAASSVVSRLESLVTGRGANMRVTKSGSRGVRLEAVSRGRSGARLAVAAEIFSVAPSVLLVDVKKDGGDTMEYRSFCCEELRPALKDIVWASSQDTPGAA

SEQ ID NO: 20431 - protein, 439 aa, Zea mays subsp. mays
  misc_feature (1)..(439): Ceres Seq. ID no. 12382165
MAADGKSVLQGRYELGRVLGHGNFGRVHAARDLRTGRSVAVKVVAKDKLERAGMAEQIKREIAVMKMVSHPNIVELHEVMATRSKIYLALELVRGGELFSRIARAGRVREDVARCYFRQLVAAVDFCHGRGVFHRDLKLENLLLDEVGNLKVADFGLSALAGHARSDGLLHTACGTPSYVAPEVLGGKGYDGAKADLWSCGVILYVLLVGSLPFHEDNLMVMYRKMQRGEFLCPPWVSADARKLIGELLDPDPSTRITVARLVETPWYRKPLPVLPPLNLKEPTPDARRATSDKEEPEVLNAFHLISFSEGFDLSPLFDQGRGGGVGRSSAGGIRFVTREAASSVVSRLESLVTGRGANMRVTKSGSRGVRLEAVSRGRSGARLAVAAEIFSVAPSVLLVDVKKDGGDTMEYRSFCCEELRPALKDIVWASSQDTPGAA

SEQ ID NO: 20432 - protein, 386 aa, Zea mays subsp. mays
  misc_feature (1)..(386): Ceres Seq. ID no. 12382166
MAEQIKREIAVMKMVSHPNIVELHEVMATRSKIYLALELVRGGELFSRIARAGRVREDVARCYFRQLVAAVDFCHGRGVFHRDLKLENLLLDEVGNLKVADFGLSALAGHARSDGLLHTACGTPSYVAPEVLGGKGYDGAKADLWSCGVILYVLLVGSLPFHEDNLMVMYRKMQRGEFLCPPWVSADARKLIGELLDPDPSTRITVARLVETPWYRKPLPVLPPLNLKEPTPDARRATSDKEEPEVLNAFHLISFSEGFDLSPLFDQGRGGGVGRSSAGGIRFVTREAASSVVSRLESLVTGRGANMRVTKSGSRGVRLEAVSRGRSGARLAVAAEIFSVAPSVLLVDVKKDGGDTMEYRSFCCEELRPALKDIVWASSQDTPGAA

SEQ ID NO: 20433 - DNA, 1066 bp, Zea mays subsp. mays
  misc_feature (1)..(1066): Ceres Seq. ID no. 12382167
ggaccattacctagaacatcctaatcaaaaaattttgagtcgcttccgagcagacgtcctccttggataaggggataggcgcgaggaagagcggcctatccgcatccgcataaatcccagtcaaattgaacgagagcgccactcccctctgctaatcccagtcaaatcgaagcaagcatggccatggcggccgtgggcgtgggcggcgcagtggcgttcctcctcccgcagcgccgccagggcgccgtcccctggagcggcgggcggcggcgggcgcccgtggcggtgcgcgcgtcgtacgaggccggggtgggcgtgatggcgaccaaggtggggatgatgacctacttcgatccggagacggggaagccggtgccggtgaccgtggtcgggttccgggagggcggcaacgtggtgacgcaggtgaagacggccgccacggacgggtacgacgccgtccaggtcgggtaccacggcgtgcgcgaggacaagctcacccgcccggagctgggccacctgggcaaggccggcgccccgccgctgcgccacctgcaggagttccggctcaccgccgtcgacgccttcgagcccggccagcccctcgacttcgccgacctcttcaaggagggcgacctcatcgacgtctccggcaactccatcggcaaggggttccaaggtggcatcaagaggcacaacttcaagcgcgggctgatgacgcacggttccaagagccaccggcagctgggttccatcggagccgggacgacgccgggccgcgtgtacaaggggaagaagatgcccgggaggatgggaggaaccaagaccaagatcaggaagctcaagatcgtcaagatcgacaacaacctccgggtgctcatgatcaagggggccgtgccagggaagcccgggaacctcctccgcataacgccggccaagatcgtcggcaagaacatccccaagaactagacttcttttttcaggggggtgaatgttgagtgtttgtgtttgttaccctgctacaaactggatgtaatcctttgccaatttccagtttttgaacacatgc

SEQ ID NO: 20434 - protein, 262 aa, Zea mays subsp. mays
  misc_feature (1)..(262): Ceres Seq. ID no. 12382168
MAMAAVGVGGAVAFLLPQRRQGAVPWSGGRRRAPVAVRASYEAGVGVMATKVGMMTYFDPETGKPVPVTVVGFREGGNVVTQVKTAATDGYDAVQVGYHGVREDKLTRPELGHLGKAGAPPLRHLQEFRLTAVDAFEPGQPLDFADLFKEGDLIDVSGNSIGKGFQGGIKRHNFKRGLMTHGSKSHRQLGSIGAGTTPGRVYKGKKMPGRMGGTKTKIRKLKIVKIDNNLRVLMIKGAVPGKPGNLLRITPAKIVGKNIPKN

SEQ ID NO: 20435 - protein, 260 aa, Zea mays subsp. mays
  misc_feature (1)..(260): Ceres Seq. ID no. 12382169
MAAVGVGGAVAFLLPQRRQGAVPWSGGRRRAPVAVRASYEAGVGVMATKVGMMTYFDPETGKPVPVTVVGFREGGNVVTQVKTAATDGYDAVQVGYHGVREDKLTRPELGHLGKAGAPPLRHLQEFRLTAVDAFEPGQPLDFADLFKEGDLIDVSGNSIGKGFQGGIKRHNFKRGLMTHGSKSHRQLGSIGAGTTPGRVYKGKKMPGRMGGTKTKIRKLKIVKIDNNLRVLMIKGAVPGKPGNLLRITPAKIVGKNIPKN

SEQ ID NO: 20436 - protein, 215 aa, Zea mays subsp. mays; identical to SEQ ID NO: 364
  misc_feature (1)..(215): Ceres Seq. ID no. 12382170

SEQ ID NO: 20437 - DNA, 1112 bp, Zea mays subsp. mays
  misc_feature (1)..(1112): Ceres Seq. ID no. 12382179
gcaggctgctccggcagactccttcaccgcgaagacttctcctctcctctctcctctctcccttccactcgcgctctcctggataccgcgcgcggcgacgagatggcgatagatcacgggacccctctcgggctgaagcggagaggcgccatgggcggaggtggcgagtgctgcgacgacggcagcgagacccggcggtggccgccgtggctgaggccgctgctgtccgcgagcttcttcgtccaatgcagggtccacgccgacgcgcacaagagcgagtgcaacatgtactgcctcgactgcatgggcgacgctctctgcgcgctctgcctcgccgcgcgccaccgcgaccaccactccatccagatacggaggtcgtcgtaccacgacgtgatccgggtgtcggagatacagaaggtgctggacatcgccggcgtgcagacgtacatcatcaacagcgcgcgcgtggtgttcctgaacgagcggccgcagccccgcccgggcaagggcgtcaccaacacctgcgaggtctgcgagcgcagcctcctcgactgcttccgcttctgctcccttgggtgcaagatagtgggcacggcccgtggctaccgtcctgggaagaagaagcacggcggcggcggcggtaacaagaagagggcggcgccggcgccggcgcttaaggacgtgcggtctgactcggaggactcgtgcaccagcaccagcggcgccagcagcgacaagagcagcgtcgtgcagagctcccctccgccgccgacctctgccagccaccgcccccccgggaacaagcgccggaagggcgtcccgcaccggtcgcccttgggcagcctcatcgtcgagctctaggactcttcgtcagcgccaaggcaaggcaaggcaacgcactctgtactgtacatgacataccccccgaagagaagggaataacaaacagtaagcctctggacgtggagggcgaagggcgacagcggtaagccgtaagatcggacaatccttagttttgcttcttctcaggttttgttttgcttttacagttactagcactctagcagtggtaccatcagtaagataaccgcgactaagttttgcagccttgt

SEQ ID NO: 20438 - protein, 286 aa, Zea mays subsp. mays
  misc_feature (1)..(286): Ceres Seq. ID no. 12382180
AGCSGRLLHREDFSSPLSSLPSTRALLDTARGDEMAIDHGTPLGLKRRGAMGGGGECCDDGSETRRWPPWLRPLLSASFFVQCRVHADAHKSECNMYCLDCMGDALCALCLAARHRDHHSIQIRRSSYHDVIRVSEIQKVLDIAGVQTYIINSARVVFLNERPQPRPGKGVTNTCEVCERSLLDCFRFCSLGCKIVGTARGYRPGKKKHGGGGGNKKRAAPAPALKDVRSDSEDSCTSTSGASSDKSSVVQSSPPPPTSASHRPPGNKRRKGVPHRSPLGSLIVEL

SEQ ID NO: 20439 - protein, 252 aa, Zea mays subsp. mays
  misc_feature (1)..(252): Ceres Seq. ID no. 12382181
MAIDHGTPLGLKRRGAMGGGGECCDDGSETRRWPPWLRPLLSASFFVQCRVHADAHKSECNMYCLDCMGDALCALCLAARHRDHHSIQIRRSSYHDVIRVSEIQKVLDIAGVQTYIINSARVVFLNERPQPRPGKGVTNTCEVCERSLLDCFRFCSLGCKIVGTARGYRPGKKKHGGGGGNKKRAAPAPALKDVRSDSEDSCTSTSGASSDKSSVVQSSPPPPTSASHRPPGNKRRKGVPHRSPLGSLIVEL

SEQ ID NO: 20440 - protein, 236 aa, Zea mays subsp. mays
  misc_feature (1)..(236): Ceres Seq. ID no. 12382182
MGGGGECCDDGSETRRWPPWLRPLLSASFFVQCRVHADAHKSECNMYCLDCMGDALCALCLAARHRDHHSIQIRRSSYHDVIRVSEIQKVLDIAGVQTYIINSARVVFLNERPQPRPGKGVTNTCEVCERSLLDCFRFCSLGCKIVGTARGYRPGKKKHGGGGGNKKRAAPAPALKDVRSDSEDSCTSTSGASSDKSSVVQSSPPPPTSASHRPPGNKRRKGVPHRSPLGSLIVEL

SEQ ID NO: 20441 - DNA, 1518 bp, Zea mays subsp. mays
  misc_feature (1)..(1518): Ceres Seq. ID no. 12382183
gaagttcattcagagagagcgcgagagggggtgtggctgtctatggcgtacgagaggatacacgaagctcctcagatggtggccatctcgccaaccaggctcaggatgaagctgctgggctccaatcacaaggacgaccccactcgcaagacgctgcaggcgtcgaggctcgacgacgatgaccaccccaacaacagcctcctgccgcaagagctcgacgaagagtaccccaaggaccaccgctccgactcttcccggtcgcggtccgacgccagccacgacaggatcagtggcagcgacgacgacagcggcaccaactttgagttctgcaaggacgagagggcgtccctgccggcttcggcggcgcccggaccgttcttccggcagcaggtgccgtccaagtggaacgacgcggagaagtggatcgcggggcgccaccaccgccacgtcgtgcactccaaccctgtcttctccaagaagcccgcggcgggcgcgcccaccgagctgtcgtctaataggtcctcgcacaagaagccccgcttctcgccggcggccgtgtcgacgcgggacgtcgggacggagatgacgcccgccgcgagccaggagcagtcgcgcagcggcacccccgccggcgccgccacgccggcgctcagcccgctctgctcggcgccgtccagcccgcggcgcggcggctcctcgtccgtgccggagcgggagctccggctccggacgcggcgggagatcgctgcgctcggcctgcagctcggcaagatgagcatcgcgtcgtgggccagcaaggaggagggtctcctcgccgccgcgtcgccggagaaggacaagcgctacgcggccgtcgacacggtggtcaggagcaaggcgttcgaagctcgcgccgccgcgtgggaggagtccaacaagtgtaaactcgcggcaagataccagaggaaagaggcgaagatagagggatgggaaagcttgcagaaatgcaagttcgaagccaagctgaggcaggccgaggcacgggctgagcagatgaaagcccgggcgaagcaggacctggcgaagaggctgtcagcgctgagccacaaggtggaggggaagcaggcgagggtggaggcgcgccggggccggcaggcgtcccggctggcgcggcaggtggagcgcatccgcgagaccggccgtgtgccgtgccggctccggcggtgctgcgcctggttcctgtagtgtagtgtagctagcatgctcccaatcgtcggaacaagtgctgatggcagtatgtcatggcatgggctgcttgatttgtaactacatgaaaattcatcgctggttcatgttcgtcccaatgccagggcagtggttggtagctgctcgccgctgtggtttggatgccgccgcctgcctttgtgccggttgtctagcttggcctgcaccctgcagccagctgatctagtgatgtggtgcccaaattcacgcacatgtaaagctccttgcaatttcaattaactcaggttattcttg

SEQ ID NO: 20442 - protein, 407 aa, Zea mays subsp. mays
  misc_feature (1)..(407): Ceres Seq. ID no. 12382184
EVHSERAREGVWLSMAYERIHEAPQMVAISPTRLRMKLLGSNHKDDPTRKTLQASRLDDDDHPNNSLLPQELDEEYPKDHRSDSSRSRSDASHDRISGSDDDSGTNFEFCKDERASLPASAAPGPFFRQQVPSKWNDAEKWIAGRHHRHVVHSNPVFSKKPAAGAPTELSSNRSSHKKPRFSPAAVSTRDVGTEMTPAASQEQSRSGTPAGAATPALSPLCSAPSSPRRGGSSSVPERELRLRTRREIAALGLQLGKMSIASWASKEEGLLAAASPEKDKRYAAVDTVVRSKAFEARAAAWEESNKCKLAARYQRKEAKIEGWESLQKCKFEAKLRQAEARAEQMKARAKQDLAKRLSALSHKVEGKQARVEARRGRQASRLARQVERIRETGRVPCRLRRCCAWFL

SEQ ID NO: 20443 - protein, 393 aa, Zea mays subsp. mays
  misc_feature (1)..(393): Ceres Seq. ID no. 12382185
MAYERIHEAPQMVAISPTRLRMKLLGSNHKDDPTRKTLQASRLDDDDHPNNSLLPQELDEEYPKDHRSDSSRSRSDASHDRISGSDDDSGTNFEFCKDERASLPASAAPGPFFRQQVPSKWNDAEKWIAGRHHRHVVHSNPVFSKKPAAGAPTELSSNRSSHKKPRFSPAAVSTRDVGTEMTPAASQEQSRSGTPAGAATPALSPLCSAPSSPRRGGSSSVPERELRLRTRREIAALGLQLGKMSIASWASKEEGLLAAASPEKDKRYAAVDTVVRSKAFEARAAAWEESNKCKLAARYQRKEAKIEGWESLQKCKFEAKLRQAEARAEQMKARAKQDLAKRLSALSHKVEGKQARVEARRGRQASRLARQVERIRETGRVPCRLRRCCAWFL

SEQ ID NO: 20444 - protein, 382 aa, Zea mays subsp. mays
  misc_feature (1)..(382): Ceres Seq. ID no. 12382186
MVAISPTRLRMKLLGSNHKDDPTRKTLQASRLDDDDHPNNSLLPQELDEEYPKDHRSDSSRSRSDASHDRISGSDDDSGTNFEFCKDERASLPASAAPGPFFRQQVPSKWNDAEKWIAGRHHRHVVHSNPVFSKKPAAGAPTELSSNRSSHKKPRFSPAAVSTRDVGTEMTPAASQEQSRSGTPAGAATPALSPLCSAPSSPRRGGSSSVPERELRLRTRREIAALGLQLGKMSIASWASKEEGLLAAASPEKDKRYAAVDTVVRSKAFEARAAAWEESNKCKLAARYQRKEAKIEGWESLQKCKFEAKLRQAEARAEQMKARAKQDLAKRLSALSHKVEGKQARVEARRGRQASRLARQVERIRETGRVPCRLRRCCAWFL

SEQ ID NO: 20445 - DNA, 1432 bp, Zea mays subsp. mays
  misc_feature (1)..(1432): Ceres Seq. ID no. 12382187
atgacaagtaaattagagattgatgcacgcagtagtaattaagacaggaatcgtaatccccccttgtttttggtttagtagtaaatctgcctgctgctccaagtagtagttaaaaaaacccagagaagcgcggtgggctgcgtataaatagccggccggccggaaagggggaaacgggcaggcaaacaaacaacacacactcgcgaggagcaggagcaggagcgatcaggacaacgctttggactcctggactggacctaccccgatggcgccagcctcctctccgatgagacagtaatccagcgagcgcgagtgagaggcaaccagcaaccatgaggccagacacggcggcctccgcctctccgactccgaagaagaaacccgacagtaaagccgcgctggacctcgcgtcgtggagcttcaacgtcaccacgtccgtcgggctcatcatggtcaacaaggctctaatggcgacgtacgggttcacgttcgccacgacgttaacggggctgcatttcgcgaccaccaccgtgatgaccctcgtgttccggtgggtcggcctgagccagccgtcgcagcttccgttaccggacctagccaagttcgtggtgttctccaacctgtccatcgtggggatgaacgtcagcctgatgtggaactccgtcggcttctaccaggtagccaagctgtgcatgatcccggcgtcgtgcctcctggaggtggtcttggaccgcgtgcactactcccgggacaccaggctcagcatcgcggtcgtgctcgctggagtggcggtgtgcaccgtcactgacgtgagcgtcaacgccagaggcctggtcgcggccgtcgtggctgtctggagcacggctctgcagcagtattatgttcatttcctccagcgcaagcactctctcaactcgttcagcctgctgggccacacggcgccggcgcaggcagggtcgctgctgctggcagggccgttcgttgactacctgctgacagggcaaagggtggaccacttcagcttctcgtctctcgctctgttgttcctcgcgctgtcgtgcttcatcgcgatcggggtcaacctgagccagttcatctgcatcggccgcttctccgccgtgtccttccaggtcctgggccacatgaagaccgtgctcgtcctctccctcggcttcctcttcttcggcaaggaaggcctcagcctccaggtcgtcgtcgggatggccctcgccgtcctcgggatggtgtggtacgggaacgcgtccgctaaaccgggcggcaaggagcgccgcggcaaagacctgccggtgagcctcaaacaagacaaggacgacactgacaaataatcatttgttatagttacaggtatacgtgtaatcgtttaatcacatggtgcaattgtttgccaaatcattgaacaatttcctgtggt

SEQ ID NO: 20446 - protein, 337 aa, Zea mays subsp. mays
  misc_feature (1)..(337): Ceres Seq. ID no. 12382188
MRPDTAASASPTPKKKPDSKAALDLASWSFNVTTSVGLIMVNKALMATYGFTFATTLTGLHFATTTVMTLVFRWVGLSQPSQLPLPDLAKFVVFSNLSIVGMNVSLMWNSVGFYQVAKLCMIPASCLLEVVLDRVHYSRDTRLSIAVVLAGVAVCTVTDVSVNARGLVAAVVAVWSTALQQYYVHFLQRKHSLNSFSLLGHTAPAQAGSLLLAGPFVDYLLTGQRVDHFSFSSLALLFLALSCFIAIGVNLSQFICIGRFSAVSFQVLGHMKTVLVLSLGFLFFGKEGLSLQVVVGMALAVLGMVWYGNASAKPGGKERRGKDLPVSLKQDKDDTDK

SEQ ID NO: 20447 - protein, 298 aa, Zea mays subsp. mays
  misc_feature (1)..(298): Ceres Seq. ID no. 12382189
MVNKALMATYGFTFATTLTGLHFATTTVMTLVFRWVGLSQPSQLPLPDLAKFVVFSNLSIVGMNVSLMWNSVGFYQVAKLCMIPASCLLEVVLDRVHYSRDTRLSIAVVLAGVAVCTVTDVSVNARGLVAAVVAVWSTALQQYYVHFLQRKHSLNSFSLLGHTAPAQAGSLLLAGPFVDYLLTGQRVDHFSFSSLALLFLALSCFIAIGVNLSQFICIGRFSAVSFQVLGHMKTVLVLSLGFLFFGKEGLSLQVVVGMALAVLGMVWYGNASAKPGGKERRGKDLPVSLKQDKDDTDK

SEQ ID NO: 20448 - protein, 292 aa, Zea mays subsp. mays
  misc_feature (1)..(292): Ceres Seq. ID no. 12382190
MATYGFTFATTLTGLHFATTTVMTLVFRWVGLSQPSQLPLPDLAKFVVFSNLSIVGMNVSLMWNSVGFYQVAKLCMIPASCLLEVVLDRVHYSRDTRLSIAVVLAGVAVCTVTDVSVNARGLVAAVVAVWSTALQQYYVHFLQRKHSLNSFSLLGHTAPAQAGSLLLAGPFVDYLLTGQRVDHFSFSSLALLFLALSCFIAIGVNLSQFICIGRFSAVSFQVLGHMKTVLVLSLGFLFFGKEGLSLQVVVGMALAVLGMVWYGNASAKPGGKERRGKDLPVSLKQDKDDTDK

SEQ ID NO: 20449 - DNA, 1084 bp, Zea mays subsp. mays
  misc_feature (1)..(1084): Ceres Seq. ID no. 12382191
ggaagaagcttcgaaccccttctggccatctctcgtcctcctttcaattcttgagctttgtgcttccatctcctctcctctgttctcttctttgtctctgcgtgcctgttcttgtcgtctcgctcgatcgtaagtgcaacggaataagaatggcgtcgccgtcagcgtcaggagagaagaagactacgatcctggtggcgaggaagggccggctgcggcagcgctacgacggcgagtaccgcctggtggccgggtgcgtgccgtaccgcgtggacgcggacggccagacgcagctgctcatggtgtccacgcccaacagggacgacctcgtcttccccaagggcgggtgggaggacgacgaggacgtgcacgaggcggcgtgccgcgaagcgctggaggaggccggcgtcaggggcgccatcaaccgaagtgcgctcgggatgtgggtgttcaggagcaagagcagtccggtgagcagcgacagcccccggggcgcctgcaagggctacatcttcgcgctggaggtggcggaggagctggagcagtggccggagcaggacacccacggcaggcagtgggtctccccggcggacgcgtaccgcctctgccgctacgactggatgcgcgaggcgctgtcggcactgctcgaccgcctcacggaggagcccgagccccccaagtcccccgccgcggacggcctcggcgagcacgcaggcgtgtgcatgatggtcaaggcgaccacagccgctgcggatcgagcggtggcgctctgctagtggcatcattctgaacatgtgcaaatcctcatcatctgggtcgtcaggctcggctgttcgttcgaacttggtgtggttggtcggtgaatgcagtgtatggaaacttgtctcgtcaatccagggcttgtaaatgatgtcggttacgccacgtgttaaatcaaatggctacaactgtccgtagtgcgtagctgagagtttccttgtcaaatctattgaggtttccactgtttgatcctcgcttcgtgtgctaaccttctcgacttctttcaactgtccccccctatatacaatatcttagttttgttttt

SEQ ID NO: 20450 - protein, 257 aa, Zea mays subsp. mays
  misc_feature (1)..(257): Ceres Seq. ID no. 12382192
KKLRTPSGHLSSSFQFLSFVLPSPLLCSLLCLCVPVLVVSLDRKCNGIRMASPSASGEKKTTILVARKGRLRQRYDGEYRLVAGCVPYRVDADGQTQLLMVSTPNRDDLVFPKGGWEDDEDVHEAACREALEEAGVRGAINRSALGMWVFRSKSSPVSSDSPRGACKGYIFALEVAEELEQWPEQDTHGRQWVSPADAYRLCRYDWMREALSALLDRLTEEPEPPKSPAADGLGEHAGVCMMVKATTAAADRAVALC

SEQ ID NO: 20451 - protein, 208 aa, Zea mays subsp. mays
  misc_feature (1)..(208): Ceres Seq. ID no. 12382193
MASPSASGEKKTTILVARKGRLRQRYDGEYRLVAGCVPYRVDADGQTQLLMVSTPNRDDLVFPKGGWEDDEDVHEAACREALEEAGVRGAINRSALGMWVFRSKSSPVSSDSPRGACKGYIFALEVAEELEQWPEQDTHGRQWVSPADAYRLCRYDWMREALSALLDRLTEEPEPPKSPAADGLGEHAGVCMMVKATTAAADRAVALC

SEQ ID NO: 20452 - protein, 158 aa, Zea mays subsp. mays
  misc_feature (1)..(158): Ceres Seq. ID no. 12382194
MVSTPNRDDLVFPKGGWEDDEDVHEAACREALEEAGVRGAINRSALGMWVFRSKSSPVSSDSPRGACKGYIFALEVAEELEQWPEQDTHGRQWVSPADAYRLCRYDWMREALSALLDRLTEEPEPPKSPAADGLGEHAGVCMMVKATTAAADRAVALC

SEQ ID NO: 20453 - DNA, 1418 bp, Zea mays subsp. mays
  misc_feature (1)..(1418): Ceres Seq. ID no. 12382218
gcacgagaccattacctagaacatcctaatcgaaaaaaagagctcgagaccgacaggacgagactcgcagctagctgacacggccgagaagcagcttcattgcaggcgtagtacgtacccagcagcagctagcactagcagtccatcggagcgacgatggtgagaaggacggtgctggcggcgctgctggtggccgccgccctcgccggcggcgcgcgggcgcagctcaaggaggggttctacgactactcctgcccacaggcggagaagatcgtcaaggactacgtgaaggcgcacatcccccacgcgcccgacgtcgcctccaccctgctccgcacccacttccacgactgcttcgtcaggggctgcgacgcgtcagtgctgctcaacgcgacgggcggcagcgaggcggagaaggacgcggcgcccaacctgacgctgcgcggcttcggcttcatcgaccgcatcaaggcgctgctcgagaaggagtgccccggcgtggtgtcctgcgccgacatcgtcgcgctcgccgcccgcgactccgtcggcgtcatcggcggtccgttctggagcgtgccgacggggaggcgcgacggcaccgtgtccatcaagcaggaggcgctggaccagatccccgcgcccaccatgaacttcacccaactcctccagtccttccagaacaagagcctcaacctcgccgacctcgtctggctctcaggggctcacacgatcggcatctcccaatgcaactccttcagcgagcgcctgtacaacttcacggggcgcggcgggcccgacgacgcggacccgtcgctggacccgctgtacgccgcgaagttgcggctcaagtgcaagacgctgacggacaacacgacgatcgtggagatggaccccggcagcttccgcaccttcgacctgagctactaccgcggcgtgctcaagcggcggggcctgttccagtccgacgccgcgctcatcaccgacgccgcctccaaggccgacatcctcagcgtgatcaacgcgccgcccgaggtgttcttccaggtcttcgcgggctccatggtcaagatgggcgccatcgaggtcaagaccggctccgagggcgagatcaggaagcactgcgccctcgtcaacaagcactaggcggcggaattcatgcgggagatggctccattgctcgcaaaaaatccttgtgagacacacaacatgctctgcatctgcaggcgttgtcgtcaccttggtggacgtagtacatcggtgcatggattatctgttgtttaatttgtacgttcagttcattctgtttcttgtattcttttggttcctttcctcttgtttattcatggatgatgaggtgtttctgttttattctctggttcagctgtaaccatgtaacatgtaaggtgcgcgttttgtcc

SEQ ID NO: 20454 - protein, 328 aa, Zea mays subsp. mays
  misc_feature (1)..(328): Ceres Seq. ID no. 12382219
MVRRTVLAALLVAAALAGGARAQLKEGFYDYSCPQAEKIVKDYVKAHIPHAPDVASTLLRTHFHDCFVRGCDASVLLNATGGSEAEKDAAPNLTLRGFGFIDRIKALLEKECPGVVSCADIVALAARDSVGVIGGPFWSVPTGRRDGTVSIKQEALDQIPAPTMNFTQLLQSFQNKSLNLADLVWLSGAHTIGISQCNSFSERLYNFTGRGGPDDADPSLDPLYAAKLRLKCKTLTDNTTIVEMDPGSFRTFDLSYYRGVLKRRGLFQSDAALITDAASKADILSVINAPPEVFFQVFAGSMVKMGAIEVKTGSEGEIRKHCALVNKH

SEQ ID NO: 20455 - protein, 165 aa, Zea mays subsp. mays
  misc_feature (1)..(165): Ceres Seq. ID no. 12382220
MNFTQLLQSFQNKSLNLADLVWLSGAHTIGISQCNSFSERLYNFTGRGGPDDADPSLDPLYAAKLRLKCKTLTDNTTIVEMDPGSFRTFDLSYYRGVLKRRGLFQSDAALITDAASKADILSVINAPPEVFFQVFAGSMVKMGAIEVKTGSEGEIRKHCALVNKH

SEQ ID NO: 20456 - DNA, 1367 bp, Zea mays subsp. mays
  misc_feature (1)..(1367): Ceres Seq. ID no. 12382275
aaaaacccttcctctcccattcttccttttttttctttccacctcgcgcctcgcctcgcctctcccaccatggcctccgccgccgccgccctctaccggagcccctccttgctgagccgccgccacctcctcatccgcctcctctccacgcagacccagctcgtcaccccaccgacgcccaccaccccggccgacctgtcccgcctcaagtcctccatccgcgacgccgccaccaccccggacgcgcttgccaccctgttcctctcgggcctcccgcacccggcctccctcgccgtcttccgcctcgtcaagcccgcctccgaccgcgccctctccgcgctcctatccgcctaccacgacaaccgcctttacgaccgcaccgtccgggccttcaacaccctccccgccgagctcggtatcaagccgggactcgtctcccacaacgtcctcctcaaggccctcgtcgccagcggggacgtcgccgcagcccacaccttattcgacgaaatgcctgacaccgctggcgtccaaccggacatcgtctcctgcaacgagatcctcaagggctacctcaacgccggcgacgccgacgcctttgatcggctagtcaaggagatcgctggtccgaaaaggcgcctgaagcctaatgtcgggacctacaacctccggatggccctgctgtgctccaaaatgaggagctttgaagctgaagaactgttggatgtcatgggggcaaacggcgtcccgcccaaccgcacgagcttcaacacggtcatcaaggggctctgcaacgagggggaggtgggcgctgccatggctctcttcaagaggatgccggaggtgcccaggcagcacggcaaaggggtctcccccaactttgagacctacattatgctgctcgaggctcttgtcaagaagaatttgtttgatcctgcgctggagatctgcaaggagtgcctgcgcaacaagtgggcgccgccattccaagctgttaaaggtttggttcagggtttgctcaagagcaggaaggccaagcacgcaagggaggttttcatggccatgagaaaggctgtcaagggtgacgccaagcaggagtggatcaaggttgaggctcagttcccgattttgcttgctgacaagaaagcctaaccaccaggatcattttgcagcctacatctgttattgctcaaaatggtttgttttagatgagctttgcattttaagttaattatgaaatgggtgactgttgatggtttaccattcactcatgtatgcttagttacttatgacacaaaatgcttctcatccgggtccttttatattctaagttccatgaactcggaatgcacactgcagatcttcatgtt

SEQ ID NO: 20457 - protein, 382 aa, Zea mays subsp. mays
  misc_feature (1)..(382): Ceres Seq. ID no. 12382276
KNPSSPILPFFSFHLAPRLASPTMASAAAALYRSPSLLSRRHLLIRLLSTQTQLVTPPTPTTPADLSRLKSSIRDAATTPDALATLFLSGLPHPASLAVFRLVKPASDRALSALLSAYHDNRLYDRTVRAFNTLPAELGIKPGLVSHNVLLKALVASGDVAAAHTLFDEMPDTAGVQPDIVSCNEILKGYLNAGDADAFDRLVKEIAGPKRRLKPNVGTYNLRMALLCSKMRSFEAEELLDVMGANGVPPNRTSFNTVIKGLCNEGEVGAAMALFKRMPEVPRQHGKGVSPNFETYIMLLEALVKKNLFDPALEICKECLRNKWAPPFQAVKGLVQGLLKSRKAKHAREVFMAMRKAVKGDAKQEWIKVEAQFPILLADKKA

SEQ ID NO: 20458 - protein, 359 aa, Zea mays subsp. mays
  misc_feature (1)..(359): Ceres Seq. ID no. 12382277
MASAAAALYRSPSLLSRRHLLIRLLSTQTQLVTPPTPTTPADLSRLKSSIRDAATTPDALATLFLSGLPHPASLAVFRLVKPASDRALSALLSAYHDNRLYDRTVRAFNTLPAELGIKPGLVSHNVLLKALVASGDVAAAHTLFDEMPDTAGVQPDIVSCNEILKGYLNAGDADAFDRLVKEIAGPKRRLKPNVGTYNLRMALLCSKMRSFEAEELLDVMGANGVPPNRTSFNTVIKGLCNEGEVGAAMALFKRMPEVPRQHGKGVSPNFETYIMLLEALVKKNLFDPALEICKECLRNKWAPPFQAVKGLVQGLLKSRKAKHAREVFMAMRKAVKGDAKQEWIKVEAQFPILLADKKA

SEQ ID NO: 20459 - protein, 213 aa, Zea mays subsp. mays
  misc_feature (1)..(213): Ceres Seq. ID no. 12382278
MPDTAGVQPDIVSCNEILKGYLNAGDADAFDRLVKEIAGPKRRLKPNVGTYNLRMALLCSKMRSFEAEELLDVMGANGVPPNRTSFNTVIKGLCNEGEVGAAMALFKRMPEVPRQHGKGVSPNFETYIMLLEALVKKNLFDPALEICKECLRNKWAPPFQAVKGLVQGLLKSRKAKHAREVFMAMRKAVKGDAKQEWIKVEAQFPILLADKKA

SEQ ID NO: 20460 - DNA, 1250 bp, Zea mays subsp. mays
  misc_feature (1)..(1250): Ceres Seq. ID no. 12382282
aagaaaaggagaaccactgctcgcgctttgcaccagaccactagctccgagaagcggcaggcaggcaggcactcgaacaaatcagcagagcagggacacatgatatatataatatataaaccgagagagcacagagcaacccaagagagcaactgagcagccagccgtggaggaagagatgtacccataccgcatgagcaacgtgatgatcgggtacctgaacctggccacgctcctggcctcgctccccatcatcggggcggggctgtggctggcaaggggtagctcctcctcctccaccaccacgtgctcgtcgatcctgcagacgccgctcctcgccgtgggcttcgcggcgctgctggtctcgctcgccggcttcgtgggcgcctgcttccacgtggcctgggcgctgcggctgtacctcgccgccgtcgcgctgctcgtcgccttcctcctcggcctcaccgcgttcggcttcgcggtcaccgcgggcggcggcggcgcgcaggtgtacggccggccgtaccgggagtaccgcgtcacggactactcggcgtggctccagaagcgcatgcaggacgacaggtactggcgccccgccctcgcctgcgtcgtcgggtccaaggcctgccccaagatccagaactggacgcccatggactacctccagcacgatctcacgccaatacagtccggctgctgcaagccgccgacggcgtgccagtacagcggaggcatgccagtcggggcgcaggacgaggactgctaccggtggaacaacgccccggacatcctctgctaccggtgcgactcgtgcagggccggcgtgatggagcaggtgcgccaggactggcacaagatctttgtgctcgacgtcgccgtgctcgccgctctcgtctgcatctgctcatgcgggtgctgcgccttcaggaacgctcgccgctcccggtcccagtacccatacggggtaaaccaaacgtccaagataaacccacgctgggactactggtggcgatgatggggtggtagaagagaacaaatctactaggctagctgtagcttctcaatgcctgtatgatattttgatccaatcttctgtggaaaaaagataaaataacacttgggatctgtatgtgttattagcccctgtggtactatgtttgtttccaggtctgcagagtttagggtttagggtttctgtaaatatttgagttaagaggagactaagccatgaagtaaaagagatgcct

SEQ ID NO: 20461 - protein, 279 aa, Zea mays subsp. mays
  misc_feature (1)..(279): Ceres Seq. ID no. 12382283
MYPYRMSNVMIGYLNLATLLASLPIIGAGLWLARGSSSSSTTTCSSILQTPLLAVGFAALLVSLAGFVGACFHVAWALRLYLAAVALLVAFLLGLTAFGFAVTAGGGGAQVYGRPYREYRVTDYSAWLQKRMQDDRYWRPALACVVGSKACPKIQNWTPMDYLQHDLTPIQSGCCKPPTACQYSGGMPVGAQDEDCYRWNNAPDILCYRCDSCRAGVMEQVRQDWHKIFVLDVAVLAALVCICSCGCCAFRNARRSRSQYPYGVNQTSKINPRWDYWWR

SEQ ID NO: 20462 - protein, 274 aa, Zea mays subsp. mays
  misc_feature (1)..(274): Ceres Seq. ID no. 12382284
MSNVMIGYLNLATLLASLPIIGAGLWLARGSSSSSTTTCSSILQTPLLAVGFAALLVSLAGFVGACFHVAWALRLYLAAVALLVAFLLGLTAFGFAVTAGGGGAQVYGRPYREYRVTDYSAWLQKRMQDDRYWRPALACVVGSKACPKIQNWTPMDYLQHDLTPIQSGCCKPPTACQYSGGMPVGAQDEDCYRWNNAPDILCYRCDSCRAGVMEQVRQDWHKIFVLDVAVLAALVCICSCGCCAFRNARRSRSQYPYGVNQTSKINPRWDYWWR

SEQ ID NO: 20463 - protein, 270 aa, Zea mays subsp. mays
  misc_feature (1)..(270): Ceres Seq. ID no. 12382285
MIGYLNLATLLASLPIIGAGLWLARGSSSSSTTTCSSILQTPLLAVGFAALLVSLAGFVGACFHVAWALRLYLAAVALLVAFLLGLTAFGFAVTAGGGGAQVYGRPYREYRVTDYSAWLQKRMQDDRYWRPALACVVGSKACPKIQNWTPMDYLQHDLTPIQSGCCKPPTACQYSGGMPVGAQDEDCYRWNNAPDILCYRCDSCRAGVMEQVRQDWHKIFVLDVAVLAALVCICSCGCCAFRNARRSRSQYPYGVNQTSKINPRWDYWWR

SEQ ID NO: 20464 - DNA, 1411 bp, Zea mays subsp. mays
  misc_feature (1)..(1411): Ceres Seq. ID no. 12382286
gcacgagaccattacctagaacatcctaatcgaaaactctctctctctctctctctctctataacaaacaggacgaggggagattgtggaatgctcacccagcaaggaggccgacctgttcaatgccgtcctgggaggcctaggccagttcggcatcataaccagggccaggatcctgctgcaggaggctccggagaaggtgacgtgggtgagggccttctacgacgacttgggcgccttcaccagggaccaggagctgctggtgtcgattccggattcggtggactacgtggaagggttcatggtcctgaacgagcggtccctccacagctcctccatcgccttccccgcgagcgtggacttcagcccggatttcggcaccaggagcagccctaggatctactactgcgtcgagttcgcggtccaccaccaccacggttaccagcagcagtctcaggcggccgtggaggccatctcgaggcggatgagccacatggcgtcccagctgtacagcgtggaggtgtcctacttggacttcctgaaccgggtcaggatggaggaggtgagcctgcggagcgccgggatgtgggaggaggtgcaccacccgtggctcaacatgttcgtgcccaaggccggggtcgctggcttcagggatctgctcatggacaacgtctcgccggatagcttccagggcctcatcctcatctacccactcctcagagacaagtgggacaccaacacgtcggtcgtgatcccggactccgggcccaccgcggacgacccggtgatgtacgtggtcggcatcctcaggtccgcgaaccctggtccagaagaagacggtgacggctgctcccaccnctgcctgcncgagctnctccncannnnncgcnggatcgccgacgccncggaggcgcncctcggcgccaagcagtacctgcctcaccacccgaccccggcccgctggcagcagcacctggnccggcgttgggagcgcttcgcggaccgcaaggcccggttcgacccgctgcgcatcntggggcccggccagggcatattccctcggacggcccaggatgctgccgccgctgctgcgtacgggagctagcattttatatatatacggcatgaaacagtatagattattaattatcagctgactagctaggatgcgatcttctttcttcttcttcttctctcttcagtttcctctgcattttgagggcatgtggggccggttgttgggttattctgtgaggctctggcctccggggcactttgagaggacctgatggtggtggtggtggtggtgattggtgattggtgaatgtcactgggaattttggaacttttgtacaggttgatggaggaagcacaggctttaagtttataagggaatagacatagcgcttct

SEQ ID NO: 20465 - protein, 267 aa, Zea mays subsp. mays
  misc_feature (1)..(267): Ceres Seq. ID no. 12382287
  misc_feature (186)..(186): Xaa is any aa, unknown or other
  misc_feature (189)..(189): Xaa is any aa, unknown or other
  misc_feature (191)..(191): Xaa is any aa, unknown or other
  misc_feature (193)..(193): Xaa is any aa, unknown or other
  misc_feature (194)..(194): Xaa is any aa, unknown or other
  misc_feature (195)..(195): Xaa is any aa, unknown or other
  misc_feature (197)..(197): Xaa is any aa, unknown or other
  misc_feature (202)..(202): Xaa is any aa, unknown or other
  misc_feature (205)..(205): Xaa is any aa, unknown or other
  misc_feature (226)..(226): Xaa is any aa, unknown or other
  misc_feature (245)..(245): Xaa is any aa, unknown or other
MVLNERSLHSSSIAFPASVDFSPDFGTRSSPRIYYCVEFAVHHHHGYQQQSQAAVEAISRRMSHMASQLYSVEVSYLDFLNRVRMEEVSLRSAGMWEEVHHPWLNMFVPKAGVAGFRDLLMDNVSPDSFQGLILIYPLLRDKWDTNTSVVIPDSGPTADDPVMYVVGILRSANPGPEEDGDGCSHXCLXEXLXXXRXIADAXEAXLGAKQYLPHHPTPARWQQHLXRRWERFADRKARFDPLRIXGPGQGIFPRTAQDAAAAAAYGS

SEQ ID NO: 20466 - protein, 206 aa, Zea mays subsp. mays
  misc_feature (1)..(206): Ceres Seq. ID no. 12382288
  misc_feature (125)..(125): Xaa is any aa, unknown or other
  misc_feature (128)..(128): Xaa is any aa, unknown or other
  misc_feature (130)..(130): Xaa is any aa, unknown or other
  misc_feature (132)..(132): Xaa is any aa, unknown or other
  misc_feature (133)..(133): Xaa is any aa, unknown or other
  misc_feature (134)..(134): Xaa is any aa, unknown or other
  misc_feature (136)..(136): Xaa is any aa, unknown or other
  misc_feature (141)..(141): Xaa is any aa, unknown or other
  misc_feature (144)..(144): Xaa is any aa, unknown or other
  misc_feature (165)..(165): Xaa is any aa, unknown or other
  misc_feature (184)..(184): Xaa is any aa, unknown or other
MSHMASQLYSVEVSYLDFLNRVRMEEVSLRSAGMWEEVHHPWLNMFVPKAGVAGFRDLLMDNVSPDSFQGLILIYPLLRDKWDTNTSVVIPDSGPTADDPVMYVVGILRSANPGPEEDGDGCSHXCLXEXLXXXRXIADAXEAXLGAKQYLPHHPTPARWQQHLXRRWERFADRKARFDPLRIXGPGQGIFPRTAQDAAAAAAYGS

SEQ ID NO: 20467 - protein, 203 aa, Zea mays subsp. mays
  misc_feature (1)..(203): Ceres Seq. ID no. 12382289
  misc_feature (122)..(122): Xaa is any aa, unknown or other
  misc_feature (125)..(125): Xaa is any aa, unknown or other
  misc_feature (127)..(127): Xaa is any aa, unknown or other
  misc_feature (129)..(129): Xaa is any aa, unknown or other
  misc_feature (130)..(130): Xaa is any aa, unknown or other
  misc_feature (131)..(131): Xaa is any aa, unknown or other
  misc_feature (133)..(133): Xaa is any aa, unknown or other
  misc_feature (138)..(138): Xaa is any aa, unknown or other
  misc_feature (141)..(141): Xaa is any aa, unknown or other
  misc_feature (162)..(162): Xaa is any aa, unknown or other
  misc_feature (181)..(181): Xaa is any aa, unknown or other
MASQLYSVEVSYLDFLNRVRMEEVSLRSAGMWEEVHHPWLNMFVPKAGVAGFRDLLMDNVSPDSFQGLILIYPLLRDKWDTNTSVVIPDSGPTADDPVMYVVGILRSANPGPEEDGDGCSHXCLXEXLXXXRXIADAXEAXLGAKQYLPHHPTPARWQQHLXRRWERFADRKARFDPLRIXGPGQGIFPRTAQDAAAAAAYGS

SEQ ID NO: 20468 - DNA, 2085 bp, Zea mays subsp. mays
  misc_feature (1)..(2085): Ceres Seq. ID no. 12382290
gcacgagaccattacctagaacatcctaatcgaaatatcctccctccatcagttctcgtcctgttctttgctacgtacggctctgtgcctagctagcaatagcatagcaatgagggcgcttggaacggttgcttgggcatggctgctgctcctgcagcagctcgccggggcctctcatgtcgtctacgagaaccttgaggtggaggcgacgacagccgccgtgcggccctccattgtcgaccccctgctgaggaccgggtaccatttccagcctcgcaagaactggatcaatgatcccaacgctccactgtactacaaggggtggtaccatctcttctaccaatacaacccgaagggcgcggtgtggggcaacatcgtgtggggccactcggtgtcgcgagacctgatcaactgggtggccctgcaaccggcgatcgagccgagcatcccgtccgacaggtacgggtgctggtctgggtcggcgacgacgctggccgacggcacgccggcgatcatgtacacgggcgtgaaccggccggacgtgaactaccaggtgcagaacgtggcgtacccgcggaacaggtcggacccgctgctgcgggagtgggtgaagccgtcgcacaaccccatcatcgtgcccgggggcggcatcaacgcgacgcagttccgggacccgaccacggcctggcgcggcgcgggagacggccgctggcgcctgctcatcggcagcgtcaccgaggcgcgccacggcgtggcgtacgtgtaccggagccgcgacttcaggcgctggacgcgggcgcggcggccgctccactcggcggccacggggatgtgggagtgccccgacttctacccggtcggcgcgcccggccggcgcgcgggcgtcgagacggagacgtcggcggcgtccgacggcgacggcggctctcctcgtcgtcgtgagcagtccaagtacgtgctgaagaacagcctcgacctgcggcggtacgactactacaccgtcggcacgtacgaccgggcggccgagcggtacgtgccggacgaccccgcgggagacgagcgccacctgcggtacgactacggcaacttctacgcgtccaagacgttcttcgaccccgtgaagcggcggcgggtgctctggggctgggccaacgagtccgacaccgccgcngacgacgtggccaaagggtgggctgggatccaggcgattcctangacggtgtggctagaccccagcgggaagcagctgctgcagtggccaatcgaggaggtggaggctctgagaggcaggtcggtcgctctcaagaacagggtgatcaagccaggacagcacgtcgaggtcaccgggatacaaacggcacaggccgacgtggaggtgagcttcgaggtgtcgagcctggcgggcgccgaggcgctgctggacccggcgctggccagcgacgcgcagcggctgtgcggcgccaggggcgcggccgtggagggcggcgtgggcccgttcgggctgtgggtgctcgcctccggcgaccgcgaggagaggaccgccgtgttcttcagggtgtttcgcggcggcggcggccacgacgacaagcccgtggtgctcatgtgcaccgaccccaccaagtcatctctggacgcgaacctgtaccagccgacgttcgcaggttttgtcgacacagacatttcgaacgggaagatatctctcagaactctgatcgaccggtcggtggtggagagctttggaggcgggggcaggacctgcatcctgtcgagggtgtacccgtcgctcgccatcggcagcaaggctcgcctctacgtgttcaacaacgggagggcggacgtcagggtgtcccgtctcaccgcgtgggagatgaagaagccactcatgaacggcgcttgaaatgtttttattgcgtgatatggaatggtgctcgcctttgtacaatatggtatggctagatacatatatatgagagcttccacgctcggtcgtcgtgtggaaaaaacctatgatgagtgtgtacgatcttagggatgttcgattcagatgccactaggggcaataactatattctaattcatgatttc

SEQ ID NO: 20469 - protein, 595 aa, Zea mays subsp. mays
  misc_feature (1)..(595): Ceres Seq. ID no. 12382291
  misc_feature (354)..(354): Xaa is any aa, unknown or other
  misc_feature (369)..(369): Xaa is any aa, unknown or other
MRALGTVAWAWLLLLQQLAGASHVVYENLEVEATTAAVRPSIVDPLLRTGYHFQPRKNWINDPNAPLYYKGWYHLFYQYNPKGAVWGNIVWGHSVSRDLINWVALQPAIEPSIPSDRYGCWSGSATTLADGTPAIMYTGVNRPDVNYQVQNVAYPRNRSDPLLREWVKPSHNPIIVPGGGINATQFRDPTTAWRGAGDGRWRLLIGSVTEARHGVAYVYRSRDFRRWTRARRPLHSAATGMWECPDFYPVGAPGRRAGVETETSAASDGDGGSPRRREQSKYVLKNSLDLRRYDYYTVGTYDRAAERYVPDDPAGDERHLRYDYGNFYASKTFFDPVKRRRVLWGWANESDTAXDDVAKGWAGIQAIPXTVWLDPSGKQLLQWPIEEVEALRGRSVALKNRVIKPGQHVEVTGIQTAQADVEVSFEVSSLAGAEALLDPALASDAQRLCGARGAAVEGGVGPFGLWVLASGDREERTAVFFRVFRGGGGHDDKPVVLMCTDPTKSSLDANLYQPTFAGFVDTDISNGKISLRTLIDRSVVESFGGGGRTCILSRVYPSLAIGSKARLYVFNNGRADVRVSRLTAWEMKKPLMNGA

SEQ ID NO: 20470 - protein, 460 aa, Zea mays subsp. mays
  misc_feature (1)..(460): Ceres Seq. ID no. 12382292
  misc_feature (219)..(219): Xaa is any aa, unknown or other
  misc_feature (234)..(234): Xaa is any aa, unknown or other
MYTGVNRPDVNYQVQNVAYPRNRSDPLLREWVKPSHNPIIVPGGGINATQFRDPTTAWRGAGDGRWRLLIGSVTEARHGVAYVYRSRDFRRWTRARRPLHSAATGMWECPDFYPVGAPGRRAGVETETSAASDGDGGSPRRREQSKYVLKNSLDLRRYDYYTVGTYDRAAERYVPDDPAGDERHLRYDYGNFYASKTFFDPVKRRRVLWGWANESDTAXDDVAKGWAGIQAIPXTVWLDPSGKQLLQWPIEEVEALRGRSVALKNRVIKPGQHVEVTGIQTAQADVEVSFEVSSLAGAEALLDPALASDAQRLCGARGAAVEGGVGPFGLWVLASGDREERTAVFFRVFRGGGGHDDKPVVLMCTDPTKSSLDANLYQPTFAGFVDTDISNGKISLRTLIDRSVVESFGGGGRTCILSRVYPSLAIGSKARLYVFNNGRADVRVSRLTAWEMKKPLMNGA

SEQ ID NO: 20471 - protein, 355 aa, Zea mays subsp. mays
  misc_feature (1)..(355): Ceres Seq. ID no. 12382293
  misc_feature (114)..(114): Xaa is any aa, unknown or other
  misc_feature (129)..(129): Xaa is any aa, unknown or other
MWECPDFYPVGAPGRRAGVETETSAASDGDGGSPRRREQSKYVLKNSLDLRRYDYYTVGTYDRAAERYVPDDPAGDERHLRYDYGNFYASKTFFDPVKRRRVLWGWANESDTAXDDVAKGWAGIQAIPXTVWLDPSGKQLLQWPIEEVEALRGRSVALKNRVIKPGQHVEVTGIQTAQADVEVSFEVSSLAGAEALLDPALASDAQRLCGARGAAVEGGVGPFGLWVLASGDREERTAVFFRVFRGGGGHDDKPVVLMCTDPTKSSLDANLYQPTFAGFVDTDISNGKISLRTLIDRSVVESFGGGGRTCILSRVYPSLAIGSKARLYVFNNGRADVRVSRLTAWEMKKPLMNGA

SEQ ID NO: 20472 - DNA, 1439 bp, Zea mays subsp. mays
  misc_feature (1)..(1439): Ceres Seq. ID no. 12382324
acaacatacagatacagctcggccggagctagagtagcgggcggcggcgagaggagaaaacaaggaagcgaggagatggcgggcgggggcagggatgggccggcggcgcgtcttctccggcgcgtccccgccgccgtgtccgtcctcttgatgctgacgctgtgctcccccgggccgcccggcgcggtggtggtggtgtcggcccggaaggtgggcgagacgtgcgcgctggaccggaactgcgacgccgggctgcactgcgagacgtgtgtggccgacggcaacgtgcggccgcgctgcacccgcgtcgctcccgtcgacccgcagaccaaggcgcgggacctgccgttcaaccgctacgcgtggctgacgacgcacaactcgttcgcgcggctcgggcagcggtcgcagaccggggtcgccatagccacgccgtggaaccagcaggacaccgtcaccgagcagctcaacaacggcgttaggggtctgatgctggacatgtacgacttccgcaacgacgtctggctctgccactcctacggcggcatctgccagaacttcaccgcctttcaaccggcggtgaacgtgctccgcgaggtggagcgcttcctgtcgcggaaccccgccgaggtggtgaccatcttcgtggaggactacgtggagtcgcccatggggctcacccgggtgctcaacgcgtcgggcctcgcgcgctacgtgctccccgcctggcgcatgcccaagagcggcggcgactggccgctgctcagcgacatggtccgcgacaaccaccgcctgctcgtcttcacctccaaggccgctaaggaggccgccgagggcatcgcctacgagtggcgctacgtcgtcgagaaccagtacgggaccaaggggatggtgaaggggacgtgccacaaccgcgccgagtcggccgccatgaacgacctgtcgaggtcgctggtgctcaactacttcagggacctcccgaacctgccggcggcgtgcaaggacaactcggcgcagctgctggacatggtcaccgcctgccacgacaagtccggggaccggtggcccaacttcatcgccgtggacttctacaagaggagcgaccggggcggcgcggcggaggccacggacaaggcgaacggcggcctagtctgcggctgcgggagcatatcggcctgcaacgccaactggacatgcactcccaggcacggcaggacgcccagaggcatcttcaacgcctcatctgacgcagcggcgtggaggccgccgccgccggtgctgcaatggcagaggctcatcctgctgccttttctccttgctcttcttatgggcctgtgagttctacgtattttgttgtatagacgggtacggatcggtttggttgcaggcaccgagcgtattttgttgtgtatatatacacacagatgacagattggtcg

SEQ ID NO: 20473 - protein, 445 aa, Zea mays subsp. mays
  misc_feature (1)..(445): Ceres Seq. ID no. 12382325
TTYRYSSAGARVAGGGERRKQGSEEMAGGGRDGPAARLLRRVPAAVSVLLMLTLCSPGPPGAVVVVSARKVGETCALDRNCDAGLHCETCVADGNVRPRCTRVAPVDPQTKARDLPFNRYAWLTTHNSFARLGQRSQTGVAIATPWNQQDTVTEQLNNGVRGLMLDMYDFRNDVWLCHSYGGICQNFTAFQPAVNVLREVERFLSRNPAEVVTIFVEDYVESPMGLTRVLNASGLARYVLPAWRMPKSGGDWPLLSDMVRDNHRLLVFTSKAAKEAAEGIAYEWRYVVENQYGTKGMVKGTCHNRAESAAMNDLSRSLVLNYFRDLPNLPAACKDNSAQLLDMVTACHDKSGDRWPNFIAVDFYKRSDRGGAAEATDKANGGLVCGCGSISACNANWTCTPRHGRTPRGIFNASSDAAAWRPPPPVLQWQRLILLPFLLALLMGL

SEQ ID NO: 20474 - protein, 420 aa, Zea mays subsp. mays
  misc_feature (1)..(420): Ceres Seq. ID no. 12382326
MAGGGRDGPAARLLRRVPAAVSVLLMLTLCSPGPPGAVVVVSARKVGETCALDRNCDAGLHCETCVADGNVRPRCTRVAPVDPQTKARDLPFNRYAWLTTHNSFARLGQRSQTGVAIATPWNQQDTVTEQLNNGVRGLMLDMYDFRNDVWLCHSYGGICQNFTAFQPAVNVLREVERFLSRNPAEVVTIFVEDYVESPMGLTRVLNASGLARYVLPAWRMPKSGGDWPLLSDMVRDNHRLLVFTSKAAKEAAEGIAYEWRYVVENQYGTKGMVKGTCHNRAESAAMNDLSRSLVLNYFRDLPNLPAACKDNSAQLLDMVTACHDKSGDRWPNFIAVDFYKRSDRGGAAEATDKANGGLVCGCGSISACNANWTCTPRHGRTPRGIFNASSDAAAWRPPPPVLQWQRLILLPFLLALLMGL

SEQ ID NO: 20475 - protein, 395 aa, Zea mays subsp. mays
  misc_feature (1)..(395): Ceres Seq. ID no. 12382327
MLTLCSPGPPGAVVVVSARKVGETCALDRNCDAGLHCETCVADGNVRPRCTRVAPVDPQTKARDLPFNRYAWLTTHNSFARLGQRSQTGVAIATPWNQQDTVTEQLNNGVRGLMLDMYDFRNDVWLCHSYGGICQNFTAFQPAVNVLREVERFLSRNPAEVVTIFVEDYVESPMGLTRVLNASGLARYVLPAWRMPKSGGDWPLLSDMVRDNHRLLVFTSKAAKEAAEGIAYEWRYVVENQYGTKGMVKGTCHNRAESAAMNDLSRSLVLNYFRDLPNLPAACKDNSAQLLDMVTACHDKSGDRWPNFIAVDFYKRSDRGGAAEATDKANGGLVCGCGSISACNANWTCTPRHGRTPRGIFNASSDAAAWRPPPPVLQWQRLILLPFLLALLMGL

SEQ ID NO: 20476 - DNA, 1171 bp, Zea mays subsp. mays
  misc_feature (1)..(1171): Ceres Seq. ID no. 12382384
gcacgagaccattacctagaacatcctaatcgaaaatctatcttatggtctctccctcaattctctggtgtacttcgcaatatccattagctgcatgttagaaaatgatatggtggctgtggagagggtaaatcagttcagtattcttccttccgaggcagcatggaaaatagaagagcatcttccttcttcaaattggcccaatcatggggacattgacattaaggatataaaggttaggtatcgatcaaatacacctttaattctgaaaggcattaatataagtatcagtggtggagaaaagataggagttgtaggaaggacaggcagtggcaagtcaactttaatccaagctttgttcaggctcgtagaacctgcagagggaaaaatgatcattgatggaatagacatatgcacactcggtctgcatgatctcagatctcgctttggcataattccacaggaaccagttctctttgaaggaacaattcgaagcaacattgatccaattgggcagttttcagatgcagaaatatggcaggctcttgagcgctgtcagctgaaagatgtagtagtttccaaacctgaaaaacttgatgctccagtggctgatagaggagagaactggagtgtaggccaaaggcagttgctctgtcttggccgtgtcatactgaagcagacccagatcttatttatggatgaggcaactgcttcagttgattcccaaactgatgccacgattcagaagatcacgagacaggagttttcatcatgtacaataattagcatcgcccacagaataccaacagtcatggactgtgatagagtcttggtgttggatgctggtctggtaaaagaatttgattcaccttcgaggttaatcgaacaaccgtccctcttcggtgcgatggttcaggagtatgccaatcgctcgtcgaatctgtaaccgtaccatgatactgagtatgtaaaaaataagtagaagttggttgcttgactttagtgtacatatggaggtagcttaactcctgatggtattgtagctttgcagtattttgataagaaactcacacaagagaggggaaatacatctaaagtttagagatcaccttttgaccttagcaaacaatgaatatttcttggaatgaacttgtaaccagtggcttttctc

SEQ ID NO: 20477 - protein, 283 aa, Zea mays subsp. mays
  misc_feature (1)..(283): Ceres Seq. ID no. 12382385
MLENDMVAVERVNQFSILPSEAAWKIEEHLPSSNWPNHGDIDIKDIKVRYRSNTPLILKGINISISGGEKIGVVGRTGSGKSTLIQALFRLVEPAEGKMIIDGIDICTLGLHDLRSRFGIIPQEPVLFEGTIRSNIDPIGQFSDAEIWQALERCQLKDVVVSKPEKLDAPVADRGENWSVGQRQLLCLGRVILKQTQILFMDEATASVDSQTDATIQKITRQEFSSCTIISIAHRIPTVMDCDRVLVLDAGLVKEFDSPSRLIEQPSLFGAMVQEYANRSSNL

SEQ ID NO: 20478 - protein, 278 aa, Zea mays subsp. mays
  misc_feature (1)..(278): Ceres Seq. ID no. 12382386
MVAVERVNQFSILPSEAAWKIEEHLPSSNWPNHGDIDIKDIKVRYRSNTPLILKGINISISGGEKIGVVGRTGSGKSTLIQALFRLVEPAEGKMIIDGIDICTLGLHDLRSRFGIIPQEPVLFEGTIRSNIDPIGQFSDAEIWQALERCQLKDVVVSKPEKLDAPVADRGENWSVGQRQLLCLGRVILKQTQILFMDEATASVDSQTDATIQKITRQEFSSCTIISIAHRIPTVMDCDRVLVLDAGLVKEFDSPSRLIEQPSLFGAMVQEYANRSSNL

SEQ ID NO: 20479 - protein, 185 aa, Zea mays subsp. mays
  misc_feature (1)..(185): Ceres Seq. ID no. 12382387
MIIDGIDICTLGLHDLRSRFGIIPQEPVLFEGTIRSNIDPIGQFSDAEIWQALERCQLKDVVVSKPEKLDAPVADRGENWSVGQRQLLCLGRVILKQTQILFMDEATASVDSQTDATIQKITRQEFSSCTIISIAHRIPTVMDCDRVLVLDAGLVKEFDSPSRLIEQPSLFGAMVQEYANRSSNL

SEQ ID NO: 20480 - DNA, 761 bp, Zea mays subsp. mays
  misc_feature (1)..(761): Ceres Seq. ID no. 12382501
gtgatgtggaggaacattcttggtcagtctttctaccagttctttgtgatgtggtatctccaaacgcaagggaaaaacttctttgggcttgaaggctctggtactgatattgttctgaatacgataattttcaactcattcgtcttctgtcaggtgttcaatgaaataagctctcgggagatggagaagatcaacgtgctcaagggcatgacaaggaactacgtgttcatggctgtcctcagcagcacggtgatcttccagttcatcatggtgcagtttctaggagagttcgccaacacgacgcccctgaccatacaccagtggctagccagcgtgctcctcggtctggccgggatgcccatcgccgccgccgtcaagctgatcccagtcggctcgtcgtgataccattgaagattgctgcggcctgggaagcacgggatgctgtccaagctgcatggtattcggtggagctgagctctctctgtctctctgtgtgcgtaaacttttggaatgcacggagggcaggctagggaaatggagcagcagctgcagtttgagaagttttgtagcctggaaatgtggctagattgcgtcggacctgtaagaaaacatcgtgtttgttggcgccgggaaaaagcagctagctgtggtggtggtggtgcagcagaattgttagattggtgattagaacttcgaaattgaatttagactgcaggatatttatggtggaggatgaatgtacggaaacgtggttcgttggc

SEQ ID NO: 20481 - protein, 133 aa, Zea mays subsp. mays
  misc_feature (1)..(133): Ceres Seq. ID no. 12382502
VMWRNILGQSFYQFFVMWYLQTQGKNFFGLEGSGTDIVLNTIIFNSFVFCQVFNEISSREMEKINVLKGMTRNYVFMAVLSSTVIFQFIMVQFLGEFANTTPLTIHQWLASVLLGLAGMPIAAAVKLIPVGSS

SEQ ID NO: 20482 - protein, 132 aa, Zea mays subsp. mays
  misc_feature (1)..(132): Ceres Seq. ID no. 12382503
MWRNILGQSFYQFFVMWYLQTQGKNFFGLEGSGTDIVLNTIIFNSFVFCQVFNEISSREMEKINVLKGMTRNYVFMAVLSSTVIFQFIMVQFLGEFANTTPLTIHQWLASVLLGLAGMPIAAAVKLIPVGSS

SEQ ID NO: 20483 - protein, 117 aa, Zea mays subsp. mays
  misc_feature (1)..(117): Ceres Seq. ID no. 12382504
MWYLQTQGKNFFGLEGSGTDIVLNTIIFNSFVFCQVFNEISSREMEKINVLKGMTRNYVFMAVLSSTVIFQFIMVQFLGEFANTTPLTIHQWLASVLLGLAGMPIAAAVKLIPVGSS

SEQ ID NO: 20484 - DNA, 2028 bp, Zea mays subsp. mays
  misc_feature (1)..(2028): Ceres Seq. ID no. 12382545
aggtcgtgaaattgattgaaatacctggggcttgagcgtgatatatagagggtggtagagaccaagcgacgttgggcgagcggcgccgccagggctgcgttggtcccttcaccggtgatgagcatccaccagatacaggaatgaacaacattgtgtaggcacctcatccagacatctaaggcgaaaaatgctgcgcctgcaccaccatagtgcacctgtctctccgcacgctgcgatttgtccaccgagtaggcttgcttgttcttgcatatgtaacaagccaaacagcagaatcaccgcttcccaggggtggtcttccataaggcggcgaatcaccactgttgccagtggccagtcagtaccaggatacacacctgatgatggcgatcaatgccttgaaacaggcaacaagctctcttttgctactgtgaaggaggctttcatcagccctgaactctgtgggtgtcagaagtgagctaattcttctagctctaccagcagtcttgggtcaagctattgatccaatagcacaacttatggagactgcatacatcggtagattaggtgcactggaattggcatcggctggtattggtatatcgatttttaatattgtgtcaaagatcttcaacataccactgttgagcattgcaacctcatttgtggcagaggatatttctaggagtgctaccaagcatcctagttcaggcaaattggagctgacatctgtatcatctgccctgatcttagctgctggaattggtataatggaagcattagcattgttcctaggatcaggattgtttcttaaactaatgggcgtgtcacctgtatctccaatgcacagacctgctaaactctttctttcattgagagctctcggagcacctgcaaatgtgattatgttggcagtccaaggtatctttcggggattcaaggatacaaagactccggtgttttatataggtttgggcaatctttctgctgtagcccttcttcctctacttatatatggctttaagcttggcataactggtgctgcaatttctacagttgtgtcccagtacattattacagttcttcttatttggtctctaagtaaaagagctgttttgcttcctccgcgaatagatcaattagagtttggtggatatctaaaatctggtggaatgctgttgggaagaactctttcaattctgctaactatgaccattggtacatcaatggctgctcggcaaggcccaacagcgatggctgctcatcagatttgtttgcaagtatggcttgctgtatccttgcttgcagatgcattagctgtttctgcccaggcgctgatagcaagctcttatgcaatattggactacaaaaaagttcaaaagacagcaatgtttgcgttgcagataggagtgtttagtgggttagctttggccattggattgtatgcctcatttggcaatatatctagactgtttaccagtgacccagaggtcctaacggttgtcaaatcttgtgcactgtcagcccatcaatgccctggccttcatctttgacggtctacattatggtgtatcagattttgaatatgtggctcaagctactatcgtggtgggtgttacgtcttcactcgtcctgttatgggctccgtctgtatttggcttggctggagtttgggctggtttgactacactcatggggttgcgtatggctgcaggcatcctgaggttgctacagaaagcgggcccttggtcgtttatgcacgaggagccataagctgaggtgtatcaactaccagcctgcgcagtttggagctgctaacttacttctgggagtttacatcactgcaaagattatccgagtgtcatggactcgctgaagatgttacccctgttactcctccggctcagaacaaaatctgacttcattgaatttcttaaaatcagtctgctagatggcatggtttggtttggattggtttggtgaaggcgtgaggcccatctgaacatcggtgcggcctctattttttttggc

SEQ ID NO: 20485 - protein, 337 aa, Zea mays subsp. mays
  misc_feature (1)..(337): Ceres Seq. ID no. 12382546
METAYIGRLGALELASAGIGISIFNIVSKIFNIPLLSIATSFVAEDISRSATKHPSSGKLELTSVSSALILAAGIGIMEALALFLGSGLFLKLMGVSPVSPMHRPAKLFLSLRALGAPANVIMLAVQGIFRGFKDTKTPVFYIGLGNLSAVALLPLLIYGFKLGITGAAISTVVSQYIITVLLIWSLSKRAVLLPPRIDQLEFGGYLKSGGMLLGRTLSILLTMTIGTSMAARQGPTAMAAHQICLQVWLAVSLLADALAVSAQALIASSYAILDYKKVQKTAMFALQIGVFSGLALAIGLYASFGNISRLFTSDPEVLTVVKSCALSAHQCPGLHL

SEQ ID NO: 20486 - protein, 260 aa, Zea mays subsp. mays
  misc_feature (1)..(260): Ceres Seq. ID no. 12382547
MEALALFLGSGLFLKLMGVSPVSPMHRPAKLFLSLRALGAPANVIMLAVQGIFRGFKDTKTPVFYIGLGNLSAVALLPLLIYGFKLGITGAAISTVVSQYIITVLLIWSLSKRAVLLPPRIDQLEFGGYLKSGGMLLGRTLSILLTMTIGTSMAARQGPTAMAAHQICLQVWLAVSLLADALAVSAQALIASSYAILDYKKVQKTAMFALQIGVFSGLALAIGLYASFGNISRLFTSDPEVLTVVKSCALSAHQCPGLHL

SEQ ID NO: 20487 - protein, 244 aa, Zea mays subsp. mays
  misc_feature (1)..(244): Ceres Seq. ID no. 12382548
MGVSPVSPMHRPAKLFLSLRALGAPANVIMLAVQGIFRGFKDTKTPVFYIGLGNLSAVALLPLLIYGFKLGITGAAISTVVSQYIITVLLIWSLSKRAVLLPPRIDQLEFGGYLKSGGMLLGRTLSILLTMTIGTSMAARQGPTAMAAHQICLQVWLAVSLLADALAVSAQALIASSYAILDYKKVQKTAMFALQIGVFSGLALAIGLYASFGNISRLFTSDPEVLTVVKSCALSAHQCPGLHL

SEQ ID NO: 20488 - DNA, 747 bp, Zea mays subsp. mays
  misc_feature (1)..(747): Ceres Seq. ID no. 12382591
gaacaaccctttccttgctaggctcggccacgggtccctgctgcgagcgcgatccgtgcttgcgttcgtccttccttctcactagctcctcatcacaccgtgcgctggtgcgtgcgtgcgtgcagcagcggggccacgatgccgcgggcgccaacagcggcgtctggatgacggtgccggcgttcggggactgggacaccaagaacggcgcgctgccggactactccatggacttctccaagatccgcgagatgcgcaagcagaacaagaaggagctctcccgcgccagcctcggcggcgacgacgacctcctcgcccacgctcacgcccagaagccgcaggccaacagcgcccagcccaagctcggccgcccctgccccgccgccgaccgccgaccgctccacgcccgcgaccactccccaacgggagggaagaagttcctgagctacttccagtgctgtatcaaagcctgaagaggagctgccgcaatgctatgtctgtgtgcctgtgctttgtcgcagcagaacactcgtgagcaattaggtcccggctttgttaagtatccaaaaatgtgcaatgtatttgccctgatggtcactcgtttgacctgttagcctgtatgaagaacaagtcaggttatggggccaggccgccaggcanccgtctatctgtacatggcaccatcgatttgtttgcgactggtggtataatgttgccctgtaatcattgtattggatgggaatttgc

SEQ ID NO: 20489 - protein, 156 aa, Zea mays subsp. mays
  misc_feature (1)..(156): Ceres Seq. ID no. 12382592
TTLSLLGSATGPCCERDPCLRSSFLLTSSSSHRALVRACVQQRGHDAAGANSGVWMTVPAFGDWDTKNGALPDYSMDFSKIREMRKQNKKELSRASLGGDDDLLAHAHAQKPQANSAQPKLGRPCPAADRRPLHARDHSPTGGKKFLSYFQCCIKA

SEQ ID NO: 20490 - protein, 101 aa, Zea mays subsp. mays
  misc_feature (1)..(101): Ceres Seq. ID no. 12382593
MTVPAFGDWDTKNGALPDYSMDFSKIREMRKQNKKELSRASLGGDDDLLAHAHAQKPQANSAQPKLGRPCPAADRRPLHARDHSPTGGKKFLSYFQCCIKA

SEQ ID NO: 20491 - protein, 81 aa, Zea mays subsp. mays
  misc_feature (1)..(81): Ceres Seq. ID no. 12382594
MDFSKIREMRKQNKKELSRASLGGDDDLLAHAHAQKPQANSAQPKLGRPCPAADRRPLHARDHSPTGGKKFLSYFQCCIKA

SEQ ID NO: 20492 - DNA, 2117 bp, Zea mays subsp. mays
  misc_feature (1)..(2117): Ceres Seq. ID no. 12382616
gcacgagaccattacctagaacatcctaatcgaaaacccgatttcaccgaccatttttccccatttcacagcgggcgaatatctctcatctcccccatcctctttcctgcaacaactcctacccacccgacagaaatatcctaagcgctgacccgaatacccgattcgctcctcgtccggtcgattcctgctcctaatcgctcgaatcgagtccttgccccgtgttccgtgccacaatctgggcgcttggctcccgcgagccggggttcttgggcctgggcggaggccatggacaagccggtggcgccgggcattatcaaggaggagctcctggagcagcagccgccgacgcaggacggtgtgggtggcggcggggatgcgccgcgcccgatggaggggctgcacgaggtgggtcccccgcctttcctcaccaagacgttcgaccttgtggaggacccggccaccgacgccgtcctctcctggagccgcgccggcaacagcttcatcgtctgggacccgcacgtcttcgccgacgggctgctcccgcgcctcttcaagcacagtaacttctccagcttcgtgcgccagctcaacacctatggcttcagaaggttgatcctgacaggtgggagtttgcaaatgaaggtttcctcagaggtcaaaggcacctgctgaagatgataaagagaaggaagccaccatcagctgtggcaccattgcgacagcaacgtgcccctgcttcttgcctggaggttggtgagtttggatttgaggaggagattgataggctgaagcgtgacaagaacattttaatcacagaagtagtaaaactaaggcaggagcagcaaagtactaaagatcatgtgagagccatggaggaaaggctacgagtggctgaacagaagcaggtacagatgatggggttcttggcaagagcaatgcggaacccagagttcttcctcagttggcccagcagcaagacaagaggaaggagctcgaggataccatctcaaagaaaagaaggcggcccattgacaacacaccattctacagtgatggggaaagcgaacagcttgattcacagttgaaaatgttcgagtcaggtgttctcaatgggctcaatgaacctgagctggagaatttagcagtgaacattcaggagcttgggaagggaagcatagatgatgggaacttgactcaagttagtgaccagtcagagctgaacgacgacttctgggcagagcttttggtcgaagattttggagacaaggcaggacagccagagttggagggaagaactgaagacgtgaatgaccttgctcaacaactggggtatctgagttcttctagcccaaaatagagccagttcctaatggttgcccccacaatcactggtgctttccctaccctactgttgcagaccatcctgatcaaaccggtacttttcaaattcaattcaatgacacaaacctgttaaaatctggtaacattttcattccatttcttttatattgctggattagccaggaatgatgatggatctggcagacaaggtttgacgacccatccttctaaccatatccattatgtttgcgcagttgcatcttcagatttgccctcatcttttcttcttcttcttctgaaacattctaaattgctccttatccagttgactggtggtggagaggtgttcatactgaaggcgtgctgtggagaggtcactgccttgacgttgaaggcttagcgctgtactctgctgtgggagttacgtgtggggtgttggctaaatgtctcttccggcgtcttctggcaaaatgatctcgtggacggtgactggcaaagatgcctaggggccaacgtatacgtacacagctgttatcagatcttgttcaaagtcattgcgcggttttgacggtgctatgtatcgatcagggttctggccttctggggttgggttgtagaattgactggctgatctagtgttctccatgtatgactggtgtaaccttaaaacaccctcagcttgttgttgaactgtgacaagcatctcgtttttttgttgtactccattttcatcatcattgtacatcaaattgctgaattatgaacagatccct

SEQ ID NO: 20493 - protein, 136 aa, Zea mays subsp. mays
  misc_feature (1)..(136): Ceres Seq. ID no. 12382617
MIKRRKPPSAVAPLRQQRAPASCLEVGEFGFEEEIDRLKRDKNILITEVVKLRQEQQSTKDHVRAMEERLRVAEQKQVQMMGFLARAMRNPEFFLSWPSSKTRGRSSRIPSQRKEGGPLTTHHSTVMGKANSLIHS

SEQ ID NO: 20494 - protein, 128 aa, Zea mays subsp. mays
  misc_feature (1)..(128): Ceres Seq. ID no. 12382618
MDKPVAPGIIKEELLEQQPPTQDGVGGGGDAPRPMEGLHEVGPPPFLTKTFDLVEDPATDAVLSWSRAGNSFIVWDPHVFADGLLPRLFKHSNFSSFVRQLNTYGFRRLILTGGSLQMKVSSEVKGTC

SEQ ID NO: 20495 - protein, 94 aa, Zea mays subsp. mays
  misc_feature (1)..(94): Ceres Seq. ID no. 12382619
MEGLHEVGPPPFLTKTFDLVEDPATDAVLSWSRAGNSFIVWDPHVFADGLLPRLFKHSNFSSFVRQLNTYGFRRLILTGGSLQMKVSSEVKGTC

SEQ ID NO: 20496 - DNA, 1578 bp, Zea mays subsp. mays
  misc_feature (1)..(1578): Ceres Seq. ID no. 12382623
caaaaatggtgccatgcatggatctgctgtccggagttgttacagcatccttgatatagtacacaggctatggactccaattgatggggagtttgatgactacattatcaatccttagggtagcggttaccaatcactacacacagcagttcaggcatctgatagctcaccgctggaggtccagattagaacccagcgaatgcatgagtatgcagaacatggccttgctgctcattggctgtataaggagagcaaagttgagtacagaagtagcatgagtaagagaataagacaaagtacatcatattcatctagttcttcagaagatgaaagttctatacaggatgatatcccatcaaagtacagttcaatgaaagtggggcatccagtgctaagaattgaaggtagtcacttactagcagctgtcgtagtcagtatagataaaggaggaaaggaattgattgttgctgtaagttttagtcttgaagcttctgaagctgtagctgagctaaggtcatcttttcagttgaagcgttgggaagcctatgctaggcttcataaaaaggtttctgagaagtggtggtgtgcacctggacatggtgactggtcaacaaatctggagaggtacacactatgccaggatgggatatttcataagcaagaccaatttgggagacttttacctacatttattcaaataattgatttggcggaagaggaagaggaagagtattggatggttgtatctgccatattcgagggaaaggaaacttgcagtctaccatctgaatcgagttatgctgataaatcatcatctgaacctccaagttctactccattaagcgaccccatcaacaataaggtgcatttgctcagaaccatgcttcaatgggaggagcaagttcgccgtggcgcatctttggcagagaaaagtctcagtgcaagcacctgcacaaaggcaatcctgcgtgaggtggccataatattctggcctaatggcaagattatgagaatgagcactggtagcacagctgctgacgctgctagaagaatgggcgtcgaagggaagctgctctgggttaatggccaactagtgctgccccaaacagagctaaaggatggggatatagttgaagtgagggtatagatgcaagtaccagattccagtacaccttcctcagggttattgatcatattggttcctcagttcttgccctatcttggcaatgcatcgaacctcaattgtacagtccattggtcgaaatgaatcgaagaaagaaggattaggtcctgtgtacataagaaactgcaagtataaaagctgtctgtccagctgtgcttctccttgcccatagttacagtggtaatgtaaatttccgtaagtaaagatgtagtaatgtttagttagtggtccacatttcagcgtgaagttatgaagtgcagtagcgctgcaagttttttttatatatatgtccaaagtagatgtctcatgctgcctaaaaaaatgtccatgtcccgtaatttggcaagccaagattgccagaaaactcatggaggatatggcaaccattttcaact

SEQ ID NO: 20497 - protein, 315 aa, Zea mays subsp. mays
  misc_feature (1)..(315): Ceres Seq. ID no. 12382624
MHEYAEHGLAAHWLYKESKVEYRSSMSKRIRQSTSYSSSSSEDESSIQDDIPSKYSSMKVGHPVLRIEGSHLLAAVVVSIDKGGKELIVAVSFSLEASEAVAELRSSFQLKRWEAYARLHKKVSEKWWCAPGHGDWSTNLERYTLCQDGIFHKQDQFGRLLPTFIQIIDLAEEEEEEYWMVVSAIFEGKETCSLPSESSYADKSSSEPPSSTPLSDPINNKVHLLRTMLQWEEQVRRGASLAEKSLSASTCTKAILREVAIIFWPNGKIMRMSTGSTAADAARRMGVEGKLLWVNGQLVLPQTELKDGDIVEVRV

SEQ ID NO: 20498 - protein, 290 aa, Zea mays subsp. mays
  misc_feature (1)..(290): Ceres Seq. ID no. 12382625
MSKRIRQSTSYSSSSSEDESSIQDDIPSKYSSMKVGHPVLRIEGSHLLAAVVVSIDKGGKELIVAVSFSLEASEAVAELRSSFQLKRWEAYARLHKKVSEKWWCAPGHGDWSTNLERYTLCQDGIFHKQDQFGRLLPTFIQIIDLAEEEEEEYWMVVSAIFEGKETCSLPSESSYADKSSSEPPSSTPLSDPINNKVHLLRTMLQWEEQVRRGASLAEKSLSASTCTKAILREVAIIFWPNGKIMRMSTGSTAADAARRMGVEGKLLWVNGQLVLPQTELKDGDIVEVRV

SEQ ID NO: 20499 - protein, 258 aa, Zea mays subsp. mays
  misc_feature (1)..(258): Ceres Seq. ID no. 12382626
MKVGHPVLRIEGSHLLAAVVVSIDKGGKELIVAVSFSLEASEAVAELRSSFQLKRWEAYARLHKKVSEKWWCAPGHGDWSTNLERYTLCQDGIFHKQDQFGRLLPTFIQIIDLAEEEEEEYWMVVSAIFEGKETCSLPSESSYADKSSSEPPSSTPLSDPINNKVHLLRTMLQWEEQVRRGASLAEKSLSASTCTKAILREVAIIFWPNGKIMRMSTGSTAADAARRMGVEGKLLWVNGQLVLPQTELKDGDIVEVRV

SEQ ID NO: 20500 - DNA, 745 bp, Zea mays subsp. mays
  misc_feature (1)..(745): Ceres Seq. ID no. 12382779
aaaaattccaagagatgaacatcttgttgagtcacttgtgttgctgcattcttattctaggcatctacgctccgacatccgccacatcagacaatcctcctctgcaggatgtatgccccatggctccccagggcgagcggcgagagttgtccatgaacgggttcctctgcaagcatccgagcaccatcctggcgtccgacttcaagactctgatgctaaaccacgccggagacctggacagcatagcctcggtcgtcggtgagcatggtgaccgctgccgagttcccaggcctgaacaccctgggcctgtcgatggcgcgcaccgacatcgccccctacggggtggtgctcccgcactcccacccgcgggcgtcggagatgatgttcgtacacggtggcagcgtggtggccggcttcctggacaccgagggcaggctgttccagaagcgtctcggtgagggagaggtgttcgtcttcccccgcggcttgcttcactacgtcatgaactacggtttcggcctcgcgacggcgttctccgtgctgaacagccagaaccccggcgtggtcggtgtcgcccacgccatgttttttgcgagtgagtcggacgtagtcgaaggtctaatggccaggatgctcaagtttggagagatggaggtgactagtgacaacaacatcactgctggtttcccatgggcattctgatctgagtaggtgcaattcaagatcgttggtggtttaagttccc

SEQ ID NO: 20501 - protein, 151 aa, Zea mays subsp. mays
  misc_feature (1)..(151): Ceres Seq. ID no. 12382780
KFQEMNILLSHLCCCILILGIYAPTSATSDNPPLQDVCPMAPQGERRELSMNGFLCKHPSTILASDFKTLMLNHAGDLDSIASVVGEHGDRCRVPRPEHPGPVDGAHRHRPLRGGAPALPPAGVGDDVRTRWQRGGRLPGHRGQAVPEASR

SEQ ID NO: 20502 - protein, 147 aa, Zea mays subsp. mays
  misc_feature (1)..(147): Ceres Seq. ID no. 12382781
MNILLSHLCCCILILGIYAPTSATSDNPPLQDVCPMAPQGERRELSMNGFLCKHPSTILASDFKTLMLNHAGDLDSIASVVGEHGDRCRVPRPEHPGPVDGAHRHRPLRGGAPALPPAGVGDDVRTRWQRGGRLPGHRGQAVPEASR

SEQ ID NO: 20503 - protein, 145 aa, Zea mays subsp. mays
  misc_feature (1)..(145): Ceres Seq. ID no. 12382782
MVTAAEFPGLNTLGLSMARTDIAPYGVVLPHSHPRASEMMFVHGGSVVAGFLDTEGRLFQKRLGEGEVFVFPRGLLHYVMNYGFGLATAFSVLNSQNPGVVGVAHAMFFASESDVVEGLMARMLKFGEMEVTSDNNITAGFPWAF

SEQ ID NO: 20504 - DNA, 1388 bp, Zea mays subsp. mays
  misc_feature (1)..(1388): Ceres Seq. ID no. 12382787
gcacgagaccattacctagaacatcctaatcgaaaaaaacaaaaaaagggccttcacttgactccacagccacagctagctgctgtggtgaagagtagcaggttcggcggccgggagggggcagccaacacgacgatggagcggttcggcctggacggcggcggtggcggtggcgagctgccgccggggttccggttccacccgacggacgaggagctcatcacctactacctcctccgcaaggccgtggacggcagcttctgcggccgcgccatcgcggagatcgacctgaacaagtgcgagccatgggagctcccggacaaggcgaagatgggggagaaggagtggtacttctacagcctccgcgaccgcaagtacccgacgggcctgcgcaccaaccgcgccacggtggccggctactggaaggccaccggcaaggaccgcgagatccgcagcggccgcaccggcgcgctggtgggcatgaagaagacgctcgtcttctaccgcggccgcgcccccaagggacagaagacgcactgggtcatgcacgagtaccgcctcgagggcgcctacgcctaccatttcctccccagctccacaagggacgagtgggtgatcgcgagggtgttccagaagcccggcgaggtcccacctgcagcccgcaagcaccgcctcggcgcccttagcagcactaccggcaccgccgcgggcgattcctgcttctcggactctacctcggcctccatcggcggcgcgtcgtcgtcatccacgcctggcccgctgttcgcgtcggcggccgccgccgtggccaatgccggcgccgccgacggcgacaccagctcctactgcggcggcgctgccaaccatggcaacctggtcaccggccgtgagctcgtgccctgcttctccactgccaccattaacggccccctagttgccgccgcgctcggcatcgggcagccgtacaacgcagccccgctgccgttcgagcagcagccgccgcctccggccttcctgccgagcctgcgttcccttcaggacaacctccagcttccaccgttcctctcagcaggcggtctgggcggcggcggggctctccactggctccccgccggcggcatggaggtcaaggtcgagggccgctcggcgccaccgcagatggctgtcggccccggccagctcgatggcgctttcggctggagcttctagttcttcgctgcactacatggttgtgcccatctatctagctagtagtggtttcttcatgcgttgtacgttaagcttggttaatcaactgctagtaagtgactgggtcgtcgttctaagtaatgtagtaactgtgttgtagtctctcatctaactgcagtagcagctttatttgttcgtgg

SEQ ID NO: 20505 - protein, 402 aa, Zea mays subsp. mays
  misc_feature (1)..(402): Ceres Seq. ID no. 12382788
ARDHYLEHPNRKKQKKGLHLTPQPQLAAVVKSSRFGGREGAANTTMERFGLDGGGGGGELPPGFRFHPTDEELITYYLLRKAVDGSFCGRAIAEIDLNKCEPWELPDKAKMGEKEWYFYSLRDRKYPTGLRTNRATVAGYWKATGKDREIRSGRTGALVGMKKTLVFYRGRAPKGQKTHWVMHEYRLEGAYAYHFLPSSTRDEWVIARVFQKPGEVPPAARKHRLGALSSTTGTAAGDSCFSDSTSASIGGASSSSTPGPLFASAAAAVANAGAADGDTSSYCGGAANHGNLVTGRELVPCFSTATINGPLVAAALGIGQPYNAAPLPFEQQPPPPAFLPSLRSLQDNLQLPPFLSAGGLGGGGALHWLPAGGMEVKVEGRSAPPQMAVGPGQLDGAFGWSF

SEQ ID NO: 20506 - protein, 357 aa, Zea mays subsp. mays
  misc_feature (1)..(357): Ceres Seq. ID no. 12382789
MERFGLDGGGGGGELPPGFRFHPTDEELITYYLLRKAVDGSFCGRAIAEIDLNKCEPWELPDKAKMGEKEWYFYSLRDRKYPTGLRTNRATVAGYWKATGKDREIRSGRTGALVGMKKTLVFYRGRAPKGQKTHWVMHEYRLEGAYAYHFLPSSTRDEWVIARVFQKPGEVPPAARKHRLGALSSTTGTAAGDSCFSDSTSASIGGASSSSTPGPLFASAAAAVANAGAADGDTSSYCGGAANHGNLVTGRELVPCFSTATINGPLVAAALGIGQPYNAAPLPFEQQPPPPAFLPSLRSLQDNLQLPPFLSAGGLGGGGALHWLPAGGMEVKVEGRSAPPQMAVGPGQLDGAFGWSF

SEQ ID NO: 20507 - protein, 292 aa, Zea mays subsp. mays
  misc_feature (1)..(292): Ceres Seq. ID no. 12382790
MGEKEWYFYSLRDRKYPTGLRTNRATVAGYWKATGKDREIRSGRTGALVGMKKTLVFYRGRAPKGQKTHWVMHEYRLEGAYAYHFLPSSTRDEWVIARVFQKPGEVPPAARKHRLGALSSTTGTAAGDSCFSDSTSASIGGASSSSTPGPLFASAAAAVANAGAADGDTSSYCGGAANHGNLVTGRELVPCFSTATINGPLVAAALGIGQPYNAAPLPFEQQPPPPAFLPSLRSLQDNLQLPPFLSAGGLGGGGALHWLPAGGMEVKVEGRSAPPQMAVGPGQLDGAFGWSF

SEQ ID NO: 20508 - DNA, 1436 bp, Zea mays subsp. mays
  misc_feature (1)..(1436): Ceres Seq. ID no. 12382811
acgccaagcgcgcaattaaccctcactaaagggaacaaaagctggagctccaccgcggtggcggccgctctagaactagtggatcccccgggctgcaggaattcgcacgagaccattacctagaacatcctaatcgaaaaaccgggctgaggaggccatcggacgcacaaggacagcagagtgcaggaccggagcggagcgaccgagagtgtgtgggagagagatggcgtccagcgcctcgtctaccctgccgctgccaacgctctcgctcgccgtgatcctgctcgcgctgtgcgcccgcggcggcgaggccaggccgccaccgccgctccacggcgtgcgcccgctcgccttcgacgaggggtacacccagatcttcggcagcgccaacctcgcgctcctccgcgacggtaggcgcgtccgcctcacgctcgacgagtccaccggagccgggttcgcgtcgcaggacgtcttcctccacggtttcttcagcgccgccatcaagctgcccgccgactacgcggcgggcgtcgtcgtcgcgttctacctgtcgaacggcgacgtgtacgagaagacgcacgacgagctggacttcgagttcctgggcaacgtgcggggccgcgagtggcgggtgcagaccaacgtgtacggcaacggcagcaccgacgccggccgggaggagcgctacgacctcccattcgaccccaccgacgacttccaccactactccatcctctggaccagcgaccgcatcactttctacgtcgacgagaccccgatccaggaggtggtgcggacggcggccatgggcgcggcgttcccgtccaagcccatgtccctgtacgccacgatctgggacggctccgcgtgggccacgctgggcggccggtaccgcgtcaactacaagtacgcgccgttcgtggccgagttcgccgacctcgccatccagggcttcgccgtcgaccccgccgccgaccacgccgtggcgtcgtgcggcgcgggcctgggcctgggcctgggcccgggcccgctcgccgtgtccgcggagcagcgctcggccatggcggcgttccggcgcgcccacacctcctactcctactgccacgaccggcggcggtaccccgtcgcgctgtcggagtgcggggccggcgcggggctcctccccggccgcatgtttggccccgacgggatgaagcagcaccggcgccacctggggcgcggcgcgcggccaccgcggcggcgcccaggacgacgacgtcatgtgatcgccggtccctggcccctcgccacgtcgcggcggcggggcggggatggttgcacgctgtggattggattggattggattgggttgggggggttgggcggggattgtccgggatggaaaagctcgcctcattgtaccattcgcgccatggaagtaggtcgtgtttattgcc

SEQ ID NO: 20509 - protein, 404 aa, Zea mays subsp. mays
  misc_feature (1)..(404): Ceres Seq. ID no. 12382812
MASSASSTLPLPTLSLAVILLALCARGGEARPPPPLHGVRPLAFDEGYTQIFGSANLALLRDGRRVRLTLDESTGAGFASQDVFLHGFFSAAIKLPADYAAGVVVAFYLSNGDVYEKTHDELDFEFLGNVRGREWRVQTNVYGNGSTDAGREERYDLPFDPTDDFHHYSILWTSDRITFYVDETPIQEVVRTAAMGAAFPSKPMSLYATIWDGSAWATLGGRYRVNYKYAPFVAEFADLAIQGFAVDPAADHAVASCGAGLGLGLGPGPLAVSAEQRSAMAAFRRAHTSYSYCHDRRRYPVALSECGAGAGLLPGRMFGPDGMKQHRRHLGRGARPPRRRPGRRRHVIAGPWPLATSRRRGGDGCTLWIGLDWIGLGGLGGDCPGWKSSPHCTIRAMEVGRVYC

SEQ ID NO: 20510 - protein, 210 aa, Zea mays subsp. mays
  misc_feature (1)..(210): Ceres Seq. ID no. 12382813
MGAAFPSKPMSLYATIWDGSAWATLGGRYRVNYKYAPFVAEFADLAIQGFAVDPAADHAVASCGAGLGLGLGPGPLAVSAEQRSAMAAFRRAHTSYSYCHDRRRYPVALSECGAGAGLLPGRMFGPDGMKQHRRHLGRGARPPRRRPGRRRHVIAGPWPLATSRRRGGDGCTLWIGLDWIGLGGLGGDCPGWKSSPHCTIRAMEVGRVYC

SEQ ID NO: 20511 - DNA, 1745 bp, Zea mays subsp. mays
  misc_feature (1)..(1745): Ceres Seq. ID no. 12383093
gcaattaaccctcactaaagggaacaaaagctggagctccaccgcggtggcggccgctctagaactagtggatcccccgggctgcaggaattcgcacgagaccattacctagaacatcctaatcgaaaaatttccgcaccacgcccagtcgcccacgcagccggcccaagcccaaaaacctttctccatcctctactctcatccccacgatggccgccgccgccaccacgccgcactccctcctcctccagcgcgccgcgatcccggccgcgccgtcgagggcgtccgccgccgcctctcccgtccgcctcccggtccgcgccgccaggatctcgtgcgcggcggtggcggcgccgtccccggccgcagccgccgcggcggacgaggtggagcgcggcgtctacaacttcgcggcgggtcccgcgacgctccctctctccgtgctcaagcgggcgcaggcggagctggtggactaccacggctccgggatgagcatcatggagatgagccaccgcgggaaggagttcgacgccgccatcaagaaggccgagtccgacctgcgcgcgctcctcgcggtgcccgacacccacgccgtgctcttcctccagggcggcgccaccacgcagttcgccgccgtcccgctcaacctctgcacggggccctccgacccggccgacttcgtcgtgtccggatcctggagcgacaaggccttcaaggaggccaagaagttctccgccgcctccgtcgcctggtcgggtaaagacggcaagtacacggccctcccgccgttcgacgccatcgcccagaaccccgaggccaggttcctccacatctgctccaacgagaccatccacggcgtggagttcaaggactacccggagccccgcaacaggtcgggcatcctcgtcgccgacatgtcctccaacttctgctccaagcccgtcgacgtctcccgcttcggcgtcatctacgccggcgcacagaagaacgtcgggccctccggcgtcaccatcgccatcgtgcgcaaggacctcatcggcgccgctcagcccttcacgcccgtcatgctcgacttcaagacgcacgccgacaacgcctccctctacaacaccccgccctgcttcgccatctacgtctgcggtctcgtcttcgaggacctgctcgcgcagggcggcctcgccgaggtcgagaagaagaacgcgcgcaaggccggcgccctctacgacaccatcgacgccagcggagggtactacgtctgccccgtcgacaagtccgtgcggtcgcacatgaacgtgcccttcaccctggccaagggcccggatttcgagaagcagttcatcgccgaggcggccaaggagggcatggtgcagctcaaggggcacaggtctgtcggcggtgtccgcgcctctatctacaatgccatgccgctcgccggcgtggagaagctcgtcgccttcatgaaggacttccaagccaggaacccttgattgccttgtgcttatggtcatttggtattgctactcagtctttcttcctagcataagtgggctcgtgcaagagctgtctcgcgttgcgcactgggatctatctgtagtattagtaccataacgtaacggctactgtattttgcaatgttttttttctctctctcgcttttgttaggtgttcatggaatttcatttctatggatcaccattgcagttgtaatgtgtttttgctggaaataaggaataaggtagagatcc

SEQ ID NO: 20512 - protein, 425 aa, Zea mays subsp. mays
  misc_feature (1)..(425): Ceres Seq. ID no. 12383094
MAAAATTPHSLLLQRAAIPAAPSRASAAASPVRLPVRAARISCAAVAAPSPAAAAAADEVERGVYNFAAGPATLPLSVLKRAQAELVDYHGSGMSIMEMSHRGKEFDAAIKKAESDLRALLAVPDTHAVLFLQGGATTQFAAVPLNLCTGPSDPADFVVSGSWSDKAFKEAKKFSAASVAWSGKDGKYTALPPFDAIAQNPEARFLHICSNETIHGVEFKDYPEPRNRSGILVADMSSNFCSKPVDVSRFGVIYAGAQKNVGPSGVTIAIVRKDLIGAAQPFTPVMLDFKTHADNASLYNTPPCFAIYVCGLVFEDLLAQGGLAEVEKKNARKAGALYDTIDASGGYYVCPVDKSVRSHMNVPFTLAKGPDFEKQFIAEAAKEGMVQLKGHRSVGGVRASIYNAMPLAGVEKLVAFMKDFQARNP

SEQ ID NO: 20513 - protein, 332 aa, Zea mays subsp. mays
  misc_feature (1)..(332): Ceres Seq. ID no. 12383095
MSIMEMSHRGKEFDAAIKKAESDLRALLAVPDTHAVLFLQGGATTQFAAVPLNLCTGPSDPADFVVSGSWSDKAFKEAKKFSAASVAWSGKDGKYTALPPFDAIAQNPEARFLHICSNETIHGVEFKDYPEPRNRSGILVADMSSNFCSKPVDVSRFGVIYAGAQKNVGPSGVTIAIVRKDLIGAAQPFTPVMLDFKTHADNASLYNTPPCFAIYVCGLVFEDLLAQGGLAEVEKKNARKAGALYDTIDASGGYYVCPVDKSVRSHMNVPFTLAKGPDFEKQFIAEAAKEGMVQLKGHRSVGGVRASIYNAMPLAGVEKLVAFMKDFQARNP

SEQ ID NO: 20514 - protein, 329 aa, Zea mays subsp. mays
  misc_feature (1)..(329): Ceres Seq. ID no. 12383096
MEMSHRGKEFDAAIKKAESDLRALLAVPDTHAVLFLQGGATTQFAAVPLNLCTGPSDPADFVVSGSWSDKAFKEAKKFSAASVAWSGKDGKYTALPPFDAIAQNPEARFLHICSNETIHGVEFKDYPEPRNRSGILVADMSSNFCSKPVDVSRFGVIYAGAQKNVGPSGVTIAIVRKDLIGAAQPFTPVMLDFKTHADNASLYNTPPCFAIYVCGLVFEDLLAQGGLAEVEKKNARKAGALYDTIDASGGYYVCPVDKSVRSHMNVPFTLAKGPDFEKQFIAEAAKEGMVQLKGHRSVGGVRASIYNAMPLAGVEKLVAFMKDFQARNP

SEQ ID NO: 20515 - DNA, 1261 bp, Zea mays subsp. mays
  misc_feature (1)..(1261): Ceres Seq. ID no. 12383097
ttaaccctcactaaagggaacaaaagctggagctccaccgcggtggcggccgctctagaactagtggatcccccgggctgcaggaattcgacgagaccattacctagaacatcctaatcgaaaactcacacaccatcgaaacacaaaccagcagcaggcagagcaacgactagctgccaggcaagccggccgggggtgctgcaagagtgcaacaaacaatggccaccgcgctctccttcaaggccttggcactggccgcgctcctctccatggtcgtcgcctctggcgctcgcgccgagcaacagttcaagcgcaacgccaccaccgcctcgcaggacagatccttgttgtcctacagcagtggctggctgccggccaaggccacctggtacggcgcccccaccggcgccggccccctcgacaacggtggtgcgtgcgggttcaagggcaccaaccagtacccgttctcgtccatgacgtcctgtggcaacgagcccatcttcaaggacggcaagggttgcggctcatgctaccagatacggtgcctgaagagcaaccacccggcctgctccggcgtggctcagacggtgatcatcacggacatgaactactacccggtggccaagtaccacttcgacctgagcggcacggcgttcgggtccatggccagctggggcctgaacgacaagctccggcacgccgggatcatcgacatgcagttcaggcgggtgccgtgcaacttcccgggcctgaccatcaccttccgcgtccagcacggctccaaccccatgtacctggccgtgctcatcgagcacgagaacaaggacggcgacgtggtgcaggcggacatcatgcagagcaactccggccactgggagcccatgcacgagtcctggggctccatctggaggatcgaccccaaccgcccgctccgtggccccttctccatgcgcatcaccaacgagtccggcaggcagctggtggccaagaacgtcatcccggccaactacatccccgacgtcgactaccgctccttcgtccagtactaatgatcgagctagcttggtcattgcttaagcgtttaattgtttcttctttatttaattagtggctgccgttgccgacatgcatgtgggggaaattggaggaggcaagcatcaatgcaatgtgtgctctcccgcccactgtcactataccgttattaattaccagtgtgtaaccagcaaatcatactacatatatggttatataatttcatact

SEQ ID NO: 20516 - protein, 276 aa, Zea mays subsp. mays
  misc_feature (1)..(276): Ceres Seq. ID no. 12383098
MATALSFKALALAALLSMVVASGARAEQQFKRNATTASQDRSLLSYSSGWLPAKATWYGAPTGAGPLDNGGACGFKGTNQYPFSSMTSCGNEPIFKDGKGCGSCYQIRCLKSNHPACSGVAQTVIITDMNYYPVAKYHFDLSGTAFGSMASWGLNDKLRHAGIIDMQFRRVPCNFPGLTITFRVQHGSNPMYLAVLIEHENKDGDVVQADIMQSNSGHWEPMHESWGSIWRIDPNRPLRGPFSMRITNESGRQLVAKNVIPANYIPDVDYRSFVQY

SEQ ID NO: 20517 - protein, 259 aa, Zea mays subsp. mays
  misc_feature (1)..(259): Ceres Seq. ID no. 12383099
MVVASGARAEQQFKRNATTASQDRSLLSYSSGWLPAKATWYGAPTGAGPLDNGGACGFKGTNQYPFSSMTSCGNEPIFKDGKGCGSCYQIRCLKSNHPACSGVAQTVIITDMNYYPVAKYHFDLSGTAFGSMASWGLNDKLRHAGIIDMQFRRVPCNFPGLTITFRVQHGSNPMYLAVLIEHENKDGDVVQADIMQSNSGHWEPMHESWGSIWRIDPNRPLRGPFSMRITNESGRQLVAKNVIPANYIPDVDYRSFVQY

SEQ ID NO: 20518 - protein, 193 aa, Zea mays subsp. mays
  misc_feature (1)..(193): Ceres Seq. ID no. 12383100
MLPDTVPEEQPPGLLRRGSDGDHHGHELLPGGQVPLRPERHGVRVHGQLGPERQAPARRDHRHAVQAGAVQLPGPDHHLPRPARLQPHVPGRAHRAREQGRRRGAGGHHAEQLRPLGAHARVLGLHLEDRPQPPAPWPLLHAHHQRVRQAAGGQERHPGQLHPRRRLPLLRPVLMIELAWSLLKRLIVSSLFN

SEQ ID NO: 20519 - DNA, 1494 bp, Zea mays subsp. mays
  misc_feature (1)..(1494): Ceres Seq. ID no. 12383105
atgctacgccaagcgcgcaattaaccctcactaaagggaacaaaagctggagctccaccgcggtggcggccgctctagaactagtggatcccccgggctgcaggaattcgcacgagaccattacctagaacatcctaatcaaaaagatcgaaacgaaaaggcagagagggagggatctccgtctccacgccgcgtcctcccgcacgaatccgcgctccggccaacgggccaagccctagccacccccgcccattcatggtgggcgggccgtgagatctctagggaggcttgtcggcttcgtcgggcgggaggggaggagatgggcgcccggaacagcgctgccgccacgccggtgctgctcaacgtgtacgaccttacggccgcgaacgattacctctactggctcggcttcggcgtcttccactccggaatcgaagtccatggcacggaatatgggtttggagcccacgactacccatccagtggtgtgtttgaggtggaatcaaagagttgccctggctttatctacagaagaacagtgtggctaggcacaacagacatgtctcaggaagaattccgctcgtttattgaaaaacttgcaggtgattatcatggcgacacatatcatttaattaacaagaactgcaatcacttcacagatgatgtctgccagaacttaactgggaaacccatcccttcctgggtgaataggcttgcaagagtagggtcagttttcgattgccttcttccagaaagcgtacaagtttctcctgtaggtcgtgtcccaacgagtcggcgaatatctgatgatgatttgtattcaatacattcaccaatggccgacaaagatgacaatgatgaggacgaggccaaacacctgctgccagctccatccaacgaccagctttctgtagatgtaccgccaaagctagcgaaagatcttctctgaaccactccatgttcataggcgcctaccatacttcaactcatatagccattggtgctaaagtgatcctcaagatggcttgacacagatagggattgggcatatttgattaaagatgaagctctaatttcttgtggcttaccagtttgcagtttcaccttgctgtctcatctcagcaaacagttgtcatctatggtagtagtggcatgattgttaccctgccatttagcacatctggaaattgccaatttggaatgtggggttccggtacctgttaggaatcaggactgtcgatgcttgttgagccccagtgttgaaggcacatactgtaacatgttactatcaaaaacagtgtacatgtacatggctaccgagtatttgccacgaatccaaatgagcgaatctctgttgggctgcttaagcgcctgtagtgacatggaacatctttttgttccgggctattgaacatcgaacattcgaacccaaccatgtggttctgtcgctgatgcctgttatgctgtaataatgtgagattactttttgctgtc

SEQ ID NO: 20520 - protein, 209 aa, Zea mays subsp. mays
  misc_feature (1)..(209): Ceres Seq. ID no. 12383106
MGARNSAAATPVLLNVYDLTAANDYLYWLGFGVFHSGIEVHGTEYGFGAHDYPSSGVFEVESKSCPGFIYRRTVWLGTTDMSQEEFRSFIEKLAGDYHGDTYHLINKNCNHFTDDVCQNLTGKPIPSWVNRLARVGSVFDCLLPESVQVSPVGRVPTSRRISDDDLYSIHSPMADKDDNDEDEAKHLLPAPSNDQLSVDVPPKLAKDLL

SEQ ID NO: 20521 - protein, 129 aa, Zea mays subsp. mays
  misc_feature (1)..(129): Ceres Seq. ID no. 12383107
MSQEEFRSFIEKLAGDYHGDTYHLINKNCNHFTDDVCQNLTGKPIPSWVNRLARVGSVFDCLLPESVQVSPVGRVPTSRRISDDDLYSIHSPMADKDDNDEDEAKHLLPAPSNDQLSVDVPPKLAKDLL

SEQ ID NO: 20522 - DNA, 1093 bp, Zea mays subsp. mays
  misc_feature (1)..(1093): Ceres Seq. ID no. 12383116
aaaactaggaatgagttcgctcgctaaaattggccggatgtgagcgctcccgttcgttcctctctcgcaaaatcaaccgccttccacggctcctccatctcgtcgccactgtgagaagctccatcgtcgtgcatcaactcagcaagattttgaggagagaagaacaagaattttgcagcaagactttgacagaagcaaaatacttcacgctattggagagctacgaaaagagtttatgagaccaccatctacatcaactctagctaaaattgcagggaatccaagatgggatccttactttaagtgttgtattggtgcaataaatggcacacatgtgcaagcatatgttcctaaacacatggaggcttcctttcacggtagaaagagttatgctactcaaaatgtcatggcagcagtatattttaatcttcgattcacatttgtcttggtcggttgggaggagacaactcatgatgcactagtcttacatgatgctttagaaagagaaaatggtattcgtgtgcctgaaggcaagttctacctagtcgatgccggatatggagccaaacttggatttatgccccttttcgtggtgtacaataccacttgaacgagcggggaaataatccagtgcaaaatgagaaaaaattattcaatcataggcattcatctctaagagtttcagtagagtgagcatttggttcattgaaaagaagatttaaaattcttgatgatgctacaccgttcttccccttctctacacaagtagaaattgtggttgcttgttgtattattcacaattgggttatacaagatggacgtgatgactttatcattcctgagaatgaggaattgcctaccattaatcatcacgtatcttcgcatggacaagcaatagagcatgatattatgattaactttaggcaggaacttgccaatgctatgtgggaagactatcatgcaaacactatttgattgctatgtattttccaatgtctctatcatttgtatggacatgtagaatttatttgtatggacatgtatcttttatttgtatggacatgtgtattttattcgtatggacatatatctt

SEQ ID NO: 20523 - protein, 124 aa, Zea mays subsp. mays
  misc_feature (1)..(124): Ceres Seq. ID no. 12383117
MRPPSTSTLAKIAGNPRWDPYFKCCIGAINGTHVQAYVPKHMEASFHGRKSYATQNVMAAVYFNLRFTFVLVGWEETTHDALVLHDALERENGIRVPEGKFYLVDAGYGAKLGFMPLFVVYNTT

SEQ ID NO: 20524 - protein, 83 aa, Zea mays subsp. mays
  misc_feature (1)..(83): Ceres Seq. ID no. 12383118
MEASFHGRKSYATQNVMAAVYFNLRFTFVLVGWEETTHDALVLHDALERENGIRVPEGKFYLVDAGYGAKLGFMPLFVVYNTT

SEQ ID NO: 20525 - protein, 67 aa, Zea mays subsp. mays
  misc_feature (1)..(67): Ceres Seq. ID no. 12383119
MAAVYFNLRFTFVLVGWEETTHDALVLHDALERENGIRVPEGKFYLVDAGYGAKLGFMPLFVVYNTT

SEQ ID NO: 20526 - DNA, 688 bp, Zea mays subsp. mays
  misc_feature (1)..(688): Ceres Seq. ID no. 12383120
gtgtcaagcatgatattacggacaacctttctttaaagataaatgctcagttgacaagtgagccccactactcccaagggatgctgaattttgattataagggcaaagattttagatctcaggttcaattcggaaacaatggtttctatggagcaaactacatccagagtgtcagcaagaacctttccttgggaactgaagccttttggcttgggcagcaaaggaagtctggagtcggtgttgttgctcgctatgacacaaagaaaatggttgcgactgcacaaattgcaaccactggaatggtcgcgcttagttatgtacagaaagtttctgaaaaggtttcccttgcatctgatttcatgtacaatcaaatgacaaaggatgtaacagcaagctttggttatgattatatgctgagacagtgtcgattgagagggaaactggataccaatggcgtaatttcttctcttttggaggagcgattgactccaggtgtcactttccagttgtctgcagagctggaccactggaagaaagattacaaatttgggtttggtatggctctcggagagtaagacgatttgagcaaattctagacacatgtacaattagtggttggcattagtcgacagggattaaaacgattctactttatctttgcatttatttgtctcccagttattcgttt

SEQ ID NO: 20527 - protein, 190 aa, Zea mays subsp. mays
  misc_feature (1)..(190): Ceres Seq. ID no. 12383121
VKHDITDNLSLKINAQLTSEPHYSQGMLNFDYKGKDFRSQVQFGNNGFYGANYIQSVSKNLSLGTEAFWLGQQRKSGVGVVARYDTKKMVATAQIATTGMVALSYVQKVSEKVSLASDFMYNQMTKDVTASFGYDYMLRQCRLRGKLDTNGVISSLLEERLTPGVTFQLSAELDHWKKDYKFGFGMALGE

SEQ ID NO: 20528 - protein, 164 aa, Zea mays subsp. mays
  misc_feature (1)..(164): Ceres Seq. ID no. 12383122
MLNFDYKGKDFRSQVQFGNNGFYGANYIQSVSKNLSLGTEAFWLGQQRKSGVGVVARYDTKKMVATAQIATTGMVALSYVQKVSEKVSLASDFMYNQMTKDVTASFGYDYMLRQCRLRGKLDTNGVISSLLEERLTPGVTFQLSAELDHWKKDYKFGFGMALGE

SEQ ID NO: 20529 - protein, 102 aa, Zea mays subsp. mays
  misc_feature (1)..(102): Ceres Seq. ID no. 12383123
MVATAQIATTGMVALSYVQKVSEKVSLASDFMYNQMTKDVTASFGYDYMLRQCRLRGKLDTNGVISSLLEERLTPGVTFQLSAELDHWKKDYKFGFGMALGE

SEQ ID NO: 20530 - DNA, 1465 bp, Zea mays subsp. mays
  misc_feature (1)..(1465): Ceres Seq. ID no. 12383185
gaatctcacacccaaaagtttcccactgccctggtcccccattcaattcttccaactccgccgcttcgcctcgttccgtccgccgcccccatggcgtccgccgccgccacgaccacctccgcccccgcccagaacctcaatccccttagtatcaacatcaagctccccccatggctcagcgggctgcgctgccccttcaccttcgtctgcccgcccccgcccccgcctccgccgccgccgccgcctcctcccccgctgccacctacggaacccgtggtcccacggtcgcggaggttaccaagcctgcgggtgaccacggagtacgatagcgaagagggcgtgtttgtgaacaaggtgtcgtgcaagcttgcgggggacctcgccaaactgcggctctccttccagagcgacccgcaggggcagtggcaagggggcggggaggaaggggacccgctacagcagctcttcgccgcgccgttggtggggctcatcaccaagcgtttctccgtgctctacgacgtcgaggcacgcaacgcgctgctccgcggagactgctcgcttcccggaggcgccgtccagctccgtgcctcgcatgatgtcaaggcacaacaaggagaagtttcggtgatcactagtttgggtgatccattgtataaaatggagttatcatctttggtgccttacagtggtttgccaagggcaacattccactttcctattggtcaagtttcagtggaagagaagagaaatgaagatgatgagaaggtgctgtctgtatatgggattggaaaatctgatttcttggacggtgttcttactgctcagtacaatgaaaatgatcttaatctaagatattgttataaggacaaggaattaactttagttccaagtgtctcgttgccttccaatgcagtatccatagacttcaaaaggcgttttggtcctgatgataagttgagctaccgttacatcttcgacactgatgaatggaatgctgtttataaacataaagtgggtaaaaatttcaaagtgaaagctggttatgattctgaggtgcgagtcggatgggcttctctttgggttggagaagaagggggcaaggcgaagactgcgccaatgaaaacaaaacttcagcttatgcttcaagtaccccaggataatcccagaaatccttattttctcttcaatgtgaagaaacgatgggatctgtaaataggtgtaagttatccattatgtggactccaaaggcttcggccaaccttttgttgcaatcttcgtaggtcaacagcaacacaatccatgagctctttctatttatcatatattttcaactactgtacgtagttagtacacagcgccccaagtaatccaaaatttatgtaaactctaaccctaaaccctaagtacttgttcgttttgttctcaatccatgtagattgagtgggattaagtgagtttcaattct

SEQ ID NO: 20531 - protein, 403 aa, Zea mays subsp. mays
  misc_feature (1)..(403): Ceres Seq. ID no. 12383186
ESHTQKFPTALVPHSILPTPPLRLVPSAAPMASAAATTTSAPAQNLNPLSINIKLPPWLSGLRCPFTFVCPPPPPPPPPPPPPPPLPPTEPVVPRSRRLPSLRVTTEYDSEEGVFVNKVSCKLAGDLAKLRLSFQSDPQGQWQGGGEEGDPLQQLFAAPLVGLITKRFSVLYDVEARNALLRGDCSLPGGAVQLRASHDVKAQQGEVSVITSLGDPLYKMELSSLVPYSGLPRATFHFPIGQVSVEEKRNEDDEKVLSVYGIGKSDFLDGVLTAQYNENDLNLRYCYKDKELTLVPSVSLPSNAVSIDFKRRFGPDDKLSYRYIFDTDEWNAVYKHKVGKNFKVKAGYDSEVRVGWASLWVGEEGGKAKTAPMKTKLQLMLQVPQDNPRNPYFLFNVKKRWDL

SEQ ID NO: 20532 - protein, 373 aa, Zea mays subsp. mays
  misc_feature (1)..(373): Ceres Seq. ID no. 12383187
MASAAATTTSAPAQNLNPLSINIKLPPWLSGLRCPFTFVCPPPPPPPPPPPPPPPLPPTEPVVPRSRRLPSLRVTTEYDSEEGVFVNKVSCKLAGDLAKLRLSFQSDPQGQWQGGGEEGDPLQQLFAAPLVGLITKRFSVLYDVEARNALLRGDCSLPGGAVQLRASHDVKAQQGEVSVITSLGDPLYKMELSSLVPYSGLPRATFHFPIGQVSVEEKRNEDDEKVLSVYGIGKSDFLDGVLTAQYNENDLNLRYCYKDKELTLVPSVSLPSNAVSIDFKRRFGPDDKLSYRYIFDTDEWNAVYKHKVGKNFKVKAGYDSEVRVGWASLWVGEEGGKAKTAPMKTKLQLMLQVPQDNPRNPYFLFNVKKRWDL

SEQ ID NO: 20533 - DNA, 1419 bp, Zea mays subsp. mays
  misc_feature (1)..(1419): Ceres Seq. ID no. 12383193
gcacgagaccattacctagaacatcctaatcgaaaaattacggacacacgggcaccccgtctcctcttttttctctctgtctcctcaccaaagaaccgcagctaggaacggctcgccacagaagaacgtacggctatgaagacgaggcgcggtgcctgctactcctgccatgcggcgccgggcgagggcccggaggtgcaacgccggaagaggcgcaggacggcggccgaggcatcgccggcggctgccgaagatccaggtgtccgcctgggcgccagagacatgttcgaggatctgcccgacgatctcgtcgtctccatactgagggacgtcgccgcgtccgccggctcgccggccgatctcgccggcgccatgctcacgtgcaagagattcagggagctagtagcgcggagcaaggtggtggtgctcgcgcgggcgtcgccgcggtgcctctcggtgcgcgccaaggcctggtcggacgaggcgcaccggttcctgcagcgctgcgccgacgccggcaacctcgaagcctgctaccttctcggcatgattcggttctactgcctggggagccgcggctcgggcgcggcgctgatggcggcggcggcggtgggcgggcaccgcgaggcgctgtactcgctggccgtgatccagttcaacggcagcggcggcgggaaggacgaccgcgacctccgcgccggagccgcgctgtgcgcgcgcgcggcggcgcggggncacgtgnacgcgctccgngagctggggcactgnctgcaggacggctacggcgtgcgccggtccgtgctggacgggcggngcctnctcatnnaggcaaacgcgcgcgagctcgcggccgcctcggcggcgcacccgtgcctncttctgagcgacttggggtgccacgccggcgaggcgcacgcggccaaccggttcctggtggactggttcgcgtcgcggccgctgggcttgacgcccggcggcaacggcaacggcagcgccgggacggcgggctcggcggaggaggacggcgttggcggtctccggctgtgctcgcaggcgctgtgcgggcggcccgagacgcggcggcacgagttcaggcggtgctcggtgtgcggcgtggtgaactactgctcccgcgcgtgccaggcgctgcactggaggatggcgcacaaggcggagtgcacgcccatggaccggtggctcgacgcggtgcagcccaacgccatcgccaatgcggacgcggcggccccggcgccgtgacgttctccgttactatatatgtcagttagcggccggccgtttctctgttttgccttttgcgtcgttctctgaacctgcgtacgtacatggtttgttggcaaatgctgatgtaacgttcttctggcgcgggcgatacgtagaacataggcagtgaaatttttt

SEQ ID NO: 20534 - protein, 373 aa, Zea mays subsp. mays
  misc_feature (1)..(373): Ceres Seq. ID no. 12383194
  misc_feature (200)..(200): Xaa is any aa, unknown or other
  misc_feature (203)..(203): Xaa is any aa, unknown or other
  misc_feature (206)..(206): Xaa is any aa, unknown or other
  misc_feature (211)..(211): Xaa is any aa, unknown or other
  misc_feature (227)..(227): Xaa is any aa, unknown or other
  misc_feature (228)..(228): Xaa is any aa, unknown or other
  misc_feature (230)..(230): Xaa is any aa, unknown or other
  misc_feature (231)..(231): Xaa is any aa, unknown or other
  misc_feature (247)..(247): Xaa is any aa, unknown or other
MKTRRGACYSCHAAPGEGPEVQRRKRRRTAAEASPAAAEDPGVRLGARDMFEDLPDDLVVSILRDVAASAGSPADLAGAMLTCKRFRELVARSKVVVLARASPRCLSVRAKAWSDEAHRFLQRCADAGNLEACYLLGMIRFYCLGSRGSGAALMAAAAVGGHREALYSLAVIQFNGSGGGKDDRDLRAGAALCARAAARXHVXALXELGHXLQDGYGVRRSVLDGRXXLXXANARELAAASAAHPCXLLSDLGCHAGEAHAANRFLVDWFASRPLGLTPGGNGNGSAGTAGSAEEDGVGGLRLCSQALCGRPETRRHEFRRCSVCGVVNYCSRACQALHWRMAHKAECTPMDRWLDAVQPNAIANADAAAPAP

SEQ ID NO: 20535 - protein, 324 aa, Zea mays subsp. mays
  misc_feature (1)..(324): Ceres Seq. ID no. 12383195
  misc_feature (151)..(151): Xaa is any aa, unknown or other
  misc_feature (154)..(154): Xaa is any aa, unknown or other
  misc_feature (157)..(157): Xaa is any aa, unknown or other
  misc_feature (162)..(162): Xaa is any aa, unknown or other
  misc_feature (178)..(178): Xaa is any aa, unknown or other
  misc_feature (179)..(179): Xaa is any aa, unknown or other
  misc_feature (181)..(181): Xaa is any aa, unknown or other
  misc_feature (182)..(182): Xaa is any aa, unknown or other
  misc_feature (198)..(198): Xaa is any aa, unknown or other
MFEDLPDDLVVSILRDVAASAGSPADLAGAMLTCKRFRELVARSKVVVLARASPRCLSVRAKAWSDEAHRFLQRCADAGNLEACYLLGMIRFYCLGSRGSGAALMAAAAVGGHREALYSLAVIQFNGSGGGKDDRDLRAGAALCARAAARXHVXALXELGHXLQDGYGVRRSVLDGRXXLXXANARELAAASAAHPCXLLSDLGCHAGEAHAANRFLVDWFASRPLGLTPGGNGNGSAGTAGSAEEDGVGGLRLCSQALCGRPETRRHEFRRCSVCGVVNYCSRACQALHWRMAHKAECTPMDRWLDAVQPNAIANADAAAPAP

SEQ ID NO: 20536 - protein, 294 aa, Zea mays subsp. mays
  misc_feature (1)..(294): Ceres Seq. ID no. 12383196
  misc_feature (121)..(121): Xaa is any aa, unknown or other
  misc_feature (124)..(124): Xaa is any aa, unknown or other
  misc_feature (127)..(127): Xaa is any aa, unknown or other
  misc_feature (132)..(132): Xaa is any aa, unknown or other
  misc_feature (148)..(148): Xaa is any aa, unknown or other
  misc_feature (149)..(149): Xaa is any aa, unknown or other
  misc_feature (151)..(151): Xaa is any aa, unknown or other
  misc_feature (152)..(152): Xaa is any aa, unknown or other
  misc_feature (168)..(168): Xaa is any aa, unknown or other
MLTCKRFRELVARSKVVVLARASPRCLSVRAKAWSDEAHRFLQRCADAGNLEACYLLGMIRFYCLGSRGSGAALMAAAAVGGHREALYSLAVIQFNGSGGGKDDRDLRAGAALCARAAARXHVXALXELGHXLQDGYGVRRSVLDGRXXLXXANARELAAASAAHPCXLLSDLGCHAGEAHAANRFLVDWFASRPLGLTPGGNGNGSAGTAGSAEEDGVGGLRLCSQALCGRPETRRHEFRRCSVCGVVNYCSRACQALHWRMAHKAECTPMDRWLDAVQPNAIANADAAAPAP

SEQ ID NO: 20537 - DNA, 1609 bp, Zea mays subsp. mays
  misc_feature (1)..(1609): Ceres Seq. ID no. 12383197
gcacgagaccattacctagaacatcctaatcgaaaaaaaaactgccaaacactgcacactcgggagtcaggactgggccgtttcagtgtcacttccgccgccttctccctcaatcaagagcgcccgtcccttcgcccgcgcgccccgccatggccgcgccgtgcggccgcggcggcggcacgctgacgctggtcctcgtggctctctccgcggcgttcctcacctacaacgtgctcatctccttccactcctccctccagcccctcccttcctccttccccaccgccaccgcctcccgccgcttcggcgccgcggggtctgccaggcggagggcgttccacaccgcggtgaccgcgtcagggtccgcgtacaacacgtggcagtgccgcgtcatgtaccactggttcaaggaggcgcgccgggcgccgggcggcgacgagatgggcgggttcaccaggatcctgcactccgggaaacccgacgagttcgtcgatgagatccccacattcgtcgccgacccactccccgatggggatcagggatacatcgttctcaataggccatgggcatttgttcagtggctccagaaagcagacataaaggaagactatattttgatggcagagccagatcacataattgtcaagcctatcccaaacttgtcgagagatggtcaggcagcagcttttcctttcttttacattgagcctaaaaaatatgagaatgtgttgcgtaagttcttccctgaagacaaggggtcaatcactaagatcgatcctataggaaactctcctgtcattattgagaaggagtctcttggaaggattgcaccgacttggatgaatgtttcattagcaatgaaaaaagatcctgacgcagataaatcttttggctgggttcttgaaatgtatgcctatgccgtggcatctgctctccatggagtgggcaacatcttacgcaaggactttatgattcagccaccttgggacttggaagttggtgattcttttattattcattatacttatgggtgtgattatgacatgacgggtaagctgacttatggcaaaattggtgaatggagatttgacaagagatcatacacggacaaacctccacctagaaatttgccgttaccaccacatggtgtagctcaaagtgtggtgacacttgtgaaaatggtcaatgaagcaacagccaacataccaaactgggactcctatgccgctgctttttaacctgttataaatttggctcacaattttgtttgccagatatttccattccagctgactttgatacatgataattgcctaacatggaagatgagtggatgatacagtggaatgcataccaggttttacacaaggctgccggttccttacctttctgattgaatcctgataatatatggtgcaatgccatccctttccccccctaattttgttaaacacatgcacatcagcacatggcacaatatgtcaaaacacactcacctttggtgaaagctgcaatgtagatgactgagagatgtgatgttcttatctggatctgaatgtgcttattagaagaagaaaaaaaagagtcaggcgctgctctgacaaacgct

SEQ ID NO: 20538 - protein, 362 aa, Zea mays subsp. mays
  misc_feature (1)..(362): Ceres Seq. ID no. 12383198
MAAPCGRGGGTLTLVLVALSAAFLTYNVLISFHSSLQPLPSSFPTATASRRFGAAGSARRRAFHTAVTASGSAYNTWQCRVMYHWFKEARRAPGGDEMGGFTRILHSGKPDEFVDEIPTFVADPLPDGDQGYIVLNRPWAFVQWLQKADIKEDYILMAEPDHIIVKPIPNLSRDGQAAAFPFFYIEPKKYENVLRKFFPEDKGSITKIDPIGNSPVIIEKESLGRIAPTWMNVSLAMKKDPDADKSFGWVLEMYAYAVASALHGVGNILRKDFMIQPPWDLEVGDSFIIHYTYGCDYDMTGKLTYGKIGEWRFDKRSYTDKPPPRNLPLPPHGVAQSVVTLVKMVNEATANIPNWDSYAAAF

SEQ ID NO: 20539 - protein, 281 aa, Zea mays subsp. mays
  misc_feature (1)..(281): Ceres Seq. ID no. 12383199
MYHWFKEARRAPGGDEMGGFTRILHSGKPDEFVDEIPTFVADPLPDGDQGYIVLNRPWAFVQWLQKADIKEDYILMAEPDHIIVKPIPNLSRDGQAAAFPFFYIEPKKYENVLRKFFPEDKGSITKIDPIGNSPVIIEKESLGRIAPTWMNVSLAMKKDPDADKSFGWVLEMYAYAVASALHGVGNILRKDFMIQPPWDLEVGDSFIIHYTYGCDYDMTGKLTYGKIGEWRFDKRSYTDKPPPRNLPLPPHGVAQSVVTLVKMVNEATANIPNWDSYAAAF

SEQ ID NO: 20540 - protein, 265 aa, Zea mays subsp. mays
  misc_feature (1)..(265): Ceres Seq. ID no. 12383200
MGGFTRILHSGKPDEFVDEIPTFVADPLPDGDQGYIVLNRPWAFVQWLQKADIKEDYILMAEPDHIIVKPIPNLSRDGQAAAFPFFYIEPKKYENVLRKFFPEDKGSITKIDPIGNSPVIIEKESLGRIAPTWMNVSLAMKKDPDADKSFGWVLEMYAYAVASALHGVGNILRKDFMIQPPWDLEVGDSFIIHYTYGCDYDMTGKLTYGKIGEWRFDKRSYTDKPPPRNLPLPPHGVAQSVVTLVKMVNEATANIPNWDSYAAAF

SEQ ID NO: 20541 - DNA, 1352 bp, Zea mays subsp. mays
  misc_feature (1)..(1352): Ceres Seq. ID no. 12383204
agcacagagtggtaagcatggcgagcaccacagacaaccgtggcctcctcgtcgtggccgccgccaccgtcgtcctcgccgtggccgcggccccggcgcatacaccggggggcaatactgctacccctccgccgccgttccggacggtgtacgcgttcggcgactcgttcacggacacggggaacacgcggtcgacgacggggccctactcgttcggctacgtgtccagcccgccctacggcgccaccttcttccaccgctcgaccaaccgctactccgacggccgcctggtggtggacttcctggccgaggcgctggcgctgccgtcctacctcccgccctacctcgccgtgtccgtctccaacgccaacgccacggcggccggagccggcgtcaacttcgcggtggccggcgccacggccatcgagcacgacttcttcgcgcggaacaacctcagcatcgacgtcacgccgcagtccatcatgacgcagtctgggctggttcgacgcgcacctgctccgctcctcctcctccgccgccgccgccgccgacgcgctcttctgggtgggcgagatcggcgccaacgactacgcctacacagtggtcgcccgcgacaccatccctcccaagctcgtccgcaccatggccgtccagagggtcaccgccttcgtcgagggcctgctggagcgaggcgccaagtacgtgatcgtgcaggggctgccgctgacggggtgcctgccgctggccatgacgctggcgcgcgccgacgaccgcgacgccgtgggctgcgccgcctccgtcaaccgccagagctacgcgcacaaccgccgcctcctggcggccctccgcgcgctgcgccgccgccacccgggcgccgtcgttgcgtacgccgattactacgccgcgcacctcgccgtgatgcggagccccgcgcgccacggcttcgccgagcccttccgcacctgctgcggctccggcggcggcgcctacaacttcgacctcttcgccacctgcggctcgccgcaggtcaccacggcctgcgcgcgccccgccgagtacgtcaactgggacggcgtccacatgacggaggccatgtacaaggtcgtcgccggcatgttcttcagtggcgacggctactgccgcccagcgttcaaggacctgctggccatgaaagcccgccaggggaagccgtgattttgagacaatcagaatgcacgttccaattacaataagtagagctgcatgcgtgacgaatccatgtcatcttcatcgtgaacccttaaccatttatcaggcatttataattggatccacatacgtatgatgatgatgagcacaaaggatttaacttc

SEQ ID NO: 20542 - protein, 409 aa, Zea mays subsp. mays
  misc_feature (1)..(409): Ceres Seq. ID no. 12383205
HRVVSMASTTDNRGLLVVAAATVVLAVAAAPAHTPGGNTATPPPPFRTVYAFGDSFTDTGNTRSTTGPYSFGYVSSPPYGATFFHRSTNRYSDGRLVVDFLAEALALPSYLPPYLAVSVSNANATAAGAGVNFAVAGATAIEHDFFARNNLSIDVTPQSIMTQSGLVRRAPAPLLLLRRRRRRRALLGGRDRRQRLRLHSGRPRHHPSQARPHHGRPEGHRLRRGPAGARRQVRDRAGAAADGVPAAGHDAGARRRPRRRGLRRLRQPPELRAQPPPPGGPPRAAPPPPGRRRCVRRLLRRAPRRDAEPRAPRLRRALPHLLRLRRRRLQLRPLRHLRLAAGHHGLRAPRRVRQLGRRPHDGGHVQGRRRHVLQWRRLLPPSVQGPAGHESPPGEAVILRQSECTFQLQ

SEQ ID NO: 20543 - protein, 404 aa, Zea mays subsp. mays
  misc_feature (1)..(404): Ceres Seq. ID no. 12383206
MASTTDNRGLLVVAAATVVLAVAAAPAHTPGGNTATPPPPFRTVYAFGDSFTDTGNTRSTTGPYSFGYVSSPPYGATFFHRSTNRYSDGRLVVDFLAEALALPSYLPPYLAVSVSNANATAAGAGVNFAVAGATAIEHDFFARNNLSIDVTPQSIMTQSGLVRRAPAPLLLLRRRRRRRALLGGRDRRQRLRLHSGRPRHHPSQARPHHGRPEGHRLRRGPAGARRQVRDRAGAAADGVPAAGHDAGARRRPRRRGLRRLRQPPELRAQPPPPGGPPRAAPPPPGRRRCVRRLLRRAPRRDAEPRAPRLRRALPHLLRLRRRRLQLRPLRHLRLAAGHHGLRAPRRVRQLGRRPHDGGHVQGRRRHVLQWRRLLPPSVQGPAGHESPPGEAVILRQSECTFQLQ

SEQ ID NO: 20544 - protein, 249 aa, Zea mays subsp. mays
  misc_feature (1)..(249): Ceres Seq. ID no. 12383207
MTQSGLVRRAPAPLLLLRRRRRRRALLGGRDRRQRLRLHSGRPRHHPSQARPHHGRPEGHRLRRGPAGARRQVRDRAGAAADGVPAAGHDAGARRRPRRRGLRRLRQPPELRAQPPPPGGPPRAAPPPPGRRRCVRRLLRRAPRRDAEPRAPRLRRALPHLLRLRRRRLQLRPLRHLRLAAGHHGLRAPRRVRQLGRRPHDGGHVQGRRRHVLQWRRLLPPSVQGPAGHESPPGEAVILRQSECTFQLQ

SEQ ID NO: 20545 - DNA, 1417 bp, Zea mays subsp. mays
  misc_feature (1)..(1417): Ceres Seq. ID no. 12383227
gcacgagaccattacctagaacatcctaatcgaaaaaggcaattgcaagcagcacaaggctccaaagatgcaccgctccttcctcctcgtctctgcactcgtagccaccgcgctttccaccgacaccaccgttgccgctgcccagagccagaggcagaggtcatgggccgaactcagcgggcgggacaactgggacgggctcctggacccgctcgacggcgacctccggcgcgccgtcatccggtacgggaagctggcgcaggcgacgtcgtacgcgttcatcggcgacccggcgtcgccgtacgcgggcgcgtcgcggtacgcccccggcgcgttcctccgcagggcgcaggcgcccgacccggacgcgtacaacgtgacgaggttcctgtacgcgacgtcgagcgcgcgcgtccccggccagttcatcacgcggccggcgccgccgggggcgtggagcgccgagtccaactggatggggtacgtcggccgtggccacggacgccggcgtcgcgaggcctggggaggcgggacatcgtggtggcgtggcgcgggaccaagcgcgccgtggagtgggccaacgacctggacatcacgctggtgccggcggcgggcgtcgtcgggcctggccccgggtggtcgcagccggcggtgcaccggggtttcttgtccgtgtacgcgtcgaggaactccacgtcgcggttcaacaagcaaagcgccagagagcaggtgttggcctagattagaaggctattggacgcgtacaagggcgagaactgcagcatcacgctaaccggccacagcctgggcgcggcgctctccacgctcaccgccatcgacatcgtcgccaacggcctcaacgtccggggccccaacaacgacacggtccccgtcgccgccatcgtcttcggcagcccccgcgtgggcgacgaccagttcaagaaggcgttcgactcggcgcccggcgcccggctgctccgggtccggaacgcgcccgacgtcgtgcccaccgtcctgcccaacgccttctacaaggacgtcggcgtggagctgctgctggacacgcgcaagtcgccgcacctcaagaggcccggcccgggccccgccgcctggcacaacctcgagtgctacctgcacggcgtcgcgggcacgcagggcgccggcgacgccgccgggttcagcctggaggtggaccgcgacgtcgcgctggtgaacaaggaggtggacgcgctcagcgacgactaccccgtgccggcggcctggtgggtggaggggaacaagggcatgaccagggacgccagcggacgctgggttttgcaggatcatgaggagggtaacctcgctatgtgatgattttgataacttcattaaagatggttattaatgaattaataatacgaaagcaagagttttctcc

SEQ ID NO: 20546 - protein, 246 aa, Zea mays subsp. mays
  misc_feature (1)..(246): Ceres Seq. ID no. 12383228
ARDHYLEHPNRKRQLQAAQGSKDAPLLPPRLCTRSHRAFHRHHRCRCPEPEAEVMGRTQRAGQLGRAPGPARRRPPARRHPVREAGAGDVVRVHRRPGVAVRGRVAVRPRRVPPQGAGARPGRVQRDEVPVRDVERARPRPVHHAAGAAGGVERRVQLDGVRRPWPRTPASRGLGRRDIVVAWRGTKRAVEWANDLDITLVPAAGVVGPGPGWSQPAVHRGFLSVYASRNSTSRFNKQSAREQVLA

SEQ ID NO: 20547 - protein, 241 aa, Zea mays subsp. mays
  misc_feature (1)..(241): Ceres Seq. ID no. 12383229
MHRSFLLVSALVATALSTDTTVAAAQSQRQRSWAELSGRDNWDGLLDPLDGDLRRAVIRYGKLAQATSYAFIGDPASPYAGASRYAPGAFLRRAQAPDPDAYNVTRFLYATSSARVPGQFITRPAPPGAWSAESNWMGYVGRGHGRRRREAWGGGTSWWRGAGPSAPWSGPTTWTSRWCRRRASSGLAPGGRSRRCTGVSCPCTRRGTPRRGSTSKAPESRCWPRLEGYWTRTRARTAASR

SEQ ID NO: 20548 - protein, 192 aa, Zea mays subsp. mays
  misc_feature (1)..(192): Ceres Seq. ID no. 12383230
MGRTQRAGQLGRAPGPARRRPPARRHPVREAGAGDVVRVHRRPGVAVRGRVAVRPRRVPPQGAGARPGRVQRDEVPVRDVERARPRPVHHAAGAAGGVERRVQLDGVRRPWPRTPASRGLGRRDIVVAWRGTKRAVEWANDLDITLVPAAGVVGPGPGWSQPAVHRGFLSVYASRNSTSRFNKQSAREQVLA

SEQ ID NO: 20549 - DNA, 1252 bp, Zea mays subsp. mays
  misc_feature (1)..(1252): Ceres Seq. ID no. 12383239
cgcaattaaccctcactaaagggaacaaaagctggagctccaccgcggtggcggccgctctagaactagtggatcccccgggctgcaggaattcgcacgagaccattacctagaacatcctaatcgaaaacaagaaaaagatttaccatcgaattccagtgaagcagacaaaatgcaatgcatatcatcttccgccagcatttctgaggatgataatagccgagctagttctaactcacagaagaactctggatctagagaccttcctcctgatgctgaagtggttatacgtgttccaagtttgcctcttcgtgatcattttggatattctccatcagagatggtggttgatgggtcaggcaaaggaagcagaagcacccggtctgaacatgagaagggtgtgttaactgaaagttttaagccaaacaaagtgaaagatgtacctgtagcaagcgtgctagacccatcagatgatgagtttgatgatcctgagtacaatcaagatccaggtgacggagcacaatgcgtcgatcacccaagggccacaaaatcgggcgactcctttttctccagcctgataaaaaagagctttaaaattaacggtgggatgggcaatggcagagcaaaggtgttcatcaatggctatcccatttctgatcgtgctgtgaggaaggcggagaagattgctggaccaatctatccgggtgaatactggtatgactaccgtgctggattctggggtgtcataggacagccctgccttggcatgatacccccatacattgcagaatttaactatcctatgcctaagaactgtgctggcggaaatactggtgtgttcatcaacagccgagaacttcaccagaaggacttggatttacttgtgggtcgagggcttcctgattctcctgatagatcatacagagttgagatttctggtaaagtatccgacgaagtatccggtgaagagctttattgccttggtaaactcgcaccaacggtggagaagatgaagcgtgggttcgggatgcgagtcccaaggaccattcagtgaaattggttcacatcgagaagcagaggctctgagatctgtgtgctgccacgcctttgtgctagagattgctaatgtcaccccgccttgaatcgttgcatctgtcgtagtggctgttttgatcgagtgtgtcatggtgtgaccatgtaattttgtctgtggattgttcaagctttctcaacgcacaagtttctgttgtgt

SEQ ID NO: 20550 - protein, 293 aa, Zea mays subsp. mays
  misc_feature (1)..(293): Ceres Seq. ID no. 12383240
MQCISSSASISEDDNSRASSNSQKNSGSRDLPPDAEVVIRVPSLPLRDHFGYSPSEMVVDGSGKGSRSTRSEHEKGVLTESFKPNKVKDVPVASVLDPSDDEFDDPEYNQDPGDGAQCVDHPRATKSGDSFFSSLIKKSFKINGGMGNGRAKVFINGYPISDRAVRKAEKIAGPIYPGEYWYDYRAGFWGVIGQPCLGMIPPYIAEFNYPMPKNCAGGNTGVFINSRELHQKDLDLLVGRGLPDSPDRSYRVEISGKVSDEVSGEELYCLGKLAPTVEKMKRGFGMRVPRTIQ

SEQ ID NO: 20551 - protein, 237 aa, Zea mays subsp. mays
  misc_feature (1)..(237): Ceres Seq. ID no. 12383241
MVVDGSGKGSRSTRSEHEKGVLTESFKPNKVKDVPVASVLDPSDDEFDDPEYNQDPGDGAQCVDHPRATKSGDSFFSSLIKKSFKINGGMGNGRAKVFINGYPISDRAVRKAEKIAGPIYPGEYWYDYRAGFWGVIGQPCLGMIPPYIAEFNYPMPKNCAGGNTGVFINSRELHQKDLDLLVGRGLPDSPDRSYRVEISGKVSDEVSGEELYCLGKLAPTVEKMKRGFGMRVPRTIQ

SEQ ID NO: 20552 - protein, 148 aa, Zea mays subsp. mays
  misc_feature (1)..(148): Ceres Seq. ID no. 12383242
MGNGRAKVFINGYPISDRAVRKAEKIAGPIYPGEYWYDYRAGFWGVIGQPCLGMIPPYIAEFNYPMPKNCAGGNTGVFINSRELHQKDLDLLVGRGLPDSPDRSYRVEISGKVSDEVSGEELYCLGKLAPTVEKMKRGFGMRVPRTIQ

SEQ ID NO: 20553 - DNA, 1252 bp, Zea mays subsp. mays
  misc_feature (1)..(1252): Ceres Seq. ID no. 12383283
gcacgagaccattacctagaacatcctaatcaaaaaaatctggttcgggctcctggatcggacccgaaaaactggtgagatttgacctacagcggagatggccaccggcgacctgcgcagcctcgccaccgtcgcggccgcggtgatcgcgtgcatgggctacgcccgcttcgccgcgcggcgactccgcccgggcctgtcccgccttgcagcgttcctcccggtgctcgccgtcttgcctttcctcccgctcgccttccgtgcgctccacccgcgcggcatctccggcttcttcctcgcctgggccgccgaattcaaactcctgctcctcgcatgcggccagcgcccgctcgatccgagcctcccgctgccctccttcaccgccatcgccaccttccccgtcacactacgggatcccaagagctccgcctcgaggccgggcctggggctcgtggagtccgcctccatggccgcgctgctcgcggccatcgtgtcgctgtactggtacgaggagcggatgaacggttacgtcctgctcacgctctactccgtgcacgtgtacctcgcgctcgagctcgtcctggcggcggccgcggtggcgtcgcgcgcgctgatgggcctggaactggagccccagttcgaccggccctacctctcgtcctcgctgcgggacttctggggccggaggtggaacctctccgttccggcgctgctccgccagtgcgtgttccgccccgtgcgcgcgcgcctcggcgccgccgcgggtgtgctagctgcgttcgtcgtctcgggcctcatgcacgaggccatgttctcctacctcacgctgctgcggccgacgggggaggcggccgcgttcttcacgctgcacggggcgtgcgcggtggcggaggggtggtgggccgcgcacgaggggtggccgcggccgccgcgcgccatggccacgccgctgacactggcgttcgtgggcgtgacggccttctggctcttctttcctccgctcacaaggcccggcgcggacaagcaggccatcgcggagtgcgaggccatggtcgcttttctgcgggacaccgcagcttgggcggtcgactccgcctggtcagtcttgtcaagctggtcgtaaattgtggtccgccgtccgcaacaggcgtgcgctgcgcctgcgcctgcgcctgcgcgtgccgtgtgctttgtcgccgtggcatctgtttgcacttttgttttgggatggtgataatttcagaaatattct

SEQ ID NO: 20554 - protein, 341 aa, Zea mays subsp. mays
  misc_feature (1)..(341): Ceres Seq. ID no. 12383284
MATGDLRSLATVAAAVIACMGYARFAARRLRPGLSRLAAFLPVLAVLPFLPLAFRALHPRGISGFFLAWAAEFKLLLLACGQRPLDPSLPLPSFTAIATFPVTLRDPKSSASRPGLGLVESASMAALLAAIVSLYWYEERMNGYVLLTLYSVHVYLALELVLAAAAVASRALMGLELEPQFDRPYLSSSLRDFWGRRWNLSVPALLRQCVFRPVRARLGAAAGVLAAFVVSGLMHEAMFSYLTLLRPTGEAAAFFTLHGACAVAEGWWAAHEGWPRPPRAMATPLTLAFVGVTAFWLFFPPLTRPGADKQAIAECEAMVAFLRDTAAWAVDSAWSVLSSWS

SEQ ID NO: 20555 - protein, 322 aa, Zea mays subsp. mays
  misc_feature (1)..(322): Ceres Seq. ID no. 12383285
MGYARFAARRLRPGLSRLAAFLPVLAVLPFLPLAFRALHPRGISGFFLAWAAEFKLLLLACGQRPLDPSLPLPSFTAIATFPVTLRDPKSSASRPGLGLVESASMAALLAAIVSLYWYEERMNGYVLLTLYSVHVYLALELVLAAAAVASRALMGLELEPQFDRPYLSSSLRDFWGRRWNLSVPALLRQCVFRPVRARLGAAAGVLAAFVVSGLMHEAMFSYLTLLRPTGEAAAFFTLHGACAVAEGWWAAHEGWPRPPRAMATPLTLAFVGVTAFWLFFPPLTRPGADKQAIAECEAMVAFLRDTAAWAVDSAWSVLSSWS

SEQ ID NO: 20556 - protein, 306 aa, Zea mays subsp. mays
  misc_feature (1)..(306): Ceres Seq. ID no. 12383286
MRPAPARSEPPAALLHRHRHLPRHTTGSQELRLEAGPGARGVRLHGRAARGHRVAVLVRGADERLRPAHALLRARVPRARARPGGGRGGVARADGPGTGAPVRPALPLVLAAGLLGPEVEPLRSGAAPPVRVPPRARAPRRRRGCASCVRRLGPHARGHVLLPHAAAADGGGGRVLHAARGVRGGGGVVGRARGVAAAAARHGHAADTGVRGRDGLLALLSSAHKARRGQAGHRGVRGHGRFSAGHRSLGGRLRLVSLVKLVVNCGPPSATGVRCACACACACRVLCRRGICLHFCFGMVIISEIF

SEQ ID NO: 20557 - DNA, 1136 bp, Zea mays subsp. mays
  misc_feature (1)..(1136): Ceres Seq. ID no. 12383299
gcacgagaccattacctagaacatcctaatcgaaaagggaacagctatagccctgcagttagtagcatctcgtttcagagcccagaggagggaggaagaagaagaagaagcagcagcagcagacatggattgctgcatctgcagccccgtggcgtccgtgtacaggctgccaaggaacgccatctgcgctccctgccaccaaggcgccaaggccatcatcggtttcctcgacagggatggtgagcgggaagaggacgacggcggtggccgttctgtccagcctcctcgcggctcggccaaggggctgagagatgcgtgggagcaggtgaaggagatgagagccagggaggaggagaccaggcagagagctgccttcctccagcacggcttcgcgtcggcgtggaaggagggaatccacaccgacatcgtcgtcaaacctggcaccggtcccgcgattcgagcccacaaggccatcctggccgcgcggtcggaggtgttccggcacatgctgtccggcgacgaccgctgcaaggcccccgccggcgactccatctcgctcccggagctctcccacgacgacctgtccctcctgctcgccttcctctacacaggcgctctggaggcgccaggaggaggaggaggagaggccagccaggaccaggagcggcagctgcacgcgctcttcgtcgcggccgacaagtacgacgtgccgttcctgaggcgggcatgcgaggcgcggctggcggcgggcgtggcgccccggaacgcgctgcggacgcttgaggtcgccgagctgagctccagctccgcgctcatggagcgcgccatgggcgccgtcgtggagcacgccgaggaggtcgtgttctcggcggaatacgagcggttcgccgcacggaacgcggggctgtgcgtcgagatcacccgcgcgctgctggccaggatgccgacgccggcgaggagtgatggcccgtgcttagagcttggaagcagctagctgatgcatgcagttgtattgtatcagatgatgatggatcggaaagaatactactcttgttccagtttcgagtcacgacaatatgtaattgtaaacgcataagttcttctgaaacacgggcgagcacgatgagctagactgt

SEQ ID NO: 20558 - protein, 289 aa, Zea mays subsp. mays
  misc_feature (1)..(289): Ceres Seq. ID no. 12383300
MDCCICSPVASVYRLPRNAICAPCHQGAKAIIGFLDRDGEREEDDGGGRSVQPPRGSAKGLRDAWEQVKEMRAREEETRQRAAFLQHGFASAWKEGIHTDIVVKPGTGPAIRAHKAILAARSEVFRHMLSGDDRCKAPAGDSISLPELSHDDLSLLLAFLYTGALEAPGGGGGEASQDQERQLHALFVAADKYDVPFLRRACEARLAAGVAPRNALRTLEVAELSSSSALMERAMGAVVEHAEEVVFSAEYERFAARNAGLCVEITRALLARMPTPARSDGPCLELGSS

SEQ ID NO: 20559 - protein, 219 aa, Zea mays subsp. mays
  misc_feature (1)..(219): Ceres Seq. ID no. 12383301
MRAREEETRQRAAFLQHGFASAWKEGIHTDIVVKPGTGPAIRAHKAILAARSEVFRHMLSGDDRCKAPAGDSISLPELSHDDLSLLLAFLYTGALEAPGGGGGEASQDQERQLHALFVAADKYDVPFLRRACEARLAAGVAPRNALRTLEVAELSSSSALMERAMGAVVEHAEEVVFSAEYERFAARNAGLCVEITRALLARMPTPARSDGPCLELGSS

SEQ ID NO: 20560 - protein, 162 aa, Zea mays subsp. mays
  misc_feature (1)..(162): Ceres Seq. ID no. 12383302
MLSGDDRCKAPAGDSISLPELSHDDLSLLLAFLYTGALEAPGGGGGEASQDQERQLHALFVAADKYDVPFLRRACEARLAAGVAPRNALRTLEVAELSSSSALMERAMGAVVEHAEEVVFSAEYERFAARNAGLCVEITRALLARMPTPARSDGPCLELGSS

SEQ ID NO: 20561 - DNA, 1569 bp, Zea mays subsp. mays
  misc_feature (1)..(1569): Ceres Seq. ID no. 12383339
ctacgccaagcgcgcaattaaccctcactaaagggaacaaaagctggagctccaccgcggtggcggccgctctagaactagtggatcccccgggctgcaggaattcgcacgagaccattacctagaacatcctaatcgaaaaaagttcaggaaaggggagcctcaaaaggagagggagagtgagagggaggggaagtgcgctgcagtgctgcgcagctgcgctggggagaagagaagaaggtgccaaccacttcccaaggagaccgccagctctgctgctgcacgaccgaccagcccgtccactcgcctcgccttcctccgaaccccggcgaggaagaggaacccgccgccgccgccggacgcacttccgatggcgacgccacggaagccgatcaagctcacgctgccgtcccacgagaccaccatcggcaagttcctgacgcacagcgggacgttcacggacggggatctgcgcgtgaacaaggacggcctccgcatcgtctcgcggagggagggaggcgaggctcctcctatagagccactggatagtcaactgagcttagatgatctagacgttataaaagtgatcgggaaaggtagcagtggaaatgtgcaattggtccgccacaaatttactggccagttttttgctctgaaggttattcaactaaatattgatgagagtatacgcaaacagattgccaaggagttgaagataaacttatcaacacagtgccaatatgttgttgtgttctatcagtgtttctatttcaatggcgccatttctattgttttggaatacatggatggtggctcccttgcagatttcctgaagactgttaaaaccattccagaggcctacctcgctgctatctgtacgcagatgctaaaaggactgatctacttgcataacgagaagcgcgttatacaccgagatctgaaaccatcaaatatattgataaatcataggggtgaagtaaaaatatcagattttggtgtgagtgccattatctctagttcctcttcgcaacgagatacatttattggcacacgcaactacatggcgccagaaagaatcgataaagaaacatggttctatgagtgatatctggagtttgggactagtgatactggaatgtgcaaccggcatctttccatttcctccttgtgaaagcttctacgaacttctcgtagctgttgttgatcaaccgccaccttctgcaccaccggatcagttttcaccagaattctgtgcgttcatttctgcatgtctccagaaggatgctaatgacaggtcatcagcacaagccttattggaccatccattcctgagcatgtatgatgacctgcatgtagatcttgcttcgtacttcacgacagcaggatctcccctcgccaccttcaagtcggtgattggctccatcactttacttatatgacatacatgtacagccttttaggataaaaatgagcactgaagttttgcctatctgtatatcggcagcaacgtttggtcatgtttgtttcaccttgtaatgtattgactcagatatgggattggtcattgtc

SEQ ID NO: 20562 - protein, 244 aa, Zea mays subsp. mays
  misc_feature (1)..(244): Ceres Seq. ID no. 12383340
MATPRKPIKLTLPSHETTIGKFLTHSGTFTDGDLRVNKDGLRIVSRREGGEAPPIEPLDSQLSLDDLDVIKVIGKGSSGNVQLVRHKFTGQFFALKVIQLNIDESIRKQIAKELKINLSTQCQYVVVFYQCFYFNGAISIVLEYMDGGSLADFLKTVKTIPEAYLAAICTQMLKGLIYLHNEKRVIHRDLKPSNILINHRGEVKISDFGVSAIISSSSSQRDTFIGTRNYMAPERIDKETWFYE

SEQ ID NO: 20563 - DNA, 1069 bp, Zea mays subsp. mays
  misc_feature (1)..(1069): Ceres Seq. ID no. 12383353
gcacgagaccattacctagaacatcctaatcaaaaaaagacggttcgagtccgttctagaatctagacacggcaatgaagcccaggcctctcggttgcggttgcggttgcgtcccggcggcggtagggtgcgtcggctgggcatggaggccgactccgaggccgcgcgggggagggagggcagcaggggtgtcgcccaagtgctcgcactcggcggcggcggcgggagcggtacagtcggaggaccgccgccgcgaggtgctgtaccgcccggtggagctgcccgggacggggtacgggtcggagctggaggcgcggatcgagaaggtcatctacgcctgccgcttcatgaccttcttcggaatttgtggcttgctcctcggctctgtcccatgcttcctcaagggatgcgttttcgtgatggatgccttcgtcgagtactaccggcacggcggagggaaggtcatcctcctgctggtggaagccattgagatgtttctcattgcaacggtcacgtttgtcttggggacgggcttgtacgagctcttcatcagtaacatggactccttttacgggtccaacctcttcggcctgttcagccttccggaacggcccaagtgggttgaaatcaagtcggtaaatgatctcaagacaaagctgggccatgtcattgtcatggttctgctggttggcatcttcgagaagagcaagagggtgaccatcacatcctgtgctgacctcttgtgctttgctggatcgattttcctgtcttcagtttgcctctacctgctttccaagctccataccaccaagggaggcagccaggcctgaaatgagagtgtttgtatgtaagtgatatgtcttgttctgttgctgtgcaacgcctgcctccggttctgttcgtgtagtaaataattaggcagtggggaggtaccgatttcccatgtactcatgttcatgtatggctagggagtttcagttaggcacaaaccaaactacattgagtatcatcctgtatgtgtagctcgatgtaatgcaatcaataactgatattctctttnagtaagctt

SEQ ID NO: 20564 - protein, 251 aa, Zea mays subsp. mays
  misc_feature (1)..(251): Ceres Seq. ID no. 12383354
MKPRPLGCGCGCVPAAVGCVGWAWRPTPRPRGGGRAAGVSPKCSHSAAAAGAVQSEDRRREVLYRPVELPGTGYGSELEARIEKVIYACRFMTFFGICGLLLGSVPCFLKGCVFVMDAFVEYYRHGGGKVILLLVEAIEMFLIATVTFVLGTGLYELFISNMDSFYGSNLFGLFSLPERPKWVEIKSVNDLKTKLGHVIVMVLLVGIFEKSKRVTITSCADLLCFAGSIFLSSVCLYLLSKLHTTKGGSQA

SEQ ID NO: 20565 - protein, 160 aa, Zea mays subsp. mays
  misc_feature (1)..(160): Ceres Seq. ID no. 12383355
MTFFGICGLLLGSVPCFLKGCVFVMDAFVEYYRHGGGKVILLLVEAIEMFLIATVTFVLGTGLYELFISNMDSFYGSNLFGLFSLPERPKWVEIKSVNDLKTKLGHVIVMVLLVGIFEKSKRVTITSCADLLCFAGSIFLSSVCLYLLSKLHTTKGGSQA

SEQ ID NO: 20566 - protein, 136 aa, Zea mays subsp. mays
  misc_feature (1)..(136): Ceres Seq. ID no. 12383356
MDAFVEYYRHGGGKVILLLVEAIEMFLIATVTFVLGTGLYELFISNMDSFYGSNLFGLFSLPERPKWVEIKSVNDLKTKLGHVIVMVLLVGIFEKSKRVTITSCADLLCFAGSIFLSSVCLYLLSKLHTTKGGSQA

SEQ ID NO: 20567 - DNA, 1233 bp, Zea mays subsp. mays
  misc_feature (1)..(1233): Ceres Seq. ID no. 12383372
acccgcacacccaccatcagcacgctcccggactctgatggcgctgagccccacgcccacggccgttgctgcaccgccgccggagccgggccccgagcccgcgccgtccgctgagctgccgctgccggacgccatcgcggccgcgctgccgccggacccgtacgagcagctggaggtggcgcgcaagatcacggccgtggccgtggcgtcccgggcctcgcgcctcgagctggaggccgcgcggctacggcagaggctggccgacagggaccgcctcgccgccgagctcgccgacagggccgccaagctcgagcaggcgctccgcgacgccgacgcgcggntccgcagcgcactcgacgacaacgccaagctggccaaggagcgggactcgctcgcgcagacgtccaagaagctggccagggacctcgccaagctggaaaccttcaagcggcacctgatgcagtcgctgggcgatgataattcccaaactcatcatcaggaaacagtagacataagaacctacgagcaatcggtggcaaaagcgaattcctggaaagacgggctagagaagaacagccatcctgtatcctctctatccgacgagtccgtcgaagccgacagcgtaaatcaggaagtgacgacgaggccatttgagcagaaactgaccatcacgcacatcactccacgcctcacctcggatcctgcgccgaagctgagaaccgccgcgacatccccgagaaggtactccacggcggtgtcgcccaaactggcgtccggcgccacctcgccgcgattggagggccacatggcgatgtcgccatggctaccctcgagcaagatgtcctctgcagccaactcgccacctcgtggacagtctatctcaggacgcggtacaagagtagatggcaaggagttctttcgtcaagcaagacaccgcctgtcatacgaacaatttgcggcttttctttccaatatcaaggagctcaacgcccataggcaatctcgagaggagaccctgaggaaggcggacgagatcttcggtgcagaaaacatggacctcttcaggtcgttccaagggctgcttagccgcagcctatcgtagtaaaaaggaaaagaagcttgcccattctatcaattactactccttgttgcggttgttcatgattcatatggacagggccgacagcaggtatacgctttgtgtataataaataaaaaaacgacgtggaccgt

SEQ ID NO: 20568 - protein, 366 aa, Zea mays subsp. mays
  misc_feature (1)..(366): Ceres Seq. ID no. 12383373
  misc_feature (114)..(114): Xaa is any aa, unknown or other
PAHPPSARSRTLMALSPTPTAVAAPPPEPGPEPAPSAELPLPDAIAAALPPDPYEQLEVARKITAVAVASRASRLELEAARLRQRLADRDRLAAELADRAAKLEQALRDADARXRSALDDNAKLAKERDSLAQTSKKLARDLAKLETFKRHLMQSLGDDNSQTHHQETVDIRTYEQSVAKANSWKDGLEKNSHPVSSLSDESVEADSVNQEVTTRPFEQKLTITHITPRLTSDPAPKLRTAATSPRRYSTAVSPKLASGATSPRLEGHMAMSPWLPSSKMSSAANSPPRGQSISGRGTRVDGKEFFRQARHRLSYEQFAAFLSNIKELNAHRQSREETLRKADEIFGAENMDLFRSFQGLLSRSLS

SEQ ID NO: 20569 - protein, 354 aa, Zea mays subsp. mays
  misc_feature (1)..(354): Ceres Seq. ID no. 12383374
  misc_feature (102)..(102): Xaa is any aa, unknown or other
MALSPTPTAVAAPPPEPGPEPAPSAELPLPDAIAAALPPDPYEQLEVARKITAVAVASRASRLELEAARLRQRLADRDRLAAELADRAAKLEQALRDADARXRSALDDNAKLAKERDSLAQTSKKLARDLAKLETFKRHLMQSLGDDNSQTHHQETVDIRTYEQSVAKANSWKDGLEKNSHPVSSLSDESVEADSVNQEVTTRPFEQKLTITHITPRLTSDPAPKLRTAATSPRRYSTAVSPKLASGATSPRLEGHMAMSPWLPSSKMSSAANSPPRGQSISGRGTRVDGKEFFRQARHRLSYEQFAAFLSNIKELNAHRQSREETLRKADEIFGAENMDLFRSFQGLLSRSLS

SEQ ID NO: 20570 - protein, 214 aa, Zea mays subsp. mays
  misc_feature (1)..(214): Ceres Seq. ID no. 12383375
MQSLGDDNSQTHHQETVDIRTYEQSVAKANSWKDGLEKNSHPVSSLSDESVEADSVNQEVTTRPFEQKLTITHITPRLTSDPAPKLRTAATSPRRYSTAVSPKLASGATSPRLEGHMAMSPWLPSSKMSSAANSPPRGQSISGRGTRVDGKEFFRQARHRLSYEQFAAFLSNIKELNAHRQSREETLRKADEIFGAENMDLFRSFQGLLSRSLS

SEQ ID NO: 20571 - DNA, 1721 bp, Zea mays subsp. mays
  misc_feature (1)..(1721): Ceres Seq. ID no. 12383403
cgccaagcccgcaattaaccctcactaaagggaacaaaagctggagctccaccgcggtggcggccgctctagaactagtggatcccccgggctgcaggaattcgcacgagaccattacctagaacatcctaatcgaaaaattattaccatgggagaagagaagcaacgtcgggatggccatggcggaaagaacaagtacgccgtggcgtgctccattattggctccatcatctccattctcatgggctatgacacgggcgtcatgaccggcgcgatgctgttcatcaaggaggacctcaagaccaacgacacgcaggtccaggtcctcgccggcatcctcaacgtctgcgcccttgtcggctccctcacggccggccgcgtctccgactgggtcggcccccgccgcaccatctccctcgcggcctgcatcttcctcgcggggtcagtcctcatgggcctctcgcccaacttcggtacgctcctggcaggacgctgcgtggccggcgtcggcgtcggatacgcgctcatgatcgcgcccgtctacgcggccgagatttcgtccgcccacatccgcggctccgtcacctcgctgcccgagatctgcatcagcttcggcatcctgattgggtacgtggccaactacctgctagctaagctcccgctggtctacggctggcgcgccatgctggggctcggcgcgctgccgagcgccgtgctcgcagtcgccgtgctcgcgatgccggagtcgccccggtggctcgtcatgcagggccgcgtcgagcaggcccacgccgtgctcaggcgcgtgtccgacactgcaggcgaggccgatgtgcgcctcgcggaaatcaagaccgcggcggggctggcagacgacgatgacggctcaccgagaggtgtcggcaagggcgtgtggaaggagatgttcctgcacccgacgccccccgtccggcgtatcctcgtcgctgccttcggagtccacttcttccagcatctcacgggaatcgaagccgtggtcctctacagcccacgcatctttaaggcagccggcatcgccacccgcagcgagatccttgcagcgaccatcggcgtgggcgtcaccaagacggtgttcatcatgacagccatcctgctggtggaccgcatcggccggaggccgctctacctctcgagcctggcgggcatcatcgcctcgcttgcctgcctcggtcttggcctcaccgtcgtggagcgctcggtgccgcgccactcgccgacgtgggctatggcattgtccatcgcaacggtcttcaccttcatagcgtccttctccatcggtgtggggcccatcacgtgggcgtacagcaccgaggtgtacccgctccggctgcgcgcgcagggcgccagcgtcggcgtggccatcaaccgtgtcatgaacgccggggtctctatgacgttcgtgtcgctgtacaatgcggtgaccatcggcggtgcctttttcctgttcgcagggctggccgtgttggcggccatgttcttctacttcctctgcccggagacgcaaggacggccactggaggagatcgaagaggtgttcggccgtgggtggcgcgcgcgcctcctgtcatgggacgaagctgttgtggagcttccaatgtccaacaccaccgacggcaacaccaaggcgcgcccgtgatgcaaatgcgattgcaaaaattatggatagacattcatatatggtc

SEQ ID NO: 20572 - protein, 508 aa, Zea mays subsp. mays
  misc_feature (1)..(508): Ceres Seq. ID no. 12383404
MGEEKQRRDGHGGKNKYAVACSIIGSIISILMGYDTGVMTGAMLFIKEDLKTNDTQVQVLAGILNVCALVGSLTAGRVSDWVGPRRTISLAACIFLAGSVLMGLSPNFGTLLAGRCVAGVGVGYALMIAPVYAAEISSAHIRGSVTSLPEICISFGILIGYVANYLLAKLPLVYGWRAMLGLGALPSAVLAVAVLAMPESPRWLVMQGRVEQAHAVLRRVSDTAGEADVRLAEIKTAAGLADDDDGSPRGVGKGVWKEMFLHPTPPVRRILVAAFGVHFFQHLTGIEAVVLYSPRIFKAAGIATRSEILAATIGVGVTKTVFIMTAILLVDRIGRRPLYLSSLAGIIASLACLGLGLTVVERSVPRHSPTWAMALSIATVFTFIASFSIGVGPITWAYSTEVYPLRLRAQGASVGVAINRVMNAGVSMTFVSLYNAVTIGGAFFLFAGLAVLAAMFFYFLCPETQGRPLEEIEEVFGRGWRARLLSWDEAVVELPMSNTTDGNTKARP

SEQ ID NO: 20573 - protein, 477 aa, Zea mays subsp. mays
  misc_feature (1)..(477): Ceres Seq. ID no. 12383405
MGYDTGVMTGAMLFIKEDLKTNDTQVQVLAGILNVCALVGSLTAGRVSDWVGPRRTISLAACIFLAGSVLMGLSPNFGTLLAGRCVAGVGVGYALMIAPVYAAEISSAHIRGSVTSLPEICISFGILIGYVANYLLAKLPLVYGWRAMLGLGALPSAVLAVAVLAMPESPRWLVMQGRVEQAHAVLRRVSDTAGEADVRLAEIKTAAGLADDDDGSPRGVGKGVWKEMFLHPTPPVRRILVAAFGVHFFQHLTGIEAVVLYSPRIFKAAGIATRSEILAATIGVGVTKTVFIMTAILLVDRIGRRPLYLSSLAGIIASLACLGLGLTVVERSVPRHSPTWAMALSIATVFTFIASFSIGVGPITWAYSTEVYPLRLRAQGASVGVAINRVMNAGVSMTFVSLYNAVTIGGAFFLFAGLAVLAAMFFYFLCPETQGRPLEEIEEVFGRGWRARLLSWDEAVVELPMSNTTDGNTKARP

SEQ ID NO: 20574 - protein, 470 aa, Zea mays subsp. mays
  misc_feature (1)..(470): Ceres Seq. ID no. 12383406
MTGAMLFIKEDLKTNDTQVQVLAGILNVCALVGSLTAGRVSDWVGPRRTISLAACIFLAGSVLMGLSPNFGTLLAGRCVAGVGVGYALMIAPVYAAEISSAHIRGSVTSLPEICISFGILIGYVANYLLAKLPLVYGWRAMLGLGALPSAVLAVAVLAMPESPRWLVMQGRVEQAHAVLRRVSDTAGEADVRLAEIKTAAGLADDDDGSPRGVGKGVWKEMFLHPTPPVRRILVAAFGVHFFQHLTGIEAVVLYSPRIFKAAGIATRSEILAATIGVGVTKTVFIMTAILLVDRIGRRPLYLSSLAGIIASLACLGLGLTVVERSVPRHSPTWAMALSIATVFTFIASFSIGVGPITWAYSTEVYPLRLRAQGASVGVAINRVMNAGVSMTFVSLYNAVTIGGAFFLFAGLAVLAAMFFYFLCPETQGRPLEEIEEVFGRGWRARLLSWDEAVVELPMSNTTDGNTKARP

SEQ ID NO: 20575 - DNA, 1863 bp, Zea mays subsp. mays
  misc_feature (1)..(1863): Ceres Seq. ID no. 12383411
gcacgagaccattacctagaacatcctaatcgaaaagcatcgccgcatctttccaccttccctcccctccactcccgcaatctcgtctccgccgtccgccgccgcgccgtagcaaggtaacagagatcacaacaagttaaagcctcaaggaatgctgaaagatgtgctttcctagaagatatttctgttgcgacatcaaggaccttgctgctccccgagggctgctgatctgctcaactcttgatgacctgatctgcatcgattctacaacgttcagactgcgccacgaccaagccataagagtactgttcaccgtcatggatcatgacatgggggaggaaggctaactctttgcccagtcccacctgattggcgccagcagtgtgatttatactttttgcagagagagaagatatggagtcgacaggaaagattttgatggagcggtatgaggtggggaggctactggggaaaggcacatttggcaaggtgcactacgcaaagaatcttgagtccaacgagagtgttgccattaagatgatggacaaggacaaagtgctcaaggccgggctttcggagcagataaggcgggagatcacaacgatgcggttggtggctcataagaacattgttgagcttcatgaggtcatggcgacgcggaacaacatctactttgtcatggagtatgtgaaaggcggagagctctttgacaagattggcaagagtggcaagctcacagaggccgctgcacacaagtacttccagcagctcattggtgcggtggattactgccacagccgaggtgtgtatcaccgggacttgaagcctgagaaccttctgttggatgagaatgagaacctcaaggtctcagattttggactgagtgcactttcagaatcccaagggggcaagatggcttactccacaccacctgtgggactccagcatatgtagctccagaggtgatcagcaagacaggctatgatggggcaaagtcagacatctggtcctgtggtgttgttctatttgtactagttgctggttatcttcctttccgggccccaaacatgatggagatgtatcgcaagatacagaatggtgatttcaggtgccctagttggttttcacacaaactcaagaagctcttgtacaagatcctcgaccccagcccagacacaagaatttcagtgcagaagataaaagagtctacctggtttcgaaaaggccctgtggagacccgtacagtaaaggagaaaattctgagtgagaatgacaccacaaatgctgctccagccgttgctatgaggcgcaagaagaatgttcatgaagacgtgaagcccccgactgtcacaagcttaaacgcctttgaaattatatctttctccacaggattggacctctctggcctatttatcagaaaggagtgtaagaaggagacgcggttcacttctgataagggtgccgtgtccatcatctcgaagcttgaagatgttgcaaaagcactgaatctcagggtaaggaagaaggacaatggtgttgtcaagattcaggggaggaaggtggggaggaagggtgtcctggagttcgacactgaaatatttgagatcacggcatcctaccacctcatcgagatgaaacaaacgggcggtgattcacttgagtacaagaaactgttggaagaggacatccggccagcactgaaggacatagtctgggcctggcatggagatgaccagcaacaaaagtagtagctttggatctctcttttttgttccataaaattgttagatctttcacttcagattgattttgttcgacatgtgcgtgttcttcttactagttacattctttctgtttctgtgg

SEQ ID NO: 20576 - protein, 226 aa, Zea mays subsp. mays
  misc_feature (1)..(226): Ceres Seq. ID no. 12383412
MMEMYRKIQNGDFRCPSWFSHKLKKLLYKILDPSPDTRISVQKIKESTWFRKGPVETRTVKEKILSENDTTNAAPAVAMRRKKNVHEDVKPPTVTSLNAFEIISFSTGLDLSGLFIRKECKKETRFTSDKGAVSIISKLEDVAKALNLRVRKKDNGVVKIQGRKVGRKGVLEFDTEIFEITASYHLIEMKQTGGDSLEYKKLLEEDIRPALKDIVWAWHGDDQQQK

SEQ ID NO: 20577 - protein, 225 aa, Zea mays subsp. mays
  misc_feature (1)..(225): Ceres Seq. ID no. 12383413
MEMYRKIQNGDFRCPSWFSHKLKKLLYKILDPSPDTRISVQKIKESTWFRKGPVETRTVKEKILSENDTTNAAPAVAMRRKKNVHEDVKPPTVTSLNAFEIISFSTGLDLSGLFIRKECKKETRFTSDKGAVSIISKLEDVAKALNLRVRKKDNGVVKIQGRKVGRKGVLEFDTEIFEITASYHLIEMKQTGGDSLEYKKLLEEDIRPALKDIVWAWHGDDQQQK

SEQ ID NO: 20578 - protein, 223 aa, Zea mays subsp. mays
  misc_feature (1)..(223): Ceres Seq. ID no. 12383414
MYRKIQNGDFRCPSWFSHKLKKLLYKILDPSPDTRISVQKIKESTWFRKGPVETRTVKEKILSENDTTNAAPAVAMRRKKNVHEDVKPPTVTSLNAFEIISFSTGLDLSGLFIRKECKKETRFTSDKGAVSIISKLEDVAKALNLRVRKKDNGVVKIQGRKVGRKGVLEFDTEIFEITASYHLIEMKQTGGDSLEYKKLLEEDIRPALKDIVWAWHGDDQQQK

SEQ ID NO: 20579 - DNA, 1414 bp, Zea mays subsp. mays
  misc_feature (1)..(1414): Ceres Seq. ID no. 12383423
actcttccgatcccgaggaggtaaaaacaccgtcgctcaccaccaacacaacgccaaccaacctgccccctcacccccgctggccgctgcttaacaaaccgccgccacaggacaagacaaacttattacagctccacctcagtgctgcagagactgagggccagccaaaccgctcaccgcacacgcggaattcaagcagcatgtacgccgacgccgggttcgccttcgccttcgccgccgcctactcccccaccctcacttcctcgcagccccagccgccgccgccgccgttcgactacgccttctcctccgagccacccctcctctccatgcccgccatggaccacgacgcctacctggggaacttggtacagccatccatggtatcagaatatgacctgggaggagaaggggacctgttcaaagctccagaagccatcatcgaggaaccgctgctcagcctcgatcctgtcgcagctgccttttcaatgatggctggcaatggaagtgctgtcatggatcaaactattaaggacgcaggcaccggcaccatccaaaatgaccccctcctgagtgaggtgctgtacgagtgcgagaaggaactcatggagaagtccacaatcgaagagacaatttctgaacttatggatgttaagattcctatgctgcaagttgaagaaatcccaagccaagctgaacaggttcttatacagaaccagcagctcccggccatggagaaagagaagcaatccgttcctgaatgctcgctccaaaaaagtgttagttctggatgcctcaactcagcagattggatgaatggacctgccaggccaaactttctagacttccaggggctggactttgaggcagcatttgggctgaggagagcttacagcgaaggagacattcagaaccttggagccaacacgcctcgaccagcagcaaatgtttgtgtgaccatcagtgacctcaagaccgaagaaaggaagcaaaagctttccaggtataggaagaagaagatcaagcggaactttggcaggaagatcaagtacgcgtgcaggaaggctctggcagacagccagccaagagtgcgagggagatttgccaagatcgaagaatgcgacctgctgaagccaagcaagtagatccaagtatgcttggttttggcttctagctaggcgccgctccatcgtccttaccttgtgcgctggagaggcgccgcgatgcccgtcggaattcattcaattgacctctcctgtttctctcgggcagcatgctgtgtaataataatctcctccgggcccttgggtgcgagtgaagagctgaaaatttggtatggtagtctagcccccctgtactgtacaaaaggcttgaagatggtaataaaactcagctcccctcttgcttgcttggc

SEQ ID NO: 20580 - protein, 380 aa, Zea mays subsp. mays
  misc_feature (1)..(380): Ceres Seq. ID no. 12383424
SSDPEEVKTPSLTTNTTPTNLPPHPRWPLLNKPPPQDKTNLLQLHLSAAETEGQPNRSPHTRNSSSMYADAGFAFAFAAAYSPTLTSSQPQPPPPPFDYAFSSEPPLLSMPAMDHDAYLGNLVQPSMVSEYDLGGEGDLFKAPEAIIEEPLLSLDPVAAAFSMMAGNGSAVMDQTIKDAGTGTIQNDPLLSEVLYECEKELMEKSTIEETISELMDVKIPMLQVEEIPSQAEQVLIQNQQLPAMEKEKQSVPECSLQKSVSSGCLNSADWMNGPARPNFLDFQGLDFEAAFGLRRAYSEGDIQNLGANTPRPAANVCVTISDLKTEERKQKLSRYRKKKIKRNFGRKIKYACRKALADSQPRVRGRFAKIEECDLLKPSK

SEQ ID NO: 20581 - protein, 314 aa, Zea mays subsp. mays
  misc_feature (1)..(314): Ceres Seq. ID no. 12383425
MYADAGFAFAFAAAYSPTLTSSQPQPPPPPFDYAFSSEPPLLSMPAMDHDAYLGNLVQPSMVSEYDLGGEGDLFKAPEAIIEEPLLSLDPVAAAFSMMAGNGSAVMDQTIKDAGTGTIQNDPLLSEVLYECEKELMEKSTIEETISELMDVKIPMLQVEEIPSQAEQVLIQNQQLPAMEKEKQSVPECSLQKSVSSGCLNSADWMNGPARPNFLDFQGLDFEAAFGLRRAYSEGDIQNLGANTPRPAANVCVTISDLKTEERKQKLSRYRKKKIKRNFGRKIKYACRKALADSQPRVRGRFAKIEECDLLKPSK

SEQ ID NO: 20582 - protein, 271 aa, Zea mays subsp. mays
  misc_feature (1)..(271): Ceres Seq. ID no. 12383426
MPAMDHDAYLGNLVQPSMVSEYDLGGEGDLFKAPEAIIEEPLLSLDPVAAAFSMMAGNGSAVMDQTIKDAGTGTIQNDPLLSEVLYECEKELMEKSTIEETISELMDVKIPMLQVEEIPSQAEQVLIQNQQLPAMEKEKQSVPECSLQKSVSSGCLNSADWMNGPARPNFLDFQGLDFEAAFGLRRAYSEGDIQNLGANTPRPAANVCVTISDLKTEERKQKLSRYRKKKIKRNFGRKIKYACRKALADSQPRVRGRFAKIEECDLLKPSK

SEQ ID NO: 20583 - DNA, 1584 bp, Zea mays subsp. mays
  misc_feature (1)..(1584): Ceres Seq. ID no. 12383435
ctacgccaagcccgcaattaaccctcactaaagggaacaaaagctggagctccaccgcggtggcggccgctctagaactagtggatcccccgggctgcaggaattcgcacgagaccattacctagaacatcctaatcgaaaaacccacacctacacctacacattacagccagtactgctgtcacctcacttagcaaagctaatacgtatgtcatagcagcttgccaccatggcgagcatcaccgtgacaaggaaatcccaatccttcgtcgtgccatcgtccacgccaactccgacgaccgagacgctcgagttgtcggccatcgaccgcgttccaggcctgcgccacacggtgcgatccctgcacgtgttccgccgcaaggacgccgccgcctccgccgcccactacgatgctgctgccgccggcaggccggccgaggtgatccgcgcggcgctgtcccgcgcgctggtggactaccgcccgttcgccggccgtttcgtcggctcactgtacgccggggaggcgagcgttgagtgcaccgacgacggtgcgtggttcgtggacgctgtcacagattgcagcctcgaggacgtgaacggcctcgactacccgcttatggtctccgaggaagagctgctgccggctccagaggaaggtgttgacccaaccagtattccgattatgatgcaggtcacggaatttgcttgtggaggatttgtggtggggctagtcgcagtgcacacccttgctgacgggctcggtgcagctcaattcatcaatgcaatttctgagtttgcccgtggagtagttaaacctacaatagcacctatatgggcacgggagttaataccaaacccacctaaaatgcctcctgggccaccaccatccttcgagtgcttcgggttcaaacattttgttatggatgtggcagttaacaatattgcacatgtcaagagtgaatactttcaaaccaatggacactattgctctacatttgatgttgccattgccaaggtttggcaagctaggacaagggcaatcaagtacgaaccaaatttcaaggtgcatgtttgcttctttgccaacactcgccacctcctcacacatgtgctacccaaggttggtggcttctatggaaattgcttctatccagtgactgtcacagcaactgctgaggtagttgctagttcaagattgcttgatgtgattaggatgataagggatgggaaggctaggcttcctttagagttttccagatggtccacgggcaatgtgaaagtagacccatatcaactaacattcaagcacaatgttctatttgtgtccgattggacacggcttggattctttgaagttgactatgggtggggtgtaccaaaccatatcctccctttcacttatgcagactacatggctgtagcagttcttggggctccaccgtctatgaagaaggggactcgaataatgacacaatgtgtcgaggaggagcatctcgtggacttcaaggccgagatgaaagccttcttttaggtcctcggattttacttgaaagttcaaacattatgcatttatgtgttcaattc

SEQ ID NO: 20584 - protein, 433 aa, Zea mays subsp. mays
  misc_feature (1)..(433): Ceres Seq. ID no. 12383436
MASITVTRKSQSFVVPSSTPTPTTETLELSAIDRVPGLRHTVRSLHVFRRKDAAASAAHYDAAAAGRPAEVIRAALSRALVDYRPFAGRFVGSLYAGEASVECTDDGAWFVDAVTDCSLEDVNGLDYPLMVSEEELLPAPEEGVDPTSIPIMMQVTEFACGGFVVGLVAVHTLADGLGAAQFINAISEFARGVVKPTIAPIWARELIPNPPKMPPGPPPSFECFGFKHFVMDVAVNNIAHVKSEYFQTNGHYCSTFDVAIAKVWQARTRAIKYEPNFKVHVCFFANTRHLLTHVLPKVGGFYGNCFYPVTVTATAEVVASSRLLDVIRMIRDGKARLPLEFSRWSTGNVKVDPYQLTFKHNVLFVSDWTRLGFFEVDYGWGVPNHILPFTYADYMAVAVLGAPPSMKKGTRIMTQCVEEEHLVDFKAEMKAFF

SEQ ID NO: 20585 - protein, 304 aa, Zea mays subsp. mays
  misc_feature (1)..(304): Ceres Seq. ID no. 12383437
MVSEEELLPAPEEGVDPTSIPIMMQVTEFACGGFVVGLVAVHTLADGLGAAQFINAISEFARGVVKPTIAPIWARELIPNPPKMPPGPPPSFECFGFKHFVMDVAVNNIAHVKSEYFQTNGHYCSTFDVAIAKVWQARTRAIKYEPNFKVHVCFFANTRHLLTHVLPKVGGFYGNCFYPVTVTATAEVVASSRLLDVIRMIRDGKARLPLEFSRWSTGNVKVDPYQLTFKHNVLFVSDWTRLGFFEVDYGWGVPNHILPFTYADYMAVAVLGAPPSMKKGTRIMTQCVEEEHLVDFKAEMKAFF

SEQ ID NO: 20586 - protein, 282 aa, Zea mays subsp. mays
  misc_feature (1)..(282): Ceres Seq. ID no. 12383438
MMQVTEFACGGFVVGLVAVHTLADGLGAAQFINAISEFARGVVKPTIAPIWARELIPNPPKMPPGPPPSFECFGFKHFVMDVAVNNIAHVKSEYFQTNGHYCSTFDVAIAKVWQARTRAIKYEPNFKVHVCFFANTRHLLTHVLPKVGGFYGNCFYPVTVTATAEVVASSRLLDVIRMIRDGKARLPLEFSRWSTGNVKVDPYQLTFKHNVLFVSDWTRLGFFEVDYGWGVPNHILPFTYADYMAVAVLGAPPSMKKGTRIMTQCVEEEHLVDFKAEMKAFF

SEQ ID NO: 20587 - DNA, 1467 bp, Zea mays subsp. mays
  misc_feature (1)..(1467): Ceres Seq. ID no. 12383439
gcagctccgcacaggtccctggcacagggcgaggcactgtcacgcacggaatcgagcaatcgatcacacagagacacaggtcaggagcaggagctcgaggtgtcgccgcgcggcagcagcttgggactcgggacagccatggggaagggccgggcaccgtgctgcgccaaggtggggctcaacaagggctcctggacgccggaggaggacatgcgcctcgtcgcctacattcagaagtacggccacgccaactggcgcgccctgcccaagcaagcaggtttgctgcggtgcgggaagagctgccgtctgcggtggatcaactacctgcgcccggacctcaagcgcggcaacttcaccgccgaggaggaggaggccatcatcaagctccacggcttgctcgggaacaagtggtccaagatcgcgtcgtgcctgccgggccggacggacaacgagatcaagaacgtctggaacacgcacctgaagaagcgggtatcgccgtccggcggggaggaggagcacggcgccgccgggtccaacaagaacaagaagaagaagaagaaagccgctggcggcgccgaggagccgctcccgtcaccgactccgtctccgtcgccgtcctcgtccaccaccacgacggccaactgctccagcggcgactccggcgagcagcagagcaacaccagcaaggaggcggacgacgagcagctggacctggagaacctcgagatgatgcccatgctggacgacgacccaataaccttcggcttcgacatgctggtggaccccgtgccagcgccgtacggcccggccgtgtccgcgtccgcgtccagacccacgtcgccctgcgcctcgtccacgtccccacctccgcccgcgggctgcggcccgctcggcgtggacgacctgctggtgctgccagagatcgacatcgaccaggagctgtggagcatcatcgacggcgacggcggcggcgacggaggaggctccgcttgcgccgtgtctgccgagacatcggcgccgtgctgccagagcaatgcgccggagccgacgacgaacggcgcctgcgcgaccagccaccacggagcggcggaggaggagggaaaggagtggtggttggaggacctggagagggagttgggcctgtggggccccgtggacgtggaggactaccagtaccagtacccaacgggcccacatggtctggtggctgaccacacggacccgcttcctgccatggtggacgacccggtgtcctgctacttccaagcgggccccgcctccgcagtgctccaggaacccgggtactcggtgactagtggtagcaacctgatggggttgtgagatttatcgtcgtcgtcgtcgtcgtttttttttgtgatttttttttagatagcagaacagaaatcctgaacaaacggatcgtactatgcctggcaaaccatcggcgccagcatactacttgcttgc

SEQ ID NO: 20588 - protein, 446 aa, Zea mays subsp. mays
  misc_feature (1)..(446): Ceres Seq. ID no. 12383440
AAPHRSLAQGEALSRTESSNRSHRDTGQEQELEVSPRGSSLGLGTAMGKGRAPCCAKVGLNKGSWTPEEDMRLVAYIQKYGHANWRALPKQAGLLRCGKSCRLRWINYLRPDLKRGNFTAEEEEAIIKLHGLLGNKWSKIASCLPGRTDNEIKNVWNTHLKKRVSPSGGEEEHGAAGSNKNKKKKKKAAGGAEEPLPSPTPSPSPSSSTTTTANCSSGDSGEQQSNTSKEADDEQLDLENLEMMPMLDDDPITFGFDMLVDPVPAPYGPAVSASASRPTSPCASSTSPPPPAGCGPLGVDDLLVLPEIDIDQELWSIIDGDGGGDGGGSACAVSAETSAPCCQSNAPEPTTNGACATSHHGAAEEEGKEWWLEDLERELGLWGPVDVEDYQYQYPTGPHGLVADHTDPLPAMVDDPVSCYFQAGPASAVLQEPGYSVTSGSNLMGL

SEQ ID NO: 20589 - protein, 402 aa, Zea mays subsp. mays
  misc_feature (1)..(402): Ceres Seq. ID no. 12383441
SSAQVPGTGRGTVTHGIEQSITQRHRSGAGARGVAARQQLGTRDSHGEGPGTVLRQGGAQQGLLDAGGGHAPRRLHSEVRPRQLARPAQASRFAAVREELPSAVDQLPAPGPQARQLHRRGGGGHHQAPRLAREQVVQDRVVPAGPDGQRDQERLEHAPEEAGIAVRRGGGARRRRVQQEQEEEEESRWRRRGAAPVTDSVSVAVLVHHHDGQLLQRRLRRAAEQHQQGGGRRAAGPGEPRDDAHAGRRPNNLRLRHAGGPRASAVRPGRVRVRVQTHVALRLVHVPTSARGLRPARRGRPAGAARDRHRPGAVEHHRRRRRRRRRRLRLRRVCRDIGAVLPEQCAGADDERRLRDQPPRSGGGGGKGVVVGGPGEGVGPVGPRGRGGLPVPVPNGPTWSGG

SEQ ID NO: 20590 - protein, 400 aa, Zea mays subsp. mays
  misc_feature (1)..(400): Ceres Seq. ID no. 12383442
MGKGRAPCCAKVGLNKGSWTPEEDMRLVAYIQKYGHANWRALPKQAGLLRCGKSCRLRWINYLRPDLKRGNFTAEEEEAIIKLHGLLGNKWSKIASCLPGRTDNEIKNVWNTHLKKRVSPSGGEEEHGAAGSNKNKKKKKKAAGGAEEPLPSPTPSPSPSSSTTTTANCSSGDSGEQQSNTSKEADDEQLDLENLEMMPMLDDDPITFGFDMLVDPVPAPYGPAVSASASRPTSPCASSTSPPPPAGCGPLGVDDLLVLPEIDIDQELWSIIDGDGGGDGGGSACAVSAETSAPCCQSNAPEPTTNGACATSHHGAAEEEGKEWWLEDLERELGLWGPVDVEDYQYQYPTGPHGLVADHTDPLPAMVDDPVSCYFQAGPASAVLQEPGYSVTSGSNLMGL

SEQ ID NO: 20591 - DNA, 1186 bp, Zea mays subsp. mays
  misc_feature (1)..(1186): Ceres Seq. ID no. 12383458
ctacgccaagcgcgcaattaaccctcactaaagggaacaaaagctggagctccaccgcggtggcggccgctctagaactagtggatcccccgggctgcaggaattcgcacgagaccattacctagaacatcctaatgaaaaaaaaacaagaagcccagaaaacaaaaggagcagcttcgattcgagatcgcggcgccatcgaccatgcagctcaagaatcgccgcgaagccgtgacggcgacagtgctcgtggccgtatcagtcctggcgaccctggcgcgcaccgacggcgccctctgcgacaagtccgacaaggcagccttgcttgccgtgaagtcggcgctgggcaacccactggcgctctccggctggaactccaccgtggcctgctgctcctgggagggcatctcctgcaacgccaccaccggccgcgtcaccgacctgaccgtcttcgcgctcaacatctcggcgccggtcccggccgccatcgccaacctcaccgcgctgcagagcgtcaacctggcctacaaccagctgtacggcagcatcccggcgttcctgggcccgcgcgcgctgccggacctcaccttcctccgcctcgacggcaaccggctctcgggcgccatcccgcccacggcgaccgtcttcaacctcctcctcgtcggcaaccgcctcacggggccgatcccggccgccttcgccggcgcggcgttcggcgacgtggagctctcggacaaccagctcacgggcgacgcgtcggcgctgttcggcgccgagaagccgctgaacgcgctgtccctgtcgcgcaaccggttcaggttcgacctcggccgcgtggagctgccggaggcgatggacatcctggagatcgaccacaacatggtgtacgggagcatcccggccgccgcggcggagaggaagtggctggcgttcgacgtcagctacaaccagctgtgcgggcccataccgcaggggcggtacacgcaccggttcggggccaagcacttcgctggcaacaagtgcctctgcggccgcccgctcccgccgtgcgcttattagaagaaggccggaacagtacattcatactagtataatagctttattattggaataatgatcctccgtgctgctgtactcgaacgttttgtaatcttgaagcgagccattattaagatatcctgtggcg

SEQ ID NO: 20592 - protein, 319 aa, Zea mays subsp. mays
  misc_feature (1)..(319): Ceres Seq. ID no. 12383459
MKKKQEAQKTKGAASIRDRGAIDHAAQESPRSRDGDSARGRISPGDPGAHRRRPLRQVRQGSLACREVGAGQPTGALRLELHRGLLLLGGHLLQRHHRPRHRPDRLRAQHLGAGPGRHRQPHRAAERQPGLQPAVRQHPGVPGPARAAGPHLPPPRRQPALGRHPAHGDRLQPPPRRQPPHGADPGRLRRRGVRRRGALGQPAHGRRVGAVRRREAAERAVPVAQPVQVRPRPRGAAGGDGHPGDRPQHGVREHPGRRGGEEVAGVRRQLQPAVRAHTAGAVHAPVRGQALRWQQVPLRPPAPAVRLLEEGRNSTFILV

SEQ ID NO: 20593 - protein, 284 aa, Zea mays subsp. mays
  misc_feature (1)..(284): Ceres Seq. ID no. 12383460
MQLKNRREAVTATVLVAVSVLATLARTDGALCDKSDKAALLAVKSALGNPLALSGWNSTVACCSWEGISCNATTGRVTDLTVFALNISAPVPAAIANLTALQSVNLAYNQLYGSIPAFLGPRALPDLTFLRLDGNRLSGAIPPTATVFNLLLVGNRLTGPIPAAFAGAAFGDVELSDNQLTGDASALFGAEKPLNALSLSRNRFRFDLGRVELPEAMDILEIDHNMVYGSIPAAAAERKWLAFDVSYNQLCGPIPQGRYTHRFGAKHFAGNKCLCGRPLPPCAY

SEQ ID NO: 20594 - DNA, 1285 bp, Zea mays subsp. mays
  misc_feature (1)..(1285): Ceres Seq. ID no. 12383461
atacatccctctccgtctccctaccgctcccgtcccgtccgctgctggctctgcatatcccgcgcccgactcccgttgctgcgtgcggcggcccgactagtcgcgccgcgctgcgctcggcttgattgaaccggccgggatgggggtgttggaggacctcgtggcgagagcgggcgggtgcgcggtcatcgacggcggcttcgccacgcagctggaggcgctcggcgccgacatcaacgacccgctctggagcgccgcttgcctcatcaccaggccgcacctcgtcaaggaggttcatatgcagtatcttgaagctggtgcggacgtcatcatttcatcatcttaccaggcaacaatcccgggtttcatagctagaggaatgtctgtcgctgaggcagaagatttactgcgaacaagtgtaaaactggccaatgaagctcgagatgaattttggaagtcaacactgaggaagtccaaacctatttacaaccgtgctctggttgctgcatccattggtagctacggagcctatcttgctgatggatcggagtacagtggatcatacggagctgacatcacagccgagaagctgaaggacttccacaggcgccggctgcaggttcttgcaagtgccggtcctgacctgattgcgtttgaggccattcctaaccaaatggaggcacaggcattggttgagcttctggaggaagagaaagtccagatcccttcctggatctgcttcagctccgtggacggtaagaacctgtgctctggggagagttttgcggactgccttaagatcctcaacgcgagcgagaaggtggccgttgtaggcgtgaactgcacacctcctcagttcatcgagggcatcatatgtgaatttaggaagcaaaccaagaaggcgattgcagtttacccgaacagcggcgaagtttgggacgggagagcgaagaggtggctgccggttgagtgcttgggtcacaaaagcttcgacgctctcgcgaagagatggcaggaggcgggggccagcctcatcggagggtgctgccggacaacgccttcaactattagggctgtttccaagatcctcaaaggaaggacggggcattgatttgtttattataattgagctgttgttgcattatgtcactagccagaataacattcagaatatgtatcctgttgctcttccgttcccctttctaaaataaggtatcaatataattttgcagtgtaaaacgtaatactagtttgtagcgctgacccacagtattgcttagtctcc

SEQ ID NO: 20595 - protein, 323 aa, Zea mays subsp. mays
  misc_feature (1)..(323): Ceres Seq. ID no. 12383462
MGVLEDLVARAGGCAVIDGGFATQLEALGADINDPLWSAACLITRPHLVKEVHMQYLEAGADVIISSSYQATIPGFIARGMSVAEAEDLLRTSVKLANEARDEFWKSTLRKSKPIYNRALVAASIGSYGAYLADGSEYSGSYGADITAEKLKDFHRRRLQVLASAGPDLIAFEAIPNQMEAQALVELLEEEKVQIPSWICFSSVDGKNLCSGESFADCLKILNASEKVAVVGVNCTPPQFIEGIICEFRKQTKKAIAVYPNSGEVWDGRAKRWLPVECLGHKSFDALAKRWQEAGASLIGGCCRTTPSTIRAVSKILKGRTGH

SEQ ID NO: 20596 - protein, 270 aa, Zea mays subsp. mays
  misc_feature (1)..(270): Ceres Seq. ID no. 12383463
MQYLEAGADVIISSSYQATIPGFIARGMSVAEAEDLLRTSVKLANEARDEFWKSTLRKSKPIYNRALVAASIGSYGAYLADGSEYSGSYGADITAEKLKDFHRRRLQVLASAGPDLIAFEAIPNQMEAQALVELLEEEKVQIPSWICFSSVDGKNLCSGESFADCLKILNASEKVAVVGVNCTPPQFIEGIICEFRKQTKKAIAVYPNSGEVWDGRAKRWLPVECLGHKSFDALAKRWQEAGASLIGGCCRTTPSTIRAVSKILKGRTGH

SEQ ID NO: 20597 - protein, 243 aa, Zea mays subsp. mays
  misc_feature (1)..(243): Ceres Seq. ID no. 12383464
MSVAEAEDLLRTSVKLANEARDEFWKSTLRKSKPIYNRALVAASIGSYGAYLADGSEYSGSYGADITAEKLKDFHRRRLQVLASAGPDLIAFEAIPNQMEAQALVELLEEEKVQIPSWICFSSVDGKNLCSGESFADCLKILNASEKVAVVGVNCTPPQFIEGIICEFRKQTKKAIAVYPNSGEVWDGRAKRWLPVECLGHKSFDALAKRWQEAGASLIGGCCRTTPSTIRAVSKILKGRTGH

SEQ ID NO: 20598 - DNA, 1463 bp, Zea mays subsp. mays
  misc_feature (1)..(1463): Ceres Seq. ID no. 12383473
gcacgagaccattacctagaacatcctaatcgaaaacccgatcagtcgccgcccaagcctagcagatccgccggcgagcgcgcgggggcaatgggtgtcgtctcggcagcggcggacgcgattgtcgcggttttctccctcaccatcgtcgtcgcggcgccgctactcgacgcgcagtccgtcctcccgcataccctctacccggcgccgctcctggaactcaagcgctggtacgccgccgagtttggcgactacctcgtggcccagtcccccggcttcttccgtggccttgtttgcctcgagctcgccttccaatggccgctcgccgtcgccacactctacggcatcctcacccgccgccgctgggctgccaccacctccctcatggccggcgttggcaccctcacctccatggtaaagccgtgtttcccttctcccttgtagtggagtcacgattgtaatgcattatgcatgcatgtctggaatttcgtgagaccagtgtctcaccgctgcagctctgcccctgtgccccagatccaaaacactaccatggtggatgcacaattgtacacttaaaagtcagttcagttgatgtggaatccaaacatagtttctcatgtgcttattttgttatgattggctgattgttcaaatgaaatcgtgctggaaaaggttttgtagacccatgggattcagagttacttccatattgtcttggcataccaattgcatttcctgttggtgatgattcccagaatgtcaagctattgccaacatttttagttttgttctctgaaccatggttccttttgacctcaaatgtgctatggataggtgacgttgttcaggttaaatctcaaccgcactgtctcgtattaaatgataggagggaaaaaaatttcttgtcacaatatcagatatcaaatcatcgcaaaaattgagtactgactacctgttatgctagattctgcaattcttggtgagatgttaggttcaggcaaatcaacaccaaagttgcttcagatgtatgttccttatgctgtttttgctgtcattgctattctacgtggactttgctcatgctctggacgcactactgctggttcatcacttgggccttctgcccggaagaagagggtctagatcagcagtgacacttggagaattttcggtttgagacagtggcgccagagcactaatgctggtcagaagacgattatctggatcaggtttctatccctggtatttagcacggatgttgaaaaatccagatagtgttagtggctgtttctctaggatttggtgttcgttttccctgaaatgtgatattcatcttgcctttatttccattttaccctttgattatatgtcttgctaactaagacattgttttgtttactggatgagctgattcaactctggcattgttctggcgaataagtttcataaatccttgtcttggt

SEQ ID NO: 20599 - protein, 147 aa, Zea mays subsp. mays
  misc_feature (1)..(147): Ceres Seq. ID no. 12383474
ARDHYLEHPNRKPDQSPPKPSRSAGERAGAMGVVSAAADAIVAVFSLTIVVAAPLLDAQSVLPHTLYPAPLLELKRWYAAEFGDYLVAQSPGFFRGLVCLELAFQWPLAVATLYGILTRRRWAATTSLMAGVGTLTSMVKPCFPSPL

SEQ ID NO: 20600 - protein, 117 aa, Zea mays subsp. mays
  misc_feature (1)..(117): Ceres Seq. ID no. 12383475
MGVVSAAADAIVAVFSLTIVVAAPLLDAQSVLPHTLYPAPLLELKRWYAAEFGDYLVAQSPGFFRGLVCLELAFQWPLAVATLYGILTRRRWAATTSLMAGVGTLTSMVKPCFPSPL

SEQ ID NO: 20601 - DNA, 1330 bp, Zea mays subsp. mays
  misc_feature (1)..(1330): Ceres Seq. ID no. 12383496
gaattttcgatagtataaacttccactccaaatttaagttcaactgacaccgtttgcagcttctttgaccgcgcggcgatcgtcaccgacggcgacctggtcacgctgacggacgcggactccggcaagccgtcgacggcccccgtcccggacctgtggcgcctgagcaccgtgcaccgcgtggaggagctcaagtcggtgatccgcatgggtcctatctgggcggcgggcatcctggtgatcacggggtcgtcgacgcagaacaccttctctctgcagcaggcgagcaccatggaccgccgcctcgcgccgggcctctccacgttcgagatccccgcggggtccatgaccgtcttcgggctgctggccatgctcttcaccctcttcgtctacgaccgcgcgctcatccgcgtggcgcgccgcttcacggggctggaccgcggcatctccttcctgcaccgcatgggcgtcggcttcgccatcagcgtgctcgccaccctggtcgccggcttcgtggagcggcaccgcagggacgcggcggcggcggccggcgccacggacgccggcacgtccccgctgtcggcctactggctggtgccgcagtacgcgctgcatggcgtggccgaggcgttcacctccgtggggcacctcgagttcatgtacgaccaggcgcccgagagcatgcgcagcacggcgacggcgctcttctggctgtccatctcgctgggaagctacgcgagcacctgctggtggacgctgtgcaccgctggagcgcggggcccggcggcgccaactggctgccggacaacatcaatcacggcaggctggattacttttactgggtcgtcacggtactgcaggtcatgaacctggtgtactacgccatttgcgccaagcggttcacgttcaagccagtgcagctcaacaagaaagaggaggaagaaggcggcaaggtacttgtggagttgcaaganaaggtttaatttgagcagcatgcactttcagctatgtgcaggtacatgtctaatagaaaggaagtactcatcagtgctaggaagatcctcagaaaaactcccaaggtattactatataaatctatgtgagcatctgtattagtcaagtagatcaagaatgcaggaaggttgttcaggcaagcaacctcagaaattgtcaaggatcacatgacagctttgtggatggcagaagctatctggtctggtcctgagacttggcacaggtgcaaaacacaactcgactatatttgtaattagaaagcaggcacgaggcacatgtctgaactctgaaacttgacgttaatgcatagtactgt

SEQ ID NO: 20602 - protein, 219 aa, Zea mays subsp. mays
  misc_feature (1)..(219): Ceres Seq. ID no. 12383497
MGPIWAAGILVITGSSTQNTFSLQQASTMDRRLAPGLSTFEIPAGSMTVFGLLAMLFTLFVYDRALIRVARRFTGLDRGISFLHRMGVGFAISVLATLVAGFVERHRRDAAAAAGATDAGTSPLSAYWLVPQYALHGVAEAFTSVGHLEFMYDQAPESMRSTATALFWLSISLGSYASTCWWTLCTAGARGPAAPTGCRTTSITAGWITFTGSSRYCRS

SEQ ID NO: 20603 - protein, 191 aa, Zea mays subsp. mays
  misc_feature (1)..(191): Ceres Seq. ID no. 12383498
MDRRLAPGLSTFEIPAGSMTVFGLLAMLFTLFVYDRALIRVARRFTGLDRGISFLHRMGVGFAISVLATLVAGFVERHRRDAAAAAGATDAGTSPLSAYWLVPQYALHGVAEAFTSVGHLEFMYDQAPESMRSTATALFWLSISLGSYASTCWWTLCTAGARGPAAPTGCRTTSITAGWITFTGSSRYCRS

SEQ ID NO: 20604 - protein, 173 aa, Zea mays subsp. mays
  misc_feature (1)..(173): Ceres Seq. ID no. 12383499
MTVFGLLAMLFTLFVYDRALIRVARRFTGLDRGISFLHRMGVGFAISVLATLVAGFVERHRRDAAAAAGATDAGTSPLSAYWLVPQYALHGVAEAFTSVGHLEFMYDQAPESMRSTATALFWLSISLGSYASTCWWTLCTAGARGPAAPTGCRTTSITAGWITFTGSSRYCRS

SEQ ID NO: 20605 - DNA, 1460 bp, Zea mays subsp. mays
  misc_feature (1)..(1460): Ceres Seq. ID no. 12383521
actcggagagcgtgattatgctgcacgcgttgatttaacagctaaggtttatggtctacataaagcagaacagtatatcgagaaaattcctgcatctcataggagtgaggttgtgtatagaacacttctggcgaattgtgttgctgaaggcaatgtaaaaaaatcggagcaagtttttaataggatgaaggatcttggattcccagttacaacattttcttccaatcagcttctgctactctacaaaagattggacaagaaaaagattgctgatgttctcacaatgatggaaaaggaggatgtgaaaccatctatctttacttacaaggtccttgtagacgccaagggaatggttggagatgtagaagctatggagaaagtggttgaatcaatggtgaaagatggcattgagccagatctcacgtttaatgctacaattgccagacagtacatatttaatggtcagcgtgataaagcagagacacttttggagtcaatggagggtgatgatatccagaaaaaccgtgctgcttgcaagtttctattacctttatatgcttttctgggcaatggtgatgctgtggaaagaatttggaaggtgtgtgaggataatactcgtatagatgagtgcttgtctgctatagatgccttcggtaagcttggtaatgttgaaaaggcagagaaggtttttgaggatatgtttgtgaaatggaaaaacctctcttccaaatactacaccgctttgctaaaggtgtatgctaatcagaacctcttagacaagggtgaggaactagcaaagcggatggatgaggagggtgccaagtttgggaccccaactttgaatgcacttgtgaagctatatgctgacgctggagaggtggagaaagctgagtccctattgcacaagctatctctgaagaacaacgtcaagcccagttacagctcatacatgacactgcttgatagctactcgaagaaaggagacgtccacaactcggagaaagtgttcaacaagttgagacagataggctacactgggaggatcaggatgtaccagtttctgctccattcttatctacatgctaaggcccctgcgtatggattcaaagagaggatgaaggctgacaacattttccccaacagtgccgtggcaactctgattgccgctactgatccgttcgtcaagaagaaatcagtatcggacttgctcgattagattatggagtagtgtgaggtactgaggtccatcatgttgctatgcgcatgtgctgtttcgataagactatggagtagtgtgagaatatatggtgagataataacgtcttagtcttgtaatgaactaccattgactttgcatttagactcatgcgctttgctgaacttgagtcatagaaacaggataaagtgcacgagagagagagaacttgtgctaattcttgatataatattttttgttatcc

SEQ ID NO: 20606 - protein, 404 aa, Zea mays subsp. mays
  misc_feature (1)..(404): Ceres Seq. ID no. 12383522
LGERDYAARVDLTAKVYGLHKAEQYIEKIPASHRSEVVYRTLLANCVAEGNVKKSEQVFNRMKDLGFPVTTFSSNQLLLLYKRLDKKKIADVLTMMEKEDVKPSIFTYKVLVDAKGMVGDVEAMEKVVESMVKDGIEPDLTFNATIARQYIFNGQRDKAETLLESMEGDDIQKNRAACKFLLPLYAFLGNGDAVERIWKVCEDNTRIDECLSAIDAFGKLGNVEKAEKVFEDMFVKWKNLSSKYYTALLKVYANQNLLDKGEELAKRMDEEGAKFGTPTLNALVKLYADAGEVEKAESLLHKLSLKNNVKPSYSSYMTLLDSYSKKGDVHNSEKVFNKLRQIGYTGRIRMYQFLLHSYLHAKAPAYGFKERMKADNIFPNSAVATLIAATDPFVKKKSVSDLLD

SEQ ID NO: 20607 - protein, 343 aa, Zea mays subsp. mays
  misc_feature (1)..(343): Ceres Seq. ID no. 12383523
MKDLGFPVTTFSSNQLLLLYKRLDKKKIADVLTMMEKEDVKPSIFTYKVLVDAKGMVGDVEAMEKVVESMVKDGIEPDLTFNATIARQYIFNGQRDKAETLLESMEGDDIQKNRAACKFLLPLYAFLGNGDAVERIWKVCEDNTRIDECLSAIDAFGKLGNVEKAEKVFEDMFVKWKNLSSKYYTALLKVYANQNLLDKGEELAKRMDEEGAKFGTPTLNALVKLYADAGEVEKAESLLHKLSLKNNVKPSYSSYMTLLDSYSKKGDVHNSEKVFNKLRQIGYTGRIRMYQFLLHSYLHAKAPAYGFKERMKADNIFPNSAVATLIAATDPFVKKKSVSDLLD

SEQ ID NO: 20608 - protein, 310 aa, Zea mays subsp. mays
  misc_feature (1)..(310): Ceres Seq. ID no. 12383524
MMEKEDVKPSIFTYKVLVDAKGMVGDVEAMEKVVESMVKDGIEPDLTFNATIARQYIFNGQRDKAETLLESMEGDDIQKNRAACKFLLPLYAFLGNGDAVERIWKVCEDNTRIDECLSAIDAFGKLGNVEKAEKVFEDMFVKWKNLSSKYYTALLKVYANQNLLDKGEELAKRMDEEGAKFGTPTLNALVKLYADAGEVEKAESLLHKLSLKNNVKPSYSSYMTLLDSYSKKGDVHNSEKVFNKLRQIGYTGRIRMYQFLLHSYLHAKAPAYGFKERMKADNIFPNSAVATLIAATDPFVKKKSVSDLLD

SEQ ID NO: 20609 - DNA, 1617 bp, Zea mays subsp. mays
  misc_feature (1)..(1617): Ceres Seq. ID no. 12383525
gcacgagaccattacctagaacatcctaatcgaaaaatcgaaaagccgcacccgcacgccagaaacagctctcgcgttgcttccgcacgccgcccatggcgagcctgtcgtcgccgagtctcctctcttccttcctcggcgaccgcctcgcactctccactaggcctctccttctccgctccgctgtcccaggcagcaggcggctggcgtatcaagcaacgagaacgctatgcaacttggtggatatcctatttaacaggagaaatcaggatgatgcaccagaaaacaaccctagacgcctgcgtcctgggaaagtatctccacgccttagtgttcccaatcatatacaacggcctccatatgtcaattctcgtcaacaacgacctggtatgaataatggacctgaaatacatgatgagaacgggatcgagtgcatgagagcttctggaaagcttgctgcacaggttttgaaatttgctgggactcttgtaaaggcataacgactgatgaaattgataaagcagtgcaccaaatgataattgataatggagcatatccttcacctcttggttattgtggatacccaaagagtgtctgcacttcagtgaatgaatgcatctgtcatgggattccggattctcgtccccttgaggatggagatatcatcaatattgatgttactgtctacctcaatggctaccatggtgatacatctgctacatttctttgcggtgatgttgatgacgaagctaagaaattagttaaggtgacaagagaatgtctcgacaaggctatatcgatttgttcacctggggtggagatcaaacaaattggtagaactatacagtatgtaatttctgagtaaccaagcttttaaacagatgcacatatttttttattatctttatcttaaaaaacaacattcagtttatcgataagctgtattgtcttaatttgtatgcgtaacagatctggtaatcaaaacgaactcttgttccaactactatacttacgacatttaatctttgaagggatcatgcagacaagtttaagtttggtgtagttagacagtttgttggccatggggttggcaaagtttttcatgctgagcctgttgtgcttcatttcagtgagttccccactttaacgaaaacatctttttattaattgctgtcttgcctcccggctatctcaaggttctggttgcactctgcaccatattaggatgtgatatctgtgccaatgacttcgaaatttgcaggaaacaatgaatggggacgtatgatgttgaatcaaacatttactatagagcccatgctaaccatagggagcatcaaccctgtcatgtggtccgatgactggaccgcagtgacagaagacggcagcttgtcagcacagtttgagcacacgatactcattaccgaagatggccctgaaatactgacacagtgttaatggaaggccaaataacaaagaacaatcgttagtcagctggcaagatcctgcatttctttttggggactaattggtccaacctaaactctgatgcaaaatggcaaactcacattgtaatctcggttcatcggtacaacgatatatgtatagaaattgtantag

SEQ ID NO: 20610 - protein, 134 aa, Zea mays subsp. mays
  misc_feature (1)..(134): Ceres Seq. ID no. 12383526
MASLSSPSLLSSFLGDRLALSTRPLLLRSAVPGSRRLAYQATRTLCNLVDILFNRRNQDDAPENNPRRLRPGKVSPRLSVPNHIQRPPYVNSRQQRPGMNNGPEIHDENGIECMRASGKLAAQVLKFAGTLVKA

SEQ ID NO: 20611 - protein, 130 aa, Zea mays subsp. mays
  misc_feature (1)..(130): Ceres Seq. ID no. 12383527
ARDHYLEHPNRKIEKPHPHARNSSRVASARRPWRACRRRVSSLPSSATASHSPLGLSFSAPLSQAAGGWRIKQRERYATWWISYLTGEIRMMHQKTTLDACVLGKYLHALVFPIIYNGLHMSILVNNDLV

SEQ ID NO: 20612 - protein, 110 aa, Zea mays subsp. mays
  misc_feature (1)..(110): Ceres Seq. ID no. 12383528
MIIDNGAYPSPLGYCGYPKSVCTSVNECICHGIPDSRPLEDGDIINIDVTVYLNGYHGDTSATFLCGDVDDEAKKLVKVTRECLDKAISICSPGVEIKQIGRTIQYVISE

SEQ ID NO: 20613 - DNA, 1692 bp, Zea mays subsp. mays
  misc_feature (1)..(1692): Ceres Seq. ID no. 12383532
gcacgagaccattacctagaacatcctaatcgaaaagccgccgccgcaaacgtcgcccccgaccgaagcctagccaccaccaccagcaccagcaacctcgcgtagcagcgctcgacaccgctggacgccccgcgcccgcgcgaaagcaggaccttgattctgtcgttggcgataccatggatgtgtcctacgagaagtgtgctgatccgtcgaactcggacctgcctagcgctgttgttgatggctgagcgatacgacgatggcggctccgaacacctgggatctgctgtagtagagggagctattggaaacgaagggaattcggggaccgaaagttccgagcagactggtgatgagcgcgctggaggaggtgaaggctctcctgttgatgtcgaaaacagcgctgataaacaagagagccaggagacgacggttccgatggaagaaacagaaacgagcgacggcacctcgatcacgtcgatggaggatgccctggaaccgaaccgtcatcacgatctcccgtcggagcctgaggatgtgggcaaccacactcctgatcctgatcactccagcggcaagaactccaaaggaaacagtagcgtgttccagagcgcaaggagggtgctggcttcaaccaataagaaaactccatctgcaactgcacggaagccactgcagttgactaacagaggtaaccaggatgacgcgaaatcgtcggctggaaaggccgccacggttccatcaggcccggttttccgctgtactgaacgggccgagaagcgcagagaattttatatgaagctggaggagaagcatcaagctatggaggaagagaagattcagttggaggctaagttgaagaaagagcaggaggaggcactgaagcagctgaggaagagcctgaccttcaaagccaaccccatgccgagcttctaccacgaggcgacgccgtccccgaaggccgagttcaagaagctgcccacgacccggcccaagtcgcccaagctgggcaggaggaagacggcctcgacctccatggagacgtccaactcgtcgtcggagagcgagggcacgaggccgtgctgccgcgccagccgcgacggcctcgacagcagctgcagatgcggcggcaggagcaggccgcaggccgcgaacgccaagccggccgccgggcccaagaagccgccgccgcagcagcagcagccgaaacaccgcgcccacaagatcgccggcgagggcgccatcaacatcgccgtgcactagccgccgccgccgcttcttgaaacttctttccggtcgcatgcatgcaggacgatggcgatggcgtgcggattttccttctaagttatgagagtgctttgtcggcttgtggatttggtgtagataataatataagttatggtgacgacgaacgaacaggggctgctgccacgagtgaggccggtcagtcagacagaggtggtggtgtttattgcttgcttgcttgtttgtctgtttgtttgtttatttatgctaatcttatttatttaatctgctgtcgaggatggcctgcgcattgccactgtgcaggcgctgcttgttttttcgtcttcttaatttatggggagtggtaagagagacttgagcgctggatgtaacgtgtacaaacgaaaacgaaggcttgctggtggtggtgatggaggattttatctg

SEQ ID NO: 20614 - protein, 360 aa, Zea mays subsp. mays
  misc_feature (1)..(360): Ceres Seq. ID no. 12383533
MCPTRSVLIRRTRTCLALLLMAERYDDGGSEHLGSAVVEGAIGNEGNSGTESSEQTGDERAGGGEGSPVDVENSADKQESQETTVPMEETETSDGTSITSMEDALEPNRHHDLPSEPEDVGNHTPDPDHSSGKNSKGNSSVFQSARRVLASTNKKTPSATARKPLQLTNRGNQDDAKSSAGKAATVPSGPVFRCTERAEKRREFYMKLEEKHQAMEEEKIQLEAKLKKEQEEALKQLRKSLTFKANPMPSFYHEATPSPKAEFKKLPTTRPKSPKLGRRKTASTSMETSNSSSESEGTRPCCRASRDGLDSSCRCGGRSRPQAANAKPAAGPKKPPPQQQQPKHRAHKIAGEGAINIAVH

SEQ ID NO: 20615 - protein, 340 aa, Zea mays subsp. mays
  misc_feature (1)..(340): Ceres Seq. ID no. 12383534
MAERYDDGGSEHLGSAVVEGAIGNEGNSGTESSEQTGDERAGGGEGSPVDVENSADKQESQETTVPMEETETSDGTSITSMEDALEPNRHHDLPSEPEDVGNHTPDPDHSSGKNSKGNSSVFQSARRVLASTNKKTPSATARKPLQLTNRGNQDDAKSSAGKAATVPSGPVFRCTERAEKRREFYMKLEEKHQAMEEEKIQLEAKLKKEQEEALKQLRKSLTFKANPMPSFYHEATPSPKAEFKKLPTTRPKSPKLGRRKTASTSMETSNSSSESEGTRPCCRASRDGLDSSCRCGGRSRPQAANAKPAAGPKKPPPQQQQPKHRAHKIAGEGAINIAVH

SEQ ID NO: 20616 - protein, 274 aa, Zea mays subsp. mays
  misc_feature (1)..(274): Ceres Seq. ID no. 12383535
MEETETSDGTSITSMEDALEPNRHHDLPSEPEDVGNHTPDPDHSSGKNSKGNSSVFQSARRVLASTNKKTPSATARKPLQLTNRGNQDDAKSSAGKAATVPSGPVFRCTERAEKRREFYMKLEEKHQAMEEEKIQLEAKLKKEQEEALKQLRKSLTFKANPMPSFYHEATPSPKAEFKKLPTTRPKSPKLGRRKTASTSMETSNSSSESEGTRPCCRASRDGLDSSCRCGGRSRPQAANAKPAAGPKKPPPQQQQPKHRAHKIAGEGAINIAVH

SEQ ID NO: 20617 - DNA, 1400 bp, Zea mays subsp. mays
  misc_feature (1)..(1400): Ceres Seq. ID no. 12383804
gcacgagaccattacctagaacatcctaatcaaaagcggatgcgctcgggcgacgctcctctctctctttctctttctctcgctacatattcttcctctctctatctttgttctcctccgcccagctttcggacgcgacactcatcgcacattcccgtcaggccggtatccgcctcgggcttcgccgaaatcctacgctacctctctgatctctctccccccggccccgagcgcaccagattcacaccgcgcccgcataggtgcgtgtgcctgcggaagctggttgctgctcgcgctactagctgtttcgcgcggtgatcaacaatccggccgcgggagcggagctaggaggccgagagacacaatgaacatgttcgatgggatggagagtgctgggtacggcggcggcgctgggccgatgggcggggtggtgctgtcgcgggaccccaagccgcggctgcggtggacgcccgacctgcacgagcgcttcgtcgaggccgtcaccaagctcggcggggccgacaaggcgacgcccaagtcagtgctgcggctgatgggaatgaaagggctcaccttgtaccacttgaagagtcacctccagaaatacaggcttggaaagcagaccaagaaagacacgggtttggacgccggcagaggggcattcgcggcgcagggcatcaatttctccacaccagtacctcctcctagcattccatctacggccagtgataatacgggagaaacgccacttgcagatgcgctgaagtaccagattgaagtccaaaggaaactgcacgaacagctcgaggttcagaagaagctgcagatgcggatcgaggcgcaaggcaaatacttacagacgatactcgagaaggcccagagcaacctctcgtaccacgcgactggagccgcaaacctagaagcaaccaggtcgcagctgacggacttcaacctcgcgctctcaggcttcatggacaacgtgacccaggcgtgcgagcagaacaacggcgagctggtgaaagccatgtccgaggacggtctcagagcgaacaatctagactttcagccgtaccatggagttcatgacggggacgacgtcaagtgcgctacggacgaagggttgctacttctggacctaaacatcagaggcgggtacggtcatcggatttcgacagatctgaagatgaatcaacacatgcggtgaaaagttcagtagaaagaaaggcgaggacagtagtttaatcttgggtaacccatcaatctaagagaagaggtgcccttgtgtttgtgagaaattctttcggccatcttgattcctaacgatgcttctttacggtgatggtcagcgtattgcttatgtaaaatttggtgagaggctccgaataagggtaactaatctt

SEQ ID NO: 20618 - protein, 279 aa, Zea mays subsp. mays
  misc_feature (1)..(279): Ceres Seq. ID no. 12383805
MNMFDGMESAGYGGGAGPMGGVVLSRDPKPRLRWTPDLHERFVEAVTKLGGADKATPKSVLRLMGMKGLTLYHLKSHLQKYRLGKQTKKDTGLDAGRGAFAAQGINFSTPVPPPSIPSTASDNTGETPLADALKYQIEVQRKLHEQLEVQKKLQMRIEAQGKYLQTILEKAQSNLSYHATGAANLEATRSQLTDFNLALSGFMDNVTQACEQNNGELVKAMSEDGLRANNLDFQPYHGVHDGDDVKCATDEGLLLLDLNIRGGYGHRISTDLKMNQHMR

SEQ ID NO: 20619 - protein, 277 aa, Zea mays subsp. mays
  misc_feature (1)..(277): Ceres Seq. ID no. 12383806
MFDGMESAGYGGGAGPMGGVVLSRDPKPRLRWTPDLHERFVEAVTKLGGADKATPKSVLRLMGMKGLTLYHLKSHLQKYRLGKQTKKDTGLDAGRGAFAAQGINFSTPVPPPSIPSTASDNTGETPLADALKYQIEVQRKLHEQLEVQKKLQMRIEAQGKYLQTILEKAQSNLSYHATGAANLEATRSQLTDFNLALSGFMDNVTQACEQNNGELVKAMSEDGLRANNLDFQPYHGVHDGDDVKCATDEGLLLLDLNIRGGYGHRISTDLKMNQHMR

SEQ ID NO: 20620 - protein, 273 aa, Zea mays subsp. mays
  misc_feature (1)..(273): Ceres Seq. ID no. 12383807
MESAGYGGGAGPMGGVVLSRDPKPRLRWTPDLHERFVEAVTKLGGADKATPKSVLRLMGMKGLTLYHLKSHLQKYRLGKQTKKDTGLDAGRGAFAAQGINFSTPVPPPSIPSTASDNTGETPLADALKYQIEVQRKLHEQLEVQKKLQMRIEAQGKYLQTILEKAQSNLSYHATGAANLEATRSQLTDFNLALSGFMDNVTQACEQNNGELVKAMSEDGLRANNLDFQPYHGVHDGDDVKCATDEGLLLLDLNIRGGYGHRISTDLKMNQHMR

SEQ ID NO: 20621 - DNA, 1748 bp, Zea mays subsp. mays
  misc_feature (1)..(1748): Ceres Seq. ID no. 12384166
attgcgctgcactgctcccacacgctcggattcctgctcgctttctcctcccacgattccatcgccagccgccccttttcccttcctttttcccttgctcgcccgcccgcccgcccaggactcgtccttcgcgcttcttcgccagctcgtccttcgcgcttcttcgccagccgtcggcgagagagggtgagaggatcctacgtgccttgtacgctcgctcgggagccggccgggatcgcgccgcgccaccgtaccccgccccggacatgtgcgtggaggggctggacgacgcagcagggaggctcggcttcggagaccaggagaccgacaggcgcgccggtgatgcgatggagagagtttgtgagaacacagtggctgttgacttcaagcagactaagctgaacaactttgtgccattcatccggtcaggggaatggtctgatattggaggtcgcgattacatggaagatgcccatgtgtgcatctctgatctggcaaagaattttggctatgactcagtcgaagatgaagtaatttctttctatggggtgtttgatggccataatggcaaagatgctgctcattatgtccgtgataacttgccacgggtcatcgtggaagacgctgattttcctcttgagcttgaaaaggtagtaaagaggtcatttgtgcaaactgatagtaagtttgcagagaaattctctcaccacaggggactttcttctggaacgacagcacttacagcaatgatttttggaaggtcccttctggttgcgaatgccggtgactgcagagcggtgctctcgcggcgtggcactgccattgagatgtccaaggaccacaggccttgctgcatgaatgaaaggaagcgcgtagagtcacttggcggctacgttgacgacggttacctgaacggtcagctggcagtgaccagagcgctcggtgactggcatctggagggcatgaaagaggtgggcgagccaggagggcccctgagcgccgaaccagagctgaagatggtcacgctgacgaaggacgacgagttcctgataatcggcagcgacggcatctgggacttcttctcgagccagaacgccgtggacttcgcgcggcggaggctccaggaccacaacgacctgaggctgtgctgcagggagatcgtggacgaggcggtgcggcggggcgccagcgacaacttgacggcggtgatggtctcgttccactcggacgcccctcccccgagccgtgccaacaagaggaccggcagggtcacgcggagcatatcggctgaggggcttcacagcctcagagtgctcctggaaggccagtgacgtcgcccggcggcgccattgctgcccgttcgtccctgatgctgtgctacgttgctgatgaggtgttaactgtaagtagcggtttccggtatcttggtgcttgctcttcttcttccgctgagggcgggcgactattcttgtccttcctccgacaataaaccaacgagcctgagatctcactgtgagacgctgtaaataagcaaatatggaagttggagctcgtcattaaggacgagttagcggtgtgcatccagggggcttttgtggctcagtatgtgatgccttttcgcccctcctgattttctgtaaataaaacgatgctgggagccatcggtgtgattgaactagtgttctgttatgcgtgctccccatcgattcaagacctacagtttttatttactactagtacaagtcttt

SEQ ID NO: 20622 - protein, 442 aa, Zea mays subsp. mays
  misc_feature (1)..(442): Ceres Seq. ID no. 12384167
CAALLPHARIPARFLLPRFHRQPPLFPSFFPCSPARPPRTRPSRFFASSSFALLRQPSAREGERILRALYARSGAGRDRAAPPYPAPDMCVEGLDDAAGRLGFGDQETDRRAGDAMERVCENTVAVDFKQTKLNNFVPFIRSGEWSDIGGRDYMEDAHVCISDLAKNFGYDSVEDEVISFYGVFDGHNGKDAAHYVRDNLPRVIVEDADFPLELEKVVKRSFVQTDSKFAEKFSHHRGLSSGTTALTAMIFGRSLLVANAGDCRAVLSRRGTAIEMSKDHRPCCMNERKRVESLGGYVDDGYLNGQLAVTRALGDWHLEGMKEVGEPGGPLSAEPELKMVTLTKDDEFLIIGSDGIWDFFSSQNAVDFARRRLQDHNDLRLCCREIVDEAVRRGASDNLTAVMVSFHSDAPPPSRANKRTGRVTRSISAEGLHSLRVLLEGQ

SEQ ID NO: 20623 - protein, 354 aa, Zea mays subsp. mays
  misc_feature (1)..(354): Ceres Seq. ID no. 12384168
MCVEGLDDAAGRLGFGDQETDRRAGDAMERVCENTVAVDFKQTKLNNFVPFIRSGEWSDIGGRDYMEDAHVCISDLAKNFGYDSVEDEVISFYGVFDGHNGKDAAHYVRDNLPRVIVEDADFPLELEKVVKRSFVQTDSKFAEKFSHHRGLSSGTTALTAMIFGRSLLVANAGDCRAVLSRRGTAIEMSKDHRPCCMNERKRVESLGGYVDDGYLNGQLAVTRALGDWHLEGMKEVGEPGGPLSAEPELKMVTLTKDDEFLIIGSDGIWDFFSSQNAVDFARRRLQDHNDLRLCCREIVDEAVRRGASDNLTAVMVSFHSDAPPPSRANKRTGRVTRSISAEGLHSLRVLLEGQ

SEQ ID NO: 20624 - protein, 327 aa, Zea mays subsp. mays
  misc_feature (1)..(327): Ceres Seq. ID no. 12384169
MERVCENTVAVDFKQTKLNNFVPFIRSGEWSDIGGRDYMEDAHVCISDLAKNFGYDSVEDEVISFYGVFDGHNGKDAAHYVRDNLPRVIVEDADFPLELEKVVKRSFVQTDSKFAEKFSHHRGLSSGTTALTAMIFGRSLLVANAGDCRAVLSRRGTAIEMSKDHRPCCMNERKRVESLGGYVDDGYLNGQLAVTRALGDWHLEGMKEVGEPGGPLSAEPELKMVTLTKDDEFLIIGSDGIWDFFSSQNAVDFARRRLQDHNDLRLCCREIVDEAVRRGASDNLTAVMVSFHSDAPPPSRANKRTGRVTRSISAEGLHSLRVLLEGQ

SEQ ID NO: 20625 - DNA, 1841 bp, Zea mays subsp. mays
  misc_feature (1)..(1841): Ceres Seq. ID no. 12384170
aagttgcaacggccagaaagccacgttagcctagccgagctcctctgctcctctcgtggccgaacaggcagagcgaccagtctccagagcgctccccatggcgtcaggagctgcggcccctgtcgttcagaccctggtgctgaaggtggccatccactgccatggctgcaagaagaaggtccggaaggtgctcaggagcgtcgaaggcgtgcagaacgtgacggtggacgcctcgcagaacaaggtgactgtggtcggcaccgtggacgccgacacgctcatccagaggttgtacaagtccggcaagaagggagagccctggcagtgccacccgcccatcaagaagagcgagcccgcgccggaggccccgccgactccgcagcctgccggtggcggcggcaaggacgccgctactgctgcggccgcggtggacaagaagccggaggagccggtgaagaagccgcagggcgacagctccgaggagaagaagaagaagccggaggaggcggcgaaggagccgcagagcgagaagaagaagccggaggaggcggcgaaggagccatagcgagaagaagaagccggaggaggtggtgaaggcgccgcagaacgagaaggaggagccgcagagcgagaagaagaagaagccggaggaggcggccgagagctccaaggagaaggagaagaaaccagaggaggcagtgaaggagccaaaggccgagagctccaaggacgagaagaagaagaagccggaggaggccgtgaaggagccgcagggtgagagctccgaggagaagaagaagaagccggagcaggagggcggggccgcagagaagaagcccgaagcagagtcaaagaagaaggacggcggtgacagcaagggagctgagacgaaggccaagggctcagcagagccggcaaaggaagctgccgccgtccccgcccccgcccccgcccccgctgtcaatgacaaggccgaggcaaagaagagcgagaagcccaaggacgccggtaaggcggcggagccagccgccgtgacgacggagaggtcgctgcctgcgccgccggcgccggcgccaatgcccgcgtacgagcaggagttccgccacccctactacgccccgcagccggtggtgagctaccacgcgtcgcagccgagctcgagcgtgtcgtacacgtacttcgcgccgcagacgcagccggcgtactccattcaacagccacagccgcacccacaggcggcggtctcctactccgtgcagccgacaccgccggcgtactactccgcgcaggagctgcagccgcagcagccggcgaagcagtggtcgccgtcgtacctgtacatgccgtacccgcacgcgcaggcggcgccggagccttactaccagcagcaggactactacagcccgcccgggacgcacgcgtcgccgatgcacgacccataccgcatcttcgacgacgagaaccccaactcctgcagcgtcatgtgagaggcgcgagctggtcggcgcggcccggacgccgccggccgccgtgggcagcgagtagtttgggggggagacggcgccgcgcgctaccgcaacatcagagagagagacgtctctgtggctgtataggtagagtagcctgttactgtttaccacccctctaccctcttccttccatcctatttccacctagtatagaggtcaaacctcttctccgtgtagtgacggaaccttttcttaatttccatctttttactgttctgaatcaagtgattagaaagaacatgtaaattgtaacgagatacgttcatgttcaccgcgtctgtatatgccggctactagaactttgaatgagcg

SEQ ID NO: 20626 - protein, 197 aa, Zea mays subsp. mays
  misc_feature (1)..(197): Ceres Seq. ID no. 12384171
KLQRPESHVSLAELLCSSRGRTGRATSLQSAPHGVRSCGPCRSDPGAEGGHPLPWLQEEGPEGAQERRRRAERDGGRLAEQGDCGRHRGRRHAHPEVVQVRQEGRALAVPPAHQEERARAGGPADSAACRWRRQGRRYCCGRGGQEAGGAGEEAAGRQLRGEEEEAGGGGEGAAEREEEAGGGGEGAIARRRSRRRW

SEQ ID NO: 20627 - protein, 155 aa, Zea mays subsp. mays
  misc_feature (1)..(155): Ceres Seq. ID no. 12384172
MASGAAAPVVQTLVLKVAIHCHGCKKKVRKVLRSVEGVQNVTVDASQNKVTVVGTVDADTLIQRLYKSGKKGEPWQCHPPIKKSEPAPEAPPTPQPAGGGGKDAATAAAAVDKKPEEPVKKPQGDSSEEKKKKPEEAAKEPQSEKKKPEEAAKEP

SEQ ID NO: 20628 - protein, 136 aa, Zea mays subsp. mays
  misc_feature (1)..(136): Ceres Seq. ID no. 12384173
MPAYEQEFRHPYYAPQPVVSYHASQPSSSVSYTYFAPQTQPAYSIQQPQPHPQAAVSYSVQPTPPAYYSAQELQPQQPAKQWSPSYLYMPYPHAQAAPEPYYQQQDYYSPPGTHASPMHDPYRIFDDENPNSCSVM

SEQ ID NO: 20629 - DNA, 1622 bp, Zea mays subsp. mays
  misc_feature (1)..(1622): Ceres Seq. ID no. 12384174
attcccatcagagaagagataaccacacgtccacacaccacagaccacacgcacggtacagcctctccgcagctgcaggtgcctgctgttctccgacgagaccccaagaactcgccaacctatcccaattcccagccacccttccctctttcacaatgctggcctccgccgccaccgtcaagccctccaccgccgcggccgcggccacctgcaaggcggccttcaagccgctccacctccctcccctccccgccgccgccggcctcaggccgctctccctctccgtctccgcgcgcccgctgtaccgtcaggagcatgtcctggcatccgtggcggtggcggcggctgggcgcaacgaacgcgccacgtcccccgcgccgccgtccgccaccgctgacggcgcccggccgctggaggtcgccgcgccggcggagacgggtcggcgcgccaagatcggggtctacttccacgtggtgggcgctgaacgttatcttcaacatctacaacaagaaggtcctcaacgcgttcccgtacccgtggctcacgtcgacgctctccctcgccgccggctccgccatcatgctcgcgtcctgggccaccaggatcgccgaggcgccccagacggacctcgatttctggaaggcgctgactcccgttgcgatcgcgcacacgatcgggcacgtggcggcgacggtgagcatggccaaggtggccgtgtcgttcacgcacatcatcaagagcggggagccggcattcagcgtgctcgtctccaggttcttcctcggcgagcacttcccggcgccggtctacttctccctcctccccatcatcggcggatgcgcgctcgccgccgtcaccgagctcaacttcaacatggttggattcatgggggcaatgatctccaacctggcattcgtcgtccggaccatcttctccaagaaggggatgaagggcaagtccgtgagcgggatgaactactacgcctgcctctccatcatgtcgctggtgatcctcctgcccttcgccgtcgccatggaggggcccaaggtgtgggcagcgggctggcagacagcagtcgccgagatcggtcccaacttcgtctggtgggtggcggcgcagagcgtgttctaccacctgtacaaccaggtgtcctacatgtccctggacgagatctcgcccctcaccttctccatcggcaacaccatgaagcgcatctccgtcatcgtcgcgtccatcatcatcttccagacgcccgtccagcccatcaacgcgctcggggccgccatcgccatcctcggaaccttcatctactcccaggccaagcagtagccgcccttggcgcgcgcgtctggctctcaggcctcagttcagttcaccgccgaatcagctcggcgctcgaagatataacagattatataacttttgaggatatctacctagcttgtataatagtattattactagatcctctcttctttttttcgtattttcttttttcctaggactagcttattactagatcatttcgtcgtcgtgttttcactatgactatgatggcgtagagagagagagagagatggatccatctaaataaaaaaaaaggtaccggatcttgttttgtt

SEQ ID NO: 20630 - protein, 499 aa, Zea mays subsp. mays
  misc_feature (1)..(499): Ceres Seq. ID no. 12384175
SHQRRDNHTSTHHRPHARYSLSAAAGACCSPTRPQELANLSQFPATLPSFTMLASAATVKPSTAAAAATCKAAFKPLHLPPLPAAAGLRPLSLSVSARPLYRQEHVLASVAVAAAGRNERATSPAPPSATADGARPLEVAAPAETGRRAKIGVYFHVVGAERYLQHLQQEGPQRVPVPVAHVDALPRRRLRHHARVLGHQDRRGAPDGPRFLEGADSRCDRAHDRARGGDGEHGQGGRVVHAHHQERGAGIQRARLQVLPRRALPGAGLLLPPPHHRRMRARRRHRAQLQHGWIHGGNDLQPGIRRPDHLLQEGDEGQVRERDELLRLPLHHVAGDPPALRRRHGGAQGVGSGLADSSRRDRSQLRLVGGGAERVLPPVQPGVLHVPGRDLAPHLLHRQHHEAHLRHRRVHHHLPDARPAHQRARGRHRHPRNLHLLPGQAVAALGARVWLSGLSSVHRRISSALEDITDYITFEDIYLACIIVLLLDPLFFFSYFLFS

SEQ ID NO: 20631 - protein, 448 aa, Zea mays subsp. mays
  misc_feature (1)..(448): Ceres Seq. ID no. 12384176
MLASAATVKPSTAAAAATCKAAFKPLHLPPLPAAAGLRPLSLSVSARPLYRQEHVLASVAVAAAGRNERATSPAPPSATADGARPLEVAAPAETGRRAKIGVYFHVVGAERYLQHLQQEGPQRVPVPVAHVDALPRRRLRHHARVLGHQDRRGAPDGPRFLEGADSRCDRAHDRARGGDGEHGQGGRVVHAHHQERGAGIQRARLQVLPRRALPGAGLLLPPPHHRRMRARRRHRAQLQHGWIHGGNDLQPGIRRPDHLLQEGDEGQVRERDELLRLPLHHVAGDPPALRRRHGGAQGVGSGLADSSRRDRSQLRLVGGGAERVLPPVQPGVLHVPGRDLAPHLLHRQHHEAHLRHRRVHHHLPDARPAHQRARGRHRHPRNLHLLPGQAVAALGARVWLSGLSSVHRRISSALEDITDYITFEDIYLACIIVLLLDPLFFFSYFLFS

SEQ ID NO: 20632 - protein, 442 aa, Zea mays subsp. mays
  misc_feature (1)..(442): Ceres Seq. ID no. 12384177
IPIREEITTRPHTTDHTHGTASPQLQVPAVLRRDPKNSPTYPNSQPPFPLSQCWPPPPPSSPPPPRPRPPARRPSSRSTSLPSPPPPASGRSPSPSPRARCTVRSMSWHPWRWRRLGATNAPRPPRRRPPPLTAPGRWRSPRRRRRVGAPRSGSTSTWWALNVIFNIYNKKVLNAFPYPWLTSTLSLAAGSAIMLASWATRIAEAPQTDLDFWKALTPVAIAHTIGHVAATVSMAKVAVSFTHIIKSGEPAFSVLVSRFFLGEHFPAPVYFSLLPIIGGCALAAVTELNFNMVGFMGAMISNLAFVVRTIFSKKGMKGKSVSGMNYYACLSIMSLVILLPFAVAMEGPKVWAAGWQTAVAEIGPNFVWWVAAQSVFYHLYNQVSYMSLDEISPLTFSIGNTMKRISVIVASIIIFQTPVQPINALGAAIAILGTFIYSQAKQ

SEQ ID NO: 20633 - DNA, 1673 bp, Zea mays subsp. mays
  misc_feature (1)..(1673): Ceres Seq. ID no. 12384182
ctcgacgcctcataggctcatagggttctccaaattctaaatcgttgcaagcgaaaccaccaaaactgtactcacaaccctcgtctgcgctgcgccaccactcccccgtggcggcttgtagttgtagaagttcccggaaccagacaacccctaggcgctgagttttctgatagcggcttcggatatctcgtcgtgggcggccatggcgggcccgtgctgagtgcggggcgggacaggtgaaggtctccgagctcgagatctcgatgcagattcgggagggcccggcgcggcggcaggcgccgtccgccgctggggcgctgcggtcgcccatgtccgccatgatgctcgctatgttcgctactatggcctccttctacgtcgccggtcgattgtggcaggatgctcagaaccgacttcatctcattaaggagctcgacagacgaacaggccaggggcaatcagcaatatctgtggatgataccttgaaggttgttgcatgcaggcagcaagggaagcggttggcatcacttgagatggagctggctgcagcaaagcataaaggttttgttggcaaatatactcctgagacaaatggaactcattctgggaaaaagccactgattgttattggaataatgagtagctttgggaggaaaaactaccgtgatgctgtcaggaaatcatggcttccaacaggttcaatgctgaagaaactagaagaagaaaaaggcattgtagtacgttttgttgttggaagaagtgcaaatcgaggtgatactttcgatagggagattgatgacgaaaataggagcaccaaggatttcttgatattggatgatcatatagaatctgatgaagagcttcctaagaagacaaaaagtttctttgctaatgcagcagaaacattcaatgctgcattttatgctaaggtcaatgatgatatatacataaatgtcgatactttgagtgcaatgctcgaaactcactgggacaggcctcgtgtctatataggttgcatgaaatcgggcgaggttttctctgacttaacccacaagtggtacgaatcagactggtggaaatttggtgatgggaaatcgtactttcgacacgcttctggtgaaatgtttgtcatatccagggccatagctcagttcatttctataaacaagtccgctctccggacatatgcccatgatgatgttagtattggatcgtggatgattggccttgccgtgaatcatgtaaatgaagcaaaactgtgctgttcatcgtggccctcaggtgcgttatgttcagcgctataacgagcaacaatgcttaatgaggaagagttttgcaaacactgtgcctgttggatcgaatcggtattgggaaaattttgttttcttctgccatcttgtgtagtcctttggaggaggcttgtacgagccagttcatactgattactggatcggatatcttgtttttcttttccaaaggaaaggtcttgcatattttctttgcaaggccactacactagaatcatgagttctgacgaaaagccctctgcagattgtatcctgttccgcgtgccatttgtagatgccccaccctttaccattcttttttctgacagacactgccattgttggagtgacagaaatcaatagcaattcgggagattactttgctcc

SEQ ID NO: 20634 - protein, 346 aa, Zea mays subsp. mays
  misc_feature (1)..(346): Ceres Seq. ID no. 12384183
MQIREGPARRQAPSAAGALRSPMSAMMLAMFATMASFYVAGRLWQDAQNRLHLIKELDRRTGQGQSAISVDDTLKVVACRQQGKRLASLEMELAAAKHKGFVGKYTPETNGTHSGKKPLIVIGIMSSFGRKNYRDAVRKSWLPTGSMLKKLEEEKGIVVRFVVGRSANRGDTFDREIDDENRSTKDFLILDDHIESDEELPKKTKSFFANAAETFNAAFYAKVNDDIYINVDTLSAMLETHWDRPRVYIGCMKSGEVFSDLTHKWYESDWWKFGDGKSYFRHASGEMFVISRAIAQFISINKSALRTYAHDDVSIGSWMIGLAVNHVNEAKLCCSSWPSGALCSAL

SEQ ID NO: 20635 - protein, 324 aa, Zea mays subsp. mays
  misc_feature (1)..(324): Ceres Seq. ID no. 12384184
MSAMMLAMFATMASFYVAGRLWQDAQNRLHLIKELDRRTGQGQSAISVDDTLKVVACRQQGKRLASLEMELAAAKHKGFVGKYTPETNGTHSGKKPLIVIGIMSSFGRKNYRDAVRKSWLPTGSMLKKLEEEKGIVVRFVVGRSANRGDTFDREIDDENRSTKDFLILDDHIESDEELPKKTKSFFANAAETFNAAFYAKVNDDIYINVDTLSAMLETHWDRPRVYIGCMKSGEVFSDLTHKWYESDWWKFGDGKSYFRHASGEMFVISRAIAQFISINKSALRTYAHDDVSIGSWMIGLAVNHVNEAKLCCSSWPSGALCSAL

SEQ ID NO: 20636 - protein, 321 aa, Zea mays subsp. mays
  misc_feature (1)..(321): Ceres Seq. ID no. 12384185
MMLAMFATMASFYVAGRLWQDAQNRLHLIKELDRRTGQGQSAISVDDTLKVVACRQQGKRLASLEMELAAAKHKGFVGKYTPETNGTHSGKKPLIVIGIMSSFGRKNYRDAVRKSWLPTGSMLKKLEEEKGIVVRFVVGRSANRGDTFDREIDDENRSTKDFLILDDHIESDEELPKKTKSFFANAAETFNAAFYAKVNDDIYINVDTLSAMLETHWDRPRVYIGCMKSGEVFSDLTHKWYESDWWKFGDGKSYFRHASGEMFVISRAIAQFISINKSALRTYAHDDVSIGSWMIGLAVNHVNEAKLCCSSWPSGALCSAL

SEQ ID NO: 20637 - DNA, 1133 bp, Zea mays subsp. mays
  misc_feature (1)..(1133): Ceres Seq. ID no. 12384197
atctagtataatccgtccgcaaccgttctctgccttctccatcctaaaccctcctagtcctctccatccccatcccctccaatggcggcgactgccacgtccttcgccactctcgccgtcgcgcgctcggcagggcagcggttcctccttgcctccaaggccgccccctcgccgctcctctccctccgcggcgcccgcctcccctcgcagggcgtctccttatctgggggcctcgcggcgtcgccctctcatagccgcgcgcgcttcgccacatcagccagcgccgaacccaaggaagcagaacttcagtctaaaatcacaaacaaggtgtactttgacataagcattgggaaccctgtgggcaagaatgttgggaggatcgtcatcggcttgtacggggatgatgttccacagacaacagagaacttccgtgctctttgcactggagagaaagggtttggatacaagggatccagtttccatcgtgtcatcagcgactttatgattcagggtggagattttgacaagggcaatggtaccggtgggaagagcatatatggacgcaccttcaaagatgagaacttcaaattggttcacactggacctggagtggtcagcatggctaatgctgggccgaacaccaatggcagccagttctttatttgcactgtcaagacaccttggttggacggaaggcatgtcgtgtttggccaggtcctggaagggatggatgtcgtaagtctgatcgagtcgcaggagaccgacagaggtgaccgcccgaagaagaaagtagtcatcagcgagtgtggggagcttccagtggtctaagtgttactcatctgttgtcggtcttacctaacctcggatggatggcgatatttcccccacctgaacttgtcgtgctaccctcccccccccccccccacccnnancctgntagttatagagaatatttcgaattgaagtaaggtcccaaatctgagggcatactgttgcttctctgctggaataaatgtgctcctttcccctgccttgttaagggaaagggttttgttcacgatgttaccttgtaaccttgtacttatgtttcatacttggaatgaaggttcatggaacaaaaatattctgctgcg

SEQ ID NO: 20638 - protein, 248 aa, Zea mays subsp. mays
  misc_feature (1)..(248): Ceres Seq. ID no. 12384198
MAATATSFATLAVARSAGQRFLLASKAAPSPLLSLRGARLPSQGVSLSGGLAASPSHSRARFATSASAEPKEAELQSKITNKVYFDISIGNPVGKNVGRIVIGLYGDDVPQTTENFRALCTGEKGFGYKGSSFHRVISDFMIQGGDFDKGNGTGGKSIYGRTFKDENFKLVHTGPGVVSMANAGPNTNGSQFFICTVKTPWLDGRHVVFGQVLEGMDVVSLIESQETDRGDRPKKKVVISECGELPVV

SEQ ID NO: 20639 - DNA, 1621 bp, Zea mays subsp. mays
  misc_feature (1)..(1621): Ceres Seq. ID no. 12384203
gcacgagaccattacctagaacatcctaatcgaaaagcatacttgcagctcgcacatctcatggtgtcgcaggaacgacaagagccagctgtgcctagcagcagcagcagcagcgccaagcgcgcagccacgtccatggacgccagcccggccccgccgctcctcctccgcgcccccactcccagccccagcattgacctccccgctggcaaggacaaggccgacgcggcggccagcaaggccggcgcggccgtgttcgacctgcgccgggagcccaagatccccgcgccattcctgtggccgcaggaagaggcgcggccgtcctcggccgcggagctggaggtgccgatggtggacgtgggcgtgctgcgcaatggcgaccgcgcggggctgcggcgcgccgcggcgcaggtggccgcggcgtgcgcgacgcacgggttcttccaggtgtgcgggcacggcgtggacgcggcgctggggcgcgccgcgctggacggcgccagcgacttcttccggctgccgctcgccgagaancagcgcgcccggcgcgtccccggcaccgtgtccgggtacaagagcgcgcacgccgaccggttcgcggccaagctcccctggaaggagaccctgncgttcggctaccacgacggcgccgcnncnnctgtcgtcgtggactacttngtcggcaccctcggccaggatttcgagccaatggggtgggtgtaccagaggtactgcgagnagatgaaggagctgtcgctgacgatcatggagctgctggagctgagcctgggcgtggagctgcgcggctactaccgggagttcttcgaggacagccggtccatcatgcggtgcaactactacccgccgtgcccggagccggagcgcacgctgggcacgggcccgcactgcgaccccacggcgctgaccatcctcctgcaggacgacgtgggcgggctggaggtgctggtggacggtgagtggcgccccgtccggcccgtcccgggcgccatggtcatcaacatcggcgacaccttcatggcgctgtcgaacgggaggtacaagagctgcctgcaccgcgcggtggtgaaccagcggcgggcgcggcggtcgctggccttcttcctgtgcccgcgcgaggaccgggtggtgcgcccgccggccagtgctgcgccgcggcgctacccggacttcacctgggccgacctcatgcgcttcacgcagcgccactaccgcgccgacacccgcacgctggacgccttcacccgctggctctcccacggcccggcccaggcggcggcgcctccctgcacctagcgagccgggccaaggccgtctctttcgccccacgtgcgcgcccagctgggcaggtgggcagacacgcggcccgcgggccccgcgccgccttgccattttttgacgctggccctactgctgtgctactagtgtacatatgcaagagtacatatatatatatatatacgtattttctatatattatatataaaagcaaggcggcccggtgcccttctcttgttttgtccacaactgtttgatcccattattctatggaccatggatacttcaatgtttgtactaagaccgtgaacgtgggattcttttc

SEQ ID NO: 20640 - protein, 437 aa, Zea mays subsp. mays
  misc_feature (1)..(437): Ceres Seq. ID no. 12384204
  misc_feature (178)..(178): Xaa is any aa, unknown or other
  misc_feature (210)..(210): Xaa is any aa, unknown or other
  misc_feature (218)..(218): Xaa is any aa, unknown or other
  misc_feature (219)..(219): Xaa is any aa, unknown or other
  misc_feature (220)..(220): Xaa is any aa, unknown or other
  misc_feature (226)..(226): Xaa is any aa, unknown or other
  misc_feature (247)..(247): Xaa is any aa, unknown or other
ARDHYLEHPNRKAYLQLAHLMVSQERQEPAVPSSSSSSAKRAATSMDASPAPPLLLRAPTPSPSIDLPAGKDKADAAASKAGAAVFDLRREPKIPAPFLWPQEEARPSSAAELEVPMVDVGVLRNGDRAGLRRAAAQVAAACATHGFFQVCGHGVDAALGRAALDGASDFFRLPLAEXQRARRVPGTVSGYKSAHADRFAAKLPWKETLXFGYHDGAXXXVVVDYXVGTLGQDFEPMGWVYQRYCEXMKELSLTIMELLELSLGVELRGYYREFFEDSRSIMRCNYYPPCPEPERTLGTGPHCDPTALTILLQDDVGGLEVLVDGEWRPVRPVPGAMVINIGDTFMALSNGRYKSCLHRAVVNQRRARRSLAFFLCPREDRVVRPPASAAPRRYPDFTWADLMRFTQRHYRADTRTLDAFTRWLSHGPAQAAAPPCT

SEQ ID NO: 20641 - protein, 417 aa, Zea mays subsp. mays
  misc_feature (1)..(417): Ceres Seq. ID no. 12384205
  misc_feature (158)..(158): Xaa is any aa, unknown or other
  misc_feature (190)..(190): Xaa is any aa, unknown or other
  misc_feature (198)..(198): Xaa is any aa, unknown or other
  misc_feature (199)..(199): Xaa is any aa, unknown or other
  misc_feature (200)..(200): Xaa is any aa, unknown or other
  misc_feature (206)..(206): Xaa is any aa, unknown or other
  misc_feature (227)..(227): Xaa is any aa, unknown or other
MVSQERQEPAVPSSSSSSAKRAATSMDASPAPPLLLRAPTPSPSIDLPAGKDKADAAASKAGAAVFDLRREPKIPAPFLWPQEEARPSSAAELEVPMVDVGVLRNGDRAGLRRAAAQVAAACATHGFFQVCGHGVDAALGRAALDGASDFFRLPLAEXQRARRVPGTVSGYKSAHADRFAAKLPWKETLXFGYHDGAXXXVVVDYXVGTLGQDFEPMGWVYQRYCEXMKELSLTIMELLELSLGVELRGYYREFFEDSRSIMRCNYYPPCPEPERTLGTGPHCDPTALTILLQDDVGGLEVLVDGEWRPVRPVPGAMVINIGDTFMALSNGRYKSCLHRAVVNQRRARRSLAFFLCPREDRVVRPPASAAPRRYPDFTWADLMRFTQRHYRADTRTLDAFTRWLSHGPAQAAAPPCT

SEQ ID NO: 20642 - protein, 392 aa, Zea mays subsp. mays
  misc_feature (1)..(392): Ceres Seq. ID no. 12384206
  misc_feature (133)..(133): Xaa is any aa, unknown or other
  misc_feature (165)..(165): Xaa is any aa, unknown or other
  misc_feature (173)..(173): Xaa is any aa, unknown or other
  misc_feature (174)..(174): Xaa is any aa, unknown or other
  misc_feature (175)..(175): Xaa is any aa, unknown or other
  misc_feature (181)..(181): Xaa is any aa, unknown or other
  misc_feature (202)..(202): Xaa is any aa, unknown or other
MDASPAPPLLLRAPTPSPSIDLPAGKDKADAAASKAGAAVFDLRREPKIPAPFLWPQEEARPSSAAELEVPMVDVGVLRNGDRAGLRRAAAQVAAACATHGFFQVCGHGVDAALGRAALDGASDFFRLPLAEXQRARRVPGTVSGYKSAHADRFAAKLPWKETLXFGYHDGAXXXVVVDYXVGTLGQDFEPMGWVYQRYCEXMKELSLTIMELLELSLGVELRGYYREFFEDSRSIMRCNYYPPCPEPERTLGTGPHCDPTALTILLQDDVGGLEVLVDGEWRPVRPVPGAMVINIGDTFMALSNGRYKSCLHRAVVNQRRARRSLAFFLCPREDRVVRPPASAAPRRYPDFTWADLMRFTQRHYRADTRTLDAFTRWLSHGPAQAAAPPCT

SEQ ID NO: 20643 - DNA, 1011 bp, Zea mays subsp. mays
  misc_feature (1)..(1011): Ceres Seq. ID no. 12384230
gagtagcaatcactgctgcgcccgataggtggcagcgagccagcgacccacccgactctgttccaacgagccttccctcccaaacttgcacgctgcccccgctctcgcctccgcccccgatccagatccagggtggaatagggaacggccatacaccatggcggatttctccaaggaatcttgcccttctgtgaagaacattttacttctggattctgaaggaaagcgtgttgctgtaaagtatttctcagatgattggccgactaatgcatcaaagttagcctacgaaaagtctgtttttactaaaactctaaagacaaatgcacggacagaagctgagataacattgtttgatggttatattgtcgtttacaagtttgtacatgaccttcacttttttgtcaccgctggagatgatgagaatgagctcatcttagcaagtgtactacatggtttttctgattctgttggtcttctactcaggggtgatgttgagaagcggactgcgcttgagaacttggatttgatacttctctgcatcgatgaaattgtagatgggggaatcatcctggaaacagatgcaaacaccattgctggtaaggttgcaaccaatgctgttgatggttctgtgcccttttctgagcagacgatatctcaggcactagccacagctagggagcaccttgcaagatctctactgaaatgaacaaccagcaatatgtatgacgtattatatgacatatatgtgtgtaggttgggctactgaatgttgagggtctttgtagacgttattcgtcccaaagtgctgctgtgacagagcctagttgaatatccgagggattggtcacatgctcgttaaattttttttttgaaccagtgagtttgtagctgccatatttcaggtaaaacataaaataaagagttgtaattgggtgtaatataattttcaccatacaaaaaaaaattcatctcaactatcaaaccatggtaaaaggttcaaaattatctatc

SEQ ID NO: 20644 - protein, 182 aa, Zea mays subsp. mays
  misc_feature (1)..(182): Ceres Seq. ID no. 12384231
MADFSKESCPSVKNILLLDSEGKRVAVKYFSDDWPTNASKLAYEKSVFTKTLKTNARTEAEITLFDGYIVVYKFVHDLHFFVTAGDDENELILASVLHGFSDSVGLLLRGDVEKRTALENLDLILLCIDEIVDGGIILETDANTIAGKVATNAVDGSVPFSEQTISQALATAREHLARSLLK

SEQ ID NO: 20645 - DNA, 717 bp, Zea mays subsp. mays
  misc_feature (1)..(717): Ceres Seq. ID no. 12384292
gcacgagaccattacctagaacatcctaatcaaaaacagaagtgtgctcgaaggtcgggctctgcacgttcgatgggacacgcggagtaagtgctgctggcatcgagagtgtaccgggatccgtagacggcatggcggaagctctatgcaacgcgtgcgagatagtagtgttctggacgcaaagcgagctgagcccgaacaggagcaacgagggcacgctggagtacgtggacaggctctgcgaaagcatgcccgatccggtggggtcgcgcgtggactgcggacgcgtgggttccctgcagaccgttgcgttcagcatcggtggaagggcgttcgagctccggcctgaccagtacgtcctcaaggtcggcgaggggttcgccgcgcactgcatcagcgggttcacggctctggacgtgccccctccggtaggccctctgtggatactgggtgacgtcttcatggagcctaccataccatctttgactacggcaagatgaggatcgggttcgcagattccgcgtgagacacgggcgttcttccactaatgaccgcgaccactatagctgcagtatgttcctcagagaagccctgcgtggtgtagtgctggattttcactactacgccctgcagagcttttctcgagcttctgtagagcacatacactacgcgcaggacaaatgtgtatcgctgcatcgagaaagaaataaaggaaac

SEQ ID NO: 20646 - protein, 122 aa, Zea mays subsp. mays
  misc_feature (1)..(122): Ceres Seq. ID no. 12384293
MAEALCNACEIVVFWTQSELSPNRSNEGTLEYVDRLCESMPDPVGSRVDCGRVGSLQTVAFSIGGRAFELRPDQYVLKVGEGFAAHCISGFTALDVPPPVGPLWILGDVFMEPTIPSLTTAR

SEQ ID NO: 20647 - protein, 83 aa, Zea mays subsp. mays
  misc_feature (1)..(83): Ceres Seq. ID no. 12384294
MPDPVGSRVDCGRVGSLQTVAFSIGGRAFELRPDQYVLKVGEGFAAHCISGFTALDVPPPVGPLWILGDVFMEPTIPSLTTAR

SEQ ID NO: 20648 - protein, 67 aa, Zea mays subsp. mays
  misc_feature (1)..(67): Ceres Seq. ID no. 12384295
MQRVRDSSVLDAKRAEPEQEQRGHAGVRGQALRKHARSGGVARGLRTRGFPADRCVQHRWKGVRAPA

SEQ ID NO: 20649 - DNA, 1841 bp, Zea mays subsp. mays
  misc_feature (1)..(1841): Ceres Seq. ID no. 12384305
ctctcgcgctaccgctctcttgaaggaagtctccgtccccgcttctgattcactcccccacatcgccatatgtcgccggaggccggaccaatcatgcggcccgccgaccagctactcctcccgttcctcctcctggccgttgcctccgtcgctgccgccggcggctcgtgggagaatggatatgggagcatcctccgcctcccctcctcgtctccgcgccggttcccccgctccgcggccgtcgacctgatccacgcgctcaacctccaccccgccgacgcgtcccctcccctctccaccgccggcgtagagggcgccctcgcccccgcggggaccctcgtcgagaggcccatccgcatcgcgtccttcgcgaacggaggcgccgccacgtcggtggaggacctcggccaccacgcggggtattaccgcctcgccaacacccacgacgccaggatgttctacttcttcttcgagtcgaggggccacaaggacgaccccgtggtgatctggctcacgggcgggcccggctgcagcagcgagctcgcgctcttctacgagaacggccccttcaacatagcggacaacttgtcgctcgtctggaatgattttggttgggacaaggcatcaaatcttatctatgtcgaccagcccactggaactgggtttagttacagctcggattcgcgtgacactcgccacaacgaagctactattagcaatgatctatatgatttcctgcaggccttttttgctgagcacccaaagtatgctaaaaatgatttcttcataactggggaatcatatgctgggcattacattcctgcctttgcaagtcgtgtgcaccagggaaacaagaacaatgagggcattcacattaacttgaagggttttgctattggcaacggactaacagatccagcaatacagtacaaggcataccctgattacgcattggatatgggattaattacaaaaacacaatttaacaggatcaataaaatagttccaacttgtgaattcgcggtcaagctttgtggtacttctggaactgtatcttgccttgctgcgtactttgtctgcaatacaatattcagtgccatcaggacaatcataggcaataaaaattattacgacatcaggaaaccatgcatcggaagcctatgctatgatttctctaatttggagaaatttctcaacctcaaatctgtcagagagagcctaggggttggagatatagagtttgtttcatgcagcccaactgtctatgaggccatgctattagattggatgaggaaccttgaagttggaatccctgaactccttgagagcgacatcaaagtgttgatttatgctggagagtatgacctcatatgtaactggcttgggaactcaaggtgggtaaactctatggaatggtctggaaaggaagcttttgtgtcctcatccgagaagcccttcacagtcgacgggaaagaagctggcgttctaaagagccacggtcctttgagtttcttgaaggttcacgatgctggtcacatggtacctatggatcaaccgaaggctgctctggagatgctgaagaggtggacttctggaaacctttcggagccatcttcaagctcccagaggcttgattttacaatgtaacaaaacacacatgctgctcatgacatttcgagcatgtacctctggatgtttgtaggctcagaaaaggtcctggtcttaggctctgaaaacctcatctggcgaccatacgttatttaccttgtatgggcgctccgcttgctggtgagacacggtgttacgagttacgactcgatgaacatgtaataaagcttttc

SEQ ID NO: 20650 - protein, 525 aa, Zea mays subsp. mays
  misc_feature (1)..(525): Ceres Seq. ID no. 12384306
MSPEAGPIMRPADQLLLPFLLLAVASVAAAGGSWENGYGSILRLPSSSPRRFPRSAAVDLIHALNLHPADASPPLSTAGVEGALAPAGTLVERPIRIASFANGGAATSVEDLGHHAGYYRLANTHDARMFYFFFESRGHKDDPVVIWLTGGPGCSSELALFYENGPFNIADNLSLVWNDFGWDKASNLIYVDQPTGTGFSYSSDSRDTRHNEATISNDLYDFLQAFFAEHPKYAKNDFFITGESYAGHYIPAFASRVHQGNKNNEGIHINLKGFAIGNGLTDPAIQYKAYPDYALDMGLITKTQFNRINKIVPTCEFAVKLCGTSGTVSCLAAYFVCNTIFSAIRTIIGNKNYYDIRKPCIGSLCYDFSNLEKFLNLKSVRESLGVGDIEFVSCSPTVYEAMLLDWMRNLEVGIPELLESDIKVLIYAGEYDLICNWLGNSRWVNSMEWSGKEAFVSSSEKPFTVDGKEAGVLKSHGPLSFLKVHDAGHMVPMDQPKAALEMLKRWTSGNLSEPSSSSQRLDFTM

SEQ ID NO: 20651 - protein, 517 aa, Zea mays subsp. mays
  misc_feature (1)..(517): Ceres Seq. ID no. 12384307
MRPADQLLLPFLLLAVASVAAAGGSWENGYGSILRLPSSSPRRFPRSAAVDLIHALNLHPADASPPLSTAGVEGALAPAGTLVERPIRIASFANGGAATSVEDLGHHAGYYRLANTHDARMFYFFFESRGHKDDPVVIWLTGGPGCSSELALFYENGPFNIADNLSLVWNDFGWDKASNLIYVDQPTGTGFSYSSDSRDTRHNEATISNDLYDFLQAFFAEHPKYAKNDFFITGESYAGHYIPAFASRVHQGNKNNEGIHINLKGFAIGNGLTDPAIQYKAYPDYALDMGLITKTQFNRINKIVPTCEFAVKLCGTSGTVSCLAAYFVCNTIFSAIRTIIGNKNYYDIRKPCIGSLCYDFSNLEKFLNLKSVRESLGVGDIEFVSCSPTVYEAMLLDWMRNLEVGIPELLESDIKVLIYAGEYDLICNWLGNSRWVNSMEWSGKEAFVSSSEKPFTVDGKEAGVLKSHGPLSFLKVHDAGHMVPMDQPKAALEMLKRWTSGNLSEPSSSSQRLDFTM

SEQ ID NO: 20652 - protein, 397 aa, Zea mays subsp. mays
  misc_feature (1)..(397): Ceres Seq. ID no. 12384308
MFYFFFESRGHKDDPVVIWLTGGPGCSSELALFYENGPFNIADNLSLVWNDFGWDKASNLIYVDQPTGTGFSYSSDSRDTRHNEATISNDLYDFLQAFFAEHPKYAKNDFFITGESYAGHYIPAFASRVHQGNKNNEGIHINLKGFAIGNGLTDPAIQYKAYPDYALDMGLITKTQFNRINKIVPTCEFAVKLCGTSGTVSCLAAYFVCNTIFSAIRTIIGNKNYYDIRKPCIGSLCYDFSNLEKFLNLKSVRESLGVGDIEFVSCSPTVYEAMLLDWMRNLEVGIPELLESDIKVLIYAGEYDLICNWLGNSRWVNSMEWSGKEAFVSSSEKPFTVDGKEAGVLKSHGPLSFLKVHDAGHMVPMDQPKAALEMLKRWTSGNLSEPSSSSQRLDFTM

SEQ ID NO: 20653 - DNA, 1777 bp, Zea mays subsp. mays
  misc_feature (1)..(1777): Ceres Seq. ID no. 12384320
gcacgagaccattacctagaacatcctaatcaaaaaaagcaaaaacatattcctgtaataatagactgcctactccgtcttcctccgtatctctccctctctctgcttcctgtgtgcttctgttctgttagataggttaacatttggtatcagaagtccgtcgatccttggatctcgcatggcgaccacaggcgcagttgatgcccagctcaccctcgcgttggaatctcaaacgcgctccctgctgtctgaattggacaagcgcatccatgccatcgactccaagtgggcaaaccgcgtgggaatcctggagactcaagtggccgattccaccaggcgtttggagtcgttctccagggggatccatgaagacctggaggcccgtttggtgacagccgatgaagctgtggatgatcggatccgctatctggaggcgagtacgatctcccgtgtcgcggcgctcgagtcgtcttctcaagccgttgagctctggcggccccaaatcgatgcgtcgattgacgggctctatgccaacatccagacgattcgcgccgacatcgcgcagatcgtgacccaacaacctcccaacagccgttccggcgggttcggcgcagccggcatcctcggaacccccagatcggtgattgggcgttcccctgctaccttcgacaacaccgattgctcacgttttgggcccggcgctgcaatttttcaccgggacagtggtattgggtataatcaacccaatttccgctgcccggtcacgggtgcgtggaacaatccttctccttcgtttacgtttcctactcagtatgatcatagtggccatgttcccttgcaccgtcagttaggggatttgcccaagctttcatttcccaagtttgacggtactagcccaaaattatggcagaaacgatgcgaggattattttgctatgtatgccactgaaatcactgtttgggtcagagtagcgtccatgcactttgagggggttgctgggtgttggtttcagtctattgaaccacaagtgtcttcctggtcatggcaacagttttgtcaagctgtgcacgatcgttttgggcgtgaacaacacgagcttgttattcgcaagctgttccatatccgtcagacatcttcggtccaggattatgttgatcgtttttgtgaacttattgatgtccttgtcacctatgagcacactacagatcctttgtattataccatgaaattcattgatggcctccgtgacgatattaaatctgttatattggttcaacgccccagcactttggatggatactgcctgcgctcttgctttgttacaggaagaggcagattcatcccggcgtcgttagcatcgtgggtcggagggtgcgttcccagggcgttcatatccgaagttacctgctcctcctcctcctaggtgggataaatcgctgggaggggaaactgtcgccaccaagcctgtggtccctcagccgggttcttctactgacaagctcgcatcccttcgtgcttatcgtcatgcctgaggtctgtgtcaatattgcgctgaaaaatgggacaagggtcacaagtgcgctcagacagttcagctgcatgctatccaggaagtatgggatctgttgaatccggaactcaccggatcagaaggtgatttcgaagattccacggatcagttcatgatgttattgtcccgagaggccagttctccaaaaactgcatattctacgttcaaacttcaagggtatatccaaggaattccactgatgatttt

SEQ ID NO: 20654 - protein, 414 aa, Zea mays subsp. mays
  misc_feature (1)..(414): Ceres Seq. ID no. 12384321
MATTGAVDAQLTLALESQTRSLLSELDKRIHAIDSKWANRVGILETQVADSTRRLESFSRGIHEDLEARLVTADEAVDDRIRYLEASTISRVAALESSSQAVELWRPQIDASIDGLYANIQTIRADIAQIVTQQPPNSRSGGFGAAGILGTPRSVIGRSPATFDNTDCSRFGPGAAIFHRDSGIGYNQPNFRCPVTGAWNNPSPSFTFPTQYDHSGHVPLHRQLGDLPKLSFPKFDGTSPKLWQKRCEDYFAMYATEITVWVRVASMHFEGVAGCWFQSIEPQVSSWSWQQFCQAVHDRFGREQHELVIRKLFHIRQTSSVQDYVDRFCELIDVLVTYEHTTDPLYYTMKFIDGLRDDIKSVILVQRPSTLDGYCLRSCFVTGRGRFIPASLASWVGGCVPRAFISEVTCSSSS

SEQ ID NO: 20655 - DNA, 1298 bp, Zea mays subsp. mays
  misc_feature (1)..(1298): Ceres Seq. ID no. 12384330
gcacgagaccattacctagaacatcctaatcaaaaatctcattctacagggaagacgaaaacacactgcagctggagcagcactgatatcgaccatggctccagcagcacctgcatctgcgacaaaatgcagcagcggcatcgtcatctctgtgctcttgcccctcgcgctgctaatggcggccgccggcacctcgtcggcgcagctgtccacgggcttctactcttcctcgtgtcccggcgtgtacgacgccgtcaagtcggtggtgcagtccgccgtcgccagcgagcagcgcatgggcgcctccatcgtccgcctcttcttccacgactgcttcgtccagggctgcgacgcgtcgctgctgctggacgacacgcctagcttccagggagagaagatggccaaccctaacaacggctccgtgaggggattcgaggtcatcgacgccgtcaagtccgccgtcgagaaggtgtgccccggcgtcgtctcctgcgccgacatcctcgccatcgccgccagggacagcgtcgtcatcctgggtggtccgacctgggacgtgaaggtcgggcggcgggactccacgacggcgagcttcagcggcgccaacaacaacatcccgccgccgacgtcgggcctcgccaacctcacgtcgctcttcgccgcccaaggcctctcccaaaaggacatggtcgcgctctccggagctcacaccatcggccaagcacgctgcaccaacttcagagcccacgtgtacaacgacaccaacatcgacggcagcttcgcaagaacaaggcagtcaggctgccctagatcgtcctcaggctcatcaggcgacaacaacctggcgccattggaccttcaaaccccgaccgtcttcgacaacaactactacaagaaccttgtctgcaagaaggggctcctgcactccgaccaggagctcttcaatggcggagccaccgacgcgctggtccagtcctacgccagtggccagagcgagttcttctcggactttgtgacgggcatggtgaagatgggtgacatcactccgttaactggctcccggtgggcagattaggaagaactgcagaagggtcaattaattaaccaattaataacaaggtcggccggcggtgcacactatctaacagggggcttgctttcagtcgttaattaagtttgtaatctttctacttcgtccacaaaattgtgagatcatcatgcatgttgtaccagccaaccaaggtgttgagacgatgttgttcgtcgtttgaataagtaatccatcatttgttcttctt

SEQ ID NO: 20656 - protein, 326 aa, Zea mays subsp. mays
  misc_feature (1)..(326): Ceres Seq. ID no. 12384331
MAPAAPASATKCSSGIVISVLLPLALLMAAAGTSSAQLSTGFYSSSCPGVYDAVKSVVQSAVASEQRMGASIVRLFFHDCFVQGCDASLLLDDTPSFQGEKMANPNNGSVRGFEVIDAVKSAVEKVCPGVVSCADILAIAARDSVVILGGPTWDVKVGRRDSTTASFSGANNNIPPPTSGLANLTSLFAAQGLSQKDMVALSGAHTIGQARCTNFRAHVYNDTNIDGSFARTRQSGCPRSSSGSSGDNNLAPLDLQTPTVFDNNYYKNLVCKKGLLHSDQELFNGGATDALVQSYASGQSEFFSDFVTGMVKMGDITPLTGSRWAD

SEQ ID NO: 20657 - protein, 299 aa, Zea mays subsp. mays
  misc_feature (1)..(299): Ceres Seq. ID no. 12384332
MAAAGTSSAQLSTGFYSSSCPGVYDAVKSVVQSAVASEQRMGASIVRLFFHDCFVQGCDASLLLDDTPSFQGEKMANPNNGSVRGFEVIDAVKSAVEKVCPGVVSCADILAIAARDSVVILGGPTWDVKVGRRDSTTASFSGANNNIPPPTSGLANLTSLFAAQGLSQKDMVALSGAHTIGQARCTNFRAHVYNDTNIDGSFARTRQSGCPRSSSGSSGDNNLAPLDLQTPTVFDNNYYKNLVCKKGLLHSDQELFNGGATDALVQSYASGQSEFFSDFVTGMVKMGDITPLTGSRWAD

SEQ ID NO: 20658 - protein, 259 aa, Zea mays subsp. mays
  misc_feature (1)..(259): Ceres Seq. ID no. 12384333
MGASIVRLFFHDCFVQGCDASLLLDDTPSFQGEKMANPNNGSVRGFEVIDAVKSAVEKVCPGVVSCADILAIAARDSVVILGGPTWDVKVGRRDSTTASFSGANNNIPPPTSGLANLTSLFAAQGLSQKDMVALSGAHTIGQARCTNFRAHVYNDTNIDGSFARTRQSGCPRSSSGSSGDNNLAPLDLQTPTVFDNNYYKNLVCKKGLLHSDQELFNGGATDALVQSYASGQSEFFSDFVTGMVKMGDITPLTGSRWAD

SEQ ID NO: 20659 - DNA, 1008 bp, Zea mays subsp. mays
  misc_feature (1)..(1008): Ceres Seq. ID no. 12384340
gaagacacaaagctgaaggcgagcgaagcaaagtagtagtagtagtactgccgttcccgtccccgacgcgcctcccgcccgagcccgcacaaccgcgccgcgtcaatcctcatgtggccgtcctgggtgaaggcgcacagctctgacagcgccgccgcctccacctccaccgccctcgtccccgccgcaggcgccggggcgtccccgcgcctctccatccccaacccgtctctcaaggacctccggtcgctgctcgcgccggactccgccgccacagccccgccctccgcctccccgtcgccgcgcgtcttgcaccgcatccgcgtcgccgcctccgcgctccgggccctccgcacgctccaccagcccccgtcccggcctccggcggcgcccgctggcaaggagccggtgccgggcggcgggcgggtggtgctgtacttcacgtccctccgcgtcgtccgcggcacctacgaggactgccgcgcggtgcgcgccatcctgcgcgggctccgcgcggccgtcgacgagcgcgacctctccatggaccccggccacctgcccgagctcgccgcgctcctcccccgcgtggcgctgccccaggtcttcgtcggcggccgccacctcggcggcgccgacgaggtccggcgcctccacgagtccggggagctccgccgcatcgtcgcccccgctcccggccccgcgttctacggcagctgcgcccgctgcggcggcgagcgatacctgctttgcggcgcctgcgacggcagccacaagcggtacagcctcaagggcggcggcgggttccgcgcctgcgccgagtgcaacgagaacgggctcgtccggtgccccgcctgctgcgtacccgtacccgtcgcctgatctagatccacgatccacctggtactggttttctgttttaattattattcaaactctactagctgtactctgtacacaaactgctaaggagcttgatgaggactggaggagaaagctaccactccgtcc

SEQ ID NO: 20660 - protein, 255 aa, Zea mays subsp. mays
  misc_feature (1)..(255): Ceres Seq. ID no. 12384341
MWPSWVKAHSSDSAAASTSTALVPAAGAGASPRLSIPNPSLKDLRSLLAPDSAATAPPSASPSPRVLHRIRVAASALRALRTLHQPPSRPPAAPAGKEPVPGGGRVVLYFTSLRVVRGTYEDCRAVRAILRGLRAAVDERDLSMDPGHLPELAALLPRVALPQVFVGGRHLGGADEVRRLHESGELRRIVAPAPGPAFYGSCARCGGERYLLCGACDGSHKRYSLKGGGGFRACAECNENGLVRCPACCVPVPVA

SEQ ID NO: 20661 - DNA, 1755 bp, Zea mays subsp. mays
  misc_feature (1)..(1755): Ceres Seq. ID no. 12384370
gcacgagaccattacctagaacatcctaatcgaaaactctgtctccctcgtgctgccctcgccctccttttttttttagtttacccgccgtcccgcgcgccgccgtttcggttgctcggctagagggactagggagtgccagcgagtccatggcagcggcgagggcgtgcttcgtcgcgctggcgctggtggcggcgctcttcgtggccggatcggcggcagcggcggcggggaatgccggaggccgctcgcagctgacgctcaggcagcggcgccggcagctgctgcggcagcggcaggtgcgcagccacctcaagaggctcaacaaggcgccgctcgccaccatcgagagtccagacggagacatcatagactgcgtgcatatctccaaccagcccgccttggatcaccccttcctcaagaaccacaccgtccagatgcggcctgcataccacccggaaggtctgtacgacgacgagtccaaggttgcatcgcagcggaacgcgcagacgatcacccagatgtggcatcagaacggcaggtgccccgagggcacgataccgatcaggcggaccaaggaggaggacgtgctgagggccagctccgtcaggaggtatggcaagaagaagcgcaggagtgcccccaaccccatgtcggttgaccctgacatgctcaacgagagcggccaccagcacgccatagcgtacgtggaaggagacaagtactacggcgccaaggctaccatcaatgtgtggcagccgaagatcgagcaggccaatgagttcagcctgtcccagctctggatcctggggggctccttcggccaggacctcaacagcatcgaagcaggatggcaggttagcccagacctgtatggggacaacaacactaggctcttcacctactggactagcgatgcctaccaggcaacaggatgctacaacctgctgtgctcggggttcatccagataaacaaccagatcgccatgggcgccagcatcttccctatctccaactacggcggctcccagtatgacatcaacatcttggtctggaaggaccccaaggagggcaactggtggctgcagttcggcaacgactacgtcctggggtactggccgtcgttcctcttctcgtacctggcggacagtgcctccatgatcgagtggggcggcgaggtggtgaactcggagcccgacggcagccacaccagcacgcagatgggcagcggccacttccccgaggaagggttcggcaaggccagctacttcaggaacgtccaggtggtggactccaccaacaacctcaaggcgcccaggggcgtgggcaccttcaccgagcagtccagctgctacgacgtgcaggacggcagcaacgccgactggggcacatacttctactacggcgggcccgggaagaactcaaactgtccatagcccaagactgactgagctgagccgccgcctatcacactcactaccagagccgcctaaccttaacacacctcagctgtatcattcatgcatccggtcaattagtttatactgcctcagatttttaacttttttttcgttttgtttcgctctttcttgcttctacctaccccctagtttactgactcctaccctaggtgagtgagcgtgtgtgttgtagacatgtgagattgttctctctgcctcagagagagtgagatgaaggagagatgtcggtcgtctggttctagggaagagatgaggaggactagggggtaggtag

SEQ ID NO: 20662 - protein, 428 aa, Zea mays subsp. mays
  misc_feature (1)..(428): Ceres Seq. ID no. 12384371
MAAARACFVALALVAALFVAGSAAAAAGNAGGRSQLTLRQRRRQLLRQRQVRSHLKRLNKAPLATIESPDGDIIDCVHISNQPALDHPFLKNHTVQMRPAYHPEGLYDDESKVASQRNAQTITQMWHQNGRCPEGTIPIRRTKEEDVLRASSVRRYGKKKRRSAPNPMSVDPDMLNESGHQHAIAYVEGDKYYGAKATINVWQPKIEQANEFSLSQLWILGGSFGQDLNSIEAGWQVSPDLYGDNNTRLFTYWTSDAYQATGCYNLLCSGFIQINNQIAMGASIFPISNYGGSQYDINILVWKDPKEGNWWLQFGNDYVLGYWPSFLFSYLADSASMIEWGGEVVNSEPDGSHTSTQMGSGHFPEEGFGKASYFRNVQVVDSTNNLKAPRGVGTFTEQSSCYDVQDGSNADWGTYFYYGGPGKNSNCP

SEQ ID NO: 20663 - protein, 332 aa, Zea mays subsp. mays
  misc_feature (1)..(332): Ceres Seq. ID no. 12384372
MRPAYHPEGLYDDESKVASQRNAQTITQMWHQNGRCPEGTIPIRRTKEEDVLRASSVRRYGKKKRRSAPNPMSVDPDMLNESGHQHAIAYVEGDKYYGAKATINVWQPKIEQANEFSLSQLWILGGSFGQDLNSIEAGWQVSPDLYGDNNTRLFTYWTSDAYQATGCYNLLCSGFIQINNQIAMGASIFPISNYGGSQYDINILVWKDPKEGNWWLQFGNDYVLGYWPSFLFSYLADSASMIEWGGEVVNSEPDGSHTSTQMGSGHFPEEGFGKASYFRNVQVVDSTNNLKAPRGVGTFTEQSSCYDVQDGSNADWGTYFYYGGPGKNSNCP

SEQ ID NO: 20664 - protein, 304 aa, Zea mays subsp. mays
  misc_feature (1)..(304): Ceres Seq. ID no. 12384373
MWHQNGRCPEGTIPIRRTKEEDVLRASSVRRYGKKKRRSAPNPMSVDPDMLNESGHQHAIAYVEGDKYYGAKATINVWQPKIEQANEFSLSQLWILGGSFGQDLNSIEAGWQVSPDLYGDNNTRLFTYWTSDAYQATGCYNLLCSGFIQINNQIAMGASIFPISNYGGSQYDINILVWKDPKEGNWWLQFGNDYVLGYWPSFLFSYLADSASMIEWGGEVVNSEPDGSHTSTQMGSGHFPEEGFGKASYFRNVQVVDSTNNLKAPRGVGTFTEQSSCYDVQDGSNADWGTYFYYGGPGKNSNCP

SEQ ID NO: 20665 - DNA, 1919 bp, Zea mays subsp. mays
  misc_feature (1)..(1919): Ceres Seq. ID no. 12386452
gcacgagaccattacctagaacatcctaatcgaaaactgcccaccgggctcgtctcctcccctggtttctttttcatcactcgtcaccggctcaccgctagttcctttagagaaggtgtacccccaatattccattaccggcccactgacgagagagagagagagagattttggcgtgactatccagagtccccaatcttacacctaaaaactcttctcagctaccggtgcggcatatcgcccctatcggcggcgaacatttgagttctcgcgacgtgtcctcgaggattctgtggtggaagatcggatcttttgctgcgggttccagttgccaaccagagatgtcggctctcctcgatctactgatggggatctttcgccagcagaccctcggcggcgccgccctggagctcgccgcgctggcggcgccgctctcgctcgccgccctcgtcggccttctcatcgggtgggcatggcgcccgaggtgggcgggggtcgtcgtcgtcgacaacgcccaacagatggcgcagctccccgcggcggcggcgcctccggaccgcgccaccgccaccaccaccgcggtggtatctcgcaacgaggcggccgccgtcgtaccgagaactgtggtggctcatgcggcggccgaggacgagcagcagcagctggcggtcaacaccggtgacttgatgcacctctggcggctcgtcgacgagaaggacggtggcccgtcgtggattcacatgatggaccgcaccttaccaaccatgaggtaccaagcctggcggagagacccaccgagtggtccaccacagtaccgcagcagcacaatcttggaagatgcgtcaccagaggttgtgagagatttcttctgggacgacgagttccggatgaacaacagctgggacgacatgcttcttcagcacgagacgctggaggagtgcaccgagactggaaccatggttgtccggtgggtcaggaagttcccgttcttctgcagcgacagggagtacatcataggccgcaggatatgggcgtctgggaagacattttactgtgtgaccaagggtgttcctcgtccctccgttccaagacaaaacaaacctcgccgtgtggacttgtactactctagctggtgcatccgtccagttgagtcgagaaaaggcgacggtgcaatgagtgcatgcgaggtgctcttgttccaccacgaggacatggggattccatgggagatcgcgaagcttggcgtccggcaggggatgtggggctgcgtcaagaggatagagcctggccttcgggcgtaccaggttgggaggaccgccggagaggctgtttccaagtgtgctgccatggcacaggtcaccaccaggttcagtgccgacgagctcgtcatcgcagggccggggcaacacggaggccagttcttcttcgtccggcgacggcgcagaggttgacaaggcgacgaagcactgggcgaacagcatacccaaggttctcatggtcggtggcgctgtggccctggcctgctgcaccttcgacggtgggttgttgaccaaggccgtcatcttcggcactgccaggaggtttgcaggagggccaggaaggcggtaggtacggtgtaacggtggacggaaagatccagcggcacaacacaaaacaagtgttgctgcactgcagcccgctgcgggttaataggttagaaatatagcatttgttacgaggaaacatagaagtattatgcaagaaaaccgctgttagataagaaatacactgctgtgtattagtagttaataacaagagttcttggtttttgtatgtaaccatattgtggatcggatccattgttcttccccatggacactactactaccagtctaccagatcgatgttgaccttgtggcagttgctgcagtttttttttc

SEQ ID NO: 20666 - protein, 369 aa, Zea mays subsp. mays
  misc_feature (1)..(369): Ceres Seq. ID no. 12386453
MSALLDLLMGIFRQQTLGGAALELAALAAPLSLAALVGLLIGWAWRPRWAGVVVVDNAQQMAQLPAAAAPPDRATATTTAVVSRNEAAAVVPRTVVAHAAAEDEQQQLAVNTGDLMHLWRLVDEKDGGPSWIHMMDRTLPTMRYQAWRRDPPSGPPQYRSSTILEDASPEVVRDFFWDDEFRMNNSWDDMLLQHETLEECTETGTMVVRWVRKFPFFCSDREYIIGRRIWASGKTFYCVTKGVPRPSVPRQNKPRRVDLYYSSWCIRPVESRKGDGAMSACEVLLFHHEDMGIPWEIAKLGVRQGMWGCVKRIEPGLRAYQVGRTAGEAVSKCAAMAQVTTRFSADELVIAGPGQHGGQFFFVRRRRRG

SEQ ID NO: 20667 - protein, 361 aa, Zea mays subsp. mays
  misc_feature (1)..(361): Ceres Seq. ID no. 12386454
MGIFRQQTLGGAALELAALAAPLSLAALVGLLIGWAWRPRWAGVVVVDNAQQMAQLPAAAAPPDRATATTTAVVSRNEAAAVVPRTVVAHAAAEDEQQQLAVNTGDLMHLWRLVDEKDGGPSWIHMMDRTLPTMRYQAWRRDPPSGPPQYRSSTILEDASPEVVRDFFWDDEFRMNNSWDDMLLQHETLEECTETGTMVVRWVRKFPFFCSDREYIIGRRIWASGKTFYCVTKGVPRPSVPRQNKPRRVDLYYSSWCIRPVESRKGDGAMSACEVLLFHHEDMGIPWEIAKLGVRQGMWGCVKRIEPGLRAYQVGRTAGEAVSKCAAMAQVTTRFSADELVIAGPGQHGGQFFFVRRRRRG

SEQ ID NO: 20668 - protein, 309 aa, Zea mays subsp. mays
  misc_feature (1)..(309): Ceres Seq. ID no. 12386455
MAQLPAAAAPPDRATATTTAVVSRNEAAAVVPRTVVAHAAAEDEQQQLAVNTGDLMHLWRLVDEKDGGPSWIHMMDRTLPTMRYQAWRRDPPSGPPQYRSSTILEDASPEVVRDFFWDDEFRMNNSWDDMLLQHETLEECTETGTMVVRWVRKFPFFCSDREYIIGRRIWASGKTFYCVTKGVPRPSVPRQNKPRRVDLYYSSWCIRPVESRKGDGAMSACEVLLFHHEDMGIPWEIAKLGVRQGMWGCVKRIEPGLRAYQVGRTAGEAVSKCAAMAQVTTRFSADELVIAGPGQHGGQFFFVRRRRRG

SEQ ID NO: 20669 - DNA, 1095 bp, Zea mays subsp. mays
  misc_feature (1)..(1095): Ceres Seq. ID no. 12386489
gcactctttccccttcccttcccttcccactcccaggctcccactctcaccccttccgcctacccacgcaaacggcacacgaactaacagccacctctcacgtcccccaccctctggttcatgtcctgctgctccccatgtcgcctccactcgagctcgactacataggcctctcgccgccggcggcagccgccgccgctgaaaacgacgaactgaagggtactgagctccgcctcgggctgccagggtccgggtcgccggaccgccgtgtcgtggctgccaccgcgaccaccctggacctgctcccggccaagggcgccaagcgcgggttttctgacgaggcgcccccgccatcgcctgttgccgctgccggaaagggaaagaaggtggcagaagaggagtacgacgagaagaaggtggcagcgaccccgcagccggccgccaaagcacaagtggtgggatggccaccagtctgcaactaccgcaagaacacgatgactgccacccagctgaagggcagcaaggaggatggtgatgccaagcagggtcaggggttcctgtacgtcaaggtcagcatggatggcgcgccgtacctcaggaagatcgacctcaagacttacaagaactacaaggacctgtcgaccgcgcttgagaagatgttcagtggcttcagtactggcaaggacggctcatctgagtaccgcaaggatggtgaatatgttctgacttacgaggacaaggatggagattggatgcttgtcggcgacgtaccatgggactgccacatcgtctttcgctccaattgtaggatgttcgccggctcctgccgcaggctcaggatcatgaaaggctcagatgcgattggactcgctccaagggcagccgataagtccaagaaccgcaactagaacggtggcttcctatccttacacagtccggtacgagggaggagatgcagtgacttgtagggatctttacgaaaaccgaaaaagtctactaacagctatgacttgtgagaagaattctggcttatggtattggtctgcactagaatggcttggtacatcgtctatggacaaaacacgctattcgatt

SEQ ID NO: 20670 - protein, 301 aa, Zea mays subsp. mays
  misc_feature (1)..(301): Ceres Seq. ID no. 12386490
TLSPSLPFPLPGSHSHPFRLPTQTAHELTATSHVPHPLVHVLLLPMSPPLELDYIGLSPPAAAAAAENDELKGTELRLGLPGSGSPDRRVVAATATTLDLLPAKGAKRGFSDEAPPPSPVAAAGKGKKVAEEEYDEKKVAATPQPAAKAQVVGWPPVCNYRKNTMTATQLKGSKEDGDAKQGQGFLYVKVSMDGAPYLRKIDLKTYKNYKDLSTALEKMFSGFSTGKDGSSEYRKDGEYVLTYEDKDGDWMLVGDVPWDCHIVFRSNCRMFAGSCRRLRIMKGSDAIGLAPRAADKSKNRN

SEQ ID NO: 20671 - protein, 256 aa, Zea mays subsp. mays
  misc_feature (1)..(256): Ceres Seq. ID no. 12386491
MSPPLELDYIGLSPPAAAAAAENDELKGTELRLGLPGSGSPDRRVVAATATTLDLLPAKGAKRGFSDEAPPPSPVAAAGKGKKVAEEEYDEKKVAATPQPAAKAQVVGWPPVCNYRKNTMTATQLKGSKEDGDAKQGQGFLYVKVSMDGAPYLRKIDLKTYKNYKDLSTALEKMFSGFSTGKDGSSEYRKDGEYVLTYEDKDGDWMLVGDVPWDCHIVFRSNCRMFAGSCRRLRIMKGSDAIGLAPRAADKSKNRN

SEQ ID NO: 20672 - DNA, 1130 bp, Zea mays subsp. mays
  misc_feature (1)..(1130): Ceres Seq. ID no. 12386565
cccgaaagccaaagaggaaaaaggaattgcgcctcccgctacgctattaccgccggcggccgctgccatggacgttggcgcgaaggaggaggagatgggtcaagtgtggtggggccaccgcgcgtggtccctcctctccgctgttcgtgcacgggcgccgctagtgcagtgcatcaccaacctcgtctcaatggacatcgccgccaacgtgctcctcgccgcgggcgcctccccggctatggtccactccctccgcgaggtgcccgactttaccccgcgctgcgacgccgtgtatgtcaacgtcggcacgctctcggaggactggctcccctccatgcgcgccgccgcctccgccggccgcccctgggtgctcgaccccgtcgccgccgccgcctccgggttccggatgaaagcctgcctcgagcttctgtcgctctgcccagcagtcgtcagggggaacgcctctgaaattctcgcgctcgcttcccgctcaaccgccgcctcttccaatttcaagggtgtggacagttcacattgctctgttgatgctattgaagctgcaaaagcgttggcactgtccagcagtgctgttgtcgcggtatctggagctgttgatttcgtcactgatgggaagcaggttatcagcgtgagcaacggtgtgcccatgatgcagaagatcaccgcaacagggtgcgctgtgactgctcttattgctgcatttgttgccatggaaccttctgatgccatagttgcagcggcatgcgctcttgccatctttggtctggtgggagagattgggatggagtcagccaaggggcctgcctctcttaggatgcacctcatcgacgctctctactgcctcaatgaagaaacagtcacttctcgggttaggatttccttgcgaccatgatgcgcggacgcatgccatggctactgttttttcaggtaaatatggagtttcgaataataggaaggctgagttcattttctgaaatgtcttgataaccatgaaaatcatagacactcctttaaccttcacgactgtacgaaatacctagatgtgatgcccaagttgtgcctgaattgtcagctgtacatatttaatacagtaaaatggggaaccttgtttc

SEQ ID NO: 20673 - protein, 302 aa, Zea mays subsp. mays
  misc_feature (1)..(302): Ceres Seq. ID no. 12386566
PKAKEEKGIAPPATLLPPAAAAMDVGAKEEEMGQVWWGHRAWSLLSAVRARAPLVQCITNLVSMDIAANVLLAAGASPAMVHSLREVPDFTPRCDAVYVNVGTLSEDWLPSMRAAASAGRPWVLDPVAAAASGFRMKACLELLSLCPAVVRGNASEILALASRSTAASSNFKGVDSSHCSVDAIEAAKALALSSSAVVAVSGAVDFVTDGKQVISVSNGVPMMQKITATGCAVTALIAAFVAMEPSDAIVAAACALAIFGLVGEIGMESAKGPASLRMHLIDALYCLNEETVTSRVRISLRP

SEQ ID NO: 20674 - protein, 280 aa, Zea mays subsp. mays
  misc_feature (1)..(280): Ceres Seq. ID no. 12386567
MDVGAKEEEMGQVWWGHRAWSLLSAVRARAPLVQCITNLVSMDIAANVLLAAGASPAMVHSLREVPDFTPRCDAVYVNVGTLSEDWLPSMRAAASAGRPWVLDPVAAAASGFRMKACLELLSLCPAVVRGNASEILALASRSTAASSNFKGVDSSHCSVDAIEAAKALALSSSAVVAVSGAVDFVTDGKQVISVSNGVPMMQKITATGCAVTALIAAFVAMEPSDAIVAAACALAIFGLVGEIGMESAKGPASLRMHLIDALYCLNEETVTSRVRISLRP

SEQ ID NO: 20675 - protein, 271 aa, Zea mays subsp. mays
  misc_feature (1)..(271): Ceres Seq. ID no. 12386568
MGQVWWGHRAWSLLSAVRARAPLVQCITNLVSMDIAANVLLAAGASPAMVHSLREVPDFTPRCDAVYVNVGTLSEDWLPSMRAAASAGRPWVLDPVAAAASGFRMKACLELLSLCPAVVRGNASEILALASRSTAASSNFKGVDSSHCSVDAIEAAKALALSSSAVVAVSGAVDFVTDGKQVISVSNGVPMMQKITATGCAVTALIAAFVAMEPSDAIVAAACALAIFGLVGEIGMESAKGPASLRMHLIDALYCLNEETVTSRVRISLRP

SEQ ID NO: 20676 - DNA, 791 bp, Zea mays subsp. mays
  misc_feature (1)..(791): Ceres Seq. ID no. 12386614
cttctcacgccgcctgcccagagcctctgcatcatccaacaacagcgacaccacgggactcgcgccatcttcagccagcgcaaacacatggcgaggatactcgtcgaagcgcccgcaggctcgggctcgccggaggactccatcaactcggacatgatcctcatcctcgccggcctgctctgcgcgctggtctgcgtcctcggcctgggcctcgtcgcccggtgcgcgtgctcgtggcgctgggccaccgagtccggccgggcgcagccggacgccgccaaagccgcgaacaggggcgtcaagaaggaggttctgcgctcgctcccgaccgtcacgtacgtctccgacagcggcaaggcggcggcggccgcggagggaggggccgacgagtgcgccatctgcctcgccgagttcgagggaggccaggccgtgcgcgtgctgccgcagtgcggccacgcgttccacgccgcctgcgtcgacacgtggctgcgcgcgcactcctcctgcccgtcctgccgccgggtgctggccgtcgacctgccccccgccgagcggtgccgccgctgtggcgcgcgccccggtgccggcatcagcgcgctctggaaggcgcccacncgctgcagcgccgaggggccgacgttcttggcgtagtgccgtgcgcactcgatatacaggaattgaaccgacgcgcagtctcagtgatgaacttgtttttttttttagcctggtaggtttcaccttttttaggtgtgtgtagtgattagctcaacggtggagtgttctggacaagc

SEQ ID NO: 20677 - protein, 242 aa, Zea mays subsp. mays
  misc_feature (1)..(242): Ceres Seq. ID no. 12386615
  misc_feature (205)..(205): Xaa is any aa, unknown or other
SHAACPEPLHHPTTATPRDSRHLQPAQTHGEDTRRSARRLGLAGGLHQLGHDPHPRRPALRAGLRPRPGPRRPVRVLVALGHRVRPGAAGRRQSREQGRQEGGSALAPDRHVRLRQRQGGGGRGGRGRRVRHLPRRVRGRPGRARAAAVRPRVPRRLRRHVAARALLLPVLPPGAGRRPAPRRAVPPLWRAPRCRHQRALEGAHXLQRRGADVLGVVPCALDIQELNRRAVSVMNLFFFLAW

SEQ ID NO: 20678 - protein, 216 aa, Zea mays subsp. mays
  misc_feature (1)..(216): Ceres Seq. ID no. 12386616
  misc_feature (205)..(205): Xaa is any aa, unknown or other
LLTPPAQSLCIIQQQRHHGTRAIFSQRKHMARILVEAPAGSGSPEDSINSDMILILAGLLCALVCVLGLGLVARCACSWRWATESGRAQPDAAKAANRGVKKEVLRSLPTVTYVSDSGKAAAAAEGGADECAICLAEFEGGQAVRVLPQCGHAFHAACVDTWLRAHSSCPSCRRVLAVDLPPAERCRRCGARPGAGISALWKAPXRCSAEGPTFLA

SEQ ID NO: 20679 - protein, 187 aa, Zea mays subsp. mays
  misc_feature (1)..(187): Ceres Seq. ID no. 12386617
  misc_feature (176)..(176): Xaa is any aa, unknown or other
MARILVEAPAGSGSPEDSINSDMILILAGLLCALVCVLGLGLVARCACSWRWATESGRAQPDAAKAANRGVKKEVLRSLPTVTYVSDSGKAAAAAEGGADECAICLAEFEGGQAVRVLPQCGHAFHAACVDTWLRAHSSCPSCRRVLAVDLPPAERCRRCGARPGAGISALWKAPXRCSAEGPTFLA

SEQ ID NO: 20680 - DNA, 698 bp, Zea mays subsp. mays
  misc_feature (1)..(698): Ceres Seq. ID no. 12386647
aatgactccagtatcgctctatataacaagtggatccgatctagtcgccagtcgtcgtcgttaaaaccgagaagagaccaggccgaaggaaaacaatcctgaaaccaagccatgggtctgcaggaggaatttgaggagcatgctgagaaggcaaagaccttgcctgagagcacgagcaatgagaacaagctgatcctctacgggctctacaagcaagccacggttggagatgtgaataccgatcgtccgggcatattctaccaaaaggacagggccaagtgggatgcctggaaggctgttgaaggcaaatcgaaggatgaggcgatgaatgactacatcaccaaggtgaagcagctccaggaggaggctgccgcctcttaaaagtctcttaatagtgttgccaaacagctatttgtcagatgagctttgtgccatttcctcattagaagtatatcattcgatccattggggatctgtgaaccatgtacctgtttatgtaactttttttttttcgaaagagcgcaggaggactgcgcacccatatattaaagtagagggaaaataaagggccataatgatgatatccatctatctatctatgtaactggtttatgtaccatgtacctgtttatgtaactggttaccagtgttatccatctatctatctatctgtgaagacttgagtcttctaaattatg

SEQ ID NO: 20681 - protein, 89 aa, Zea mays subsp. mays; identical to SEQ ID NO: 14572
  misc_feature (1)..(89): Ceres Seq. ID no. 12386648

SEQ ID NO: 20682 - DNA, 886 bp, Zea mays subsp. mays
  misc_feature (1)..(886): Ceres Seq. ID no. 12386681
gaatctctctgcctcattctctctccaccggcgacggcgagtccgaccgcactgctcctctccgtgcggagatctctcgcgtgctggcaggcgcgtcctggtgactgggacacgggagaagagaccttggtgggtggcagcggcaggccatggaggcgctgctggtgacggtgcttcttctcctcctctcctctaccctcgccgcagcacaatggtgcgtgtgcaggcaggacgcgtcgcaggccgcgctgcagaagaccatcgactacgcgtgcggctccggggcggactgcaactccatccatgagaccggggcgtgctacaaccccaacaccgtcccggcgcactgctcctgggccgccaacagctactaccagaacaacaaggccaagggcgccacctgcgacttcgccggcaccgccaccctcaccaccagcgacccgagctccttcgggctgctcttaccccaccaccagtgcaagcgccgcgggaaccgtgaccccgaccaccggcggcacaatgggaggagcgggaggcccagggaccttgacgcccgccgggacaggcgcaggcacagccggcactaccggcatggggactgcaggcactacgggtaccgggttcggcggcctaggaccagcaggcatggacacagcggcggcggcggcggggggcttgctcctcctcccagaggctgggctgtgcgctgccctcgtcgcgctcctcctctccgccatcgtgctcgcgtgacgccttcacatgacctcggaaacaacaacctactgcctgcatgctagtagtagtagaaagcgctgcccttttgggaggtgtatgtagttcaggagtactctgattatctatggagaaagggtgggaattattgggc

SEQ ID NO: 20683 - protein, 215 aa, Zea mays subsp. mays
  misc_feature (1)..(215): Ceres Seq. ID no. 12386682
MEALLVTVLLLLLSSTLAAAQWCVCRQDASQAALQKTIDYACGSGADCNSIHETGACYNPNTVPAHCSWAANSYYQNNKAKGATCDFAGTATLTTSDPSSFGLLLPHHQCKRRGNRDPDHRRHNGRSGRPRDLDARRDRRRHSRHYRHGDCRHYGYRVRRPRTSRHGHSGGGGGGLAPPPRGWAVRCPRRAPPLRHRARVTPSHDLGNNNLLPAC

SEQ ID NO: 20684 - protein, 148 aa, Zea mays subsp. mays
  misc_feature (1)..(148): Ceres Seq. ID no. 12386683
MRPGRATTPTPSRRTAPGPPTATTRTTRPRAPPATSPAPPPSPPATRAPSGCSYPTTSASAAGTVTPTTGGTMGGAGGPGTLTPAGTGAGTAGTTGMGTAGTTGTGFGGLGPAGMDTAAAAAGGLLLLPEAGLCAALVALLLSAIVLA

SEQ ID NO: 20685 - DNA, 1706 bp, Zea mays subsp. mays
  misc_feature (1)..(1706): Ceres Seq. ID no. 12386684
agtcggtctctctcactctctcttgtctccaagtttgtaaccctagccgccaagcttgaagctccagccgtgctcgtgtagggccgcaggccatccgggctccggcttccagcatctaccaggcgtccttagaatacggtgcagcgagcagcaagtcgccgagcagccgagccaccgccgaacacagggcgccgccgagcagccgagccgccgccgagcgccgagtcttctctgagtgacttcggtacagacgacaaactttctccacacataccgcgccactccgccactcactgtgctgacggatggggtggtgctccccgtccacttcccggcagcttctctccacgacctcactcttcaccttcggcgcgggtctccttaccttcggcatccacctctcctacgtccacatcgagccccagcgcgctcgcacgctcgctcgggaccaattcgtccgtgactacctccgcaagaagcacgacaagtagcccgccttctgcggtccccaggtgattgcttggtagtcggagacgatggccctggtcccatcgaggtccgacagcgaggccttgatcccggaggtggagatgaatgccggcgccgaccagaccgcaacaacggcgcgggtcaccgtcgttcaggcgtcgtccgtgttctacgacacccctgcgactctcgataaagcggagaaattggtagcagaagcagctgggtatggttcacagttggttttgtttccggaagtctttgttggtggctacccacatggatctacctttggactggttgtcggcaatcgcactgccaagggaaaggaagactttcagaagtatcacgcatctgccatagatgtgcctggtccagaagtgtcccgcttatctgcattagctggaaaatataaggtgtttctggtgataggggtggttgagagggcaggatatacactttacaacacggtgctctccttcgatccactgggaaaatacctagggaagcaccgcaaggtcatgcctactgcactagaacgtgtattctgggggtttggagatggatctacaatacctgtctacgatactccgattggaaaaatgggtgctctcatttgctgggaaaacagaatgccacttctcaggacggccatgtatgccaaaggtattgagatatattgtgctcccacggttgattgcatgccaacttggctgtcttctatgacacatatcgcccttgaagggggatgctttgtgctgtcagcgtgccagttctgtcgtagaaagaactaccctccccctcccgagtacacattttgtggcctagaggaagagccatccccggaatccgttgtttgttctggagggagtgtcatcatctcaccattgggaacagtgttggcgggtcccaactacgaaagtgaggcccttctcactgctgacctggaccttggagagattgttcgagccaagtttgattttgacgtggtgggccactactcgcgacctgaggtgctgagtttagtggtgaagagcgatccaaagcccgccgtctctttcatctcagccgctggtagggatgatgactatgtgcagacctaatgacaaacatatctttggtctttagcttccttatacggcaatcgcatgcatctgtataattgtgggtttccggaacgttgcacgttccgtcagaataataataaactgttatgt

SEQ ID NO: 20686 - protein, 351 aa, Zea mays subsp. mays
  misc_feature (1)..(351): Ceres Seq. ID no. 12386685
MALVPSRSDSEALIPEVEMNAGADQTATTARVTVVQASSVFYDTPATLDKAEKLVAEAAGYGSQLVLFPEVFVGGYPHGSTFGLVVGNRTAKGKEDFQKYHASAIDVPGPEVSRLSALAGKYKVFLVIGVVERAGYTLYNTVLSFDPLGKYLGKHRKVMPTALERVFWGFGDGSTIPVYDTPIGKMGALICWENRMPLLRTAMYAKGIEIYCAPTVDCMPTWLSSMTHIALEGGCFVLSACQFCRRKNYPPPPEYTFCGLEEEPSPESVVCSGGSVIISPLGTVLAGPNYESEALLTADLDLGEIVRAKFDFDVVGHYSRPEVLSLVVKSDPKPAVSFISAAGRDDDYVQT

SEQ ID NO: 20687 - protein, 333 aa, Zea mays subsp. mays
  misc_feature (1)..(333): Ceres Seq. ID no. 12386686
MNAGADQTATTARVTVVQASSVFYDTPATLDKAEKLVAEAAGYGSQLVLFPEVFVGGYPHGSTFGLVVGNRTAKGKEDFQKYHASAIDVPGPEVSRLSALAGKYKVFLVIGVVERAGYTLYNTVLSFDPLGKYLGKHRKVMPTALERVFWGFGDGSTIPVYDTPIGKMGALICWENRMPLLRTAMYAKGIEIYCAPTVDCMPTWLSSMTHIALEGGCFVLSACQFCRRKNYPPPPEYTFCGLEEEPSPESVVCSGGSVIISPLGTVLAGPNYESEALLTADLDLGEIVRAKFDFDVVGHYSRPEVLSLVVKSDPKPAVSFISAAGRDDDYVQT

SEQ ID NO: 20688 - protein, 193 aa, Zea mays subsp. mays
  misc_feature (1)..(193): Ceres Seq. ID no. 12386687
MPTALERVFWGFGDGSTIPVYDTPIGKMGALICWENRMPLLRTAMYAKGIEIYCAPTVDCMPTWLSSMTHIALEGGCFVLSACQFCRRKNYPPPPEYTFCGLEEEPSPESVVCSGGSVIISPLGTVLAGPNYESEALLTADLDLGEIVRAKFDFDVVGHYSRPEVLSLVVKSDPKPAVSFISAAGRDDDYVQT

SEQ ID NO: 20689 - DNA, 1676 bp, Zea mays subsp. mays
  misc_feature (1)..(1676): Ceres Seq. ID no. 12386749
actcaagtcacaacaaacaccaccatcgtctctttgctcagcacaaaagcatcacactccctctctctcgcgcgctcacaagcacgtcgtcaaccatggttgtcgagatgaaggagaacggcgtagcggcgatggcggcgggcgagaaggcgccgcagctgggcgtgaagcgcggcgagccgacgctggtgccgccggcggaggcgacgccgacgggcgggcagtactacctgtccaacctggaccagaacatcgcggtgatcgtgcagacggtgtactgctacaagccctcctcgccgcccggcggcggcgaaggcaaggacgtggacgtggcagccgcgctccgcgacgcgctggcgcgcgtgctggtgcactaccacccgctggcggggcggctgggcgtcagcccggaggatgaagctcaccgtggagctgaccggcggagggcgccgtgttcgtggaggccgacgccgcctgcgacctcgccgccgtcggcgacctcaccaagcccgaccccgccgcgctcggccagctcgtctactccgtccccggcgccaaacacatcctcgagatgccccccatgaccgcgcaggtgacgaggttcaagtgtgggggcttcgcgctcggcctggccatgaaccactgcatgttcgacggcatcggcgccatggagttcgtcaactcgtgggcggagacggcgcgcggcgtcgccgagctcaccgtgccgccgttcctggaccgaagcgtcctgaaggcgcgcgacccgcccgtgcccaccttcccccaccacgagttcgccgagatccccgacgtctccgacacggcggcgctctacggcgcgcaggagctgctgtaccgctccttctgcttcgacccggaccggctggagcgcgtgcgcgggcttgcgctcgccgacggcgccctgggccgctgcaccaccttcgaggcgctgtcggggctggtgtggcgcgcgcgcaccaaggcgctggggctggcgcccgagcagcgcaccaagctgctgttcgccgtggacgggcggcgccggttcgcgccgccgctcccgcggggctacttcggcaacggcatcgtgctcaccaacgcccttgccacggccggcgagctgctgtccgcgcccgtgtcgcgcgcggcggggctggtgcaggacgccgtgcggatggtcaccgacgactacatgcgctcggcggtggactacttcgaggcgacgcgggcccggccgtcgctcgcgtccacgctgctcatcaccacctggtcgcgcctcgagttccacggcgccgacttcgggtggggcgagcccgtcatgtcgggcccggtcacgctgccggagaaggaagtcatcctgttcctggcgcacgggaaggagaggaagagcatcaacgtgctgctcggcctgccagccaccgcgatggacgccttccaagagctcatggacgagatatgattcattcgtcggtgatgacggacatggatgggttgctgctatacatacatttacgatgcagggtgcttatacattcttcaattgctcggtgttatagtacgaccgtgttaatactcgatctatgttgatgttgttaagtttagtggccatatgagaatttgctgtcgattgcaattgttctaatattaatggaaaatagtaaactttatttcctttc

SEQ ID NO: 20690 - protein, 390 aa, Zea mays subsp. mays
  misc_feature (1)..(390): Ceres Seq. ID no. 12386750
MKLTVELTGGGRRVRGGRRRLRPRRRRRPHQARPRRARPARLLRPRRQTHPRDAPHDRAGDEVQVWGLRARPGHEPLHVRRHRRHGVRQLVGGDGARRRRAHRAAVPGPKRPEGARPARAHLPPPRVRRDPRRLRHGGALRRAGAAVPLLLLRPGPAGARARACARRRRPGPLHHLRGAVGAGVARAHQGAGAGARAAHQAAVRRGRAAPVRAAAPAGLLRQRHRAHQRPCHGRRAAVRARVARGGAGAGRRADGHRRLHALGGGLLRGDAGPAVARVHAAHHHLVAPRVPRRRLRVGRARHVGPGHAAGEGSHPVPGAREGEEEHQRAARPASHRDGRLPRAHGRDMIHSSVMTDMDGLLLYIHLRCRVLIHSSIARCYSTTVLILDLC

SEQ ID NO: 20691 - protein, 295 aa, Zea mays subsp. mays
  misc_feature (1)..(295): Ceres Seq. ID no. 12386751
MPPMTAQVTRFKCGGFALGLAMNHCMFDGIGAMEFVNSWAETARGVAELTVPPFLDRSVLKARDPPVPTFPHHEFAEIPDVSDTAALYGAQELLYRSFCFDPDRLERVRGLALADGALGRCTTFEALSGLVWRARTKALGLAPEQRTKLLFAVDGRRRFAPPLPRGYFGNGIVLTNALATAGELLSAPVSRAAGLVQDAVRMVTDDYMRSAVDYFEATRARPSLASTLLITTWSRLEFHGADFGWGEPVMSGPVTLPEKEVILFLAHGKERKSINVLLGLPATAMDAFQELMDEI

SEQ ID NO: 20692 - protein, 292 aa, Zea mays subsp. mays
  misc_feature (1)..(292): Ceres Seq. ID no. 12386752
MTAQVTRFKCGGFALGLAMNHCMFDGIGAMEFVNSWAETARGVAELTVPPFLDRSVLKARDPPVPTFPHHEFAEIPDVSDTAALYGAQELLYRSFCFDPDRLERVRGLALADGALGRCTTFEALSGLVWRARTKALGLAPEQRTKLLFAVDGRRRFAPPLPRGYFGNGIVLTNALATAGELLSAPVSRAAGLVQDAVRMVTDDYMRSAVDYFEATRARPSLASTLLITTWSRLEFHGADFGWGEPVMSGPVTLPEKEVILFLAHGKERKSINVLLGLPATAMDAFQELMDEI

SEQ ID NO: 20693 - DNA, 1284 bp, Zea mays subsp. mays
  misc_feature (1)..(1284): Ceres Seq. ID no. 12386761
acgggaaaggagtacggagtaccggagacatcgtcaacgccatggccggaggaggtgcaacggtgtgcgtgaccggagccggcgggttcatcgcctcgtgggtagtgaagctcctgctctcccgcgggtacaccgtgcacggcaccgtccgccacctcagtgacgagaagacaggccacctgaagcgcctggagaatgctgccggaaaccttaggatcttcaaggctgacctgctggactacgacgccatggcagctgcggtcgtcgggtgccagggggttttccatgtggccactcctgtgccttcggaggacctgactgacccagagctacaaatgctgggtcctgctgttaccggcaccacgaatgtgctcaaagctgcctccagcgcgaacgtccagcgagtggtggtggtgtcgtccatggttgccgtcgagatcagccccaaagattggcctgaaggtaaggtccgagatgagaggtgctggtcagaccgagagttctgcaggagcattgagagctggtacccggtggctaagatcatctcagaggaggcggcgctggcgtacgggcagcaaaccgggctcgacgtggtgactatcaatccagggttggtgttcggccccatgctgcagccgacggtcaacacgaccatccagttcctcatctacttcctcaaaggaggccccgacccggtgaagaacaagctctggcacatcgtcgacgtccgcgatgtggccgacgccatgctgctgctctacgaggtgcctgaagcgaccggcagacacatctgcgcgcctcatgttatcagtgcccgcgacctgctggatctgctgaagagcatgtaccctgactacccttgcattgccaacgagagcatacttgacagagaccacccagcgccgatgacctctgacaagctgaagaagatcgggtggagctgccgaccgctggaggagacgatcgtggacaccgtcgagtgctgcctgcgggctggatttctggacgacgtgggtggggagacttcctgtcgcttccctcctcttttaaaccagatctagcctcggcgaaagcatgaattgtgattgcctatgctcttgcttatgttaccgtggacgacgagcgtcagcttttaaataaacgtcattgcatgctgttgtatttcttatattactgtggacaagcatcgatcagagcttttaaattgttaggatcacaggtgaaaaaggagacagagtttaacgtggaaaaaactctctaatttggaggagaaaaaatcacggg

SEQ ID NO: 20694 - protein, 352 aa, Zea mays subsp. mays
  misc_feature (1)..(352): Ceres Seq. ID no. 12386762
GKGVRSTGDIVNAMAGGGATVCVTGAGGFIASWVVKLLLSRGYTVHGTVRHLSDEKTGHLKRLENAAGNLRIFKADLLDYDAMAAAVVGCQGVFHVATPVPSEDLTDPELQMLGPAVTGTTNVLKAASSANVQRVVVVSSMVAVEISPKDWPEGKVRDERCWSDREFCRSIESWYPVAKIISEEAALAYGQQTGLDVVTINPGLVFGPMLQPTVNTTIQFLIYFLKGGPDPVKNKLWHIVDVRDVADAMLLLYEVPEATGRHICAPHVISARDLLDLLKSMYPDYPCIANESILDRDHPAPMTSDKLKKIGWSCRPLEETIVDTVECCLRAGFLDDVGGETSCRFPPLLNQI

SEQ ID NO: 20695 - protein, 339 aa, Zea mays subsp. mays
  misc_feature (1)..(339): Ceres Seq. ID no. 12386763
MAGGGATVCVTGAGGFIASWVVKLLLSRGYTVHGTVRHLSDEKTGHLKRLENAAGNLRIFKADLLDYDAMAAAVVGCQGVFHVATPVPSEDLTDPELQMLGPAVTGTTNVLKAASSANVQRVVVVSSMVAVEISPKDWPEGKVRDERCWSDREFCRSIESWYPVAKIISEEAALAYGQQTGLDVVTINPGLVFGPMLQPTVNTTIQFLIYFLKGGPDPVKNKLWHIVDVRDVADAMLLLYEVPEATGRHICAPHVISARDLLDLLKSMYPDYPCIANESILDRDHPAPMTSDKLKKIGWSCRPLEETIVDTVECCLRAGFLDDVGGETSCRFPPLLNQI

SEQ ID NO: 20696 - protein, 270 aa, Zea mays subsp. mays
  misc_feature (1)..(270): Ceres Seq. ID no. 12386764
MAAAVVGCQGVFHVATPVPSEDLTDPELQMLGPAVTGTTNVLKAASSANVQRVVVVSSMVAVEISPKDWPEGKVRDERCWSDREFCRSIESWYPVAKIISEEAALAYGQQTGLDVVTINPGLVFGPMLQPTVNTTIQFLIYFLKGGPDPVKNKLWHIVDVRDVADAMLLLYEVPEATGRHICAPHVISARDLLDLLKSMYPDYPCIANESILDRDHPAPMTSDKLKKIGWSCRPLEETIVDTVECCLRAGFLDDVGGETSCRFPPLLNQI

SEQ ID NO: 20697 - DNA, 886 bp, Zea mays subsp. mays
  misc_feature (1)..(886): Ceres Seq. ID no. 12386765
tttctatggaggaacaagaggatctctggtggggtgctcgcaggcgcaactgccttctggctgctgtttgaggtcatggattaccacctcctcaccctgctatgccactgcctcatcctcaccctggccatcctgttcctctggtccaatgccacgactttcatcaacaagtctcctcctaacatccccgaggtgaagatcccagatgacctggctgtgaatgttgcacgttccctgagatatgagatcaacaggggttttgctaccttgagggagattggccaaggccatgacctcaagaaatttctgattgtgattgcaggactgtggatcctttctgttcttgggagctgctgcaatttcctcaccttgtcttacatagtttttatggtactgtacactgtaccggtcctgtatgagaaacatgaggataaggttgatgcttttggtgagaaggccatggtcgagctgaagaagtactacgccatcttcgacgagaaatgtctatcaaagattccgaagggcccattaaaagacaagaagcaacattagaagcgtagaatcagataagggtctgcggtgatttatcatctcttttgaccattactcgtcggttttggaggatggatgtgattccatgtctaaatacctggacgtgctctagtgttttagtgtggtcagtatcaatgttctaaattatctgagattacgctgaatcatgttctgaagtccacgtttaactttgctctccctatcctttggaagtggcaatttcctaaatgtctgtaatatatctagtctagtgctatttcttaatctgacctagcgtcatgatgaaccttcttggatatttatttatatgtgccaccggacatggtaactatag

SEQ ID NO: 20698 - protein, 183 aa, Zea mays subsp. mays
  misc_feature (1)..(183): Ceres Seq. ID no. 12386766
FLWRNKRISGGVLAGATAFWLLFEVMDYHLLTLLCHCLILTLAILFLWSNATTFINKSPPNIPEVKIPDDLAVNVARSLRYEINRGFATLREIGQGHDLKKFLIVIAGLWILSVLGSCCNFLTLSYIVFMVLYTVPVLYEKHEDKVDAFGEKAMVELKKYYAIFDEKCLSKIPKGPLKDKKQH

SEQ ID NO: 20699 - protein, 158 aa, Zea mays subsp. mays
  misc_feature (1)..(158): Ceres Seq. ID no. 12386767
MDYHLLTLLCHCLILTLAILFLWSNATTFINKSPPNIPEVKIPDDLAVNVARSLRYEINRGFATLREIGQGHDLKKFLIVIAGLWILSVLGSCCNFLTLSYIVFMVLYTVPVLYEKHEDKVDAFGEKAMVELKKYYAIFDEKCLSKIPKGPLKDKKQH

SEQ ID NO: 20700 - DNA, 1398 bp, Zea mays subsp. mays
  misc_feature (1)..(1398): Ceres Seq. ID no. 12386788
ctcgatcatctcccatcacttcctagctagtcgttcttactcaacacattattcgatcttgagtggaagcaaagcaggcagacatggcggcggctactgcaccaaagacgatgccgtcgtccgttttcgccgccgcactgctgctcctagccgcggcggcgtgccaggccagcccttactaccctctggagctagggtactaccgttacacttgtccccaggccgaggctatcgtcaaggccagcatggagaaggccatcgctcagaaccctggcaatggcgccgccgtcatccgcatgctcttccatgactgcttcgtcgagggctgcgacgcttccgtgcttctcgacccgaccccgttcagcccgacgccggagaagctggccgcacccaacaacccgagcctgcgcgggttcgagctgatcgacgccatcaaggacgccctcgaggccgcgtgccccggggtcgtctcctgcgccgacatcatcgccttcgcggcgcgcgacgcgtcctgcttcctgagccagggcaaggtctccttcgacatgccgtcgggccgcctcgacggcaccttctccaacgcctccgagtcggtcaagttcctcgtcccgcccacgtccaacctcagcgacctcgcctccagcttcgccgtcaagggcatgtcgctggaggacctggtcgtcctctccggcgcgcacaccgtcggccgctcccactgctcctccttcgtctccgaccgcctcgacgtcccctccgacatcaaccctgcgctggccgccttcctcaggacccgctgcccgcccaacacgaccaccagcgacgaccccaccgtgatgcaggacgtggtcacgcccaacgccatggacatccagtactacaagaacgtgctctcgcacaccgtgctcttcacctccgacgccgcgctcctcacgtcgccggagacggccaagttggtgctggacaacgccaagatccccgggtggtgggaggacaagttcgagaaggccatggtcaagatggctagcctcgaagtcaagactgggcaccaaggacaagtcaggaagaactgcagggcgatcaatcactactagctaacagctggttgttgatcagcttgcaccactgcaatgtggaagaccttcagaaaagaaaaactgcacagtacgggtgatggatggtgaaggatcaatcggttcagttgtgttggtgtttaatttgttcatgacctgcaagagtgtggtttgttgtgtatgatatggcaactgttgttattatctttccatttgcctttgatttgttgaaaacctggagaggtttgtatctgctattattctttggtttgtgtttctatatttggattataaaataaagttgaatatataagtgttcagttctttt

SEQ ID NO: 20701 - protein, 335 aa, Zea mays subsp. mays
  misc_feature (1)..(335): Ceres Seq. ID no. 12386789
MAAATAPKTMPSSVFAAALLLLAAAACQASPYYPLELGYYRYTCPQAEAIVKASMEKAIAQNPGNGAAVIRMLFHDCFVEGCDASVLLDPTPFSPTPEKLAAPNNPSLRGFELIDAIKDALEAACPGVVSCADIIAFAARDASCFLSQGKVSFDMPSGRLDGTFSNASESVKFLVPPTSNLSDLASSFAVKGMSLEDLVVLSGAHTVGRSHCSSFVSDRLDVPSDINPALAAFLRTRCPPNTTTSDDPTVMQDVVTPNAMDIQYYKNVLSHTVLFTSDAALLTSPETAKLVLDNAKIPGWWEDKFEKAMVKMASLEVKTGHQGQVRKNCRAINHY

SEQ ID NO: 20702 - protein, 326 aa, Zea mays subsp. mays
  misc_feature (1)..(326): Ceres Seq. ID no. 12386790
MPSSVFAAALLLLAAAACQASPYYPLELGYYRYTCPQAEAIVKASMEKAIAQNPGNGAAVIRMLFHDCFVEGCDASVLLDPTPFSPTPEKLAAPNNPSLRGFELIDAIKDALEAACPGVVSCADIIAFAARDASCFLSQGKVSFDMPSGRLDGTFSNASESVKFLVPPTSNLSDLASSFAVKGMSLEDLVVLSGAHTVGRSHCSSFVSDRLDVPSDINPALAAFLRTRCPPNTTTSDDPTVMQDVVTPNAMDIQYYKNVLSHTVLFTSDAALLTSPETAKLVLDNAKIPGWWEDKFEKAMVKMASLEVKTGHQGQVRKNCRAINHY

SEQ ID NO: 20703 - protein, 281 aa, Zea mays subsp. mays
  misc_feature (1)..(281): Ceres Seq. ID no. 12386791
MEKAIAQNPGNGAAVIRMLFHDCFVEGCDASVLLDPTPFSPTPEKLAAPNNPSLRGFELIDAIKDALEAACPGVVSCADIIAFAARDASCFLSQGKVSFDMPSGRLDGTFSNASESVKFLVPPTSNLSDLASSFAVKGMSLEDLVVLSGAHTVGRSHCSSFVSDRLDVPSDINPALAAFLRTRCPPNTTTSDDPTVMQDVVTPNAMDIQYYKNVLSHTVLFTSDAALLTSPETAKLVLDNAKIPGWWEDKFEKAMVKMASLEVKTGHQGQVRKNCRAINHY

SEQ ID NO: 20704 - DNA, 1074 bp, Zea mays subsp. mays
  misc_feature (1)..(1074): Ceres Seq. ID no. 12386832
atattaatggagctgctttgcacgggcggcagacagccgtagacagagcagtgacggtcgtcgtacacagatcacgatgctgctcccacactcttcatcagcctctgcaactgctaccactcgtgggctagcactagcagcagcagcagcagcaccgccgcgtccgaccgctcgcccccggcgcgcgcgcctcctgcctccacgcgcgcgggccgagacgcatgcgacgggcgttggcgccgaccgcgcggccgaggcgcttctccaaagcgggctgcgccgtgagtcgctgccgcggcacgtcgcggtggtgatggacgggaactcgcggtgggcgcgcgagcgggggctgacgcccgcggacggccacaaggccggcggccgcaacctggagcgggtcgttgcgctgtcgcgcgcctggggcatccgcgcgctcaccgccttcgtctgctcccgcgagaacttgagccgccccaaggccgaggtcgactacatgatgggcttgtccgagtggctgataggcgacaacatcgacaagctctcgaggcaggggatccggctgcaggtgatcggcgacgccgcgaagatgccagcctctntgcggagcgcagcggcgcaggccgacgaggccacgaggcacaactcgcagctgcacgtgatgctggccatctgctacagcgggcgatgggacatggtccaggcgtgccgggagctggcccgggaggcgcaggcgaaccggctcagtccggacgacatcgacgagtcggtcatcgccggcaagctcgcgacgagcgccgccggcgagttctcctgtcccgacctggtcatcagaaccagcggcgagatgaggctcagcaacttcttgctgtggcagtcggcgtactcggagttgttcttcaccggcaagatgtggcctgactttggggaggctgagtacctggaagcgttgcgctccttccagggcagagaccgccgcttcggccaatcaaaattactctaacagtctaactcgatggagccacgaagtggagcgccagtatatgtgaagagttatggattgttcggttagctttc

SEQ ID NO: 20705 - protein, 307 aa, Zea mays subsp. mays
  misc_feature (1)..(307): Ceres Seq. ID no. 12386833
  misc_feature (175)..(175): Xaa is any aa, unknown or other
MLLPHSSSASATATTRGLALAAAAAAPPRPTARPRRARLLPPRARAETHATGVGADRAAEALLQSGLRRESLPRHVAVVMDGNSRWARERGLTPADGHKAGGRNLERVVALSRAWGIRALTAFVCSRENLSRPKAEVDYMMGLSEWLIGDNIDKLSRQGIRLQVIGDAAKMPASXRSAAAQADEATRHNSQLHVMLAICYSGRWDMVQACRELAREAQANRLSPDDIDESVIAGKLATSAAGEFSCPDLVIRTSGEMRLSNFLLWQSAYSELFFTGKMWPDFGEAEYLEALRSFQGRDRRFGQSKLL

SEQ ID NO: 20706 - protein, 228 aa, Zea mays subsp. mays
  misc_feature (1)..(228): Ceres Seq. ID no. 12386834
  misc_feature (96)..(96): Xaa is any aa, unknown or other
MDGNSRWARERGLTPADGHKAGGRNLERVVALSRAWGIRALTAFVCSRENLSRPKAEVDYMMGLSEWLIGDNIDKLSRQGIRLQVIGDAAKMPASXRSAAAQADEATRHNSQLHVMLAICYSGRWDMVQACRELAREAQANRLSPDDIDESVIAGKLATSAAGEFSCPDLVIRTSGEMRLSNFLLWQSAYSELFFTGKMWPDFGEAEYLEALRSFQGRDRRFGQSKLL

SEQ ID NO: 20707 - protein, 168 aa, Zea mays subsp. mays
  misc_feature (1)..(168): Ceres Seq. ID no. 12386835
  misc_feature (36)..(36): Xaa is any aa, unknown or other
MMGLSEWLIGDNIDKLSRQGIRLQVIGDAAKMPASXRSAAAQADEATRHNSQLHVMLAICYSGRWDMVQACRELAREAQANRLSPDDIDESVIAGKLATSAAGEFSCPDLVIRTSGEMRLSNFLLWQSAYSELFFTGKMWPDFGEAEYLEALRSFQGRDRRFGQSKLL

SEQ ID NO: 20708 - DNA, 1228 bp, Zea mays subsp. mays
  misc_feature (1)..(1228): Ceres Seq. ID no. 12386860
aaatctccatcaccatcgccttcaactcaagcgactacagcaaacttgctgagactgcagctgatcatggggtcgacgacatggttggcggccgtgctggcggcactcgtggtcgccgcctcctcaacggtggcatcacacgcctcgctgccggggaaacttgaggtcggtttctacgagcactcgtgcccacaggcggaggacatcgtgcgcaacgccgtccgccgcggcatagcccgcgagcccggcgtcggcgcggggctcatccgcatgcacttccacgactgcttcgtccggggctgcgacggctccatcctcatcaactccacgccgggcaacaaggccgagaaggactccgtggccaacaaccccagcatgcgcggcttcgacgtcatcgacgacgccaaggccgtcctcgaggcgcactgcccgcgcaccgtctcctgcgctgatatcgtcgcgctcgcggcccgtgacagcacctacctcgccggcggcctggactacaaggtcccgtcgggccgccgtgacggccgcgtgtccaaagaggaggaggtgctcgacaacaatgtccccgccccgactgacgaggtcgacgagctcatcgagagcttcaagcgcaaggggctcaacgccgacgacatggtcacgctctctggcgcgcacaccatcggccgctcccactgctcctccttcacgcagcggctctacaacttcagcgggcagctggggcagacagacccgtccctcgaccccgcctacgccgggcacctcaaggcgcggtgcccttggccgtccagcgacgaccagatggatcccacggtggttccgcttgacccagtcacgccggcgaccttcgacaaccagtactacaagaacgtgctggcgcacaaggtcctgttcatctccgacaacacactgctcgacaacccatggacggccggaatggtccacttcaacgccgcagtcgagaaggcatggcaggtcaagttcgccaaggccatggttaagatgggcaaggtccaggtgctcaccggcgaggagggagagatcagggagaagtgcttcgccgtcaacccacactactagtcaagtttaattatctaattaccccgcgcgtgttatgtttgtttatacgttccatacatcaacattatgtagagtgtttttcgttctcttcaaggctgtgaaatcaaacaagtttatcaagtaaaatggtgttatttgc

SEQ ID NO: 20709 - protein, 362 aa, Zea mays subsp. mays
  misc_feature (1)..(362): Ceres Seq. ID no. 12386861
KSPSPSPSTQATTANLLRLQLIMGSTTWLAAVLAALVVAASSTVASHASLPGKLEVGFYEHSCPQAEDIVRNAVRRGIAREPGVGAGLIRMHFHDCFVRGCDGSILINSTPGNKAEKDSVANNPSMRGFDVIDDAKAVLEAHCPRTVSCADIVALAARDSTYLAGGLDYKVPSGRRDGRVSKEEEVLDNNVPAPTDEVDELIESFKRKGLNADDMVTLSGAHTIGRSHCSSFTQRLYNFSGQLGQTDPSLDPAYAGHLKARCPWPSSDDQMDPTVVPLDPVTPATFDNQYYKNVLAHKVLFISDNTLLDNPWTAGMVHFNAAVEKAWQVKFAKAMVKMGKVQVLTGEEGEIREKCFAVNPHY

SEQ ID NO: 20710 - protein, 340 aa, Zea mays subsp. mays
  misc_feature (1)..(340): Ceres Seq. ID no. 12386862
MGSTTWLAAVLAALVVAASSTVASHASLPGKLEVGFYEHSCPQAEDIVRNAVRRGIAREPGVGAGLIRMHFHDCFVRGCDGSILINSTPGNKAEKDSVANNPSMRGFDVIDDAKAVLEAHCPRTVSCADIVALAARDSTYLAGGLDYKVPSGRRDGRVSKEEEVLDNNVPAPTDEVDELIESFKRKGLNADDMVTLSGAHTIGRSHCSSFTQRLYNFSGQLGQTDPSLDPAYAGHLKARCPWPSSDDQMDPTVVPLDPVTPATFDNQYYKNVLAHKVLFISDNTLLDNPWTAGMVHFNAAVEKAWQVKFAKAMVKMGKVQVLTGEEGEIREKCFAVNPHY

SEQ ID NO: 20711 - protein, 272 aa, Zea mays subsp. mays
  misc_feature (1)..(272): Ceres Seq. ID no. 12386863
MHFHDCFVRGCDGSILINSTPGNKAEKDSVANNPSMRGFDVIDDAKAVLEAHCPRTVSCADIVALAARDSTYLAGGLDYKVPSGRRDGRVSKEEEVLDNNVPAPTDEVDELIESFKRKGLNADDMVTLSGAHTIGRSHCSSFTQRLYNFSGQLGQTDPSLDPAYAGHLKARCPWPSSDDQMDPTVVPLDPVTPATFDNQYYKNVLAHKVLFISDNTLLDNPWTAGMVHFNAAVEKAWQVKFAKAMVKMGKVQVLTGEEGEIREKCFAVNPHY

SEQ ID NO: 20712 - DNA, 1140 bp, Zea mays subsp. mays
  misc_feature (1)..(1140): Ceres Seq. ID no. 12386869
ccaccaacccaacctctgacgatcaccatcgccgctagcctccaccaccaacttcccatcgcctccccctcatctccccacactcctgacctcacctctccgaactgcagcacctcccctcccgccacccacacgtgctcccatggccgccaccgcgatctcagtccgcctccacccaaccgccgcgcgccatgtggcctccgcccgccgcgcccgcctcggggccgtccgcgcgcagtccgcgccggcggcggcggcggcggcgctgacgcaggacgacctcaagcggctggcggcggtgcgcgccgtcgagcaggtgaagagcgggatggtgctcgggctcgggacgggctccacggccgccttcgccgtcgccgagatcggcgcgctcctggccgcgggcaagctcgagaagatcgtcggcgtgcccacatccaagcgcaccttcgagcaggcgcagtcgctcggcatcccgctctccacgctcgacgacaacccgctcatcgacctcgccatcgacggtgccgacgaggttgaccctgacctcaaccttgtgaaagggcggggtggtgctcttcttcgtgagaagatggttgaggcagcatcggacaagtttattgttattgttgacgagacaaaactagttgatgggttaggaggtagtggtctagccatgccagtggaagttgtgcagttctgctggaagtacaaccttgtaagattgcaggaactgtttaaggaggaaggagtcgaggcaaagctaaggtttgaaggcgacaagccctatgttactgacaactcaaactacatcgtcgatttatacttcaagacgccaatcaaggatgcgttggcagcaggacaggaaattgcagctctggaaggagttgttgaccatgggttgttcttgaacatggcgagttcagtgatcattgctggaacggacggtgtcagtgtcaaaacgaagtgagtttttgagttgctttgttgtttgtgttgagttttacaatttaatgtacaagctattggtgtaaaagcagctgataagatgcttcaataaaggtgttcccccaatgtggggattgactatcacttattgtgggataaaaagccattttaataggttgaaacttctgttgattc

SEQ ID NO: 20713 - protein, 274 aa, Zea mays subsp. mays
  misc_feature (1)..(274): Ceres Seq. ID no. 12386870
MAATAISVRLHPTAARHVASARRARLGAVRAQSAPAAAAAALTQDDLKRLAAVRAVEQVKSGMVLGLGTGSTAAFAVAEIGALLAAGKLEKIVGVPTSKRTFEQAQSLGIPLSTLDDNPLIDLAIDGADEVDPDLNLVKGRGGALLREKMVEAASDKFIVIVDETKLVDGLGGSGLAMPVEVVQFCWKYNLVRLQELFKEEGVEAKLRFEGDKPYVTDNSNYIVDLYFKTPIKDALAAGQEIAALEGVVDHGLFLNMASSVIIAGTDGVSVKTK

SEQ ID NO: 20714 - protein, 212 aa, Zea mays subsp. mays
  misc_feature (1)..(212): Ceres Seq. ID no. 12386871
MVLGLGTGSTAAFAVAEIGALLAAGKLEKIVGVPTSKRTFEQAQSLGIPLSTLDDNPLIDLAIDGADEVDPDLNLVKGRGGALLREKMVEAASDKFIVIVDETKLVDGLGGSGLAMPVEVVQFCWKYNLVRLQELFKEEGVEAKLRFEGDKPYVTDNSNYIVDLYFKTPIKDALAAGQEIAALEGVVDHGLFLNMASSVIIAGTDGVSVKTK

SEQ ID NO: 20715 - protein, 178 aa, Zea mays subsp. mays
  misc_feature (1)..(178): Ceres Seq. ID no. 12386872
PPTQPLTITIAASLHHQLPIASPSSPHTPDLTSPNCSTSPPATHTCSHGRHRDLSPPPPNRRAPCGLRPPRPPRGRPRAVRAGGGGGGADAGRPQAAGGGARRRAGEERDGARARDGLHGRLRRRRDRRAPGRGQAREDRRRAHIQAHLRAGAVARHPALHARRQPAHRPRHRRCRRG

SEQ ID NO: 20716 - DNA, 1850 bp, Zea mays subsp. mays
  misc_feature (1)..(1850): Ceres Seq. ID no. 12386893
aaggagcagctgggaaacggagcgccacaagcccacaactctcgcgcaggcttctctcccatctccgcccttcccgaagcagcacggtgcaggccgcggacccgcggtttctccacagaatcccgctccacgcacgtcgcccccgtcgccggcgaggcggctgtgctgctgcgtactcccctggttccaactctgaaccggccaccctctcctgctccgcgacctcgagtaactttttgagtaccagtgatgcaaagggacacaagctctagcgatgtttctgcttctcatgtaggacgtgtaagacgtcgcaaacatccaactgaggctaccacagatgggaatagagctaatggacagccattgcttgtcaatgatcagaacaaatataaatcaatgcttacccgtacgtattctacagtatggatgattggaggctttgcctttattatttatatgggtcatctatatatctgggctatggtggttgtgattcaaatatacatggcaagagaacttttcaatttactcagaaaatccagtgaagagaaacaactgccagggttcagggtcctgaattggcacttctttttcacggcaatgctgtacacttatgggcgctttcttagtcgtcagctggtgaatacagtgacttcagatcacttgctttataaggtcgtcagtggcctaattaagtatcagatgtttatctgctatttcctttatattgcagggtttgtatggtttattttgactctcaagaaaaagacatacaagtatcagttcaaacagtatgcctggacacacatgatacttttaacagtttttgcacagtctgctttcactgtggcaaacatatttgaagggatattctggtttcttttgcctgcttcacttattgtgatcaacgatatttttgcttatttatttgggttctttcttgggagaacaccattaatcaagttgtctccaaagaaaacttgggaaggttttattggtgcatcagtgacaactatcatctctgcgtttctgttagcaaatgtaatgggccattcgcaatggttgacatgcccaagaaaggatctgttgactgggtggctttattgtgatcctggtccaatgtttaagccagagcattactcattgggagagtgggtgccgcattggttcccatggaaagaactagctattatgcctgtgcagtggcatgctttagccctaggtttatttgcatcaataatagcaccatttggaggattttttgcgagtggcttcaagagggcttttaaaattaaggattttggtgacagcatacctgggcatggtggaattactgacagaatggattgtcaaatggttatggcagtgtttgcatacatataccaccaatcattcattgcacctcagaacttctctgttgagataatcttggatcagattataagaaacctaacctatgaggagcaaaaatatgtatatgaacaacttggggaaatgttccgtgagaggcaattggctcattggctgaaagctgagagttagcgtgcttatgaaatgcatgatatgttgtgcatttagttcatgtatggcagcatgccagcatgttatgaatgtatacggagcccttgcccaaaccattgtatagaatggtagaatggagagaatgaatgggttgtaggtgctttattcactctctagtctccactgacgctgcctataattcactccccctgtcatcgtttctgcagtctgtgtaaaagggaacctggaaagttttattctttccacttcgtggtgctgggctcagatcaaatattcgaggattcacaatatatccccgatgttttacc

SEQ ID NO: 20717 - protein, 430 aa, Zea mays subsp. mays
  misc_feature (1)..(430): Ceres Seq. ID no. 12386894
MQRDTSSSDVSASHVGRVRRRKHPTEATTDGNRANGQPLLVNDQNKYKSMLTRTYSTVWMIGGFAFIIYMGHLYIWAMVVVIQIYMARELFNLLRKSSEEKQLPGFRVLNWHFFFTAMLYTYGRFLSRQLVNTVTSDHLLYKVVSGLIKYQMFICYFLYIAGFVWFILTLKKKTYKYQFKQYAWTHMILLTVFAQSAFTVANIFEGIFWFLLPASLIVINDIFAYLFGFFLGRTPLIKLSPKKTWEGFIGASVTTIISAFLLANVMGHSQWLTCPRKDLLTGWLYCDPGPMFKPEHYSLGEWVPHWFPWKELAIMPVQWHALALGLFASIIAPFGGFFASGFKRAFKIKDFGDSIPGHGGITDRMDCQMVMAVFAYIYHQSFIAPQNFSVEIILDQIIRNLTYEEQKYVYEQLGEMFRERQLAHWLKAES

SEQ ID NO: 20718 - protein, 381 aa, Zea mays subsp. mays
  misc_feature (1)..(381): Ceres Seq. ID no. 12386895
MLTRTYSTVWMIGGFAFIIYMGHLYIWAMVVVIQIYMARELFNLLRKSSEEKQLPGFRVLNWHFFFTAMLYTYGRFLSRQLVNTVTSDHLLYKVVSGLIKYQMFICYFLYIAGFVWFILTLKKKTYKYQFKQYAWTHMILLTVFAQSAFTVANIFEGIFWFLLPASLIVINDIFAYLFGFFLGRTPLIKLSPKKTWEGFIGASVTTIISAFLLANVMGHSQWLTCPRKDLLTGWLYCDPGPMFKPEHYSLGEWVPHWFPWKELAIMPVQWHALALGLFASIIAPFGGFFASGFKRAFKIKDFGDSIPGHGGITDRMDCQMVMAVFAYIYHQSFIAPQNFSVEIILDQIIRNLTYEEQKYVYEQLGEMFRERQLAHWLKAES

SEQ ID NO: 20719 - protein, 371 aa, Zea mays subsp. mays
  misc_feature (1)..(371): Ceres Seq. ID no. 12386896
MIGGFAFIIYMGHLYIWAMVVVIQIYMARELFNLLRKSSEEKQLPGFRVLNWHFFFTAMLYTYGRFLSRQLVNTVTSDHLLYKVVSGLIKYQMFICYFLYIAGFVWFILTLKKKTYKYQFKQYAWTHMILLTVFAQSAFTVANIFEGIFWFLLPASLIVINDIFAYLFGFFLGRTPLIKLSPKKTWEGFIGASVTTIISAFLLANVMGHSQWLTCPRKDLLTGWLYCDPGPMFKPEHYSLGEWVPHWFPWKELAIMPVQWHALALGLFASIIAPFGGFFASGFKRAFKIKDFGDSIPGHGGITDRMDCQMVMAVFAYIYHQSFIAPQNFSVEIILDQIIRNLTYEEQKYVYEQLGEMFRERQLAHWLKAES

SEQ ID NO: 20720 - DNA, 1192 bp, Zea mays subsp. mays
  misc_feature (1)..(1192): Ceres Seq. ID no. 12386906
gcacgagaccattacctagaacatcctaatcgaaaaacactcgaacacttccaaagttctagcccctctcgtgagtcctgtccaaataatggcccacgcgcagcagtgtcctcctgcttctgacggcgctcgccgcagccacgcctgtgccgtcagcggcgaccaggaagctcatgttcctcgtccagccacagccgaacctcctcacgtaccacaacggcgccgtgctgagcggcgacatccccgtctccatcctctggtatggccgcttcacgccggcgcagaaggctgtggtctccgacttcctcctcgccctctccggcgccgcgccgccgcaggggtcgccgtccgttgcccagtggtggagcagcgtcaaccagctctacctctccaaggcggcggcggcggccgtcagcaagaacggcgcgcacggcggcggcgccaagagcgcgcgggtggtgctgtccgggcacggcctccgacgagggctgctcgctggggaagagcctgaagctgtcgcagcttccggcgctggcggccgcggcacgccccgcgaccgcggccgcgaggggcggcgtcgcgctggtgctcacggcgcgggacgtggccgtggagggcttctgcacgagccggtgcgggcaccacgggtcgtacggcggcggcgggcgcgcggcgtacgcgtgggtgggcgacgccgccgaccagtgcccgggccagtgcgcgtggccgttccaccagccggcgtacggcccgcaggcgccgccgctggtgccgcccagcggggacgcgggcacggacggcgtggtgatcaacgtggccagcatggtcgccggcgcggtcaccaacccgttcggcgacggcttctaccagggcgaccgcggctcgccgctggaggccgccacggcgtgcgcgggcgtgtacggcagcggcgcgtaccccgggtacgccgggcagctgctcgtggaccgggccacgggcgccagctacaacgcgcacggtgcgcgcgggaggaagtacctgctcccggcgctgttcgaccccgacacgtcggcgtgctccacgctggtgtagtgtagccgatctcacaggctaataaatgttggtatatgtaaatactgaacagtacacagtatgtatcatcgttcgtgacgggcagggcagtgctaaataaacgacctgtgcttgaagctgc

SEQ ID NO: 20721 - protein, 300 aa, Zea mays subsp. mays
  misc_feature (1)..(300): Ceres Seq. ID no. 12386907
MFLVQPQPNLLTYHNGAVLSGDIPVSILWYGRFTPAQKAVVSDFLLALSGAAPPQGSPSVAQWWSSVNQLYLSKAAAAAVSKNGAHGGGAKSARVVLSGHGLRRGLLAGEEPEAVAASGAGGRGTPRDRGREGRRRAGAHGAGRGRGGLLHEPVRAPRVVRRRRARGVRVGGRRRRPVPGPVRVAVPPAGVRPAGAAAGAAQRGRGHGRRGDQRGQHGRRRGHQPVRRRLLPGRPRLAAGGRHGVRGRVRQRRVPRVRRAAARGPGHGRQLQRARCAREEVPAPGAVRPRHVGVLHAGVV

SEQ ID NO: 20722 - protein, 269 aa, Zea mays subsp. mays
  misc_feature (1)..(269): Ceres Seq. ID no. 12386908
MAASRRRRRLWSPTSSSPSPAPRRRRGRRPLPSGGAASTSSTSPRRRRRPSARTARTAAAPRARGWCCPGTASDEGCSLGKSLKLSQLPALAAAARPATAAARGGVALVLTARDVAVEGFCTSRCGHHGSYGGGGRAAYAWVGDAADQCPGQCAWPFHQPAYGPQAPPLVPPSGDAGTDGVVINVASMVAGAVTNPFGDGFYQGDRGSPLEAATACAGVYGSGAYPGYAGQLLVDRATGASYNAHGARGRKYLLPALFDPDTSACSTLV

SEQ ID NO: 20723 - DNA, 1430 bp, Zea mays subsp. mays
  misc_feature (1)..(1430): Ceres Seq. ID no. 12386925
gctctaaaaagtccaactccaaacctagactagaggcccctcaccgaggcgacgacgcacgcagccgagcgccactccgccgccgccgcctcctcctcgtccccgtcccgcgccgcaacggcctcccccaccctgcgcccgccggccgcccctcgacgggtcgagcggagcggggaacccatccgtccggccgttggtcgctctcgctcgtctggtgttggttgtaatgagaagctggacctgttaggccgaagagttctcgttgcaagtctgtgcctcagcgatgggttcaggcaacttgatcgtgaagaaggtggtaaagcacagctcctttgatctggacatacagcttgataagagttggatggaggatgttacctgcccgatctgccttgattaccctcacaatgcagtgctactgaggtgcacgtcttatgagaagggatgcaggccgtttgtttgcgatacagaccagacccgctcaaactgtcttgagaggtttaaatctgcatatgaactgccttccaatgtgaaagtttcatctttagccgtgcctcctcttgatagcattattcatattgtgccgtctaacgcaaacaaccgccccagctgccctttgtgtagaggtgatgttattgggtgggttgttattggtgaggctcggctgcatcttaatcagaagaaaaggtgctgtgaagaggattgctgctcgtttgttggcaacttcaatgagcttcagaagcacacgcaacaaaagcatcctgattcacgcccttcagagatcgatcctgctaggcaagttgattgggagaatttccagcaatcttctgatatcgtagatgtcttgagcacaatacatgcacaagttccaaacgggattgttctgggagactatgtgattgagtatggggatgatgacactggtgaggactatgaagttttccgcagggtcaggacgaactggtggtcatgtattttctgcagggcgttttcaagatcttcaagaagtcgtagaagatccagagcaagggaaagaataggcagtggaaggaggaatggcaaccaggttaatctagaaaattttaacctcgtggttccgacacaacctgttgaattaagggaaattaggtttgatgaaattgatgatgaatacatagtcacaggggccattcctagtatcgcagcaccgggaagaatggctagtttccattacagggatacaagatatggacgttgatgcatagggtctgcagtaaaaaaaggaatagatgttatgcaatttaccgatcaacgtaacgttgtaactccgctcatttggattccttccacctgccctcggtaggtgctgccgcagttcaaacttatctgtgcataaaaagtagcaacagaacctcgctgttcgtttgaatcaggcctcgtcattctagttc

SEQ ID NO: 20724 - protein, 317 aa, Zea mays subsp. mays
  misc_feature (1)..(317): Ceres Seq. ID no. 12386926
MGSGNLIVKKVVKHSSFDLDIQLDKSWMEDVTCPICLDYPHNAVLLRCTSYEKGCRPFVCDTDQTRSNCLERFKSAYELPSNVKVSSLAVPPLDSIIHIVPSNANNRPSCPLCRGDVIGWVVIGEARLHLNQKKRCCEEDCCSFVGNFNELQKHTQQKHPDSRPSEIDPARQVDWENFQQSSDIVDVLSTIHAQVPNGIVLGDYVIEYGDDDTGEDYEVFRRVRTNWWSCIFCRAFSRSSRSRRRSRARERIGSGRRNGNQVNLENFNLVVPTQPVELREIRFDEIDDEYIVTGAIPSIAAPGRMASFHYRDTRYGR

SEQ ID NO: 20725 - protein, 290 aa, Zea mays subsp. mays
  misc_feature (1)..(290): Ceres Seq. ID no. 12386927
MEDVTCPICLDYPHNAVLLRCTSYEKGCRPFVCDTDQTRSNCLERFKSAYELPSNVKVSSLAVPPLDSIIHIVPSNANNRPSCPLCRGDVIGWVVIGEARLHLNQKKRCCEEDCCSFVGNFNELQKHTQQKHPDSRPSEIDPARQVDWENFQQSSDIVDVLSTIHAQVPNGIVLGDYVIEYGDDDTGEDYEVFRRVRTNWWSCIFCRAFSRSSRSRRRSRARERIGSGRRNGNQVNLENFNLVVPTQPVELREIRFDEIDDEYIVTGAIPSIAAPGRMASFHYRDTRYGR

SEQ ID NO: 20726 - DNA, 1756 bp, Zea mays subsp. mays
  misc_feature (1)..(1756): Ceres Seq. ID no. 12386932
aagacaggaaggagctatccgcgtctgcctcctcccggccctctgctccctcccagagtctccgctagccaagcccccacatggcaccaccgcccgcgggcctcgtgctcgtggctctgctcgcgctggtcctggcgccggcgccggcgcgcggggacaagccggcgaggggcggggcgtccagctccatcgccgccggggcggatacggagccgtcctccgccgtcttcccgctctacggcgacgtctacccgcacgggttgtactacgtggctatgaacatcggcaacccacccaagccatacttcctggacgtggactccggcagcgacctcacctggctgcagtgcgacgcgccctgcaggagctgcaacgaggtgccgcacccgctgtaccggccgacaaagagcaagctggtgccgtgcgtgcaccggctgtgcgcttccctgcacaacgggctggccggcgggaagcacagatgcgactcgccgcacgagcaatgcgactacgtgatcaagtacgcagaccaggggtcgtccaccggcgtgctcatcaacgacagcttcgcgctccgcctcaccaacggctctgtcgctcgccccagcgtcgcgttcgggtgtggttacgaccagcaggtccgcagcggcgacctgagttggcctaccgacggcgtgctggggctcgggaccggctcagtcagcttgctctcgcagctcaaacagcgtggcgtcaccaagaacgtggtcggccactgcctcagcctgaggggcggcgggttcctcttcttcggtgacgatctcgtgccttaccaacgcgcgacatggactcccatggctcgcagcgcgttccaactactactcccctggctccgcaagcctgtacttcggcgaccggtcactgggcgtgagactgacgaaagtggtcttcgacagtggaagctcgttcacctacttcgctgcaaagccataccaagcacttgtcaccgctcttaaggatggcctgagcaggacgctggaagaggaatccgacccttcgctgccactctgctggaaagggcaggaaccattcaagtctgtgcttgatgtgaggaaggagttcaagtctttggtgctcaactttgccagtggcaagaagacgctcatggagatccctcctgagaactacctcattgtcacagaaaacgggaatgcctgtctgggcatcctcaacggatccgagatcggtctcaaggacctgagcattattggagacattacgatgcaggatcacatggtgatatatgacaatgagaaagggaaaattggatggattcgtgcaccctgtgacagagcccccaacgacaatacggttcatgggtttgaggaaggttactgttggcctcaattcctcccggggatcattggtcttcccaacgaagattgcccagcctattaccgttcaaacaaagagtgatttgccgaggcccaagggggagaggccgctagaatgtcacaagaaggatggtcacggaggctggacactgtgttaggatcgtgtgtgttctttaggaaaggagagaaactagcccatgtaaacatcataatgttcatatcaaatataatgatgatcaccctgttacgagtacaatcttttcggaccttttctttgtacattctttacttggttttctttctgttgatgtgatatatactacggttccaggtgtctcgcgactatggtcctgttcaaaacctgtaaacctaatggttagtcagcc

SEQ ID NO: 20727 - protein, 303 aa, Zea mays subsp. mays
  misc_feature (1)..(303): Ceres Seq. ID no. 12386933
MAPPPAGLVLVALLALVLAPAPARGDKPARGGASSSIAAGADTEPSSAVFPLYGDVYPHGLYYVAMNIGNPPKPYFLDVDSGSDLTWLQCDAPCRSCNEVPHPLYRPTKSKLVPCVHRLCASLHNGLAGGKHRCDSPHEQCDYVIKYADQGSSTGVLINDSFALRLTNGSVARPSVAFGCGYDQQVRSGDLSWPTDGVLGLGTGSVSLLSQLKQRGVTKNVVGHCLSLRGGGFLFFGDDLVPYQRATWTPMARSAFQLLLPWLRKPVLRRPVTGRETDESGLRQWKLVHLLRCKAIPSTCHRS

SEQ ID NO: 20728 - protein, 263 aa, Zea mays subsp. mays
  misc_feature (1)..(263): Ceres Seq. ID no. 12386934
RQEGAIRVCLLPALCSLPESPLAKPPHGTTARGPRARGSARAGPGAGAGARGQAGEGRGVQLHRRRGGYGAVLRRLPALRRRLPARVVLRGYEHRQPTQAILPGRGLRQRPHLAAVRRALQELQRGAAPAVPADKEQAGAVRAPAVRFPAQRAGRREAQMRLAARAMRLRDQVRRPGVVHRRAHQRQLRAPPHQRLCRSPQRRVRVWLRPAGPQRRPELAYRRRAGARDRLSQLALAAQTAWRHQERGRPLPQPEGRRVPLLR

SEQ ID NO: 20729 - protein, 238 aa, Zea mays subsp. mays
  misc_feature (1)..(238): Ceres Seq. ID no. 12386935
MNIGNPPKPYFLDVDSGSDLTWLQCDAPCRSCNEVPHPLYRPTKSKLVPCVHRLCASLHNGLAGGKHRCDSPHEQCDYVIKYADQGSSTGVLINDSFALRLTNGSVARPSVAFGCGYDQQVRSGDLSWPTDGVLGLGTGSVSLLSQLKQRGVTKNVVGHCLSLRGGGFLFFGDDLVPYQRATWTPMARSAFQLLLPWLRKPVLRRPVTGRETDESGLRQWKLVHLLRCKAIPSTCHRS

SEQ ID NO: 20730 - DNA, 873 bp, Zea mays subsp. mays
  misc_feature (1)..(873): Ceres Seq. ID no. 12386948
caaagaagaagatggatgaacttgctgagtagctgaaggaaaaggtcgatgaattggaagcaatggagtctctgaaccaaactctgattatcaaggaaaggaagagcaacgatgagttgcaacacgctcggaaggagctgatagatggctttatggagcttgctgttgttggccgagctaacataggtataaagagaatgggtgagcttgatctcaaagcattcggaattgcttgcaagaaaaggttgccaaaggaggatgcagaagtcatttctgctaccctttgttcaaagtggcaagaagaaattagaaacccaagctggcacccttttaaggttaaggtggtggatgggaaagaaatggaaattctcaaagaggacgatgagatgctgcaggagctgaaagaagagcacggtgaagaaatttatgggttggtaacaaaggccctgcttgagatcaatgagtacaaccctagtggccgctatcctgtaccagagctgtggaactacaaggagggccgtaaagcaacactgaggaagccgtccagcacgtcatgaggcagtggaagtctcacaagagaaagcgctgagcaaattggttggtgggttcttctgcctgccctctcctgagttttccatattaactcgatagtcgatactgggtagcattaggtcgtagcttttaattaactcctaatgatgagtgggtaacagtggctggctaatattaacgttaagttgccggaggttcggcctggtttcttttgttgtagtatacgaatgctgttagacggtctggattctcctgtcgttgcatgggcatttgtatgtccaggatattgaccgcttcatggatcagccgtcaaactttggc

SEQ ID NO: 20731 - protein, 164 aa, Zea mays subsp. mays
  misc_feature (1)..(164): Ceres Seq. ID no. 12386949
MESLNQTLIIKERKSNDELQHARKELIDGFMELAVVGRANIGIKRMGELDLKAFGIACKKRLPKEDAEVISATLCSKWQEEIRNPSWHPFKVKVVDGKEMEILKEDDEMLQELKEEHGEEIYGLVTKALLEINEYNPSGRYPVPELWNYKEGRKATLRKPSSTS

SEQ ID NO: 20732 - protein, 134 aa, Zea mays subsp. mays
  misc_feature (1)..(134): Ceres Seq. ID no. 12386950
MELAVVGRANIGIKRMGELDLKAFGIACKKRLPKEDAEVISATLCSKWQEEIRNPSWHPFKVKVVDGKEMEILKEDDEMLQELKEEHGEEIYGLVTKALLEINEYNPSGRYPVPELWNYKEGRKATLRKPSSTS

SEQ ID NO: 20733 - protein, 119 aa, Zea mays subsp. mays
  misc_feature (1)..(119): Ceres Seq. ID no. 12386951
MGELDLKAFGIACKKRLPKEDAEVISATLCSKWQEEIRNPSWHPFKVKVVDGKEMEILKEDDEMLQELKEEHGEEIYGLVTKALLEINEYNPSGRYPVPELWNYKEGRKATLRKPSSTS

SEQ ID NO: 20734 - DNA, 1081 bp, Zea mays subsp. mays
  misc_feature (1)..(1081): Ceres Seq. ID no. 12386976
aaaggctacaagcctacaagcaaccgcgtccgcgtgtggagcaaggaaggagaggggagccgagcgggcaaaggggagcgcggcgacagacatggcggagcagcacaaggaggagtcgggcgtgacagtgctggacaagatctccgacaagctccacgggcgcgggggcggctcgtcttcgtcgtcggactcggacgacgagcgctcgtcggcgacggccgccgtgaaggccaagatctaccgcatcttcgggcgcgagaagcccgtgcactccgtcctcggcggcggcaagccggccgatctgtttctatggaggaacaagaggatctctggtggggtgctcgcaggcgcaactgccttctggctgctgtttgaggtcatggattaccacctcctcaccctgctatgccactgcctcatcctcaccctggccatcctgttcctctggtccaatgccacgactttcatcaacaagtctcctcctaacatccccgaggtgaagatcccagatgacctggctgtgaattttgcacgttccctgagatatgagatcaacaggggttttgctaccttgagggagattggccaaggccatgacctcaagaaatttctgattgtgattgcaggactgtggatcctttctgttcttgggagctgctgcaatttcctcaccttgtcttacatagtttttatggtactgtacactgtaccggtcctgtatgagaaacatgaggataaggttgatgcttttggtgagaaggccatggtcgagctgaagaagtactacgccatcttcgacgagaaatgtctatcaaagattccgaagggcccattaaaagacaagaagcaacattagaagcgtagaatcagataagggtctgcggtgatttatcatctcttttgaccattactcgtcggttttggaggatggatgtgattccatgtctaaatacctggacgtgctctagtgttttagtgtggtcagtatcaatgttctaaattatctgagattacgctgaatcatgttctgaagtccacgtttaactttgctctccctatcctttggaagtggcaatttcct

SEQ ID NO: 20735 - protein, 284 aa, Zea mays subsp. mays
  misc_feature (1)..(284): Ceres Seq. ID no. 12386977
KATSLQATASACGARKERGAERAKGSAATDMAEQHKEESGVTVLDKISDKLHGRGGGSSSSSDSDDERSSATAAVKAKIYRIFGREKPVHSVLGGGKPADLFLWRNKRISGGVLAGATAFWLLFEVMDYHLLTLLCHCLILTLAILFLWSNATTFINKSPPNIPEVKIPDDLAVNFARSLRYEINRGFATLREIGQGHDLKKFLIVIAGLWILSVLGSCCNFLTLSYIVFMVLYTVPVLYEKHEDKVDAFGEKAMVELKKYYAIFDEKCLSKIPKGPLKDKKQH

SEQ ID NO: 20736 - protein, 254 aa, Zea mays subsp. mays
  misc_feature (1)..(254): Ceres Seq. ID no. 12386978
MAEQHKEESGVTVLDKISDKLHGRGGGSSSSSDSDDERSSATAAVKAKIYRIFGREKPVHSVLGGGKPADLFLWRNKRISGGVLAGATAFWLLFEVMDYHLLTLLCHCLILTLAILFLWSNATTFINKSPPNIPEVKIPDDLAVNFARSLRYEINRGFATLREIGQGHDLKKFLIVIAGLWILSVLGSCCNFLTLSYIVFMVLYTVPVLYEKHEDKVDAFGEKAMVELKKYYAIFDEKCLSKIPKGPLKDKKQH

SEQ ID NO: 20737 - protein, 158 aa, Zea mays subsp. mays
  misc_feature (1)..(158): Ceres Seq. ID no. 12386979
MDYHLLTLLCHCLILTLAILFLWSNATTFINKSPPNIPEVKIPDDLAVNFARSLRYEINRGFATLREIGQGHDLKKFLIVIAGLWILSVLGSCCNFLTLSYIVFMVLYTVPVLYEKHEDKVDAFGEKAMVELKKYYAIFDEKCLSKIPKGPLKDKKQH

SEQ ID NO: 20738 - DNA, 1165 bp, Zea mays subsp. mays
  misc_feature (1)..(1165): Ceres Seq. ID no. 12387009
gagctaccccatttccccacccccagcaccccactccccgcttccatttccttggaccccaccaccgcgcctacatccctcagagctcagatgcagccgccggcgaccgagatgcacccggccgccgacgccgccacctccgccgccaccgcgcaggccgacactactgctcgcgccgccgtccccgcatccgatccacccccgcccccgccggcgccggcggctganacggtcgatccgccgcccccgccgccagcgccggcgcccaagacggtcacctggagcgagaagctcacgtccgactcgccgacgcacgtgcacgccgccgccgcggcggagtccagccagtacgtgtcccgtgggcccgcatcctcgtctaagggcgccgtggaggcgatgagggagacgctgtcaaggtgggggaagtcgtggggggagaccaccaagctggtcgagagcctcagccgcgacacgtggcaacacttcaagactggacctagttttactgaagctgctatgggacgcctagcacaagggactaaagttttagcagaaggaggctatgaaaaaatatttaagcagaccttcgaggttcttccagacgaggagctgaaaatatgctatgcgtgctatctctcaacatcagcaggtcctgtcatgggagtcttgtatatttctacagcgaagattgctttctgcagtgacaatcctctgtcatacaaagctggaaataaaactgaatggagttactacaaggtggtcattcctcttcaccagctaagagcagctaatccttcagtaagcaaagtaaatcccgctgagaagtacattcaggtcgtttccgttgaagggcatgagttctggttcatgggttttctaatgtacgacaaggctgcagccagtcttcaagaagccttggctagtgctcgtgagttgcaaccgtgaagacaccaagtggtgttctttccggttacatacatcagtttccacatctcgagttcaggctgggtcgctgggattcttctcctgtttcagatcctttttgctgaagcttttgacacagtacacccacaggcctgcatacgtgtcagaaatgtgtgccattcctgtcaatgttgtaatcatgacagatatttatatatatggaaaaacactgccgctgtcc

SEQ ID NO: 20739 - protein, 314 aa, Zea mays subsp. mays
  misc_feature (1)..(314): Ceres Seq. ID no. 12387010
  misc_feature (76)..(76): Xaa is any aa, unknown or other
ELPHFPTPSTPLPASISLDPTTAPTSLRAQMQPPATEMHPAADAATSAATAQADTTARAAVPASDPPPPPPAPAAXTVDPPPPPPAPAPKTVTWSEKLTSDSPTHVHAAAAAESSQYVSRGPASSSKGAVEAMRETLSRWGKSWGETTKLVESLSRDTWQHFKTGPSFTEAAMGRLAQGTKVLAEGGYEKIFKQTFEVLPDEELKICYACYLSTSAGPVMGVLYISTAKIAFCSDNPLSYKAGNKTEWSYYKVVIPLHQLRAANPSVSKVNPAEKYIQVVSVEGHEFWFMGFLMYDKAAASLQEALASARELQP

SEQ ID NO: 20740 - protein, 284 aa, Zea mays subsp. mays
  misc_feature (1)..(284): Ceres Seq. ID no. 12387011
  misc_feature (46)..(46): Xaa is any aa, unknown or other
MQPPATEMHPAADAATSAATAQADTTARAAVPASDPPPPPPAPAAXTVDPPPPPPAPAPKTVTWSEKLTSDSPTHVHAAAAAESSQYVSRGPASSSKGAVEAMRETLSRWGKSWGETTKLVESLSRDTWQHFKTGPSFTEAAMGRLAQGTKVLAEGGYEKIFKQTFEVLPDEELKICYACYLSTSAGPVMGVLYISTAKIAFCSDNPLSYKAGNKTEWSYYKVVIPLHQLRAANPSVSKVNPAEKYIQVVSVEGHEFWFMGFLMYDKAAASLQEALASARELQP

SEQ ID NO: 20741 - protein, 277 aa, Zea mays subsp. mays
  misc_feature (1)..(277): Ceres Seq. ID no. 12387012
  misc_feature (39)..(39): Xaa is any aa, unknown or other
MHPAADAATSAATAQADTTARAAVPASDPPPPPPAPAAXTVDPPPPPPAPAPKTVTWSEKLTSDSPTHVHAAAAAESSQYVSRGPASSSKGAVEAMRETLSRWGKSWGETTKLVESLSRDTWQHFKTGPSFTEAAMGRLAQGTKVLAEGGYEKIFKQTFEVLPDEELKICYACYLSTSAGPVMGVLYISTAKIAFCSDNPLSYKAGNKTEWSYYKVVIPLHQLRAANPSVSKVNPAEKYIQVVSVEGHEFWFMGFLMYDKAAASLQEALASARELQP

SEQ ID NO: 20742 - DNA, 1466 bp, Zea mays subsp. mays
  misc_feature (1)..(1466): Ceres Seq. ID no. 12387022
gcgtcaccatccatttgacgaggcggtttatcccccagcaccccaaccaacctttccacgtaccaccgggtttctgtccgcgccccgcccttcaaaagcaggtccgcacgccggccggcgagacagacgacaccaccacgccgggacgggaggcacaggtgcggtctgcgtcgagagttggtccactggcaggccggaatgaagaagtgcgcgtcggagctggagctggaggcgttcatccgggagagcggcgaggacgcccgcgccgccgccggaggtagcagtccggggtgcggtggatcaagcgatcccggagggagcggcgtcttctcacccggcttcggtttcgccgactcggacaccatggatggaggcagttggtggtacgggaacgtccgcacgccgaacccagtcatgtcgcaggcggcgtccatatccgctagccccgggctaaccacctcagccaatcatgctcttgaaagcgagtcagactccgacagcgaatcactgtatgaggtagagggagttccatacgagcgaggtaacagatccattgagacgaagcgaataagaaggatggtgtccaatagggagtctgcgcggcggtctaggaggaggaaacaggcacagttgtctgaccttgagtcacaggttgaacgactcaaaggtgaaaacgcaacactgttccagcaactttcagatgccaaccaacagttcagtactgcagtcacagacaacagaatcctcaaatccgatgtagaagcgttaagaattaaggtaaagatggcagaggatatggtagcgagaagtgctgtatcgtgtggcctaggcgaccttggcctggcaccatacgtgaactcaaggaagatgtgccaagctttgaatgtgctcacagggttggatttactagggagtgatgcgttcaggggtccaaccgcaggtacacgagtacagaactcaccagtacagagcactgcaagcctagagagtctggataaccgaaagtccaacgaggtgaccagttgcgcggcggacatttggccttgagcttcaagccattgatctgattcaaagcttgctccaccctcaaaaaaaggaccagagtttgtcaactcaaatagctggtggcttgagcagagcttctggcacgagttctcttgaaccatatttccacataagctttataggatgcatcactcttttgatgtcacttagtttcaagtataaaatgaagctgtctttgtacaaagctgcaaatgagaagtaaatgaaacgtcctggacaaacttgtgaagtaggaatgatacataggctctatttccaggtcagatgagacagttatgtttacaacaaaaagcaatacatgttgtttagaaaccgctattaattcacaggaatgttcaatccagtacaagtcatctagtagatttgcacccctaccttctagtagattcaaccatgttttc

SEQ ID NO: 20743 - protein, 282 aa, Zea mays subsp. mays
  misc_feature (1)..(282): Ceres Seq. ID no. 12387023
MKKCASELELEAFIRESGEDARAAAGGSSPGCGGSSDPGGSGVFSPGFGFADSDTMDGGSWWYGNVRTPNPVMSQAASISASPGLTTSANHALESESDSDSESLYEVEGVPYERGNRSIETKRIRRMVSNRESARRSRRRKQAQLSDLESQVERLKGENATLFQQLSDANQQFSTAVTDNRILKSDVEALRIKVKMAEDMVARSAVSCGLGDLGLAPYVNSRKMCQALNVLTGLDLLGSDAFRGPTAGTRVQNSPVQSTASLESLDNRKSNEVTSCAADIWP

SEQ ID NO: 20744 - protein, 227 aa, Zea mays subsp. mays
  misc_feature (1)..(227): Ceres Seq. ID no. 12387024
MDGGSWWYGNVRTPNPVMSQAASISASPGLTTSANHALESESDSDSESLYEVEGVPYERGNRSIETKRIRRMVSNRESARRSRRRKQAQLSDLESQVERLKGENATLFQQLSDANQQFSTAVTDNRILKSDVEALRIKVKMAEDMVARSAVSCGLGDLGLAPYVNSRKMCQALNVLTGLDLLGSDAFRGPTAGTRVQNSPVQSTASLESLDNRKSNEVTSCAADIWP

SEQ ID NO: 20745 - protein, 210 aa, Zea mays subsp. mays
  misc_feature (1)..(210): Ceres Seq. ID no. 12387025
MSQAASISASPGLTTSANHALESESDSDSESLYEVEGVPYERGNRSIETKRIRRMVSNRESARRSRRRKQAQLSDLESQVERLKGENATLFQQLSDANQQFSTAVTDNRILKSDVEALRIKVKMAEDMVARSAVSCGLGDLGLAPYVNSRKMCQALNVLTGLDLLGSDAFRGPTAGTRVQNSPVQSTASLESLDNRKSNEVTSCAADIWP

SEQ ID NO: 20746 - DNA, 1659 bp, Zea mays subsp. mays
  misc_feature (1)..(1659): Ceres Seq. ID no. 12387042
aaagaacccgagcaccgcctcagctcatcctcgcagatacgtttcagttccggagcgactagcgcgagcgttcagggattatttactgaaagagagagtgttcagggattttagcacttgttcatggctgctgcgtgcatcagccatcgctttcgccactccaagctcccggtactggtcctggcgctggcgacggtggtggccgccgcacgggctcagctgtcgccgccgacgttctacgcctcgtcgtgccctgccgcgctcgtcaccatcaacgccgccgtgagggctgccgtgctgctggaccgccgcatgggcgcctccctgctccggctccacttccacgactgcttcgtgcagggctgcgacgcgtccgttctgctggacgacacgggcaacttcaccggggagaagggcgcgggccccaacgcgggctcgctcagggggttcggcgtcatcgacaccgtcaaggccctgctggaggcgctgtgcccgcggaccgtgtcgtgcgccgacatcctcgccgtcgccgcccgtgactctgtcgtcgcgctcggaggcccatcgtggaccgtgcagctcggcaggagggactccaccacggcgagcctctccaccgcgaacaccgacctcccctcgccggcgtccagcctgagcaccctgctcgccgcattcgccaggaaaggcggtcagcagcaccgacatggtcgctctgtctggtgcgtccctcaccgatcaatcaaccacggaccacgctttcatcagtgaccagtcatcaccgcagcgcctggcttcacatcacagtgatgttatggcatggtcaccgacgtgaccatgcaactaccagttcccctgtgcctctactctaacagcggtggcagcttggcagttagcaccagcgcggcagcgccaccgccacgtactggtcaccactgacacgtgagcggttgcgtatgcatgatgcaggagcccacacggtggggcaagcgcagtgccagaactaccaggccaggatctacaacgacgccaacatcaacgcggccttcgcggcgtcgctgagggccggctgcccggcgtccggagggggcggcgccaacgcgccgctggacgcgtccacgccgaacgcgttcgacaacgcgtactacggcgatctggtcgcgcagcagggcctgctgcactccgatcaagagctcttcaacggtggctccacggacgcactggtcaggagctacgcggccagctcggcgcggtttagtagcgacttcgccgcagccatggtcaggatgggcgccattggtgtcctgaccgggagcagcggacaggtgcggcgcaactgccggaaggtgaactagccagctcgcagaatactgcattgtatgcatcacactggtggaagaaattgtgtgtgctgagttatccaaccatggttgaacgaagttgtaaagattaaagggcaacgaagtcatatagcttgcattgatgttgtcattaaagaagtacaccctccatttttttctgcaaatacctagaacatttaggtatcactgtagctcaactttgagtataaatgtagcatataattatctctttcatatggccaacaataatatacaaatgtattctgtataagttacaattattataataaaattcaattcc

SEQ ID NO: 20747 - protein, 214 aa, Zea mays subsp. mays
  misc_feature (1)..(214): Ceres Seq. ID no. 12387043
MAAACISHRFRHSKLPVLVLALATVVAAARAQLSPPTFYASSCPAALVTINAAVRAAVLLDRRMGASLLRLHFHDCFVQGCDASVLLDDTGNFTGEKGAGPNAGSLRGFGVIDTVKALLEALCPRTVSCADILAVAARDSVVALGGPSWTVQLGRRDSTTASLSTANTDLPSPASSLSTLLAAFARKGGQQHRHGRSVWCVPHRSINHGPRFHQ

SEQ ID NO: 20748 - protein, 151 aa, Zea mays subsp. mays
  misc_feature (1)..(151): Ceres Seq. ID no. 12387044
MGASLLRLHFHDCFVQGCDASVLLDDTGNFTGEKGAGPNAGSLRGFGVIDTVKALLEALCPRTVSCADILAVAARDSVVALGGPSWTVQLGRRDSTTASLSTANTDLPSPASSLSTLLAAFARKGGQQHRHGRSVWCVPHRSINHGPRFHQ

SEQ ID NO: 20749 - protein, 132 aa, Zea mays subsp. mays
  misc_feature (1)..(132): Ceres Seq. ID no. 12387045
MHDAGAHTVGQAQCQNYQARIYNDANINAAFAASLRAGCPASGGGGANAPLDASTPNAFDNAYYGDLVAQQGLLHSDQELFNGGSTDALVRSYAASSARFSSDFAAAMVRMGAIGVLTGSSGQVRRNCRKVN

SEQ ID NO: 20750 - DNA, 1403 bp, Zea mays subsp. mays
  misc_feature (1)..(1403): Ceres Seq. ID no. 12387046
agctgcactgcagcacacgcgccaccgaagcgctctgcccacctcgctcccctccagtggccgccagcgcggctcagcggtccatcctcctgacgccacctgcaacggcgtcaggcggtgatccattccaactcgcgctccgtcctggcaatcactttgggaaggtggtcagtggaatagctttgcttaaaaagcttgaagcagttggtagtgaaactggaaatccttcttatcaagtgaaaattgtagactgtggtgaagtttccaacacaaattctcaggatccgctaaagggagataaagtaagctcaaagacagataacagcagttcagacagtgaaaagggtggccatcgtaccaagcgttccttaccgaaaggaatgatccaggtggaagctccaggaacaatcccattcagtttgatgtaaatttaatgaaaccagtaaatgtagatggcaacattggtggtgataatgcagaggctagcatgtctagaactggtgaaggaaggcatctgccaagcaatgaacctttgtccaccaatggtaaagatttaggtgtgggttctgcagacaatgggcaacctcaacaaatcaggaaaggacgtggttttactcagaagtatgggtatgcacgccgatataggacgccatctcccgagcgtccctctgtttgaccccgctacgatggagggagagatgatagatggaacaatttcaataggtatgaaagaaatggtccttacagtagacgctcgccagtaaggagataccatggctcgccaagagccaatagcccatccagtactacccaagcctcaaccgttcaaagtgttgctcgaagaggatatgtacaggtaatgcatccatcgtactgttgatttagccatcccaacctgcaaataacctttgcatattctgtttgacatttttacatagtgttttctttaaatgaaaccgactcatactactcggcctacacagtgcccattctgcaaaacgcccaattatgctgtggagtatcgtggcatcaaaacaaaggagtaaaggagcatagagcagtttacagacaattgaaaaagagaattgatcttttttatgggcgaagtgttgaagatggctttggtgaaggaaatgtcttgttagcatcaagtaagtggcgacatcacaacccctacaagcttgtgccttaaaacaagaggatacaagaagttggagtgcttttgtgaaggcttttacgaatcacttgaagtgttagtacttttgtgaatgattttgtaaagtgtttgcaaatatgtgcaaaacataataacatgtgtaggttttgtgaatgattttgttgtggtgcttgttgatggtttatgtgatgtggatctaccattgtgcaatactaattaaatttgt

SEQ ID NO: 20751 - protein, 141 aa, Zea mays subsp. mays
  misc_feature (1)..(141): Ceres Seq. ID no. 12387047
LHCSTRATEALCPPRSPPVAASAAQRSILLTPPATASGGDPFQLALRPGNHFGKVVSGIALLKKLEAVGSETGNPSYQVKIVDCGEVSNTNSQDPLKGDKVSSKTDNSSSDSEKGGHRTKRSLPKGMIQVEAPGTIPFSLM

SEQ ID NO: 20752 - protein, 80 aa, Zea mays subsp. mays
  misc_feature (1)..(80): Ceres Seq. ID no. 12387048
MKPVNVDGNIGGDNAEASMSRTGEGRHLPSNEPLSTNGKDLGVGSADNGQPQQIRKGRGFTQKYGYARRYRTPSPERPSV

SEQ ID NO: 20753 - DNA, 1978 bp, Zea mays subsp. mays
  misc_feature (1)..(1978): Ceres Seq. ID no. 12387049
aaaccaaacccagctcaggcacaaccccaacgcaccgccgccgctcgcctggcctcacctcgccggagaagagttataagacaggagaaccccgtccccggggcgcaggcctcggcagcttccgtgaccaccgcccaatcctgccacagctgccctccctcctcccctctgggcgtggccgagttgtaggcatcacggctagcgttgcagccccccggcgcggccccgcagctgcgcaggtggagcccacgggcaccatcgcctccgctgtcgcgtccagccccgctccgcacggcggccgcgggggcgctgccctcggccggaggaagcccgtccgatctcctcttcctcgccggcggcggtcgcctctgagccgttcctgtctctcaccttcttcctttcctagcaattagtcccttctgctaacccccccggaccccgacgagttctcaccccgagagtaactgaccgacctaccggcatggagatgaagctgaccatcaggagggtgcccaccgtcgtctccaactaccaggaggacgccgacaagccgcgcgcgggctgcgggaggaactgcctcggcgactgctgcctgcctgcttccaagcttcccctctacgcgttcaagttgactccggcaaagggctcgcaggaggatgctgcttcaaccaagttacttgttgatattctccttagtgagtgggaggacaggatgactcgaggcttattccgctacgatgtcactgcctgtgagaccaaggtcattcctggcaaccttgggtttgttgcacaactcaatgaagggcgccatcttaagaagcgccctactgagtttcgtgtggaccgtgtgctccagccgtttgaccctgccaaattcaatttcacaaaagttggccaggaagaggttctcttccaatttgagaatagtggtggtgatgacagctatttcctgaacaacgctccaatcattgctgttgatcgggctccaaatgttattgctatcaatgtaagcccaattgaatatggacatgtgcttctcattcctcgtgttctggaccgcctgcctcagaggattgatccagagagcttcttgcttgcactgcaaatggcagccgagggaggtagcccatacttcaggcttggttacaatagcttgggtgcgtttgccaccatcaatcacctccactttcaggcgtactacttgtcagtgcctttccctgttgagaaggcagctacccacaagatcccactctctgaggacacgaagaagaatggggtgaccgtgtccaagctgataaattatcctgtgagaggcctggtatttgagggagggaacaccctggacgacctggccactgtggtttctaatgcttgcatttggctgcaagacaacaatgtgccttacaatgtgctcatttctgactgtggcaagagggttttcctgttcccccagtgctacgcagagaagcaggctctgggtgaagtgagccaggagctgctggacactcaggtgaacccagctgtgtgggagatcagtggacacatggtgctgaaacggaggatggactatgaggaggcatctgaaacctccgcgtggaaactcctcgccgaggtctctctctccgaggagcgcttcgaggaagtgaaggcgtacatcttcagcgctgctggcctggttcagtatgatgaggaagaggaggaagccagcgacggtgagggccctacggcctatgttcctgtcaaggttacccctctgcccatcgctgaagggtgcctcgtcctcccgtgagtccgtggtcggttaaataaagggccgtatatgattgcgagccctgtgctctgccgctattttcttctcgtttgtgtcttgctgctctcgtggtgaactcgctactccagtactctgcaatattaagcagaagctattgtattgtttgggtcgtttgtcagctaaattgaaatgcgatggacatttact

SEQ ID NO: 20754 - protein, 435 aa, Zea mays subsp. mays
  misc_feature (1)..(435): Ceres Seq. ID no. 12387050
MEMKLTIRRVPTVVSNYQEDADKPRAGCGRNCLGDCCLPASKLPLYAFKLTPAKGSQEDAASTKLLVDILLSEWEDRMTRGLFRYDVTACETKVIPGNLGFVAQLNEGRHLKKRPTEFRVDRVLQPFDPAKFNFTKVGQEEVLFQFENSGGDDSYFLNNAPIIAVDRAPNVIAINVSPIEYGHVLLIPRVLDRLPQRIDPESFLLALQMAAEGGSPYFRLGYNSLGAFATINHLHFQAYYLSVPFPVEKAATHKIPLSEDTKKNGVTVSKLINYPVRGLVFEGGNTLDDLATVVSNACIWLQDNNVPYNVLISDCGKRVFLFPQCYAEKQALGEVSQELLDTQVNPAVWEISGHMVLKRRMDYEEASETSAWKLLAEVSLSEERFEEVKAYIFSAAGLVQYDEEEEEASDGEGPTAYVPVKVTPLPIAEGCLVLP

SEQ ID NO: 20755 - protein, 433 aa, Zea mays subsp. mays
  misc_feature (1)..(433): Ceres Seq. ID no. 12387051
MKLTIRRVPTVVSNYQEDADKPRAGCGRNCLGDCCLPASKLPLYAFKLTPAKGSQEDAASTKLLVDILLSEWEDRMTRGLFRYDVTACETKVIPGNLGFVAQLNEGRHLKKRPTEFRVDRVLQPFDPAKFNFTKVGQEEVLFQFENSGGDDSYFLNNAPIIAVDRAPNVIAINVSPIEYGHVLLIPRVLDRLPQRIDPESFLLALQMAAEGGSPYFRLGYNSLGAFATINHLHFQAYYLSVPFPVEKAATHKIPLSEDTKKNGVTVSKLINYPVRGLVFEGGNTLDDLATVVSNACIWLQDNNVPYNVLISDCGKRVFLFPQCYAEKQALGEVSQELLDTQVNPAVWEISGHMVLKRRMDYEEASETSAWKLLAEVSLSEERFEEVKAYIFSAAGLVQYDEEEEEASDGEGPTAYVPVKVTPLPIAEGCLVLP

SEQ ID NO: 20756 - protein, 358 aa, Zea mays subsp. mays
  misc_feature (1)..(358): Ceres Seq. ID no. 12387052
MTRGLFRYDVTACETKVIPGNLGFVAQLNEGRHLKKRPTEFRVDRVLQPFDPAKFNFTKVGQEEVLFQFENSGGDDSYFLNNAPIIAVDRAPNVIAINVSPIEYGHVLLIPRVLDRLPQRIDPESFLLALQMAAEGGSPYFRLGYNSLGAFATINHLHFQAYYLSVPFPVEKAATHKIPLSEDTKKNGVTVSKLINYPVRGLVFEGGNTLDDLATVVSNACIWLQDNNVPYNVLISDCGKRVFLFPQCYAEKQALGEVSQELLDTQVNPAVWEISGHMVLKRRMDYEEASETSAWKLLAEVSLSEERFEEVKAYIFSAAGLVQYDEEEEEASDGEGPTAYVPVKVTPLPIAEGCLVLP

SEQ ID NO: 20757 - DNA, 1214 bp, Zea mays subsp. mays
  misc_feature (1)..(1214): Ceres Seq. ID no. 12387065
aaactgcatcagagcacgaccacactacccacccacctccactactgacgaccgattcccagaaagctcgatctagcgcgcgcggctgcagagtgcagacgacgacgtacaccatggcgcggcggtccctggccctgctgctcgcgtcgtcgctcgccctgatggcggccgccgtcgcatcggcggactcgtggctctacgacaagttcaacacggacggcaccgtccgcacccagtacgacgcgtcggggcaggaggtggcgatgctcagcctggaccgcagctccggcgccggcttcaactccaagaagcagtacctgtacggcgagttcagcgtccagatgaagctcatccccggcaactccgccggcaccgtctcgtgcttctacctctcgtcgggcgacggcgacgggcacgacgagatcgacatggagttcatgggcaacgcgagcgggcagccggtggtgctgaacacgaacgtgtgggccagcggcgacggcaagaaggagcaccagttcgacctctggttcgacccctccgccgactaccacacctacaccatcatctggaacccgaccaacatcctgttcaaggtggacggcgacgtgatccggtgcttcaagcgctacgccgacctgccgtacccgagcgcgaggcccatggcgctgcacgccacgctgtgggacggcagctactgggccaccgagaagggcaaggtgccggtggactggtccgccgcgcccttcgtcgtctcctaccggggctactcggccaacgcctgcgtcagcggcggggcctgcggcggcggcggcgacgacgggtggatgagcaagcagcccgacgacgccgagtggggcaccgtccggtgggccgagagcaactacatgcgctacaactactgcgacgacggctggcggttcccccagggcctcccgcccgagtgcagccgcagctaagctagctgattccgccggttttcgtacgctcggcggcgtccgctgacgacacacgccttgttggtttgttcttgctggacatcatacatctctatatgcatgattcttgttctgttattgttaaatcgtgattacaatacttgtaattgtaaagaagtgtgtgggcacgggagtatatcactgtagttttaatttgcttgtaaagaaaagaagggtttttttacttgtgacgcgggagctagcgactgcgtcctgttc

SEQ ID NO: 20758 - protein, 317 aa, Zea mays subsp. mays
  misc_feature (1)..(317): Ceres Seq. ID no. 12387066
TASEHDHTTHPPPLLTTDSQKARSSARGCRVQTTTYTMARRSLALLLASSLALMAAAVASADSWLYDKFNTDGTVRTQYDASGQEVAMLSLDRSSGAGFNSKKQYLYGEFSVQMKLIPGNSAGTVSCFYLSSGDGDGHDEIDMEFMGNASGQPVVLNTNVWASGDGKKEHQFDLWFDPSADYHTYTIIWNPTNILFKVDGDVIRCFKRYADLPYPSARPMALHATLWDGSYWATEKGKVPVDWSAAPFVVSYRGYSANACVSGGACGGGGDDGWMSKQPDDAEWGTVRWAESNYMRYNYCDDGWRFPQGLPPECSRS

SEQ ID NO: 20759 - protein, 280 aa, Zea mays subsp. mays
  misc_feature (1)..(280): Ceres Seq. ID no. 12387067
MARRSLALLLASSLALMAAAVASADSWLYDKFNTDGTVRTQYDASGQEVAMLSLDRSSGAGFNSKKQYLYGEFSVQMKLIPGNSAGTVSCFYLSSGDGDGHDEIDMEFMGNASGQPVVLNTNVWASGDGKKEHQFDLWFDPSADYHTYTIIWNPTNILFKVDGDVIRCFKRYADLPYPSARPMALHATLWDGSYWATEKGKVPVDWSAAPFVVSYRGYSANACVSGGACGGGGDDGWMSKQPDDAEWGTVRWAESNYMRYNYCDDGWRFPQGLPPECSRS

SEQ ID NO: 20760 - protein, 264 aa, Zea mays subsp. mays
  misc_feature (1)..(264): Ceres Seq. ID no. 12387068
MAAAVASADSWLYDKFNTDGTVRTQYDASGQEVAMLSLDRSSGAGFNSKKQYLYGEFSVQMKLIPGNSAGTVSCFYLSSGDGDGHDEIDMEFMGNASGQPVVLNTNVWASGDGKKEHQFDLWFDPSADYHTYTIIWNPTNILFKVDGDVIRCFKRYADLPYPSARPMALHATLWDGSYWATEKGKVPVDWSAAPFVVSYRGYSANACVSGGACGGGGDDGWMSKQPDDAEWGTVRWAESNYMRYNYCDDGWRFPQGLPPECSRS

SEQ ID NO: 20761 - DNA, 1238 bp, Zea mays subsp. mays
  misc_feature (1)..(1238): Ceres Seq. ID no. 12387069
attccctcgctcgcggccttgtacagcatactgtccttgcggcgctgctggctccgccgggtgttgggtcaacgttctcccgtccccccgagcgcagtctcgcgtggttctcccgtcccccgaggcccgagcgtagtctctctcttttgccgtggttctccagtcctccctcatccgctctctttctttctctcgtggcgagtggtaacgacgtcaggtgctcaggtcttgttcaggcccttcgccggcgacgagcacacagcaaatggatacaggagctcaagctatgttcatcatcagtcttgtgctctggtgtactacaagctttgccttggatgatgctgctgctacaaggattccaattgtgggcacattacctctgtcaatgaaagaaaatccgcaattatgccaactttgtgaggagtttgcatcagaggccctcttctatttaaatgaaaatgagacccagactgaaatcattgatacactacaccaagcttgttcaaagtttggctcttttaagctggagtgcacgaggttggtggattattatgtccctcttttcttcacaaaaattgcttcattaagccctgaagaattttgtgcatcagcaagtttttgtggggaggtaacattcattcgtcttccaagacatgaagatacttgcaccctttgccatgaggttgtcgatgaggttgttactaatcttgaagatccaggcatggagcttaagataattgagatacttctgaaaggatgcaataatgcagaggattatgtacaaaagtgcaagaggttgataatccaaaatgcacctatcataatggagaatattaagaagttcctcgagaagagagatttttgcaattctatccatgtctgtggaagtaaatccgttcgcgctggatcacaagtcctcagaagcctttcttcagcctgaagccctgaacttgcacggattgttatgatcatgcaacagatattagtgtaaaaacaagtccaggcgccgctatgtgagtcccgtgtgacatcgactgtacagatttggctgtgtacatgttaaaggaaaacacaactgaggcacaaacctcttctgtttacgggtcatgagcagggtgtgtatttgaactgtatatcattataccttggattggatgtcatgttgctctatatttatacgtaaccgagttttgtaactttggagaagtaatgtatatgatgccaaagcttgatcttcc

SEQ ID NO: 20762 - protein, 224 aa, Zea mays subsp. mays
  misc_feature (1)..(224): Ceres Seq. ID no. 12387070
MDTGAQAMFIISLVLWCTTSFALDDAAATRIPIVGTLPLSMKENPQLCQLCEEFASEALFYLNENETQTEIIDTLHQACSKFGSFKLECTRLVDYYVPLFFTKIASLSPEEFCASASFCGEVTFIRLPRHEDTCTLCHEVVDEVVTNLEDPGMELKIIEILLKGCNNAEDYVQKCKRLIIQNAPIIMENIKKFLEKRDFCNSIHVCGSKSVRAGSQVLRSLSSA

SEQ ID NO: 20763 - protein, 217 aa, Zea mays subsp. mays
  misc_feature (1)..(217): Ceres Seq. ID no. 12387071
MFIISLVLWCTTSFALDDAAATRIPIVGTLPLSMKENPQLCQLCEEFASEALFYLNENETQTEIIDTLHQACSKFGSFKLECTRLVDYYVPLFFTKIASLSPEEFCASASFCGEVTFIRLPRHEDTCTLCHEVVDEVVTNLEDPGMELKIIEILLKGCNNAEDYVQKCKRLIIQNAPIIMENIKKFLEKRDFCNSIHVCGSKSVRAGSQVLRSLSSA

SEQ ID NO: 20764 - protein, 184 aa, Zea mays subsp. mays
  misc_feature (1)..(184): Ceres Seq. ID no. 12387072
MKENPQLCQLCEEFASEALFYLNENETQTEIIDTLHQACSKFGSFKLECTRLVDYYVPLFFTKIASLSPEEFCASASFCGEVTFIRLPRHEDTCTLCHEVVDEVVTNLEDPGMELKIIEILLKGCNNAEDYVQKCKRLIIQNAPIIMENIKKFLEKRDFCNSIHVCGSKSVRAGSQVLRSLSSA

SEQ ID NO: 20765 - DNA, 1128 bp, Zea mays subsp. mays
  misc_feature (1)..(1128): Ceres Seq. ID no. 12387077
atcctcctcctcctgctgctctggcctctggagtcgccgcccctcccaagaacaccaggctctaatttaatttaagcggagggaagcttgatcgatcagtctgacactgccctcgttaagttatagcaaatgcctcccgcttcgacggatgcaaacaacgcgatccagaagctgtacgaggtctgcagagcctcactgtccgagaaggggcctctatctcctcctgactactctctcgacaacgtccgtgctgcgttagacatggttaccccgtccgacgtcggccttgaacgcgaggctggagctgtgcgtgcttggaggagcccacgggcggccctgggtcggaagaggattttccattccagcccagccatcagatatcgccatatatacgagtgcgcaagcttctcgattgggatgttttgcatgccggcatcatccatcatcccgctccacaaccatcctggaatgaccgtgctcggcaaggttttgtacggcgcggcgcacgtcagatcgtaccgctggattgaatcagccggatcgtccattaacctgtcgaaagcgaggccagccaaggttgtaagggacggcgagatgtccgcgccgtgcggagcgatggttcttcgtccggaggaaggcggcgacgtccacgccttgagagccatcactccctgcgccgtcctccacatcctgacgcccccgtactcctcgcaggacgggaggcactgctcctacttccggagacgcccaagatcacacccatcgggcgttttattgaaccgaacaggggggtctgagttcgtgtggctggaagaataccagccacgtcacaacttcatcattagaagggacctgtacacaggacccgctttaaagttatgatgacatcatgacaaacaggggggataattatatatatacgcttcccctttggcttcttattaagttatatcgatggacaagcacttagctatatgtgcttggcacttttttatttatatggtagtattaaaaagacagttgattatcctacgtacagggccgcctgctgtatgtattattctaagataatgttattgtacatctgatgatgtcacccactgacagaatgttatttatataataatt

SEQ ID NO: 20766 - protein, 250 aa, Zea mays subsp. mays
  misc_feature (1)..(250): Ceres Seq. ID no. 12387078
MPPASTDANNAIQKLYEVCRASLSEKGPLSPPDYSLDNVRAALDMVTPSDVGLEREAGAVRAWRSPRAALGRKRIFHSSPAIRYRHIYECASFSIGMFCMPASSIIPLHNHPGMTVLGKVLYGAAHVRSYRWIESAGSSINLSKARPAKVVRDGEMSAPCGAMVLRPEEGGDVHALRAITPCAVLHILTPPYSSQDGRHCSYFRRRPRSHPSGVLLNRTGGSEFVWLEEYQPRHNFIIRRDLYTGPALKL

SEQ ID NO: 20767 - protein, 206 aa, Zea mays subsp. mays
  misc_feature (1)..(206): Ceres Seq. ID no. 12387079
MVTPSDVGLEREAGAVRAWRSPRAALGRKRIFHSSPAIRYRHIYECASFSIGMFCMPASSIIPLHNHPGMTVLGKVLYGAAHVRSYRWIESAGSSINLSKARPAKVVRDGEMSAPCGAMVLRPEEGGDVHALRAITPCAVLHILTPPYSSQDGRHCSYFRRRPRSHPSGVLLNRTGGSEFVWLEEYQPRHNFIIRRDLYTGPALKL

SEQ ID NO: 20768 - protein, 154 aa, Zea mays subsp. mays
  misc_feature (1)..(154): Ceres Seq. ID no. 12387080
MFCMPASSIIPLHNHPGMTVLGKVLYGAAHVRSYRWIESAGSSINLSKARPAKVVRDGEMSAPCGAMVLRPEEGGDVHALRAITPCAVLHILTPPYSSQDGRHCSYFRRRPRSHPSGVLLNRTGGSEFVWLEEYQPRHNFIIRRDLYTGPALKL

SEQ ID NO: 20769 - DNA, 1536 bp, Zea mays subsp. mays
  misc_feature (1)..(1536): Ceres Seq. ID no. 12387081
aaagcaaagtctcctgcttccttccgtcttgctcctcgacccttcttccttccccaccaccgcgttccaatcaatcccaatcgcgacccagccagaggcgagcgcgagaaaatccccattccccaatccccacgccacagcctcccttccctccccgtctcctccaaattcaatcgtctccaagcgccaatccgccccgtctccaaatcccaggcaggcaggcagccaaccagccatggagtgcgagccggaggagctgcagttcctgggcgtcgtcggcatctaccgcttctccgcggagatcctccgaggcccgcaccgcccgctcttcgcgcgcatcgcggccgccttcgcgctgcccctctccgcgcttttcctcctgcacgtcgccatctcgcacgcgctcttcacccacatcgactccgacgacacggccctggacgcatcctccccgggcaccgacacgcagcgccgcctgctgtcccgcctcgcctccgactggctcgccctgctcctcttcaagtccgcctacctcctcgcgctcctcctgctctcgctcctctccgtcgccgcctccgtgttctccgtcgcctccgtctactccgccaagcgcgacgcgctcaccttcccgcgcgtgctctccgtcgtgccccgcgtctggcggaggctcgccgccacgttcctcgccgccttcgcgctcctcttcgcctaccacgccgtcgccgtgctcgtcttcgtcggcctcctcgtcgccgcggacaacggctccggcctcgcgggcctgctcgccttcctcgtcgccgtcgcctacctgctcggcctcgtctacctcggcgtcgtctggcacctcgccagcgtcgtctccgtgctcgaggaccacaagggcttcgccgccatgcgcaagagcaaggacctcatcagggggaagctcgtcaccgcgggtgctatcttcttcacgctcaacgtcgtcttcgccgccgtcgagctcggcttccgcgcctgggtcgtcaggggatccggcgccgcgtcgtcaaggctcttgctcggcctcatcatgctcgccgcgctctgctgcgtcgtcatgctcgcgctcgtcacgcagaccgtcgtctacctcgtgtgcaagagctaccaccacgagagcctcgacaaggccaacatctccgaccacctcgaggtctacctcggcgactacgtccccgctaaaggcgtccgacgtgcagatggagcagttccaggtctgactgtgaatcccatagcttctctgtctttatcactgctcgccaatccatcctctgatgccggaattctcctgttaccaccggcagccaggtaatctgtaattgtgtacgtacagcaggcagcaggtgatgaacatacttgcgttaagtaggaagaattgggaatttttgtcttgggggtacaagaataatggggatctgtacttcccttagtctcttcctcaaggacatggttccttcccttgtttacatgatttataaacaggagatgaatggaattgggcatgccgaattt

SEQ ID NO: 20770 - protein, 444 aa, Zea mays subsp. mays
  misc_feature (1)..(444): Ceres Seq. ID no. 12387082
KQSLLLPSVLLLDPSSFPTTAFQSIPIATQPEASARKSPFPNPHATASLPSPSPPNSIVSKRQSAPSPNPRQAGSQPAMECEPEELQFLGVVGIYRFSAEILRGPHRPLFARIAAAFALPLSALFLLHVAISHALFTHIDSDDTALDASSPGTDTQRRLLSRLASDWLALLLFKSAYLLALLLLSLLSVAASVFSVASVYSAKRDALTFPRVLSVVPRVWRRLAATFLAAFALLFAYHAVAVLVFVGLLVAADNGSGLAGLLAFLVAVAYLLGLVYLGVVWHLASVVSVLEDHKGFAAMRKSKDLIRGKLVTAGAIFFTLNVVFAAVELGFRAWVVRGSGAASSRLLLGLIMLAALCCVVMLALVTQTVVYLVCKSYHHESLDKANISDHLEVYLGDYVPAKGVRRADGAVPGLTVNPIASLSLSLLANPSSDAGILLLPPAAR

SEQ ID NO: 20771 - protein, 413 aa, Zea mays subsp. mays
  misc_feature (1)..(413): Ceres Seq. ID no. 12387083
SKVSCFLPSCSSTLLPSPPPRSNQSQSRPSQRRARENPHSPIPTPQPPFPPRLLQIQSSPSANPPRLQIPGRQAANQPWSASRRSCSSWASSASTASPRRSSEARTARSSRASRPPSRCPSPRFSSCTSPSRTRSSPTSTPTTRPWTHPPRAPTRSAACCPASPPTGSPCSSSSPPTSSRSSCSRSSPSPPPCSPSPPSTPPSATRSPSRACSPSCPASGGGSPPRSSPPSRSSSPTTPSPCSSSSASSSPRTTAPASRACSPSSSPSPTCSASSTSASSGTSPASSPCSRTTRASPPCARARTSSGGSSSPRVLSSSRSTSSSPPSSSASAPGSSGDPAPRRQGSCSASSCSPRSAASSCSRSSRRPSSTSCARATTTRASTRPTSPTTSRSTSATTSPLKASDVQMEQFQV

SEQ ID NO: 20772 - protein, 401 aa, Zea mays subsp. mays
  misc_feature (1)..(401): Ceres Seq. ID no. 12387084
KAKSPASFRLAPRPFFLPHHRVPINPNRDPARGEREKIPIPQSPRHSLPSLPVSSKFNRLQAPIRPVSKSQAGRQPTSHGVRAGGAAVPGRRRHLPLLRGDPPRPAPPALRAHRGRLRAAPLRAFPPARRHLARALHPHRLRRHGPGRILPGHRHAAPPAVPPRLRLARPAPLQVRLPPRAPPALAPLRRRLRVLRRLRLLRQARRAHLPARALRRAPRLAEARRHVPRRLRAPLRLPRRRRARLRRPPRRRGQRLRPRGPARLPRRRRLPARPRLPRRRLAPRQRRLRARGPQGLRRHAQEQGPHQGEARHRGCYLLHAQRRLRRRRARLPRLGRQGIRRRVVKALARPHHARRALLRRHARARHADRRLPRVQELPPREPRQGQHLRPPRGLPRRLRPR

SEQ ID NO: 20773 - protein, 366 aa, Zea mays subsp. mays
  misc_feature (1)..(366): Ceres Seq. ID no. 12387085
MECEPEELQFLGVVGIYRFSAEILRGPHRPLFARIAAAFALPLSALFLLHVAISHALFTHIDSDDTALDASSPGTDTQRRLLSRLASDWLALLLFKSAYLLALLLLSLLSVAASVFSVASVYSAKRDALTFPRVLSVVPRVWRRLAATFLAAFALLFAYHAVAVLVFVGLLVAADNGSGLAGLLAFLVAVAYLLGLVYLGVVWHLASVVSVLEDHKGFAAMRKSKDLIRGKLVTAGAIFFTLNVVFAAVELGFRAWVVRGSGAASSRLLLGLIMLAALCCVVMLALVTQTVVYLVCKSYHHESLDKANISDHLEVYLGDYVPAKGVRRADGAVPGLTVNPIASLSLSLLANPSSDAGILLLPPAAR

SEQ ID NO: 20774 - DNA, 1779 bp, Zea mays subsp. mays
  misc_feature (1)..(1779): Ceres Seq. ID no. 12387104
agacgcgcgccaggcaagcaacaatggccaagcttctcaagccttggtacgcggccttcgtgaacagattcctcgccgtggtcgcggtggcatctatcgtagccgccgcgctccggcgggcgtggccagcattcagcatggacgatgtcgtcggcagccttggcgccgcgcggccggtccacgtgctcatggcggtcatcctggctgccggcgtggcgaagctgaggcgcctgcgccggccgcgggacgtgtacctggtggagtacggctgcttccgaccgcggccgtgcttccgggcgccgttcgccacgtgcctggagcacgtgcacctcctgccgtacctggtggacgacgagagcgtcagcttcgccatccgcctgctcgagcgctcggggctcggcgacgagacgtgcctgccctactcctaccactacatgcctccggaccgcagcctcgaggcggcccgggaggaggccgagctggtcatcttctccgcagtggacgaggtgttcgccagggcgagcgtgaggcccgaggagatcgacgtgctcatcgtcaactgcagcatcttcacgcccacgccggtcttcgccgacatggtcgtcaacaggtacgggctccgcgccgacgtgcagtgcctgaacctgtccgggatgggctgcggcgcggggctcgtctccatcggcctggccaagaacctcctccaggtggcgccgccaggcacgcgcgtcctgacggtgtccacggagatcctctcgtcgcagtactacgtcgggagcgagcgcgcgatgctgctgcccaactgcctcttccgcatgggggccgccgccacgatcctctccaacagccccgagcgcgcgcggttccggctcggccgcctcgtccgcaccatgaccgccgcgcgggacgccgactaccgctgcatattccaggaggaagacggcgagggcatcctgggcgttcgcctctccaaggacctcaccacaacggccggccatgcgctcaagcggaacatcgcggcgttcggccccctcgtgctgccggtctcggagcagctcctggtggcgatgtcgctgctcaagcgcaagttcatgagcggccggcgcgccagggtgaggctgtaccgcccggacttccgcaaggcgtttgagcacttctgcatccacgccggcggccgcgcggtgatcgacgaggtgcagcgcgggctcggcctgtccgacgaggacgtggaggcgtcgcggatgacgctgcaccggttcgggaacacgtccagcagcctggtgctgtacgagctggcctacatcgaggccaaggcccggatgagggcgggcgatcgggtgtggatgatctccttcggcgccggattcgagtgcagctgtgtggcattggagtgcgtcaagccgccggccgacgccggcgggccctgggccgactgcatcgaccgctacccggtgcagctccccgaagtcgccaaggacaacatctgatcaaccccttcttctggatctggggcatgctgcatcatgctggacatgaacatgcccaaggcttccgtcgtcgtcgatgtcgtcgtccttagtgccgggctgtcggccaccgcccaacatgtcgtgctctgtctatgatcgatctcttggaaataatgtagccctacccctacggtgtccaaaacgcaagtatggcgcgtttgtgtttgttaccactgcacttgtttaccacgctgcactgcgtttgtgtttgttaccactgcacaaagttaattaagcgccagttacgatc

SEQ ID NO: 20775 - protein, 494 aa, Zea mays subsp. mays
  misc_feature (1)..(494): Ceres Seq. ID no. 12387105
TRARQATMAKLLKPWYAAFVNRFLAVVAVASIVAAALRRAWPAFSMDDVVGSLGAARPVHVLMAVILAAGVAKLRRLRRPRDVYLVEYGCFRPRPCFRAPFATCLEHVHLLPYLVDDESVSFAIRLLERSGLGDETCLPYSYHYMPPDRSLEAAREEAELVIFSAVDEVFARASVRPEEIDVLIVNCSIFTPTPVFADMVVNRYGLRADVQCLNLSGMGCGAGLVSIGLAKNLLQVAPPGTRVLTVSTEILSSQYYVGSERAMLLPNCLFRMGAAATILSNSPERARFRLGRLVRTMTAARDADYRCIFQEEDGEGILGVRLSKDLTTTAGHALKRNIAAFGPLVLPVSEQLLVAMSLLKRKFMSGRRARVRLYRPDFRKAFEHFCIHAGGRAVIDEVQRGLGLSDEDVEASRMTLHRFGNTSSSLVLYELAYIEAKARMRAGDRVWMISFGAGFECSCVALECVKPPADAGGPWADCIDRYPVQLPEVAKDNI

SEQ ID NO: 20776 - protein, 487 aa, Zea mays subsp. mays
  misc_feature (1)..(487): Ceres Seq. ID no. 12387106
MAKLLKPWYAAFVNRFLAVVAVASIVAAALRRAWPAFSMDDVVGSLGAARPVHVLMAVILAAGVAKLRRLRRPRDVYLVEYGCFRPRPCFRAPFATCLEHVHLLPYLVDDESVSFAIRLLERSGLGDETCLPYSYHYMPPDRSLEAAREEAELVIFSAVDEVFARASVRPEEIDVLIVNCSIFTPTPVFADMVVNRYGLRADVQCLNLSGMGCGAGLVSIGLAKNLLQVAPPGTRVLTVSTEILSSQYYVGSERAMLLPNCLFRMGAAATILSNSPERARFRLGRLVRTMTAARDADYRCIFQEEDGEGILGVRLSKDLTTTAGHALKRNIAAFGPLVLPVSEQLLVAMSLLKRKFMSGRRARVRLYRPDFRKAFEHFCIHAGGRAVIDEVQRGLGLSDEDVEASRMTLHRFGNTSSSLVLYELAYIEAKARMRAGDRVWMISFGAGFECSCVALECVKPPADAGGPWADCIDRYPVQLPEVAKDNI

SEQ ID NO: 20777 - protein, 449 aa, Zea mays subsp. mays
  misc_feature (1)..(449): Ceres Seq. ID no. 12387107
MDDVVGSLGAARPVHVLMAVILAAGVAKLRRLRRPRDVYLVEYGCFRPRPCFRAPFATCLEHVHLLPYLVDDESVSFAIRLLERSGLGDETCLPYSYHYMPPDRSLEAAREEAELVIFSAVDEVFARASVRPEEIDVLIVNCSIFTPTPVFADMVVNRYGLRADVQCLNLSGMGCGAGLVSIGLAKNLLQVAPPGTRVLTVSTEILSSQYYVGSERAMLLPNCLFRMGAAATILSNSPERARFRLGRLVRTMTAARDADYRCIFQEEDGEGILGVRLSKDLTTTAGHALKRNIAAFGPLVLPVSEQLLVAMSLLKRKFMSGRRARVRLYRPDFRKAFEHFCIHAGGRAVIDEVQRGLGLSDEDVEASRMTLHRFGNTSSSLVLYELAYIEAKARMRAGDRVWMISFGAGFECSCVALECVKPPADAGGPWADCIDRYPVQLPEVAKDNI

SEQ ID NO: 20778 - DNA, 1607 bp, Zea mays subsp. mays
  misc_feature (1)..(1607): Ceres Seq. ID no. 12387119
atttctcctctcctctcccctcgctagttcgtcgcgtcctcctcagatcaacaaaccgtgtcctgctgctgcctctggaaaccaccgggggatcgccccgcccttttcttcccgcaccccagatcctccgtcccaaaacggcagcttccggaggtctcccgtctccctgctccttccggcgcgacgggtggcccggctcgcggatccggcggtcttcggtcgacggcgaggcggcgctcgtcttggatcgggagtggttgctgaggcgcggagatggtggccgaggcggaagtcatgcatcagtcccccgttccggtgctggaggtgcagtaccaccggcgcgcgacgaccaagggggttgacgacgtcgtcgggatgtccgcgcccgcccccgcggaggttggggttggggttggggttgaggtcgaggtcgaggtcgaggtcgccgtggaggtgcctcgcatggggttggagcagcctgatgtcgcaccaagtttatccacggacatgatacagcagtttgtgcccaacatccgttctggtagcttcgccgacattgggcctcggaggtatatggaggacgagcacatccgaatagatgatctttccgcccatctcggctcgatgttggtctgccctctgcctagcgccttctacggggtctttgacggccatggcggcccggacgccgcagcctacatgaagaggcatgcgatgaggttcttgtttgaggaaagcgagttcccacaggcgtcgcaggtggatgaggtgtacctcgagtccgtggagagctgtgtccgcagagccttcctgcaggcggaccttgccctggctgatgatctggacatcagccggtcctctggaaccacggcgctcactgcattagtgtttggaaggcaactggtggtcgcgaacacgggggactgccgcgcggtgttgtgccggaaaggagtggcgatggagatgtcccgcgaccaccgcgcgaaccacgtggaggagcgcgagagggtggccgcgtcgggcgggtacatcgaggacgggtacctgaacggggtgctgtcggtgacgcgggcgctgggcgactgggacatgaaggcgcccggcgcgtcggcgtcggcggcgctgatcgcggagcccgagttccggcgggcgacgctgggtgaggacgacgagttcctcgtcatggggtgcgacgggatctgggacgtgatgacgagccagcacgcggtgagcctggtgcggcgcggcctgcggcagcacgacgaccccgcgcgctgcgcccgggagctggtgatggaggccaagcggctggagacggccgacaacctgacggtcgtcgtggtgtgcttcgcgccggagatggggtcgccgtttacaccgcagcaacagcaggaggaggagctgcccgcgaggcccaggagctgcaagaagggcctgtcgacggaggcgctgtgcagcctgaggagctggctggatacggaccaccggtagagggaggaagagctggggggtgtgtaaatactggagtattatgctgacagcaacactggttgattatgagcgctgggccatctgttgaggattttacgtaggctggttcagcagcc

SEQ ID NO: 20779 - protein, 405 aa, Zea mays subsp. mays
  misc_feature (1)..(405): Ceres Seq. ID no. 12387120
MVAEAEVMHQSPVPVLEVQYHRRATTKGVDDVVGMSAPAPAEVGVGVGVEVEVEVEVAVEVPRMGLEQPDVAPSLSTDMIQQFVPNIRSGSFADIGPRRYMEDEHIRIDDLSAHLGSMLVCPLPSAFYGVFDGHGGPDAAAYMKRHAMRFLFEESEFPQASQVDEVYLESVESCVRRAFLQADLALADDLDISRSSGTTALTALVFGRQLVVANTGDCRAVLCRKGVAMEMSRDHRANHVEERERVAASGGYIEDGYLNGVLSVTRALGDWDMKAPGASASAALIAEPEFRRATLGEDDEFLVMGCDGIWDVMTSQHAVSLVRRGLRQHDDPARCARELVMEAKRLETADNLTVVVVCFAPEMGSPFTPQQQQEEELPARPRSCKKGLSTEALCSLRSWLDTDHR

SEQ ID NO: 20780 - protein, 398 aa, Zea mays subsp. mays
  misc_feature (1)..(398): Ceres Seq. ID no. 12387121
MHQSPVPVLEVQYHRRATTKGVDDVVGMSAPAPAEVGVGVGVEVEVEVEVAVEVPRMGLEQPDVAPSLSTDMIQQFVPNIRSGSFADIGPRRYMEDEHIRIDDLSAHLGSMLVCPLPSAFYGVFDGHGGPDAAAYMKRHAMRFLFEESEFPQASQVDEVYLESVESCVRRAFLQADLALADDLDISRSSGTTALTALVFGRQLVVANTGDCRAVLCRKGVAMEMSRDHRANHVEERERVAASGGYIEDGYLNGVLSVTRALGDWDMKAPGASASAALIAEPEFRRATLGEDDEFLVMGCDGIWDVMTSQHAVSLVRRGLRQHDDPARCARELVMEAKRLETADNLTVVVVCFAPEMGSPFTPQQQQEEELPARPRSCKKGLSTEALCSLRSWLDTDHR

SEQ ID NO: 20781 - protein, 371 aa, Zea mays subsp. mays
  misc_feature (1)..(371): Ceres Seq. ID no. 12387122
MSAPAPAEVGVGVGVEVEVEVEVAVEVPRMGLEQPDVAPSLSTDMIQQFVPNIRSGSFADIGPRRYMEDEHIRIDDLSAHLGSMLVCPLPSAFYGVFDGHGGPDAAAYMKRHAMRFLFEESEFPQASQVDEVYLESVESCVRRAFLQADLALADDLDISRSSGTTALTALVFGRQLVVANTGDCRAVLCRKGVAMEMSRDHRANHVEERERVAASGGYIEDGYLNGVLSVTRALGDWDMKAPGASASAALIAEPEFRRATLGEDDEFLVMGCDGIWDVMTSQHAVSLVRRGLRQHDDPARCARELVMEAKRLETADNLTVVVVCFAPEMGSPFTPQQQQEEELPARPRSCKKGLSTEALCSLRSWLDTDHR

SEQ ID NO: 20782 - DNA, 1673 bp, Zea mays subsp. mays
  misc_feature (1)..(1673): Ceres Seq. ID no. 12387134
attcagaagcagtgaagtgagagaggtaaaacaagctgagactctaacttcaaaggaagatacacacacaaaggacagtgagaaggaggccaagaagcttgctcgcaaggcgctagggaggaagaagacaaccacgcactattgctgttgcttgtgcttagtgtgtgctcgtggctagaagcagacaagcagctgcgggagcataagggcggcatggcttcttgcggtagcttctactttgttcccatgctcctgctgatgctcctgctcgcttctcccgccactgctgcactggtgacatcctcccagcctggcggcaatgccactgctgcaaggccgaggccggggatggagcagctcaagcgcaagaggatcagggctctgctcaccaagcttaacaagcctgctctcaagactatccagagctcggatggcgacatcatagactgtgttccctctcacctccagcccgcatttgaccacccaaagctcaggggcgaaaagattctggatccgccggagaggcccaagaaccgcaacttcacctttggcggcagcggcagaagcagggtcggcgaggtggtggtgcaggcgtggcacgccaccggcgaggcgtgtccagaggggaccgtgccgatacggcggacgacggagaaggatctgctcagggctagctccctcaggaggtacggcaggaagccagcgcgccggggtgttcgccgtgattccacaagcagcggccatgagcatgcagttgggtatgtaaactcagaacagtactatggggccaaggccagtgttaatgtgtggtcgccaaggataggtgacccatctgagttcagcctgtctcagatctgggtcctctctggctccttcggcaatgatctcaacaccatcgaagctggatggcaggtaagcccagagctatacggagacagtaacccaagattcttcacctactggacaactgacgcgtaccaagaaaccgggtgctacaaccacaattgccgcggattcgtgcagacgacgaacaagattgcaattggggcggctatcaccccggagtcggtgtacaatggcaggcagttcgacatcactctcatgctatggaaggacccaaagcaggggcactggtggctggagctgggcccgggcctcgtagtcgggtactggccgtcgcacctcttcagccacctggctcgccacgccaacatggtgcagttcggcggcgaggtcgtcaacacccggccgtcggggtcgcataccgcgacgcagatgggcagcggccacttccccagagagggcttcgaccgcgccgcctacttccggaacctgcaggtggtggactgggacaacaacctcatcccggcggccaacctgaaactcctcgccgaccatcctggatgctacgatatccagggaggcactaacagctactggggaagctacttctactacggaggacccgggaggaacgccaaatgtccctgagatcaattcggaccggatgtctctttcttgttcgatgttcttttttcgttgccctttctaggatttggtaggtcttatacgtctttaacgaaagaatgcatccacggttgagacttgggaggaatttgtaaatttggcaagtacctgttatatttaatatccctatggctcatattttattt

SEQ ID NO: 20783 - protein, 425 aa, Zea mays subsp. mays
  misc_feature (1)..(425): Ceres Seq. ID no. 12387135
MASCGSFYFVPMLLLMLLLASPATAALVTSSQPGGNATAARPRPGMEQLKRKRIRALLTKLNKPALKTIQSSDGDIIDCVPSHLQPAFDHPKLRGEKILDPPERPKNRNFTFGGSGRSRVGEVVVQAWHATGEACPEGTVPIRRTTEKDLLRASSLRRYGRKPARRGVRRDSTSSGHEHAVGYVNSEQYYGAKASVNVWSPRIGDPSEFSLSQIWVLSGSFGNDLNTIEAGWQVSPELYGDSNPRFFTYWTTDAYQETGCYNHNCRGFVQTTNKIAIGAAITPESVYNGRQFDITLMLWKDPKQGHWWLELGPGLVVGYWPSHLFSHLARHANMVQFGGEVVNTRPSGSHTATQMGSGHFPREGFDRAAYFRNLQVVDWDNNLIPAANLKLLADHPGCYDIQGGTNSYWGSYFYYGGPGRNAKCP

SEQ ID NO: 20784 - protein, 414 aa, Zea mays subsp. mays
  misc_feature (1)..(414): Ceres Seq. ID no. 12387136
MLLLMLLLASPATAALVTSSQPGGNATAARPRPGMEQLKRKRIRALLTKLNKPALKTIQSSDGDIIDCVPSHLQPAFDHPKLRGEKILDPPERPKNRNFTFGGSGRSRVGEVVVQAWHATGEACPEGTVPIRRTTEKDLLRASSLRRYGRKPARRGVRRDSTSSGHEHAVGYVNSEQYYGAKASVNVWSPRIGDPSEFSLSQIWVLSGSFGNDLNTIEAGWQVSPELYGDSNPRFFTYWTTDAYQETGCYNHNCRGFVQTTNKIAIGAAITPESVYNGRQFDITLMLWKDPKQGHWWLELGPGLVVGYWPSHLFSHLARHANMVQFGGEVVNTRPSGSHTATQMGSGHFPREGFDRAAYFRNLQVVDWDNNLIPAANLKLLADHPGCYDIQGGTNSYWGSYFYYGGPGRNAKCP

SEQ ID NO: 20785 - protein, 410 aa, Zea mays subsp. mays
  misc_feature (1)..(410): Ceres Seq. ID no. 12387137
MLLLASPATAALVTSSQPGGNATAARPRPGMEQLKRKRIRALLTKLNKPALKTIQSSDGDIIDCVPSHLQPAFDHPKLRGEKILDPPERPKNRNFTFGGSGRSRVGEVVVQAWHATGEACPEGTVPIRRTTEKDLLRASSLRRYGRKPARRGVRRDSTSSGHEHAVGYVNSEQYYGAKASVNVWSPRIGDPSEFSLSQIWVLSGSFGNDLNTIEAGWQVSPELYGDSNPRFFTYWTTDAYQETGCYNHNCRGFVQTTNKIAIGAAITPESVYNGRQFDITLMLWKDPKQGHWWLELGPGLVVGYWPSHLFSHLARHANMVQFGGEVVNTRPSGSHTATQMGSGHFPREGFDRAAYFRNLQVVDWDNNLIPAANLKLLADHPGCYDIQGGTNSYWGSYFYYGGPGRNAKCP

SEQ ID NO: 20786 - DNA, 1241 bp, Zea mays subsp. mays
  misc_feature (1)..(1241): Ceres Seq. ID no. 12387145
agtgatgttctcctacgtgtggtccttcacgctgcagatgtacctgcaggcgcagagcaagaacgcggtgatcacgtacctggccatgctgaacctcggcctccacctgctcctgtcctggctggccaccgccaggctccgcctcggcctcgccggcgtcatgggctccatggttgtcgccatgtggatccccgtgctcggccagctcgccttcgtcttcttcggcgggtgcccgcgcacctggaccggcttctcctccgccgccttcgccgacctcgccgccatcgtcaggctgtcgctgtcgtctggcgtcatgctctgtttggagctgtggtacaacaccatactggtgctgctcactgggtacatgaagaacgcagaggttgcgctggacgccctctcaatatgcctcaacatcaacggctgggagatgatgatttccatcggctttctggtggcaaccggagtacgggtggcgaacgagctgggagccgggagcgcgaggagggccaagttcgccatctacaacgtggtggccacctcctccatcatcgggtccgtgctgttcgtgctgttcctcctcttccgcggaggcctcgcctacatattcaccgacagccaggcggtggcggacgcagtcgccggcctctcgcccctgctggccttctccatactgctcaacagcgtccagccagtgctgtcaggcgtcgctgtcggcgcgggctggcagagcgtcgtcgcctacgttaacatcacttcgtactacctcatcggcatccctcttggagccgtgctgggctacgcgctggggcttcatgtgaagggcatctggatcggcatgctgctcggaacgctggtccagactgttgtgcttctcttcataacgttgaagaccgactgggaaaaacaggtggaggttgctcaagagaggctgaagagatggtacatggaagagaacagaagactccaggggtccagacgaaacccttaggccggccctcagctccactgtgtatctctagttttccactcaccacgagaacaaaacgagggagacgactgctccacgtacaggccgatcgaggctgaaggatcatctctgggctgtatggtattgtagacacaaataatcatctgggctgggctgggcatgcaggtaatagtggtgtgcactagttctgaggttatatctctgccttgttcatcttaattcgatctgccggtgtcttgttgatcagtgc

SEQ ID NO: 20787 - protein, 329 aa, Zea mays subsp. mays
  misc_feature (1)..(329): Ceres Seq. ID no. 12387146
VMFSYVWSFTLQMYLQAQSKNAVITYLAMLNLGLHLLLSWLATARLRLGLAGVMGSMVVAMWIPVLGQLAFVFFGGCPRTWTGFSSAAFADLAAIVRLSLSSGVMLCLELWYNTILVLLTGYMKNAEVALDALSICLNINGWEMMISIGFLVATGVRVANELGAGSARRAKFAIYNVVATSSIIGSVLFVLFLLFRGGLAYIFTDSQAVADAVAGLSPLLAFSILLNSVQPVLSGVAVGAGWQSVVAYVNITSYYLIGIPLGAVLGYALGLHVKGIWIGMLLGTLVQTVVLLFITLKTDWEKQVEVAQERLKRWYMEENRRLQGSRRNP

SEQ ID NO: 20788 - protein, 328 aa, Zea mays subsp. mays
  misc_feature (1)..(328): Ceres Seq. ID no. 12387147
MFSYVWSFTLQMYLQAQSKNAVITYLAMLNLGLHLLLSWLATARLRLGLAGVMGSMVVAMWIPVLGQLAFVFFGGCPRTWTGFSSAAFADLAAIVRLSLSSGVMLCLELWYNTILVLLTGYMKNAEVALDALSICLNINGWEMMISIGFLVATGVRVANELGAGSARRAKFAIYNVVATSSIIGSVLFVLFLLFRGGLAYIFTDSQAVADAVAGLSPLLAFSILLNSVQPVLSGVAVGAGWQSVVAYVNITSYYLIGIPLGAVLGYALGLHVKGIWIGMLLGTLVQTVVLLFITLKTDWEKQVEVAQERLKRWYMEENRRLQGSRRNP

SEQ ID NO: 20789 - protein, 317 aa, Zea mays subsp. mays
  misc_feature (1)..(317): Ceres Seq. ID no. 12387148
MYLQAQSKNAVITYLAMLNLGLHLLLSWLATARLRLGLAGVMGSMVVAMWIPVLGQLAFVFFGGCPRTWTGFSSAAFADLAAIVRLSLSSGVMLCLELWYNTILVLLTGYMKNAEVALDALSICLNINGWEMMISIGFLVATGVRVANELGAGSARRAKFAIYNVVATSSIIGSVLFVLFLLFRGGLAYIFTDSQAVADAVAGLSPLLAFSILLNSVQPVLSGVAVGAGWQSVVAYVNITSYYLIGIPLGAVLGYALGLHVKGIWIGMLLGTLVQTVVLLFITLKTDWEKQVEVAQERLKRWYMEENRRLQGSRRNP

SEQ ID NO: 20790 - DNA, 1510 bp, Zea mays subsp. mays
  misc_feature (1)..(1510): Ceres Seq. ID no. 12387174
gcacgagaccattacctagaacatcctaatcgaaaaaagcgaaagctcaagcaaatacaagctctcagttagaccacactcaaaccagccacggacagcctcaaaatcccgagcaggagctcgctcgtagccccgagaacccgaaagctctgcagcgagatgtctcccgagctgaccggcaagatggccgccaaggccgccgccgccgctgcggcggtgaagcccgcgacgagggcgtacgtgacgttcctggcgggcgacggcgactactggaagggcgtggtgggcctggccaagggcctgcgcaaggtcggctcggcctatcccctggtggtggcccttctgcccgacgtgccggagtcccaccgccgcatcctcgtctcgcagggctgcatcctccgcgagatcgagcccgtgtacccgcctgagaaccagacgcagttcgccatggcgtactacgtcatcaactactccaagctccgcatctgggagttcgtggagtacgagaggatggtgtacctggacgcggacatccaggtgttcgagaacatcgacgagctgttcgagctcgagaaggggtacttctacgcggtgatggactgcttctgcgagaagacgtggagccacaccccgcagtacaggatcggctactgccaacagtgcccggacaaggtggcgtggccgaccaccgagctgggccctccgcccccgctctacttcaacgccggcatgttcgcgcacgagcccagcatggccaccgccaaggcactcctcgacaccctccgcgtcactccgcccacccccttcgcagagcaggacttcctgaacatgttcttcagggaccagtacaggccgatccctaacgtgtacaacctcgtgctcgccatgctctggaggcaccccgagaacgtccagctggagaaggtgaaggtcgtgcactactgcgcggcggggtccaagccgtggaggttcacgggcaaggaggccaacatggacagggaggacatcaagacgctggtgaacaagtggtgggacatctacaacgacgaggcactggacttcaagggcctgcccctctcgcccgccgacgccgacgacgaggtggaggcggtggccaagaagccgctccgcgcggcgctggcggaggccggcacggtcaagtacgtcaccgcgccctcggccgcgtgacaccgtgcttcggcttcccgccggtggccgcgctatggcttttgcgcggtcctcacaagtccgtaaagaagaatctcactataaggcctttgttttgaattttgtttatgaattagggtgtctaattttggatcagttcctttcccttgtgtgtctatttagggtgtgagcttatatatatatagtaccaattcaaggtgcaagcgttcgtcaggaattgggctttatgaatacgcccttcggtcacagctagagtatttgtcctgtaccgagggattatgtgtattttgcttggtgaattaatatataaaatacgaagccg

SEQ ID NO: 20791 - protein, 342 aa, Zea mays subsp. mays
  misc_feature (1)..(342): Ceres Seq. ID no. 12387175
MSPELTGKMAAKAAAAAAAVKPATRAYVTFLAGDGDYWKGVVGLAKGLRKVGSAYPLVVALLPDVPESHRRILVSQGCILREIEPVYPPENQTQFAMAYYVINYSKLRIWEFVEYERMVYLDADIQVFENIDELFELEKGYFYAVMDCFCEKTWSHTPQYRIGYCQQCPDKVAWPTTELGPPPPLYFNAGMFAHEPSMATAKALLDTLRVTPPTPFAEQDFLNMFFRDQYRPIPNVYNLVLAMLWRHPENVQLEKVKVVHYCAAGSKPWRFTGKEANMDREDIKTLVNKWWDIYNDEALDFKGLPLSPADADDEVEAVAKKPLRAALAEAGTVKYVTAPSAA

SEQ ID NO: 20792 - protein, 334 aa, Zea mays subsp. mays
  misc_feature (1)..(334): Ceres Seq. ID no. 12387176
MAAKAAAAAAAVKPATRAYVTFLAGDGDYWKGVVGLAKGLRKVGSAYPLVVALLPDVPESHRRILVSQGCILREIEPVYPPENQTQFAMAYYVINYSKLRIWEFVEYERMVYLDADIQVFENIDELFELEKGYFYAVMDCFCEKTWSHTPQYRIGYCQQCPDKVAWPTTELGPPPPLYFNAGMFAHEPSMATAKALLDTLRVTPPTPFAEQDFLNMFFRDQYRPIPNVYNLVLAMLWRHPENVQLEKVKVVHYCAAGSKPWRFTGKEANMDREDIKTLVNKWWDIYNDEALDFKGLPLSPADADDEVEAVAKKPLRAALAEAGTVKYVTAPSAA

SEQ ID NO: 20793 - protein, 246 aa, Zea mays subsp. mays
  misc_feature (1)..(246): Ceres Seq. ID no. 12387177
MAYYVINYSKLRIWEFVEYERMVYLDADIQVFENIDELFELEKGYFYAVMDCFCEKTWSHTPQYRIGYCQQCPDKVAWPTTELGPPPPLYFNAGMFAHEPSMATAKALLDTLRVTPPTPFAEQDFLNMFFRDQYRPIPNVYNLVLAMLWRHPENVQLEKVKVVHYCAAGSKPWRFTGKEANMDREDIKTLVNKWWDIYNDEALDFKGLPLSPADADDEVEAVAKKPLRAALAEAGTVKYVTAPSAA

SEQ ID NO: 20794 - DNA, 1594 bp, Zea mays subsp. mays
  misc_feature (1)..(1594): Ceres Seq. ID no. 12387222
agatctggatccaaacggcggctctgtttcgtgcgctgtcccgtctccctccgtctcgtcagcttcgtgccgtgcccgtgcgagccgctgccaacccgctccagctttgcccgttgccttggccgtcccgtccggccgtccctagaaaaggccgcgtcccacgttgccttggttcccccaccctgctgtctccctccctccttccttccttccccgccactgcgcagcgcgagtgcggcgacagccagtcacacactcacactccctcgaccgctctcggccccgtccgcgtcgccgcagggcgaggaggcaatggcggcaggcgggaatggcgccggcggggacaccagggcggccttcgcgcggatctacaagacgctcaaggaggagctgctcaccgacccggccttcgagttcaccgaggagtcacgccagtggatcgaccgcatggttgactacaatgtactcggaggcaagtgtaaccgtgggctctctgtggtcgacagctacaagctgctcaagggcgctgatgctctgggcgaggaggaaacgttccttgcttgcaccctcggctggtgcattgaatggcttcaggctttctttcttgtgcttgatgatatcatggatgactctcacactcgtcgcggccagccttgctggttcagggtgcctcaggttggcttaattgctgcgaatgacgggatcatccttcgcaaccatatctcacggatccttcggcgccactttaagggcaaaccttactatgctgatctccttgatttgttcaatgaggttgagttcaagacagcttcaggtcagctgctggaccttatcactacccatgagggagaaaaagatctaacaaagtataacataacagttcacggtcgaattgttcaatacaagacagcctattattcattttatctgccggttgcatgtgccctgctgctctctggcgagaatttggacaattatggtgatgtagagaacatccttgttgaaatgggaacatactttcaagtccaggatgactatctggattgttacggtgatcctgaatttatcggcaagattggaacggacattgaagattacaagtgctcatggctagttgtgcaagcccttgagcgtgctgatgagagccaaaagcgcattctatttgaaaattatggcaagaaagatccagcctgtgtggcaaaagtgaagaacctctacaaagaacttgacctagaggcggtatttcaggagtacgagaatgagagctacaagaagctgattgcagacattgaagcccagccaagcattgcggttcagaaagtgctgaaatccttcttgcacaagatctacaagaggcagaagtagggtgctcttggataaacgagctcaggagtcgttactccttcgcatgcttgacataaccggacttcctcacctggttgctctagtatgatgtggagcgtctagttaaaaaaatcgatgtagtatgaagcaccttgctgctctgaatattaacaggcaattaaggcaaggtgctgtttcggtttggtggaccgcatgttgcagataataaattagttgttttgtcatgcgg

SEQ ID NO: 20795 - protein, 454 aa, Zea mays subsp. mays
  misc_feature (1)..(454): Ceres Seq. ID no. 12387223
RSGSKRRLCFVRCPVSLRLVSFVPCPCEPLPTRSSFARCLGRPVRPSLEKAASHVALVPPPCCLPPSFLPSPPLRSASAATASHTLTLPRPLSAPSASPQGEEAMAAGGNGAGGDTRAAFARIYKTLKEELLTDPAFEFTEESRQWIDRMVDYNVLGGKCNRGLSVVDSYKLLKGADALGEEETFLACTLGWCIEWLQAFFLVLDDIMDDSHTRRGQPCWFRVPQVGLIAANDGIILRNHISRILRRHFKGKPYYADLLDLFNEVEFKTASGQLLDLITTHEGEKDLTKYNITVHGRIVQYKTAYYSFYLPVACALLLSGENLDNYGDVENILVEMGTYFQVQDDYLDCYGDPEFIGKIGTDIEDYKCSWLVVQALERADESQKRILFENYGKKDPACVAKVKNLYKELDLEAVFQEYENESYKKLIADIEAQPSIAVQKVLKSFLHKIYKRQK

SEQ ID NO: 20796 - protein, 350 aa, Zea mays subsp. mays
  misc_feature (1)..(350): Ceres Seq. ID no. 12387224
MAAGGNGAGGDTRAAFARIYKTLKEELLTDPAFEFTEESRQWIDRMVDYNVLGGKCNRGLSVVDSYKLLKGADALGEEETFLACTLGWCIEWLQAFFLVLDDIMDDSHTRRGQPCWFRVPQVGLIAANDGIILRNHISRILRRHFKGKPYYADLLDLFNEVEFKTASGQLLDLITTHEGEKDLTKYNITVHGRIVQYKTAYYSFYLPVACALLLSGENLDNYGDVENILVEMGTYFQVQDDYLDCYGDPEFIGKIGTDIEDYKCSWLVVQALERADESQKRILFENYGKKDPACVAKVKNLYKELDLEAVFQEYENESYKKLIADIEAQPSIAVQKVLKSFLHKIYKRQK

SEQ ID NO: 20797 - protein, 305 aa, Zea mays subsp. mays
  misc_feature (1)..(305): Ceres Seq. ID no. 12387225
MVDYNVLGGKCNRGLSVVDSYKLLKGADALGEEETFLACTLGWCIEWLQAFFLVLDDIMDDSHTRRGQPCWFRVPQVGLIAANDGIILRNHISRILRRHFKGKPYYADLLDLFNEVEFKTASGQLLDLITTHEGEKDLTKYNITVHGRIVQYKTAYYSFYLPVACALLLSGENLDNYGDVENILVEMGTYFQVQDDYLDCYGDPEFIGKIGTDIEDYKCSWLVVQALERADESQKRILFENYGKKDPACVAKVKNLYKELDLEAVFQEYENESYKKLIADIEAQPSIAVQKVLKSFLHKIYKRQK

SEQ ID NO: 20798 - DNA, 902 bp, Zea mays subsp. mays
  misc_feature (1)..(902): Ceres Seq. ID no. 12387230
atacacagcaaagcctcaaaacctgatcatcagagaaacgaaaaggaagaggagcgtgggagaaaaaacaaaagaaaggaaaagagatatagccctgagaagaatgtcccttacaactgatgaactcaaggccaaggccgaggtatactacggtgacgagatctgccatctgtgtacccagctcctgctcagggaagcaggcctccccaatggcctgcttccattgaaggacctaatcgagtgcggctatgtccaggaaactggattcgtgtggctgaagcaaagcaacagggttgaccacatcttccatagtctaggaaggctggtctcttacggcacggagatcaccggctatgccgagaagggcaggatcaggaaggtcaaagggataaagaccagggagctcatgctgtgggtcccggtggaggagattgctcttgatgatgatccagcgactgggaagcttgtctgcaagagcattgctgggattaccaaaaccttccctgcatcggctttccatatcccggagaaggagaacaatgtgaaggcgaactgtgctgcactgaagccggtggtcctcatggagagagctccacgagttgttaaaaacagctgatccgccttcaattctgcatccactggtatttggagttgacgtacggccgccatatcagcccttaatcctacgtatttaaataatggttgaactagtgtcctttactattttccgttcatgtacttgggaaatgataacacaaagttcttccgcctatatatatactgcggttgtacgattgccctggcatctatataatattgtcctgtaaggtaaccacccaacttcctttcatgtactacgtagctctatattactaatacaaagcatgttgtggacttctatg

SEQ ID NO: 20799 - protein, 204 aa, Zea mays subsp. mays
  misc_feature (1)..(204): Ceres Seq. ID no. 12387231
YTAKPQNLIIRETKRKRSVGEKTKERKRDIALRRMSLTTDELKAKAEVYYGDEICHLCTQLLLREAGLPNGLLPLKDLIECGYVQETGFVWLKQSNRVDHIFHSLGRLVSYGTEITGYAEKGRIRKVKGIKTRELMLWVPVEEIALDDDPATGKLVCKSIAGITKTFPASAFHIPEKENNVKANCAALKPVVLMERAPRVVKNS

SEQ ID NO: 20800 - protein, 170 aa, Zea mays subsp. mays
  misc_feature (1)..(170): Ceres Seq. ID no. 12387232
MSLTTDELKAKAEVYYGDEICHLCTQLLLREAGLPNGLLPLKDLIECGYVQETGFVWLKQSNRVDHIFHSLGRLVSYGTEITGYAEKGRIRKVKGIKTRELMLWVPVEEIALDDDPATGKLVCKSIAGITKTFPASAFHIPEKENNVKANCAALKPVVLMERAPRVVKNS

SEQ ID NO: 20801 - DNA, 1090 bp, Zea mays subsp. mays
  misc_feature (1)..(1090): Ceres Seq. ID no. 12387248
aatcagatgtcatactggggtctaaaaagattgaggctcctgtattatttcgtggaattggacacacggctaatccatcaaacagtttggttctgaaagtcctatctgcctctccatcagcatactcagctaacccaaagactaagttatcgttgcctccatcgcttactgggtcagctatatcactggtttcggttatgcaggcaagaaataatgctcgggtgctgctatctggatcacttgatctttttagcaaccggttcctgaagtctggtgttcaaaaggctggtagcaaaacgagatacgagagagctggaaatgagcaatttgtgacagagacaagcaaatgggtcttccatgagagggggcaccttaaggctgttaatgttaagcaccacaaggttggggagaccaatgaaccaggcatgtaccgcattaacgatgacctggaatactctgttgagatctatgaatggtctggaacaagctggaagccatatgttgctgatgatgtgcaactccagtttttcatgatgagtccttatgttctgaaaactatgtcgaatgacaacaagggtttatactcaacatccttcaaagttcctgatgtctacggagttttccagttcaaagttgagtaccagaggctgggatatactggtttgtcttttacaaagcagattccagtgcgcccttacaggcataacgagtatgagaggttcataacatcagcgtacccatactacactgcctcattttcaacgatgtgtgctttcttcatattctcgcttgtgtacctgtaccacaaataaaggactcacgggagcgcacaagtttctggaggctgctgatgcgacctagatctgtggccaagtgttacccggtgcaattttatggaatcatatatttgtagtaggccaacttagctagaattagacgaccgtgaccgcaatcatgggaaatttactcgtgctagtaggatgttcgatctgccccacaattttttgttttcggatccttctgatcagcacttgtgaaaacgtttacagtctgtagcattgaaaggatgatgaagcatgtagtgattttg

SEQ ID NO: 20802 - protein, 269 aa, Zea mays subsp. mays
  misc_feature (1)..(269): Ceres Seq. ID no. 12387249
SDVILGSKKIEAPVLFRGIGHTANPSNSLVLKVLSASPSAYSANPKTKLSLPPSLTGSAISLVSVMQARNNARVLLSGSLDLFSNRFLKSGVQKAGSKTRYERAGNEQFVTETSKWVFHERGHLKAVNVKHHKVGETNEPGMYRINDDLEYSVEIYEWSGTSWKPYVADDVQLQFFMMSPYVLKTMSNDNKGLYSTSFKVPDVYGVFQFKVEYQRLGYTGLSFTKQIPVRPYRHNEYERFITSAYPYYTASFSTMCAFFIFSLVYLYHK

SEQ ID NO: 20803 - protein, 204 aa, Zea mays subsp. mays
  misc_feature (1)..(204): Ceres Seq. ID no. 12387250
MQARNNARVLLSGSLDLFSNRFLKSGVQKAGSKTRYERAGNEQFVTETSKWVFHERGHLKAVNVKHHKVGETNEPGMYRINDDLEYSVEIYEWSGTSWKPYVADDVQLQFFMMSPYVLKTMSNDNKGLYSTSFKVPDVYGVFQFKVEYQRLGYTGLSFTKQIPVRPYRHNEYERFITSAYPYYTASFSTMCAFFIFSLVYLYHK

SEQ ID NO: 20804 - DNA, 1697 bp, Zea mays subsp. mays
  misc_feature (1)..(1697): Ceres Seq. ID no. 12387264
gtacctccggcgccccctccgacaccggtcctccggcctgcgcaggctagctagctctatataccaccgtgcctccgccgcgcaggcaggggagatccaagggtccgagcaaaaggccggcggcggcgagccagccagccagctaaagcgatcaatatatacatatatactatcgagcaacaagaaagaaaggaaaaaagaaggcaagcccaccagggccggcgaagagaggagctaataaggaaggaaggaaggaaggaaggaagatgatgagcaaggaggcagtggtgaacgcgttcctgggctgcttcatgcacgtggggctggcgctggtgctcgccgtctacctccccgtggcctttgtgtgccgcctcctccaccgcctcctcgtccgccccttcgccaggggcgaggacctccgcggcaaggtcatcctcgtcaccggcgcgtcctccggcatcggcgagcacctggtgtacgagtacgcgaggcacggcgcgtgcgtggcgctggtggcgcgcacggaggtggcgctgcgcgccgtggccaaggcggcgcgcgacctgggcgcccccgacgtgctggtcgtgccggccgacgtcaccaaggtcgacgacgccaagcgcgccgtcgaggagaccgtcgcgcacttcggcaaactgaatcacttggtggccaaacgccgggatctggtccagctgcttctttgaagagatcaccaacataaccgccttccataatgttattgatctcaacttctggggtgccgtgtacccgacctacttcgcgctgccgtacctcaaggccagccggggcaacatcgtggtgaccgcctccgtcgccggcagggtgccgacagccaggatgagcttctacaacgcaagcaaaggcgccgtgatacgtttctacgagacgctgagggctgagctggggtcccacgtgcacgtcaccatcctcacgcccggctacgtcgtctccaacctcaccaagggcaagggcctccagaaggacggccatgtcggcatcgacgaggaggcccgcgacgtacgtgatgagctcgatccaccgccctccctttatttatataatttcctcctcctacgtgcacgcgaacagtacagctacagcgacgaaatggcatgcatgcgcgcgcgcgcttgcagatcaacgtggggccgatgccggtgggcaagacggagtcgctggccgaggtggtggtggccagcgtgcgccgtcgggactactacgtcacgtggcccggctggtactggcccttccacatggtcatgtgcgccgcgccggagctggtggactggttctcccgcaccttctacgtctccaagtccggcgaccaggacggcggcggcggcgcgctcagcaagaagatcctggaggccgtcggcgggaagaagttcctctacccccagaccatacgctcacagaccgccatggcagccaataactgacaacttgcattgcactgtgttatatatatgtcattcatgagaatgcacggtcgatctgttgtttggattagaacacggtgatgatcgaacgggccagcacgggtcaaattgtttattcgtttcgtttcggattttttttccatttcctctgccttttctccacttccgattttacaaatggtcaatgtgtatcaagtaattaatacgaatgttcattcgtggttggcttgc

SEQ ID NO: 20805 - protein, 213 aa, Zea mays subsp. mays
  misc_feature (1)..(213): Ceres Seq. ID no. 12387265
MSFYNASKGAVIRFYETLRAELGSHVHVTILTPGYVVSNLTKGKGLQKDGHVGIDEEARDVRDELDPPPSLYLYNFLLLRAREQYSYSDEMACMRARACRSTWGRCRWARRSRWPRWWWPACAVGTTTSRGPAGTGPSTWSCAPRRSWWTGSPAPSTSPSPATRTAAAARSARRSWRPSAGRSSSTPRPYAHRPPWQPITDNLHCTVLYICHS

SEQ ID NO: 20806 - protein, 148 aa, Zea mays subsp. mays
  misc_feature (1)..(148): Ceres Seq. ID no. 12387266
MSASTRRPATYVMSSIHRPPFIYIISSSYVHANSTATATKWHACARALADQRGADAGGQDGVAGRGGGGQRAPSGLLRHVARLVLALPHGHVRRAGAGGLVLPHLLRLQVRRPGRRRRRAQQEDPGGRRREEVPLPPDHTLTDRHGSQ

SEQ ID NO: 20807 - protein, 147 aa, Zea mays subsp. mays
  misc_feature (1)..(147): Ceres Seq. ID no. 12387267
MMSKEAVVNAFLGCFMHVGLALVLAVYLPVAFVCRLLHRLLVRPFARGEDLRGKVILVTGASSGIGEHLVYEYARHGACVALVARTEVALRAVAKAARDLGAPDVLVVPADVTKVDDAKRAVEETVAHFGKLNHLVAKRRDLVQLLL

SEQ ID NO: 20808 - DNA, 1432 bp, Zea mays subsp. mays
  misc_feature (1)..(1432): Ceres Seq. ID no. 12387277
actctcacagccacgccacgccacgagagaagaatgccgccgacgctgggcctgctcctcgcggcggcggcggcggtcctgctgctgctgctgccgccgccaccatcgacgggggcgcaggagacgtgctggtcggggccggcgccgcggcgcggggcgtggatgtccgtggccagcttcggggcgcgcggggacgggcagacgctcaacacgggcgcgttcgcgcgcgccgtggcgcgcatcgcgcgtcgccggggcgcgcggggcggcacgctgctgtacgtgccgcccggggtgtggctcacgggccccttcaacctcacctcccacatgacgctcttcctcgcccgcggcgccatcgtccgcgccacccaggacacgtcgagctggccgctcatcgacccgctgccgtcgtacgggagagggcgcgagctgcctggcgggagatacatgagcttgatccacggccacggtctgcaggacgtcttcatcacaggtgagaacggcaccatcgacggccaaggcggcgtgtggtgggacatgtggaagaagcgcacgctgcccttcacgaggccgcacctgctggagctcatgtactccaccgacgtcgtcgtctccaacctcgtcttccaggactcgccgttctggaacatccacccggtttactgcagcaacgtagtgatagcaaacctgactgtgttggcgccgcacgactcccccaacaccgacgggatcgatctagattcaagcagcaacgtgtgcgtcgaggactgctacatctccgccggcgacgacctgatttccatcaagagcgggtgggacgagtacggcgtggccttcggccgcccaagctccggcatcacggtccggaggataaccgggtcgggcccgttcgccggcttcgcggtcgggagcgagacctcgggcggcgtggaggacgtcgtggccgagcacctgagcttctccggcgtgggcgtcggggtccacgtgaagaccaactcgggcaggggcggcttcatccggaacgtcaccgtctcccaggtgaccctggacggcgcccgctacggcctgaggatcgccggcgacgtcgggggccaccccggcgcgtcctacaacgcgagcctgctccccgtcgtcgacggcgtggcggtcaggaacgtctggggccggaacgtccggcaggccgggctcatacggggcatcagggactcggtcttcagtaacatttgcctctccaacgtgaagctctatggcattggcagcgactccatcgggccgtggagatgccgagccgtcagtggcagcgcactcgacgtgcaaccgtcgccatgtgcggagctggctagtacgtccgggacaggtttctgtacctgaatcagtttttccgcctcctatagcagcaataaagacgtcagcatttctcaaaaaacag

SEQ ID NO: 20809 - protein, 457 aa, Zea mays subsp. mays
  misc_feature (1)..(457): Ceres Seq. ID no. 12387278
TLTATPRHERRMPPTLGLLLAAAAAVLLLLLPPPPSTGAQETCWSGPAPRRGAWMSVASFGARGDGQTLNTGAFARAVARIARRRGARGGTLLYVPPGVWLTGPFNLTSHMTLFLARGAIVRATQDTSSWPLIDPLPSYGRGRELPGGRYMSLIHGHGLQDVFITGENGTIDGQGGVWWDMWKKRTLPFTRPHLLELMYSTDVVVSNLVFQDSPFWNIHPVYCSNVVIANLTVLAPHDSPNTDGIDLDSSSNVCVEDCYISAGDDLISIKSGWDEYGVAFGRPSSGITVRRITGSGPFAGFAVGSETSGGVEDVVAEHLSFSGVGVGVHVKTNSGRGGFIRNVTVSQVTLDGARYGLRIAGDVGGHPGASYNASLLPVVDGVAVRNVWGRNVRQAGLIRGIRDSVFSNICLSNVKLYGIGSDSIGPWRCRAVSGSALDVQPSPCAELASTSGTGFCT

SEQ ID NO: 20810 - protein, 446 aa, Zea mays subsp. mays
  misc_feature (1)..(446): Ceres Seq. ID no. 12387279
MPPTLGLLLAAAAAVLLLLLPPPPSTGAQETCWSGPAPRRGAWMSVASFGARGDGQTLNTGAFARAVARIARRRGARGGTLLYVPPGVWLTGPFNLTSHMTLFLARGAIVRATQDTSSWPLIDPLPSYGRGRELPGGRYMSLIHGHGLQDVFITGENGTIDGQGGVWWDMWKKRTLPFTRPHLLELMYSTDVVVSNLVFQDSPFWNIHPVYCSNVVIANLTVLAPHDSPNTDGIDLDSSSNVCVEDCYISAGDDLISIKSGWDEYGVAFGRPSSGITVRRITGSGPFAGFAVGSETSGGVEDVVAEHLSFSGVGVGVHVKTNSGRGGFIRNVTVSQVTLDGARYGLRIAGDVGGHPGASYNASLLPVVDGVAVRNVWGRNVRQAGLIRGIRDSVFSNICLSNVKLYGIGSDSIGPWRCRAVSGSALDVQPSPCAELASTSGTGFCT

SEQ ID NO: 20811 - protein, 403 aa, Zea mays subsp. mays
  misc_feature (1)..(403): Ceres Seq. ID no. 12387280
MSVASFGARGDGQTLNTGAFARAVARIARRRGARGGTLLYVPPGVWLTGPFNLTSHMTLFLARGAIVRATQDTSSWPLIDPLPSYGRGRELPGGRYMSLIHGHGLQDVFITGENGTIDGQGGVWWDMWKKRTLPFTRPHLLELMYSTDVVVSNLVFQDSPFWNIHPVYCSNVVIANLTVLAPHDSPNTDGIDLDSSSNVCVEDCYISAGDDLISIKSGWDEYGVAFGRPSSGITVRRITGSGPFAGFAVGSETSGGVEDVVAEHLSFSGVGVGVHVKTNSGRGGFIRNVTVSQVTLDGARYGLRIAGDVGGHPGASYNASLLPVVDGVAVRNVWGRNVRQAGLIRGIRDSVFSNICLSNVKLYGIGSDSIGPWRCRAVSGSALDVQPSPCAELASTSGTGFCT

SEQ ID NO: 20812 - DNA, 1112 bp, Zea mays subsp. mays
  misc_feature (1)..(1112): Ceres Seq. ID no. 12387373
aaccgctcgccgcgtgctccctttgtgactaaaccgcatcctccccgcgccgacctgctccggcgagttaaacatggccgtcctcctccgcggcacctccgccgccgcctcgactgctggcccctcctcggcgctgctcgccaccaccttccgccgctcccgcggctgccttctgccccgtgccgcgccgcagcgccgcttgtatgtggcccgcgcctcggcccagccccttgaggtctgcgctaaggagtccatcaccatccctggccgcctcggagactgtcctttcacacagagggttttgttgactatagaggagaagcatctgccttatgatctgaagctagttgatctagctaataagccagattggttatttgaaatcaacccagaaggtaaagtgcctatcgtgaagctcgaggaaaaatggatcggtgattctgatgttataacacaagcattagaggagaaataccctgaaccacccttggcaactccaccagaaaaagcttcagttggatcaaaaatattttccactttcattggtttcctcaaaagcaaagatccaagcgatggaacagaagaggcactacttaatgagcttacttcatttgatagttatctaaaagacaatggtccatttattaatggtggaataatttctgctgctgatctctctctgggtcctaaactatatcacatggagataactctgggccactacaagaattggtctgttccagattcactttcttatgtaaaaacatatatgaagtcgattttctcaatggattcttttgtcaaaactcaagctctgacagaggatgtaattgctggatggcgcccaaaagtcatgggttaaattcatttctaaagttagacgttaaggagagggagagaggtgtcgattggcgaatggagggtctagatgcaaaggtttgtcgcatggctgtaatatgtacatgaattgtggtggattttgttaggaattttctagggcatagcatatctggtattcatatccaatctcctttgctttgtatgtcaaatggaaaacatctatacaattgtaaaacatatattttatgtaaatgagcattctcgttgaactt

SEQ ID NO: 20813 - protein, 262 aa, Zea mays subsp. mays
  misc_feature (1)..(262): Ceres Seq. ID no. 12387374
MAVLLRGTSAAASTAGPSSALLATTFRRSRGCLLPRAAPQRRLYVARASAQPLEVCAKESITIPGRLGDCPFTQRVLLTIEEKHLPYDLKLVDLANKPDWLFEINPEGKVPIVKLEEKWIGDSDVITQALEEKYPEPPLATPPEKASVGSKIFSTFIGFLKSKDPSDGTEEALLNELTSFDSYLKDNGPFINGGIISAADLSLGPKLYHMEITLGHYKNWSVPDSLSYVKTYMKSIFSMDSFVKTQALTEDVIAGWRPKVMG

SEQ ID NO: 20814 - DNA, 1686 bp, Zea mays subsp. mays
  misc_feature (1)..(1686): Ceres Seq. ID no. 12387379
aaaaggtggagggggtgtgaggtgtgtggttggagttggcctaacaattgagcctgccgcgcacaatcaatggccgcgctcgagtccaacaagaagctgcgcctccttctcgtgcccttcttcgccactagtcacataggcccgttcaccgacctcgccgtccgtctagccacagccaacccggacgccgtcgagctcactctcgccgtcaccccagcgaacgtccacgtggttcgctcggccctcgggcggtacggcgccgaggcgggcggcgtgatcaagattgccacctacccgttccccgcgtggacggcctcgctccgggcgtggagaacctctcggccgccggggacgacgggtggcgcattgatgccgtcgccgtcgacgaggcctcgacgcgaccggcgcaggaggcgctcatcagggaacagtcccctgacgccgtcatcaccgacgtccacttcatctggaacaacgccgtggccggcgagctcggcgtgccgtgcgttacgttcagcgtcgttggcatcttctcgacgctcgtcatgtaccacctcggccgtgacgtcgtcatcagagatggccaggaggtgaccgtccctgggttgccggggccggagatacggatccccgtatccgagttgccggagttcctgagacgccggcaggagcacgacggggtcaggcggtgccatgtggagatgggcaggtgcttcggcgtcaccctcaactcgttcgtggatctggagcagccataccgggacatgtgcgtgcgcagcggatacctgaagcgcgcctacttcgtcgggcccctctcgctgccgttaccaccggccggagcaagcaccagagattcgccgtgcctcgcgtggctcggcaccaagccgaggttttcagtggtgtacgtatgcttcggcaccttcgctgccatctcggaggaccagctccgggaactggcgcttgggctagaagcttcagagaagccattcctgtgggtagtgagggcggacggatggacgccgccggagggctgggaggagcgcgtcggagagagggggatgctagtgagagggtgggcgccgcagacggcgatactgtcccatccagcagttggcgcgttcctgacgcactgcgggtcgagctcgctgctggaggcggcggcggccggcgtgccgatgctgacgtggccgctggtgttcgaccagttcatcgaggagaggctggtgaccgaggtcctcaagatcggggagagggtgtggagcgggacacggagcacgagatacgaggagcaaaaggtcgtggcagcagaggtggtggcgcgagcggtggcaaggttcctggagccgggtggcaccggcgaggcggcgaggagcaaggcgggggtgctcgctgcgaaggcgcgctcggctgtggcggagggtggctcgtcattctgtgatctgcgccgtctcgtcaatgacctgatcgaagcaagaacggctgccggaaccaacgcctgagttacaaaaatcacgagtacgtgttgaattgctctatgtgttttcctttttttccagctgtttgtcgtttctttgggcagcagtttgtgtataggagggtaccaaatatttttaagagaaagaggtatttgtatttccttgtgaatagtagagaaacagacatttttggctagcagccaaatctgcg

SEQ ID NO: 20815 - protein, 317 aa, Zea mays subsp. mays
  misc_feature (1)..(317): Ceres Seq. ID no. 12387380
MYHLGRDVVIRDGQEVTVPGLPGPEIRIPVSELPEFLRRRQEHDGVRRCHVEMGRCFGVTLNSFVDLEQPYRDMCVRSGYLKRAYFVGPLSLPLPPAGASTRDSPCLAWLGTKPRFSVVYVCFGTFAAISEDQLRELALGLEASEKPFLWVVRADGWTPPEGWEERVGERGMLVRGWAPQTAILSHPAVGAFLTHCGSSSLLEAAAAGVPMLTWPLVFDQFIEERLVTEVLKIGERVWSGTRSTRYEEQKVVAAEVVARAVARFLEPGGTGEAARSKAGVLAAKARSAVAEGGSSFCDLRRLVNDLIEARTAAGTNA

SEQ ID NO: 20816 - protein, 265 aa, Zea mays subsp. mays
  misc_feature (1)..(265): Ceres Seq. ID no. 12387381
MGRCFGVTLNSFVDLEQPYRDMCVRSGYLKRAYFVGPLSLPLPPAGASTRDSPCLAWLGTKPRFSVVYVCFGTFAAISEDQLRELALGLEASEKPFLWVVRADGWTPPEGWEERVGERGMLVRGWAPQTAILSHPAVGAFLTHCGSSSLLEAAAAGVPMLTWPLVFDQFIEERLVTEVLKIGERVWSGTRSTRYEEQKVVAAEVVARAVARFLEPGGTGEAARSKAGVLAAKARSAVAEGGSSFCDLRRLVNDLIEARTAAGTNA

SEQ ID NO: 20817 - protein, 244 aa, Zea mays subsp. mays
  misc_feature (1)..(244): Ceres Seq. ID no. 12387382
MCVRSGYLKRAYFVGPLSLPLPPAGASTRDSPCLAWLGTKPRFSVVYVCFGTFAAISEDQLRELALGLEASEKPFLWVVRADGWTPPEGWEERVGERGMLVRGWAPQTAILSHPAVGAFLTHCGSSSLLEAAAAGVPMLTWPLVFDQFIEERLVTEVLKIGERVWSGTRSTRYEEQKVVAAEVVARAVARFLEPGGTGEAARSKAGVLAAKARSAVAEGGSSFCDLRRLVNDLIEARTAAGTNA

SEQ ID NO: 20818 - DNA, 2090 bp, Zea mays subsp. mays
  misc_feature (1)..(2090): Ceres Seq. ID no. 12387564
tcgcaccacaaccacctcctaccccttctcttcttcttctccccccttgcgaatcggagaccaagtgcaattgcccacccaagccccggaaccgggggccaagagcagtacagggggttggtttctgcgacggcgaggacgcgaagcggattcggatcgcgccgccatgccgctcgacgagctcgccgacaaagggccgtcgtcctccgaggaagttcagctcgcgccgtcggattccaagttccggagcctcagtccttcgccgattccgctcccaactcttccgagcatcagatcattggtccactcggtttctgacgagagtgtaaatgtagatgtcgcggcctcacatcaaagtgaaaatggatctatctctactgttagttcactagaatcagagagggcagcatatgaatttcttgctcaaactcctgtcaggtcaactgatgcacatcttcttgagttttcggaggctatgagaactgttgcaaaagccttacgacgagtggctgaagggaaggctgctgctcaagcagaggcagcggagtggaaacgtaagtatgaattagagacagcgcacaagcatcggagtaaaatcaaaggctacagcagttgtatcaataatgacttagacaaactggtcagccaactaaccctggagacacctacatctgatcaattaggatgttgcggaaagcatggtatatgtgcacatgagattctccaggacgaagttcctgggcctatcccaagatctaatcacaaggtggtggggagaaaggcatcatttaaactttcatggggatgtaatggggataaaaatggacaacataagcatgattttgtgtcctttgaaaaaggtgatataacaaccgcagaacgaagcaataagcagatcttactgaaatgggaatcgccaccacaaacagtgcttttcataaccaaaccgaattccaactctgttcgtgttctttgtgctgaaatgatcagatggcttagggagcataaaaatataaacatctttgttgagccacgtgttagcaaggaacttctaacagaggattcttactacaacttcgtccaaacatgggataatgatgaggagataaagatgctgcgcacaaaggttgatttaattataactcttggtggtgatggaactgttctgtgggctgcatcattgttcaaaggacctgttcctccggttgttgcatttgccctgggatcactgggcttcatgacgcctttcccaagcgagcaataccgtgagttgttggacaatgtgctgaatgggccatttagcatcacgctgagaaaccgcatacagtgtcatgtaatacgtgacgaggcaaaggatgaaatcgtgtctgaggagccattcttagtgttgaacgaagttacaatcgaccgaggaatatcatcctaccttaccaacctggaagtctactgtgacagctcttttgttacttgcgtacaaggggatggactaatcatatcaactacatctggaagtacagcatattcattagcagctggagggtccatggttcatcctcaggtcccagggatccttttcaccccaatctgcccgcactctctgtcattcagacctttgattctgcctgaatacgtgaccctccgcgttcaagtgccgttcaacagcaggggcaatgcctgggcatccttcgacggcaaagaccgacagcagctgtcgcccggtgacgccctgatctgcagcatttctccctggcccgtgcccacagcctgcctggtggactcgacgaccgatttcctccgcagcatccatgagggtctccactggaacttgaggaaatcccagtcatttgacggcccgcgtgattgatgcaacagctgttcagttatatttcagcccggtgccagaattcaagctgggaattctcaacaggaataactgtagctactccagggtgctctcacctttaccgttccatacttgcctatatacaaaggttgcgtgcgttagatgtgaggtatagatagatgtatagaatatggatggatgataacgactggacatgttgaataatacaacgccaacgtatgcacgc

SEQ ID NO: 20819 - protein, 620 aa, Zea mays subsp. mays
  misc_feature (1)..(620): Ceres Seq. ID no. 12387565
RTTTTSYPFSSSSPPLRIGDQVQLPTQAPEPGAKSSTGGWFLRRRGREADSDRAAMPLDELADKGPSSSEEVQLAPSDSKFRSLSPSPIPLPTLPSIRSLVHSVSDESVNVDVAASHQSENGSISTVSSLESERAAYEFLAQTPVRSTDAHLLEFSEAMRTVAKALRRVAEGKAAAQAEAAEWKRKYELETAHKHRSKIKGYSSCINNDLDKLVSQLTLETPTSDQLGCCGKHGICAHEILQDEVPGPIPRSNHKVVGRKASFKLSWGCNGDKNGQHKHDFVSFEKGDITTAERSNKQILLKWESPPQTVLFITKPNSNSVRVLCAEMIRWLREHKNINIFVEPRVSKELLTEDSYYNFVQTWDNDEEIKMLRTKVDLIITLGGDGTVLWAASLFKGPVPPVVAFALGSLGFMTPFPSEQYRELLDNVLNGPFSITLRNRIQCHVIRDEAKDEIVSEEPFLVLNEVTIDRGISSYLTNLEVYCDSSFVTCVQGDGLIISTTSGSTAYSLAAGGSMVHPQVPGILFTPICPHSLSFRPLILPEYVTLRVQVPFNSRGNAWASFDGKDRQQLSPGDALICSISPWPVPTACLVDSTTDFLRSIHEGLHWNLRKSQSFDGPRD

SEQ ID NO: 20820 - protein, 565 aa, Zea mays subsp. mays
  misc_feature (1)..(565): Ceres Seq. ID no. 12387566
MPLDELADKGPSSSEEVQLAPSDSKFRSLSPSPIPLPTLPSIRSLVHSVSDESVNVDVAASHQSENGSISTVSSLESERAAYEFLAQTPVRSTDAHLLEFSEAMRTVAKALRRVAEGKAAAQAEAAEWKRKYELETAHKHRSKIKGYSSCINNDLDKLVSQLTLETPTSDQLGCCGKHGICAHEILQDEVPGPIPRSNHKVVGRKASFKLSWGCNGDKNGQHKHDFVSFEKGDITTAERSNKQILLKWESPPQTVLFITKPNSNSVRVLCAEMIRWLREHKNINIFVEPRVSKELLTEDSYYNFVQTWDNDEEIKMLRTKVDLIITLGGDGTVLWAASLFKGPVPPVVAFALGSLGFMTPFPSEQYRELLDNVLNGPFSITLRNRIQCHVIRDEAKDEIVSEEPFLVLNEVTIDRGISSYLTNLEVYCDSSFVTCVQGDGLIISTTSGSTAYSLAAGGSMVHPQVPGILFTPICPHSLSFRPLILPEYVTLRVQVPFNSRGNAWASFDGKDRQQLSPGDALICSISPWPVPTACLVDSTTDFLRSIHEGLHWNLRKSQSFDGPRD

SEQ ID NO: 20821 - protein, 462 aa, Zea mays subsp. mays
  misc_feature (1)..(462): Ceres Seq. ID no. 12387567
MRTVAKALRRVAEGKAAAQAEAAEWKRKYELETAHKHRSKIKGYSSCINNDLDKLVSQLTLETPTSDQLGCCGKHGICAHEILQDEVPGPIPRSNHKVVGRKASFKLSWGCNGDKNGQHKHDFVSFEKGDITTAERSNKQILLKWESPPQTVLFITKPNSNSVRVLCAEMIRWLREHKNINIFVEPRVSKELLTEDSYYNFVQTWDNDEEIKMLRTKVDLIITLGGDGTVLWAASLFKGPVPPVVAFALGSLGFMTPFPSEQYRELLDNVLNGPFSITLRNRIQCHVIRDEAKDEIVSEEPFLVLNEVTIDRGISSYLTNLEVYCDSSFVTCVQGDGLIISTTSGSTAYSLAAGGSMVHPQVPGILFTPICPHSLSFRPLILPEYVTLRVQVPFNSRGNAWASFDGKDRQQLSPGDALICSISPWPVPTACLVDSTTDFLRSIHEGLHWNLRKSQSFDGPRD

SEQ ID NO: 20822 - DNA, 2198 bp, Zea mays subsp. mays
  misc_feature (1)..(2198): Ceres Seq. ID no. 12387571
gcacgagaccattacctagaacatcctaatcgaaaagtcctaaaaccctagcgaaggcgagccttccacttccctcagcctgccgccgccaccgccgccgccgccgccatgtgcccagcagcggcgaccacgagctccgccaagccgtcgaagaagcggaaacagcccgtcatagcgccgccggagtcggactctgaggaggaatctgtctacgacactgcctccgacgatgacgaggaggaagaggagacgcaggagttagagagtgaggatgtagacgaggaggtggaggaggggagcgaggacggcgaggaaaatgaaattggtgacgatagcgaggtggaagaagaggaggtgaaggagaaaaaagaaaaggaggagacggtgaaggagaaaaaggaaaagaaggacatgaagcaagagggaaagaaggcgaagaagcaagaggaaaagaaggcgaagaaggacaagaaggaagaggaaaaaaaggtgatggaggacaagaaagaagaggaaaagaaggcgaagaagaagagcgaggggagtggaatcctgtctaacaagctcttctcggagctccccctctctgagctcactgccaaggccatcagagagatgaactacacccacctcacccagattcaagctagatcaataccacatctgttggaggggaatgatgtgatgggcgcagccaagactggctctgggaagactcttgcattccttataccagcgattgagatgctatatcacacacacttctcaccgaggaatgggactggagctattgtggtttgcccgacacgggaacttgctatccagacacacaatgttgccaaggagttaatgaaatatcactcacaaactctcggatatgtcattggtggtaataatcgaagaagtgaggctgatcagcttgcaaaggggatcaatttattagttgctaccccaggcaggcttttggaccatctacaaaataccaagagtttcatatacagaaggctaaagtgccttgtcattgatgaagccgatcgcatacttgagcaaaactttgaggaagacatgaaacaaatatttaaacgccttccccagaataggcagactgttcttttttctgctacacagactccagaggttgaaaaatttgctaaactgtcatttgagaaaaatgaagaaagtaaaaaaaaacctgtttatgttggagttgatgatgataagtcaaaggctactgttgaaggcctgcagcagggttattgtgtcatttctagcgataaaaggttcttggttctgtatgctttcctaagaaagaagcggaataagaagataatggtgttcttctcatcatgtaattcagtaaagttccacgctgaacttctgaatttccttgggatagagtgttctgatatccatggaaaacagaagcaacagaagcgaactactacattctttagcttttgcaaggcagaaaagggcatcttattgtgcactaatgtggctgcccgtggacttgatattcctgacgtggattatatcttgcaatatgaccctccagatgaaccaaaggattacattcacagagttggtcgtaccgcacgaggtgagaaaggcaaaggaagtgcattgctgttcttactaccagaagaactgaagtttctaatttacctgaaggcggccaaggttaccctgacggaatatgagttcaatcagaagaatgtgccaaatttgcaatcgcagcttgagaatattgttggtgagaattactttctgaaccagtctgccaaagaagcctacagatcctacgttttggcatatgactctcactctatgaaagacatttttaatgtccatcaacttgatctgcagaaagtagccgcgtcattcggtttcaagaatcccccgaaagtgaacctggacctggacagcagtgcggcgaagcatcggaagaagaggagagtagacggtgggaagaggcatggcatcagcgcttcgaacccgtacgggaggaaggacaaaggcggtggcggcgataaaagacagttggcgagattctagaaaggaggaagagcaggagcgtttcactattgttgtgttcgtaccagggctttgattgatgatgttacctggcttgggaaaaatcttgacaggccactaaggctggctataaattttgggttgtcttgatatatttggtgtgt

SEQ ID NO: 20823 - protein, 648 aa, Zea mays subsp. mays
  misc_feature (1)..(648): Ceres Seq. ID no. 12387572
MCPAAATTSSAKPSKKRKQPVIAPPESDSEEESVYDTASDDDEEEEETQELESEDVDEEVEEGSEDGEENEIGDDSEVEEEEVKEKKEKEETVKEKKEKKDMKQEGKKAKKQEEKKAKKDKKEEEKKVMEDKKEEEKKAKKKSEGSGILSNKLFSELPLSELTAKAIREMNYTHLTQIQARSIPHLLEGNDVMGAAKTGSGKTLAFLIPAIEMLYHTHFSPRNGTGAIVVCPTRELAIQTHNVAKELMKYHSQTLGYVIGGNNRRSEADQLAKGINLLVATPGRLLDHLQNTKSFIYRRLKCLVIDEADRILEQNFEEDMKQIFKRLPQNRQTVLFSATQTPEVEKFAKLSFEKNEESKKKPVYVGVDDDKSKATVEGLQQGYCVISSDKRFLVLYAFLRKKRNKKIMVFFSSCNSVKFHAELLNFLGIECSDIHGKQKQQKRTTTFFSFCKAEKGILLCTNVAARGLDIPDVDYILQYDPPDEPKDYIHRVGRTARGEKGKGSALLFLLPEELKFLIYLKAAKVTLTEYEFNQKNVPNLQSQLENIVGENYFLNQSAKEAYRSYVLAYDSHSMKDIFNVHQLDLQKVAASFGFKNPPKVNLDLDSSAAKHRKKRRVDGGKRHGISASNPYGRKDKGGGGDKRQLARF

SEQ ID NO: 20824 - protein, 547 aa, Zea mays subsp. mays
  misc_feature (1)..(547): Ceres Seq. ID no. 12387573
MKQEGKKAKKQEEKKAKKDKKEEEKKVMEDKKEEEKKAKKKSEGSGILSNKLFSELPLSELTAKAIREMNYTHLTQIQARSIPHLLEGNDVMGAAKTGSGKTLAFLIPAIEMLYHTHFSPRNGTGAIVVCPTRELAIQTHNVAKELMKYHSQTLGYVIGGNNRRSEADQLAKGINLLVATPGRLLDHLQNTKSFIYRRLKCLVIDEADRILEQNFEEDMKQIFKRLPQNRQTVLFSATQTPEVEKFAKLSFEKNEESKKKPVYVGVDDDKSKATVEGLQQGYCVISSDKRFLVLYAFLRKKRNKKIMVFFSSCNSVKFHAELLNFLGIECSDIHGKQKQQKRTTTFFSFCKAEKGILLCTNVAARGLDIPDVDYILQYDPPDEPKDYIHRVGRTARGEKGKGSALLFLLPEELKFLIYLKAAKVTLTEYEFNQKNVPNLQSQLENIVGENYFLNQSAKEAYRSYVLAYDSHSMKDIFNVHQLDLQKVAASFGFKNPPKVNLDLDSSAAKHRKKRRVDGGKRHGISASNPYGRKDKGGGGDKRQLARF

SEQ ID NO: 20825 - protein, 520 aa, Zea mays subsp. mays
  misc_feature (1)..(520): Ceres Seq. ID no. 12387574
MEDKKEEEKKAKKKSEGSGILSNKLFSELPLSELTAKAIREMNYTHLTQIQARSIPHLLEGNDVMGAAKTGSGKTLAFLIPAIEMLYHTHFSPRNGTGAIVVCPTRELAIQTHNVAKELMKYHSQTLGYVIGGNNRRSEADQLAKGINLLVATPGRLLDHLQNTKSFIYRRLKCLVIDEADRILEQNFEEDMKQIFKRLPQNRQTVLFSATQTPEVEKFAKLSFEKNEESKKKPVYVGVDDDKSKATVEGLQQGYCVISSDKRFLVLYAFLRKKRNKKIMVFFSSCNSVKFHAELLNFLGIECSDIHGKQKQQKRTTTFFSFCKAEKGILLCTNVAARGLDIPDVDYILQYDPPDEPKDYIHRVGRTARGEKGKGSALLFLLPEELKFLIYLKAAKVTLTEYEFNQKNVPNLQSQLENIVGENYFLNQSAKEAYRSYVLAYDSHSMKDIFNVHQLDLQKVAASFGFKNPPKVNLDLDSSAAKHRKKRRVDGGKRHGISASNPYGRKDKGGGGDKRQLARF

SEQ ID NO: 20826 - DNA, 2001 bp, Zea mays subsp. mays
  misc_feature (1)..(2001): Ceres Seq. ID no. 12387575
  misc_feature (1856)..(1856): n is a, c, t, g, unknown, or other
  misc_feature (1859)..(1859): n is a, c, t, g, unknown, or other
  misc_feature (1866)..(1866): n is a, c, t, g, unknown, or other
  misc_feature (1877)..(1877): n is a, c, t, g, unknown, or other
  misc_feature (1878)..(1878): n is a, c, t, g, unknown, or other
  misc_feature (1890)..(1890): n is a, c, t, g, unknown, or other
  misc_feature (1959)..(1959): n is a, c, t, g, unknown, or other
  misc_feature (1980)..(1980): n is a, c, t, g, unknown, or other
  misc_feature (1996)..(1996): n is a, c, t, g, unknown, or other
gcacgagaccattacctagaacatcctaatcgaaaaatcctggtgctgcacgccccacggtctcggcggccacgccccacactcctcgtcctcgtcctcctcctcgcacccctcctccccggcccgcgccgccgcccatcacatggacccgccgcccaccagctctaccgtggcctcctcctacgccactccgccccagccttcctacgcgccctcctaccctaccagctacaccaagttcaactccgcgctcaacgcggggttgctcaatcccatgtccccgccgccgctgccacttgacaagacgcgctccagccccacactcttcgacatgatggccaacgagcaggactaccacccccgcaccgccgccggcatccactccatccccgccccgccccagccgcaccagctcccgcccgcgcgctccatggacaggcagatgctgctccaggaccgcatcgccgacctcatcggcagctgtagccccgggaaccagttcaacgacgccgactcctccgacgtccgcctcaccctcagctccaaggacggcctctccgtcacgctctgcgttcaccgccacatactcgtcgcgcacagcaggttcttcgccgccaaactgtccgaccgctggtccaagcagcagcggacgctgccgcacatcgtcgagatctccgactgcgacgacgtcgaggtgtacgccgagacgctgcggctcatgtactgcaaggatctccgccggaggctgatgcgggaggatgtgaacaaggtccttggcatcctgaaggtgtccgcagccattgtattcgatgccggggtgttgtcttgcttggagtacttggaggctgcgccttgggctgaggacgatgatgagaaggtggctacgttgttgacgcagctgcatcttgagaactccggggctggggaggtgcttaagagggtgtcactggaattggccccttcgtcattggttgaagaggcagatgaaggaggcagctgcaacggtggcaattccagtggtggtgaggaggtattgctgaggctcctgcaggtcgtcctggaagggaaggacgaaaaggcaaggagggagatgaaggggctagtgtccaaaatgctcagggagaacagcacatcccgtggtggagcaattggtggcgaccttcgcaaggaatcgctctattctgcgtgcaatggatgcttgtccctgctgtgcgagcaatttgtgagggcttcagagggtgatcactcagaggtggcgcggatcgcaaggcaggctgacaacctgcattggatgcttgacatccttgttgagcgccagatcgcggaggatttcttgaggacatgggcaacgcagactgagttagcggcgatgcatcgtaaagtgccagcgatacaccgctacgaagtgagccgagtgacggcaagactctttgttggggttggcaagggtcagatcttggtgtccaaggaggcccgttgccagctcttgagcacctggctagagcccttttatgaggacttctgatggatgcggcgagcatgcaaggggcttgaccggcatttgatcgaggatggactggcaaacacaatcctgacgctgcctcttgcaactcagcaggagatccttctggcatggtttaatcggttcctcaactctggggaggattgcccaaacattcagagagggtttgaggtgtggtggcggcgggcattctggaaaaggaactctgaaccagaaccaccatcccgtttgaggattactgcgatctgcgagaactcttgatgacggcggttcatattcgacatggaatgtggcggatgctgtgatataattattgattttctgtgatatgtantantgtctanctgtttctcannttttttttttgntatgtctgattaggcagttagccaattacacatgtcatcttgatcctgtttcaatgcaatgtataccangtccaatgtactactatgccncaaccattttgattcnaagtg

SEQ ID NO: 20827 - protein, 460 aa, Zea mays subsp. mays
  misc_feature (1)..(460): Ceres Seq. ID no. 12387576
MDPPPTSSTVASSYATPPQPSYAPSYPTSYTKFNSALNAGLLNPMSPPPLPLDKTRSSPTLFDMMANEQDYHPRTAAGIHSIPAPPQPHQLPPARSMDRQMLLQDRIADLIGSCSPGNQFNDADSSDVRLTLSSKDGLSVTLCVHRHILVAHSRFFAAKLSDRWSKQQRTLPHIVEISDCDDVEVYAETLRLMYCKDLRRRLMREDVNKVLGILKVSAAIVFDAGVLSCLEYLEAAPWAEDDDEKVATLLTQLHLENSGAGEVLKRVSLELAPSSLVEEADEGGSCNGGNSSGGEEVLLRLLQVVLEGKDEKARREMKGLVSKMLRENSTSRGGAIGGDLRKESLYSACNGCLSLLCEQFVRASEGDHSEVARIARQADNLHWMLDILVERQIAEDFLRTWATQTELAAMHRKVPAIHRYEVSRVTARLFVGVGKGQILVSKEARCQLLSTWLEPFYEDF

SEQ ID NO: 20828 - protein, 416 aa, Zea mays subsp. mays
  misc_feature (1)..(416): Ceres Seq. ID no. 12387577
MSPPPLPLDKTRSSPTLFDMMANEQDYHPRTAAGIHSIPAPPQPHQLPPARSMDRQMLLQDRIADLIGSCSPGNQFNDADSSDVRLTLSSKDGLSVTLCVHRHILVAHSRFFAAKLSDRWSKQQRTLPHIVEISDCDDVEVYAETLRLMYCKDLRRRLMREDVNKVLGILKVSAAIVFDAGVLSCLEYLEAAPWAEDDDEKVATLLTQLHLENSGAGEVLKRVSLELAPSSLVEEADEGGSCNGGNSSGGEEVLLRLLQVVLEGKDEKARREMKGLVSKMLRENSTSRGGAIGGDLRKESLYSACNGCLSLLCEQFVRASEGDHSEVARIARQADNLHWMLDILVERQIAEDFLRTWATQTELAAMHRKVPAIHRYEVSRVTARLFVGVGKGQILVSKEARCQLLSTWLEPFYEDF

SEQ ID NO: 20829 - protein, 397 aa, Zea mays subsp. mays
  misc_feature (1)..(397): Ceres Seq. ID no. 12387578
MMANEQDYHPRTAAGIHSIPAPPQPHQLPPARSMDRQMLLQDRIADLIGSCSPGNQFNDADSSDVRLTLSSKDGLSVTLCVHRHILVAHSRFFAAKLSDRWSKQQRTLPHIVEISDCDDVEVYAETLRLMYCKDLRRRLMREDVNKVLGILKVSAAIVFDAGVLSCLEYLEAAPWAEDDDEKVATLLTQLHLENSGAGEVLKRVSLELAPSSLVEEADEGGSCNGGNSSGGEEVLLRLLQVVLEGKDEKARREMKGLVSKMLRENSTSRGGAIGGDLRKESLYSACNGCLSLLCEQFVRASEGDHSEVARIARQADNLHWMLDILVERQIAEDFLRTWATQTELAAMHRKVPAIHRYEVSRVTARLFVGVGKGQILVSKEARCQLLSTWLEPFYEDF

SEQ ID NO: 20830 - DNA, 1863 bp, Zea mays subsp. mays
  misc_feature (1)..(1863): Ceres Seq. ID no. 12387583
gcacgagaccattacctagaacatcctaatcgaaaaaccatttcgtttcggcttgagcagccggggagctgagcagcgcggcgcccatgtcggactccgagctgtcccagggcacgctagtgttcggcctccacctctgggagctcgtcggcatcggtgtcggtgccgcattcgtgctcctcctcgtcctcctctccctgctctgcctcctcgcctcccgccgccgccgacgccgccgtgctgcccccgtcctccacctccccgccgtcgtgcccaatgcccagcccaagcaccccgccaagccccccaaggacatccaagaggtgccctcccgcggcaccgcggcccccgccgccccggccaaggcgccgctcgcccaggtgctgcaggcgccgccgccggactccatccagatcgagacggggaaggagcaccgtatcacgttcccggagcagccgccgcccccgcaccaccagcggagcggggggccgtcgtctcggggcgccagcggggagagccgtggcggtggtggggaaccgggggtcccggaggtgtcgcacctggggtggggccactggtacacactcaaggagctggaggacgccacgtgcatgttcgccgacgagaaggtgatcggcgagggcggctacggcatagtgtaccacggcgtgctggagggcggagtgcaggtcgccgtcaaaaacttgctcaacaacagggggcaggcagaacgggaattcaaggttgaggtggaagctatcgggcgagtgcgacacaagaaccttgttcggttgttaggatactgcgctgaaggcaaccaaaggatgcttgtgtatgagtacgttaataatggaaacttggagcaatggctccatggggatgttggccctgtgagccctcttacatgggatatcagaatgaagattattctgggaacagcaaaagggttaatgtatttgcacgagggacttgagccaaaggttgttcaccgtgatgtcaagtcgagcaatattcttcttgacaagcattggaatgcaaagctttctgattttgggctagcgaaacttttgggttcagaaaggagttatgtcacaaccagggtcatggggacatttgggtatgttgcgccagagtatgcgggcactggcatgttgaatgaaactagcgatgtctatagtttcggaattcttatcatggaaataatatctggccgtgtacctgttgattacaacaggccgccaggggagattaatctagttgagtggctgaagacgatggtcagcaacagaaattctgaaggggttttggatccaaagatgaccgagaagcctacttctagggcattgaagaaggctttgctagtggctctgcggtgcgtagaccccgaagctcgcaagaggccaaagattgggcatgtcattcacatgcttgaggttgacgatttcccgtacagagatgagcgccggggtggcaaagctccagcccaagcaagatcggtggaaacgccacctgcaagcgaacctggcgatagcagcggaaacaacactccaaaggacgcgcctaatggagaacctttcaagtggagaaactaagaggactagccaccaggaaaacggtggttgcttgagtttgtgcctgataaagaagctggatatggttggttggttggttggttggttggtcgggcatgcaaactccacaagcaccagtgtcggtcgtcgtcgtgacagtatatgtacattgttgaatcgatatgttagccatagcgattttttttccagttggttttcttggggccgtatatttatgcgaaggatgattttgtgtgataaaggcgcgcgctctcgtgtgtattcctgaggc

SEQ ID NO: 20831 - protein, 501 aa, Zea mays subsp. mays
  misc_feature (1)..(501): Ceres Seq. ID no. 12387584
MSDSELSQGTLVFGLHLWELVGIGVGAAFVLLLVLLSLLCLLASRRRRRRRAAPVLHLPAVVPNAQPKHPAKPPKDIQEVPSRGTAAPAAPAKAPLAQVLQAPPPDSIQIETGKEHRITFPEQPPPPHHQRSGGPSSRGASGESRGGGGEPGVPEVSHLGWGHWYTLKELEDATCMFADEKVIGEGGYGIVYHGVLEGGVQVAVKNLLNNRGQAEREFKVEVEAIGRVRHKNLVRLLGYCAEGNQRMLVYEYVNNGNLEQWLHGDVGPVSPLTWDIRMKIILGTAKGLMYLHEGLEPKVVHRDVKSSNILLDKHWNAKLSDFGLAKLLGSERSYVTTRVMGTFGYVAPEYAGTGMLNETSDVYSFGILIMEIISGRVPVDYNRPPGEINLVEWLKTMVSNRNSEGVLDPKMTEKPTSRALKKALLVALRCVDPEARKRPKIGHVIHMLEVDDFPYRDERRGGKAPAQARSVETPPASEPGDSSGNNTPKDAPNGEPFKWRN

SEQ ID NO: 20832 - protein, 326 aa, Zea mays subsp. mays
  misc_feature (1)..(326): Ceres Seq. ID no. 12387585
MFADEKVIGEGGYGIVYHGVLEGGVQVAVKNLLNNRGQAEREFKVEVEAIGRVRHKNLVRLLGYCAEGNQRMLVYEYVNNGNLEQWLHGDVGPVSPLTWDIRMKIILGTAKGLMYLHEGLEPKVVHRDVKSSNILLDKHWNAKLSDFGLAKLLGSERSYVTTRVMGTFGYVAPEYAGTGMLNETSDVYSFGILIMEIISGRVPVDYNRPPGEINLVEWLKTMVSNRNSEGVLDPKMTEKPTSRALKKALLVALRCVDPEARKRPKIGHVIHMLEVDDFPYRDERRGGKAPAQARSVETPPASEPGDSSGNNTPKDAPNGEPFKWRN

SEQ ID NO: 20833 - protein, 255 aa, Zea mays subsp. mays
  misc_feature (1)..(255): Ceres Seq. ID no. 12387586
MLVYEYVNNGNLEQWLHGDVGPVSPLTWDIRMKIILGTAKGLMYLHEGLEPKVVHRDVKSSNILLDKHWNAKLSDFGLAKLLGSERSYVTTRVMGTFGYVAPEYAGTGMLNETSDVYSFGILIMEIISGRVPVDYNRPPGEINLVEWLKTMVSNRNSEGVLDPKMTEKPTSRALKKALLVALRCVDPEARKRPKIGHVIHMLEVDDFPYRDERRGGKAPAQARSVETPPASEPGDSSGNNTPKDAPNGEPFKWRN

SEQ ID NO: 20834 - DNA, 1953 bp, Zea mays subsp. mays
  misc_feature (1)..(1953): Ceres Seq. ID no. 12387587
gcacgagaccattacctagaacatcctaatcgaaaaaagcgaggaggcagtgcggagacgggagccagtggccagtgacagtgagcggcgacgttccagtgtccactgtccagtaggcgagcgaggaggtggtccattggccggccatggctcgtctccgctgcgtcttcgtcgtcttcgtcctgctctcgtctgccctccgccttccaggcgacgccattgcctcccgggggcaccatggccccgccgcacacgactacagggactcgctcgtcaagtccatcctcttcttcgagggccagcggtcgggcaagctgccgccgtcgcagcgcgtgtcctggcgcagggactcgggactctccgacggtcactccgccaaggtggacctggtgggcgggtaccacgacgctggtgacaacgtcaagttcgggttcccgatggcgttcagcatgacgatgctggcgtggagcgtggtggagtttggcggcctcatgaagtcggagctgcagcacgccagggacgccgtccgctggggcgccgactacctgctcaaggccacggcgcacccggacaccatctacgtccaggtcggtgacgcgaccaaggaccacgcgtgctgggagcggccggaggacatggacacccccaggacggtgtacaaggtggaccgtggcaccccgggatccgacgtcgccgccgagactgccgcggctctcgccgccgcctccctcgtcttccgcaagtccgacccggcctacgccagccgccttgtcgccagggccaagagggtgttcgagttcgcggacaagcaccgcggctcctacagcaccgggctggcggcggacgtgtgcccgtactactgctcctactccgggtaccaggacgagctcctgtggggcgcggcgtggcttcaccgcgccaccaagagcccctcttacctgagctacatccagacgaacgggcaggtgctgggcgcggacgagtcggacaacacgttcgggtgggacaacaagcacgcgggcgcgcgggtgctcatctccaagtcgttcctggtgcagcgcctgggcgcgctccacgagtacaagggccacgccgacggcttcatttgctccatggtgcccggcacggccacggaccagacgcagtacacccggggcgggctgctgttcaggcttagcgacagcaacatgcagtacgtgacgtcgagctctttcctcctgctcacctacgccaagtacctggcgttcgccaagcagacggtgcgctgcggcggcgtggcggtcacgccgcagcggctgcgcgccatcgcgcgcaggcaggtggactacctgctggggagcaacccgatggggatgtcctacatggtgggctacggcgccaagtacccgcgccgcatccaccaccgcgcttcgtcgctgccgtccgtggcggcgcacccggctaggatcggttgctcgcaggggttcaccgcgctgtacgcgggtggggccaatcccaacctgctcgtcggtgccgtcgtcgggggacccgacatgcaggacaggttccccgacgagcggaacgaccacgagcactcggagccggccacctacatcaacgcgccgctcgtcggcgcgctcgcctacctcgcgcactcctacggccagctctaagctccctagcgttaattgttgccgtgttgattgattgttcggaaattagagcatcgcgatttgacgaccccagtgcaagcaaaaccaaggaccttcgcttgtgggtcttaatatattgccactagtactcgtaggcgtgatttgtttgttacgcgacgccgctgctggcgcacgtatgtaagcgcggagacaaactgtgctccacggctccaccaagtgtactgctactaaggttgcagctcgcaactctatctgatgctatctactgttttgtttaattacatccacgaacctatccgcc

SEQ ID NO: 20835 - protein, 501 aa, Zea mays subsp. mays
  misc_feature (1)..(501): Ceres Seq. ID no. 12387588
MARLRCVFVVFVLLSSALRLPGDAIASRGHHGPAAHDYRDSLVKSILFFEGQRSGKLPPSQRVSWRRDSGLSDGHSAKVDLVGGYHDAGDNVKFGFPMAFSMTMLAWSVVEFGGLMKSELQHARDAVRWGADYLLKATAHPDTIYVQVGDATKDHACWERPEDMDTPRTVYKVDRGTPGSDVAAETAAALAAASLVFRKSDPAYASRLVARAKRVFEFADKHRGSYSTGLAADVCPYYCSYSGYQDELLWGAAWLHRATKSPSYLSYIQTNGQVLGADESDNTFGWDNKHAGARVLISKSFLVQRLGALHEYKGHADGFICSMVPGTATDQTQYTRGGLLFRLSDSNMQYVTSSSFLLLTYAKYLAFAKQTVRCGGVAVTPQRLRAIARRQVDYLLGSNPMGMSYMVGYGAKYPRRIHHRASSLPSVAAHPARIGCSQGFTALYAGGANPNLLVGAVVGGPDMQDRFPDERNDHEHSEPATYINAPLVGALAYLAHSYGQL

SEQ ID NO: 20836 - protein, 404 aa, Zea mays subsp. mays
  misc_feature (1)..(404): Ceres Seq. ID no. 12387589
MAFSMTMLAWSVVEFGGLMKSELQHARDAVRWGADYLLKATAHPDTIYVQVGDATKDHACWERPEDMDTPRTVYKVDRGTPGSDVAAETAAALAAASLVFRKSDPAYASRLVARAKRVFEFADKHRGSYSTGLAADVCPYYCSYSGYQDELLWGAAWLHRATKSPSYLSYIQTNGQVLGADESDNTFGWDNKHAGARVLISKSFLVQRLGALHEYKGHADGFICSMVPGTATDQTQYTRGGLLFRLSDSNMQYVTSSSFLLLTYAKYLAFAKQTVRCGGVAVTPQRLRAIARRQVDYLLGSNPMGMSYMVGYGAKYPRRIHHRASSLPSVAAHPARIGCSQGFTALYAGGANPNLLVGAVVGGPDMQDRFPDERNDHEHSEPATYINAPLVGALAYLAHSYGQL

SEQ ID NO: 20837 - protein, 400 aa, Zea mays subsp. mays
  misc_feature (1)..(400): Ceres Seq. ID no. 12387590
MTMLAWSVVEFGGLMKSELQHARDAVRWGADYLLKATAHPDTIYVQVGDATKDHACWERPEDMDTPRTVYKVDRGTPGSDVAAETAAALAAASLVFRKSDPAYASRLVARAKRVFEFADKHRGSYSTGLAADVCPYYCSYSGYQDELLWGAAWLHRATKSPSYLSYIQTNGQVLGADESDNTFGWDNKHAGARVLISKSFLVQRLGALHEYKGHADGFICSMVPGTATDQTQYTRGGLLFRLSDSNMQYVTSSSFLLLTYAKYLAFAKQTVRCGGVAVTPQRLRAIARRQVDYLLGSNPMGMSYMVGYGAKYPRRIHHRASSLPSVAAHPARIGCSQGFTALYAGGANPNLLVGAVVGGPDMQDRFPDERNDHEHSEPATYINAPLVGALAYLAHSYGQL

SEQ ID NO: 20838 - DNA, 736 bp, Zea mays subsp. mays
  misc_feature (1)..(736): Ceres Seq. ID no. 12387667
gctagaaaatcagctataagacgcgcgggcggccagccggacacggacgccaacgcctcatccacctgtgctgtgacctcatatttgtcctccgttccttcgtctcatgatctctgcgcctctgcggctgtcggcgcctagggctgccgtcgggggatcgttcctgctcggcgcgtccaagtccaagcccagcaggatccgctgcgccgcgggggtggggaggggcgccgccgccgccacgctgtacgaggtgctgggcctgcgcgccggcgcgacgggccgggagatcaaggccgcgtaccggcgcttggcgcgggancggcacccggacgtggcgaccgcgcccggggccgctgccgagttcgtccgcctgcacgacgcctatgccacgctntccgacccggacagccgcgcgcgctacgaccgcagcgccgtagccgcggtggccgtggcgcagcgcccctggaggagcggcgtcggcgtntatggccggcccctccgcacatgggagacggaccagctgctgatagcagttgttgtttatatagactagttagacggacctcctgcggtcctgccgctagccatacggccatggcggctcaccttggttttttttttctgtaccggtggccatccatgtaccctgatttcgttctcctcctacttgcacttgtacgcgtgcgatcttgagaagccattgcgaacaaatcgaccagcttataggtgattaatg

SEQ ID NO: 20839 - protein, 148 aa, Zea mays subsp. mays
  misc_feature (1)..(148): Ceres Seq. ID no. 12387668
  misc_feature (71)..(71): Xaa is any aa, unknown or other
  misc_feature (96)..(96): Xaa is any aa, unknown or other
  misc_feature (126)..(126): Xaa is any aa, unknown or other
MISAPLRLSAPRAAVGGSFLLGASKSKPSRIRCAAGVGRGAAAATLYEVLGLRAGATGREIKAAYRRLARXRHPDVATAPGAAAEFVRLHDAYATXSDPDSRARYDRSAVAAVAVAQRPWRSGVGXYGRPLRTWETDQLLIAVVVYID

SEQ ID NO: 20840 - DNA, 1826 bp, Zea mays subsp. mays
  misc_feature (1)..(1826): Ceres Seq. ID no. 12387680
gcacgagaccattacctagaacatcctaatcgaaaagtactgtacatcgacatgcgacatcttgcttggcctatctgatctttaatgtcgccgcgcacagagaggagatccggtctcatgaagtggctctgcagattcctcaaggggccgaagcccggcgaaccgagccgccggcggccccaggtggcggccggagaaggggagggcgcgctttggcaccaacgaccagctagaccaaagatcgatccacctaggaacgagaatgaggaactagtggaccgtgccattgccgagcctcttgcagaggctgtcaaaccgcccagagagaaaacccataggggagaagacagcaacgacgacgaagatctcacaagagccgtacaggacagtctgaatatgaacccttacacgccttacaacccctatccaccctctcaagcccaacctatagggcacagggtatgcggaggctgcaagcatgagatagggcgtggccattacttgagctgcatgggcatttactggcaccctcagtgcttccgctgcaggtcctgcggtcaccttatccgtgagaccgagttcaccttgctgggtacggattcgtaccacaagctgtgctacaaggagctgcatcatccaaagtgcgacgtctgccttcagtttgtaaggcctcgtgtcctcggaaaacctgaggcgatctgcactgcagactgtgataaactgcatcccaacgaacgggagtggcttgatagagtacagagcccacccgttctggggccagaagtattgcccttcgcatgagcgcgacaggacgccacgttgctgcagctgtgagaaaatggaggtacagccaaggaacacgaagtacatgtcgctgggagacggacgcggcctgtgcatggaatgcctgggatctgcagtgatggacacgagcgagtgccagcctctgtaccattctatcagatactactacgaggggatggacatgagactggaccagcagatacccgtgctcttggttgagcggcaagcgctcaacgaagccatggaaggggagagtaaaggcccacaccacatgcctgagactaggggcctatgtctgtccgaggagcggactgtgagcagtatacttaggaggcccagaattggtggaaaccggttactaggcatgagaactcggccacagaagctgacgaggagatgtgaagttactgcaatacttgtcctgtatggcctccccaggctactgacaggttccatcctcgcccatgagctgatgcacgggtggctgcgcctcaaaggttaccgaaacctaaacgcggaggtggaagaaggcatatgccaggtcatgtcttacttgtggctggaatcagagattcttccgtcatcctcgaggcacgcgcagccttcatcatcgtcctcctcctcatcctatccagcaacatcatccgagaaaggtggaatatctcataccgggaagaagctgggcgagttcttcatgcaccagattgccaatgacacgtcgacggcctatggtgacgggttcagaactgcgtacgctgccgtcaacaagtatggccttcgccaaacactgagccatatacgcctaacaggaggcttccctgtataataagagtgacaaaaaagacacaaaatgtccatgcatgatcatatcgatatcaaaaggttatatacatattgggatgaagttcgctatggaagcatagtgattcagtttcggtgaccttgagttttcaaagaggtcatgtgtaagaacactgatttaggggtggaggtatgccgcttccggcatatgatttcctctc

SEQ ID NO: 20841 - protein, 263 aa, Zea mays subsp. mays
  misc_feature (1)..(263): Ceres Seq. ID no. 12387681
MEVQPRNTKYMSLGDGRGLCMECLGSAVMDTSECQPLYHSIRYYYEGMDMRLDQQIPVLLVERQALNEAMEGESKGPHHMPETRGLCLSEERTVSSILRRPRIGGNRLLGMRTRPQKLTRRCEVTAILVLYGLPRLLTGSILAHELMHGWLRLKGYRNLNAEVEEGICQVMSYLWLESEILPSSSRHAQPSSSSSSSSYPATSSEKGGISHTGKKLGEFFMHQIANDTSTAYGDGFRTAYAAVNKYGLRQTLSHIRLTGGFPV

SEQ ID NO: 20842 - protein, 253 aa, Zea mays subsp. mays
  misc_feature (1)..(253): Ceres Seq. ID no. 12387682
MSLGDGRGLCMECLGSAVMDTSECQPLYHSIRYYYEGMDMRLDQQIPVLLVERQALNEAMEGESKGPHHMPETRGLCLSEERTVSSILRRPRIGGNRLLGMRTRPQKLTRRCEVTAILVLYGLPRLLTGSILAHELMHGWLRLKGYRNLNAEVEEGICQVMSYLWLESEILPSSSRHAQPSSSSSSSSYPATSSEKGGISHTGKKLGEFFMHQIANDTSTAYGDGFRTAYAAVNKYGLRQTLSHIRLTGGFPV

SEQ ID NO: 20843 - protein, 243 aa, Zea mays subsp. mays
  misc_feature (1)..(243): Ceres Seq. ID no. 12387683
MECLGSAVMDTSECQPLYHSIRYYYEGMDMRLDQQIPVLLVERQALNEAMEGESKGPHHMPETRGLCLSEERTVSSILRRPRIGGNRLLGMRTRPQKLTRRCEVTAILVLYGLPRLLTGSILAHELMHGWLRLKGYRNLNAEVEEGICQVMSYLWLESEILPSSSRHAQPSSSSSSSSYPATSSEKGGISHTGKKLGEFFMHQIANDTSTAYGDGFRTAYAAVNKYGLRQTLSHIRLTGGFPV

SEQ ID NO: 20844 - DNA, 1943 bp, Zea mays subsp. mays
  misc_feature (1)..(1943): Ceres Seq. ID no. 12387936
ggaaaaggaaaaaaaaaaaagaaccgcgcacgcttcttcttccctcccccacaaagggaagaaaaaaaatttccgtgtacggtttcgcccggcgccgcctttggcagttgctttgcttgctcttgccctgttgagctccaaaggatctccatttcaccactcccatcgatcccactaccggtccgcatcaagcagccggcgatggggtccgcgtccgcccgcatcgccaccgccgccgtgcacctcgtcaccgcggccgccatcctcctcatgctcgcgcgaggcggcgaggccgtcagtctctggctcccgccgccgaccgccggaggagggggcttcctcggcggcgcggaccgttacctgactcgggaggagcactggatgaaccaaaccctggatcacttcaacccgacggaccatcggcaattcaaacagcggtactacgaatttctcgactactaccgagctccaaatggcccgatcttcctatacatctgtggagaatctacgtgcaatgggattggcaataactacttagctgtggtggcaaagaaatttggtgctgcattggtttctcctgagcatcgatactatggaaagagttctccttttaacagtttgacaacagaaaatctacagttcttgtcatcaaagcaggctttatttgatcttgctgttttccgccaatattatcaggaaaccttaaatgccaagtataatcgctctggggcaaacagttcttggtttgtttttggagggtcatatgctggagcactcagtgcttggttcaggttgaagtttcctcacttgacatgtggaagccttgcaagttcaggggttgttcttgctgtatacaactttaccgattttgacaaacagattgggatctctgctggtcctgaatgcaaggcagcacttcaagaaataacaggacttgttgatggacagcttcagtctggccgtaactcggttaaggagttgtttggagcgacaaagttagaaaatgatggtgacttcctctacttactggcagatgctgctgctattgcgttccaatatggtaatcctgatgtcttgtgctccccactagctgaagcaaagaagaatgggacagatttggtggaaacatttgctagttacgtgaaagattattacattggaaaatttggggcgtcagtagcatcatatgatcagcaatatttgaagaacacaactcctgctgaatcctcatatagactatggtggtaccaagtttgcagtgaggttgcatatttccaggtggcaccaaaaaacgatagtgttcgttccccaaagatcgacacgaggtaccatttggacttgtgcagaaatgttttcggcgaaggagtctaccctgatgtctttatgacaaacttatactatggaggcacaggaattgcaggttctaaaattgtttttgcaaatggatctcaagacccatggcgccacgcttctaagcagaaatcatcagacgaattgccatcatacctaattgagtgcaagaactgcggacactgcagtgatctctctggatgccctcaagctccttcaaacattgaaggtgattcatccaagtgctcacctcccgaagctctgaacaaagtaaggaaggagattgtcgatcacattgacctgtggctatcagaatgccaagagcaaggacatgacaaggagccatggctgggaagcatatggagcatagctgctatttgatcaatctgtgaagctataagcatgtgctgctagagtaaccaaggcaaatatgctttctttttcttgcagcactgtggtttatcgtttcggcaaacaatgtgggctgctgagtaagaggacatatctggtgcaccaatcttccatgtgcattagatatgttctcgctgagtaatccacctgtggcgaataaataaagcagtcagttctcagtc

SEQ ID NO: 20845 - protein, 576 aa, Zea mays subsp. mays
  misc_feature (1)..(576): Ceres Seq. ID no. 12387937
GKGKKKKNRARFFFPPPQREEKKFPCTVSPGAAFGSCFACSCPVELQRISISPLPSIPLPVRIKQPAMGSASARIATAAVHLVTAAAILLMLARGGEAVSLWLPPPTAGGGGFLGGADRYLTREEHWMNQTLDHFNPTDHRQFKQRYYEFLDYYRAPNGPIFLYICGESTCNGIGNNYLAVVAKKFGAALVSPEHRYYGKSSPFNSLTTENLQFLSSKQALFDLAVFRQYYQETLNAKYNRSGANSSWFVFGGSYAGALSAWFRLKFPHLTCGSLASSGVVLAVYNFTDFDKQIGISAGPECKAALQEITGLVDGQLQSGRNSVKELFGATKLENDGDFLYLLADAAAIAFQYGNPDVLCSPLAEAKKNGTDLVETFASYVKDYYIGKFGASVASYDQQYLKNTTPAESSYRLWWYQVCSEVAYFQVAPKNDSVRSPKIDTRYHLDLCRNVFGEGVYPDVFMTNLYYGGTGIAGSKIVFANGSQDPWRHASKQKSSDELPSYLIECKNCGHCSDLSGCPQAPSNIEGDSSKCSPPEALNKVRKEIVDHIDLWLSECQEQGHDKEPWLGSIWSIAAI

SEQ ID NO: 20846 - protein, 509 aa, Zea mays subsp. mays
  misc_feature (1)..(509): Ceres Seq. ID no. 12387938
MGSASARIATAAVHLVTAAAILLMLARGGEAVSLWLPPPTAGGGGFLGGADRYLTREEHWMNQTLDHFNPTDHRQFKQRYYEFLDYYRAPNGPIFLYICGESTCNGIGNNYLAVVAKKFGAALVSPEHRYYGKSSPFNSLTTENLQFLSSKQALFDLAVFRQYYQETLNAKYNRSGANSSWFVFGGSYAGALSAWFRLKFPHLTCGSLASSGVVLAVYNFTDFDKQIGISAGPECKAALQEITGLVDGQLQSGRNSVKELFGATKLENDGDFLYLLADAAAIAFQYGNPDVLCSPLAEAKKNGTDLVETFASYVKDYYIGKFGASVASYDQQYLKNTTPAESSYRLWWYQVCSEVAYFQVAPKNDSVRSPKIDTRYHLDLCRNVFGEGVYPDVFMTNLYYGGTGIAGSKIVFANGSQDPWRHASKQKSSDELPSYLIECKNCGHCSDLSGCPQAPSNIEGDSSKCSPPEALNKVRKEIVDHIDLWLSECQEQGHDKEPWLGSIWSIAAI

SEQ ID NO: 20847 - protein, 486 aa, Zea mays subsp. mays
  misc_feature (1)..(486): Ceres Seq. ID no. 12387939
MLARGGEAVSLWLPPPTAGGGGFLGGADRYLTREEHWMNQTLDHFNPTDHRQFKQRYYEFLDYYRAPNGPIFLYICGESTCNGIGNNYLAVVAKKFGAALVSPEHRYYGKSSPFNSLTTENLQFLSSKQALFDLAVFRQYYQETLNAKYNRSGANSSWFVFGGSYAGALSAWFRLKFPHLTCGSLASSGVVLAVYNFTDFDKQIGISAGPECKAALQEITGLVDGQLQSGRNSVKELFGATKLENDGDFLYLLADAAAIAFQYGNPDVLCSPLAEAKKNGTDLVETFASYVKDYYIGKFGASVASYDQQYLKNTTPAESSYRLWWYQVCSEVAYFQVAPKNDSVRSPKIDTRYHLDLCRNVFGEGVYPDVFMTNLYYGGTGIAGSKIVFANGSQDPWRHASKQKSSDELPSYLIECKNCGHCSDLSGCPQAPSNIEGDSSKCSPPEALNKVRKEIVDHIDLWLSECQEQGHDKEPWLGSIWSIAAI

SEQ ID NO: 20848 - DNA, 1051 bp, Zea mays subsp. mays
  misc_feature (1)..(1051): Ceres Seq. ID no. 12387956
gcacgagaccattacctagaacatcctaatcgaaaaaaggaaacgagaagacaaggcctccgcggctccgcccccgatgcctccgctcctcacctcacccgcctccctcccctccgcctcccctctcctcgtctcctgtatcggcgctctccaccgccccggccccttcctccaccagcgcgccgccgcctcggtccacttcctcgcgccgcacaggaagacccgaccgccccccgcgatgagctggcttgggaagctgggcctgagcgggcttggaggcagcccgcgcgcgtcggaggcgtcggcagcgctggcgcaggggcccgacgaggaccagcccgcgccggggaacgagttcgcgcaattcggcgccggctgcttctggggcgtggagctcgcgttccagctcgtgccgggagtcacccgcacggaggtcggctacagccagggcaacatccacgatccgacctacgaggacgtctgcaccggcaccacaaaccacaacgaggtcgtccgcgtgcagtacgacccggccgcctgcaagtacgacgacctcctcgacaccttctgggcgcgccacgaccccactactcccaaccgacagggcaatgatgttggaacacagtataggtcagggatatactactataacccagagcaggagaaggcggcaagagagtccctggagaagcagcagaagcttctgaaccggaagatcgtcaccgagatcgttccagcgaagaggttctatagagcagaagagtaccatcagcagtacctggagaagggcggccgcttcggcttcgggcaatctgcagccaagggctgcaatgaccccatccgatgctacggatgagccaaatggacctctacgtgcatggtgtgaatcgtaactgaataagggatgcatcaaagccagattttatactgctttcctaggtttgttttgccactattgaacggctgtaagagtttagctatatactaccatggtactccaatcatcgtgtacaaaaccatattgtattacatgcaagtgcgagtgagattt

SEQ ID NO: 20849 - protein, 259 aa, Zea mays subsp. mays
  misc_feature (1)..(259): Ceres Seq. ID no. 12387957
MPPLLTSPASLPSASPLLVSCIGALHRPGPFLHQRAAASVHFLAPHRKTRPPPAMSWLGKLGLSGLGGSPRASEASAALAQGPDEDQPAPGNEFAQFGAGCFWGVELAFQLVPGVTRTEVGYSQGNIHDPTYEDVCTGTTNHNEVVRVQYDPAACKYDDLLDTFWARHDPTTPNRQGNDVGTQYRSGIYYYNPEQEKAARESLEKQQKLLNRKIVTEIVPAKRFYRAEEYHQQYLEKGGRFGFGQSAAKGCNDPIRCYG

SEQ ID NO: 20850 - protein, 205 aa, Zea mays subsp. mays
  misc_feature (1)..(205): Ceres Seq. ID no. 12387958
MSWLGKLGLSGLGGSPRASEASAALAQGPDEDQPAPGNEFAQFGAGCFWGVELAFQLVPGVTRTEVGYSQGNIHDPTYEDVCTGTTNHNEVVRVQYDPAACKYDDLLDTFWARHDPTTPNRQGNDVGTQYRSGIYYYNPEQEKAARESLEKQQKLLNRKIVTEIVPAKRFYRAEEYHQQYLEKGGRFGFGQSAAKGCNDPIRCYG

SEQ ID NO: 20851 - protein, 203 aa, Zea mays subsp. mays
  misc_feature (1)..(203): Ceres Seq. ID no. 12387959
ARDHYLEHPNRKKETRRQGLRGSAPDASAPHLTRLPPLRLPSPRLLYRRSPPPRPLPPPARRRLGPLPRAAQEDPTAPRDELAWEAGPERAWRQPARVGGVGSAGAGARRGPARAGERVRAIRRRLLLGRGARVPARAGSHPHGGRLQPGQHPRSDLRGRLHRHHKPQRGRPRAVRPGRLQVRRPPRHLLGAPRPHYSQPTGQ

SEQ ID NO: 20852 - DNA, 2003 bp, Zea mays subsp. mays
  misc_feature (1)..(2003): Ceres Seq. ID no. 12387993
gcaccgagaccattacctagaacatcctaatcgaaaaatccgacccagtatccccgacaaagtcaatgcgatgcgtctcctccttgctctatcgactatcgtagccgattccccgttgcaagtaactaaaactaagtctcaagtctgcagagtaaccggagtagcatagcactagcaagcaatggccgctctcacttccgctctcctcttcgccgccctcctcgtggccgcccagtacgtgctccgcttgctccactccttcctgtgggtcccgttccgcctggaacgccgcttccggcggcagggaatccggtggccaccacgaagcctggtctccggtaacgcagccgactaccgcgacctgctagccgccgccaggtccgcgcccctctcctccttccgccacaacggcgtcgtcgcccgcgccacgccgcagtacgcggtctggctggcgcggtacggccggccgttcgtgtactggttcgggccccggccgcggctggtgatctccgacacggagctcgtgaaggccgtgatgaccgactccacggggggctttgataaggcggcctcgggcggcaacaacccgctcgccaggcagctcatcggcgaggggctcgtcgggctctccggggagacgtgggcgcgccaccgccgcgtgatttcgccggcgtttaacatggagagggtgaaggcttggataccagaaatagcagctgcggcatcacctgttctggataagtgggaggccgaaggtgggagccgcactgagtttgagatcgatgtccataaagcattccacactttgagtgcggatgtcatttcctgtgtggcatttggaagcaggctacgaggaggggaaacgaattttccaattgcaggaggaacagatgcaacttgctcttcttgcaatgaggactgtttatattcctggcttcaggtttgtaccaacaaagaagaaccgaaaaaggcagaggttaaaccaggaaatccaatgctccctgcgcaaattgatcgaaatcaatggaacaaaatgtgaggactcaaaaaatttgctggggttaatgctatcagccagcaaagctgggagtgaatacaaaatgggaatcgaagagataatccatgagtgcaagacgttttactttgctgggaaggaaacaacagcgaacctgttgacatgggcaacacttcttcttgcgttgcatcaagagtggcaggtcaaggcccgtgatgaggttcttaaagtgtgcggaaagcatgagcaccctaatgcagaaaacctgagcgatctcaagattgtaactatggtgttaaaagaaaccctcaggctgtatcctccagctacatttatcaatcggactgccactagggatatcaagctgggtaaactagacatcccggctggcacacggctggacttccctatcattcacatccatcgtgaccatgaagtctggggcatggatgcagaggagtttaatccatcaaggtttgcagatggcagcagctatcacctaggtgcttacttcccctttgggatcggccctacaatctgcgttggccagaatcttgcaatggtcgaggccaaggtggcgcttgcaatgacccttcagcggtttgcgttcaccgtttcggcgtcttatgctcatgcaccgatgctggtgttcaccctccagcctcagttcggtgctcaagttcttgtccggaagatatgagccttctatgtgacaaccaataaggtcataaaatttctatatctttttgagtagtctgaaggatccatgaggcctctcctttttttcttcttctttcgaacacaggactctacttttttttgttcaatcctgttcatgaaagacttgtatataagatttgttctctacaggaatctgataaaggcttcaaacacttgagctaaaatggcatgtgttgtacaaaaaccatctagaacctgcatgaatataccgatttggaactgcaagcctcaccgcttgggtttgttg

SEQ ID NO: 20853 - protein, 299 aa, Zea mays subsp. mays
  misc_feature (1)..(299): Ceres Seq. ID no. 12387994
MSFPVWHLEAGYEEGKRIFQLQEEQMQLALLAMRTVYIPGFRFVPTKKNRKRQRLNQEIQCSLRKLIEINGTKCEDSKNLLGLMLSASKAGSEYKMGIEEIIHECKTFYFAGKETTANLLTWATLLLALHQEWQVKARDEVLKVCGKHEHPNAENLSDLKIVTMVLKETLRLYPPATFINRTATRDIKLGKLDIPAGTRLDFPIIHIHRDHEVWGMDAEEFNPSRFADGSSYHLGAYFPFGIGPTICVGQNLAMVEAKVALAMTLQRFAFTVSASYAHAPMLVFTLQPQFGAQVLVRKI

SEQ ID NO: 20854 - protein, 285 aa, Zea mays subsp. mays
  misc_feature (1)..(285): Ceres Seq. ID no. 12387995
MAALTSALLFAALLVAAQYVLRLLHSFLWVPFRLERRFRRQGIRWPPRSLVSGNAADYRDLLAAARSAPLSSFRHNGVVARATPQYAVWLARYGRPFVYWFGPRPRLVISDTELVKAVMTDSTGGFDKAASGGNNPLARQLIGEGLVGLSGETWARHRRVISPAFNMERVKAWIPEIAAAASPVLDKWEAEGGSRTEFEIDVHKAFHTLSADVISCVAFGSRLRGGETNFPIAGGTDATCSSCNEDCLYSWLQVCTNKEEPKKAEVKPGNPMLPAQIDRNQWNKM

SEQ ID NO: 20855 - protein, 274 aa, Zea mays subsp. mays
  misc_feature (1)..(274): Ceres Seq. ID no. 12387996
MQLALLAMRTVYIPGFRFVPTKKNRKRQRLNQEIQCSLRKLIEINGTKCEDSKNLLGLMLSASKAGSEYKMGIEEIIHECKTFYFAGKETTANLLTWATLLLALHQEWQVKARDEVLKVCGKHEHPNAENLSDLKIVTMVLKETLRLYPPATFINRTATRDIKLGKLDIPAGTRLDFPIIHIHRDHEVWGMDAEEFNPSRFADGSSYHLGAYFPFGIGPTICVGQNLAMVEAKVALAMTLQRFAFTVSASYAHAPMLVFTLQPQFGAQVLVRKI

SEQ ID NO: 20856 - DNA, 527 bp, Zea mays subsp. mays
  misc_feature (1)..(527): Ceres Seq. ID no. 12388020
aaatcaattctccagaccctccccggcaaccgcgtccggccgtccgcttccgtttccttggataaccacgacgcccgcccgccccccggcaagcgaaagcgaagcgagccaacccagccatggagaaggcgatcgatcggcagcgggtcctcctggcgcacctcctcccctccccctccgccgcctcctcgcagcctcagcttgcggcgtcggcgtgcgcggccggggacagcgccgcctaccagaggtcctcctccttcggggacgatgtcgtcgtcgtcgctgcctacaggacgccgatatgcaaggccaagcgaggaggcttcaaggacacctacccagaggacctcctcactgttgttctcaaggctgttctggacaacactagaatcaggagtgatgtggccacgagctttttcatatgtattcttagaatcaggagttggagagcagagcgatctatatatcacaactcgttcttcccagagcaacatgtatgcaaacatcttgggggggtcgatcttctc

SEQ ID NO: 20857 - protein, 175 aa, Zea mays subsp. mays
  misc_feature (1)..(175): Ceres Seq. ID no. 12388021
KSILQTLPGNRVRPSASVSLDNHDARPPPGKRKRSEPTQPWRRRSIGSGSSWRTSSPPPPPPPRSLSLRRRRARPGTAPPTRGPPPSGTMSSSSLPTGRRYARPSEEASRTPTQRTSSLLFSRLFWTTLESGVMWPRAFSYVFLESGVGEQSDLYITTRSSQSNMYANILGGSIF

SEQ ID NO: 20858 - protein, 136 aa, Zea mays subsp. mays
  misc_feature (1)..(136): Ceres Seq. ID no. 12388022
MEKAIDRQRVLLAHLLPSPSAASSQPQLAASACAAGDSAAYQRSSSFGDDVVVVAAYRTPICKAKRGGFKDTYPEDLLTVVLKAVLDNTRIRSDVATSFFICILRIRSWRAERSIYHNSFFPEQHVCKHLGGVDLL

SEQ ID NO: 20859 - protein, 128 aa, Zea mays subsp. mays
  misc_feature (1)..(128): Ceres Seq. ID no. 12388023
NQFSRPSPATASGRPLPFPWITTTPARPPASESEASQPSHGEGDRSAAGPPGAPPPLPLRRLLAASACGVGVRGRGQRRLPEVLLLRGRCRRRRCLQDADMQGQARRLQGHLPRGPPHCCSQGCSGQH

SEQ ID NO: 20860 - DNA, 1130 bp, Zea mays subsp. mays
  misc_feature (1)..(1130): Ceres Seq. ID no. 12388641
aaatcttgttactgacaaactgaactttggggccatgaacatgtggtttttgctgaatccacctggggatgcaacaatccatgtggaaaatgttgatgacttcaaatggttaaactcttcttactgccctgttctgaagcagcttgagtctgcagccatgaaagaatattatttcaaggctgatcgtccgaaaacactctctgctggttcttctaatctgaagtatcgaaacccaaaatatttgtccatgctcaatcatctaagattttacctcccacaagtctatcccaagctgaataaaattcttttcctggatgatgatatagttgtccagagggacctaactggactctgggaggttgatcttaatggaaatgtaaatggagccgtggaaacatgtggagagagttttcaccgatttgataagtacctaaatttctcaaacccaaatattgctcagaattttgatcctaatgcatgtggttgggcttatggaatgaacatgtttgatctggaagaatggaagaagaaagacattactggaatttaccacaaatggcagaacatgaacgagaacaggctgctctggaaactggggacattgccaccagggcttctaactttttacaagctgacacaccctctggacaaatcatggcatgtgcttggcttagggtacaatccaaccattgagcgctcagagatagacaatgctgctgtcatccactacaatggtaacatgaagccctggctggaaattgcaatgataaagtatcggccttactggacaaagtacatcaattatcagcattcctacattcatggatgcaagatcagccaatagaaaccaccctcagatattcttctgtgatgaacattgaagttggatgggactcaaaatgaaatcagtataactatcacatgttctttattcgtgttatattagatttgttagttatcacgtgtatgtagtttcgtcgcccttttgtggtgctttctcccctagctcattgttggttcttgtccctttttgtcatgaaaagaatgatgagctctatgattctcatcagctgataaatgtaatgtctgaatttctgtcggtggcaaattaatgatcccattcaaacggc

SEQ ID NO: 20861 - protein, 280 aa, Zea mays subsp. mays
  misc_feature (1)..(280): Ceres Seq. ID no. 12388642
NLVTDKLNFGAMNMWFLLNPPGDATIHVENVDDFKWLNSSYCPVLKQLESAAMKEYYFKADRPKTLSAGSSNLKYRNPKYLSMLNHLRFYLPQVYPKLNKILFLDDDIVVQRDLTGLWEVDLNGNVNGAVETCGESFHRFDKYLNFSNPNIAQNFDPNACGWAYGMNMFDLEEWKKKDITGIYHKWQNMNENRLLWKLGTLPPGLLTFYKLTHPLDKSWHVLGLGYNPTIERSEIDNAAVIHYNGNMKPWLEIAMIKYRPYWTKYINYQHSYIHGCKISQ

SEQ ID NO: 20862 - protein, 269 aa, Zea mays subsp. mays
  misc_feature (1)..(269): Ceres Seq. ID no. 12388643
MNMWFLLNPPGDATIHVENVDDFKWLNSSYCPVLKQLESAAMKEYYFKADRPKTLSAGSSNLKYRNPKYLSMLNHLRFYLPQVYPKLNKILFLDDDIVVQRDLTGLWEVDLNGNVNGAVETCGESFHRFDKYLNFSNPNIAQNFDPNACGWAYGMNMFDLEEWKKKDITGIYHKWQNMNENRLLWKLGTLPPGLLTFYKLTHPLDKSWHVLGLGYNPTIERSEIDNAAVIHYNGNMKPWLEIAMIKYRPYWTKYINYQHSYIHGCKISQ

SEQ ID NO: 20863 - protein, 267 aa, Zea mays subsp. mays
  misc_feature (1)..(267): Ceres Seq. ID no. 12388644
MWFLLNPPGDATIHVENVDDFKWLNSSYCPVLKQLESAAMKEYYFKADRPKTLSAGSSNLKYRNPKYLSMLNHLRFYLPQVYPKLNKILFLDDDIVVQRDLTGLWEVDLNGNVNGAVETCGESFHRFDKYLNFSNPNIAQNFDPNACGWAYGMNMFDLEEWKKKDITGIYHKWQNMNENRLLWKLGTLPPGLLTFYKLTHPLDKSWHVLGLGYNPTIERSEIDNAAVIHYNGNMKPWLEIAMIKYRPYWTKYINYQHSYIHGCKISQ

SEQ ID NO: 20864 - DNA, 1621 bp, Zea mays subsp. mays
  misc_feature (1)..(1621): Ceres Seq. ID no. 12388645
acaaattgtgtgtgccttggcgtgtcgtggaggccccgggcacgcacgccgcacagtggcatcagctctcagtgcgcgcacgtcaccacaaattgtgtgccttgtcgtggaggccccgggcacgtacgccgcacagggcacacctgctccctccggcctgctctgctcactgctttgattccgcttcggcgcttcgccgcctccggttttctctccgcgcctccagtctccagggacgcaccacctctcccaagtcccaatctcccatggcggcgctgggcacggcgatcacccccgcagcagctaccacggcgccgtgctgctataatcggcatccgcggagccacatcacggcgcgccgtaaccgggttgcctccgcgaggaggcttgacctgtgcgccagctcctcacctgccgtcaccgctcccgacataccagacgaggcgctggtggaacccttggtggcgccggcgccggagacgaagctcaggaagctggcgtgtccaatctgctactaccccctggcgagctcgagcgatcagttggatgatgctaccagtctcgaatgtccaacgtgcaagaaatgctaccccaacaagcaagattactgggatcttacagtgtcagttggttcgacagagtactccgagtccatgccagtggcaacagagttgtttaggactccactggtatcttttctttacgaaagaggatggcgccaaaatttcatatggggtggtttcccaggcctagaaagagagtttgaaatggcaaaaacttatttgaagccaacaattggagggactattgttgatgcaagttgtggaagtggcctgttctcaagattatttattaagagtgggctatattctcttgttgtggcactggatttctcagagaatatgttgaagcagtgcaaccaatacatcaagcaggaaaacatttcagatgagagattagtattggtgagggctgacatatctagactcccttttgtgagtggttcaattgacgctctgcatgcaggtgctgcaattcattgttggccatccccagcttgtgctgttgcagatatcagtagagtccttcgcccagggggaatttttgttgcttcgacattcgtggcagatgttattccaccagctattccagtattgaagatcgtacgcccgtacattagccaaataactggcaacaataccttcttatctgaagtggagcttgaagatctttgcaaagcatgtgggctggttgatttcaaatttgtcagaagtggattctatataatgttttctgccactaaagcatgctaactaagtagcagcaatcgtccagtcgtttatgtcaagactcctcggttttatactgcaaatggtttccttctgtgcattgtgcggttgtgccatttgctctaaaggttgccaactttcctcaagggggtgtggtgtaaatagtgaacacatatattttacttctacttgaccgacctcattatagcatgaaaatatcatattttttgtgtacagcttcatagatctttgcaattatgtaatttaaggcttgtttggaacagctctaccaacctaaaaactgaatctggatatagaatttagttagatcc

SEQ ID NO: 20865 - protein, 436 aa, Zea mays subsp. mays
  misc_feature (1)..(436): Ceres Seq. ID no. 12388646
KLCVPWRVVEAPGTHAAQWHQLSVRARHHKLCALSWRPRARTPHRAHLLPPACSAHCFDSASALRRLRFSLRASSLQGRTTSPKSQSPMAALGTAITPAAATTAPCCYNRHPRSHITARRNRVASARRLDLCASSSPAVTAPDIPDEALVEPLVAPAPETKLRKLACPICYYPLASSSDQLDDATSLECPTCKKCYPNKQDYWDLTVSVGSTEYSESMPVATELFRTPLVSFLYERGWRQNFIWGGFPGLEREFEMAKTYLKPTIGGTIVDASCGSGLFSRLFIKSGLYSLVVALDFSENMLKQCNQYIKQENISDERLVLVRADISRLPFVSGSIDALHAGAAIHCWPSPACAVADISRVLRPGGIFVASTFVADVIPPAIPVLKIVRPYISQITGNNTFLSEVELEDLCKACGLVDFKFVRSGFYIMFSATKAC

SEQ ID NO: 20866 - protein, 348 aa, Zea mays subsp. mays
  misc_feature (1)..(348): Ceres Seq. ID no. 12388647
MAALGTAITPAAATTAPCCYNRHPRSHITARRNRVASARRLDLCASSSPAVTAPDIPDEALVEPLVAPAPETKLRKLACPICYYPLASSSDQLDDATSLECPTCKKCYPNKQDYWDLTVSVGSTEYSESMPVATELFRTPLVSFLYERGWRQNFIWGGFPGLEREFEMAKTYLKPTIGGTIVDASCGSGLFSRLFIKSGLYSLVVALDFSENMLKQCNQYIKQENISDERLVLVRADISRLPFVSGSIDALHAGAAIHCWPSPACAVADISRVLRPGGIFVASTFVADVIPPAIPVLKIVRPYISQITGNNTFLSEVELEDLCKACGLVDFKFVRSGFYIMFSATKAC

SEQ ID NO: 20867 - protein, 250 aa, Zea mays subsp. mays
  misc_feature (1)..(250): Ceres Seq. ID no. 12388648
TNCVCLGVSWRPRARTPHSGISSQCAHVTTNCVPCRGGPGHVRRTGHTCSLRPALLTALIPLRRFAASGFLSAPPVSRDAPPLPSPNLPWRRWARRSPPQQLPRRRAAIIGIRGATSRRAVTGLPPRGGLTCAPAPHLPSPLPTYQTRRWWNPWWRRRRRRSSGSWRVQSATTPWRARAISWMMLPVSNVQRARNATPTSKITGILQCQLVRQSTPSPCQWQQSCLGLHWYLFFTKEDGAKISYGVVSQA

SEQ ID NO: 20868 - DNA, 602 bp, Zea mays subsp. mays
  misc_feature (1)..(602): Ceres Seq. ID no. 12388653
agggacgcgctcatccttttgcctcccaactgtgctgtgcaggaacctgcggggaaggcggtcgctcgctcgctgagaggatgcctctggggctgacgctgggctcgctggggcggtcgatgcgccggaagcggctgtcctcgctcgacatcctctcctccaagcgggcgccgcgggattactacaagggcaagaactgcaagcccaccgggttccacacccgcaaaggtggatatgtgattgttgatgaaaagttgccaagatttgtggtccctgacttgactgatttcaagctgaaggcatacgtgtcacaatgcgccagggacctcacagcgtcgacagcatcctctacttcagcagaaagtactgaaagcaagagctgatctgatctttgcttgcggggaggcagcccaactctgaagttatgtttccctagactgcccatgttccgaggattagcatcagcattctagctacaaacatttcagatatctttcttgtaagggcaaacattatggcatacctagattcacttttcctgctttaattttgatcttcattttgaagtaataagtacttgagttaaggggacatttcttgtg

SEQ ID NO: 20869 - protein, 126 aa, Zea mays subsp. mays
  misc_feature (1)..(126): Ceres Seq. ID no. 12388654
GRAHPFASQLCCAGTCGEGGRSLAERMPLGLTLGSLGRSMRRKRLSSLDILSSKRAPRDYYKGKNCKPTGFHTRKGGYVIVDEKLPRFVVPDLTDFKLKAYVSQCARDLTASTASSTSAESTESKS

SEQ ID NO: 20870 - protein, 100 aa, Zea mays subsp. mays
  misc_feature (1)..(100): Ceres Seq. ID no. 12388655
MPLGLTLGSLGRSMRRKRLSSLDILSSKRAPRDYYKGKNCKPTGFHTRKGGYVIVDEKLPRFVVPDLTDFKLKAYVSQCARDLTASTASSTSAESTESKS

SEQ ID NO: 20871 - protein, 87 aa, Zea mays subsp. mays
  misc_feature (1)..(87): Ceres Seq. ID no. 12388656
MRRKRLSSLDILSSKRAPRDYYKGKNCKPTGFHTRKGGYVIVDEKLPRFVVPDLTDFKLKAYVSQCARDLTASTASSTSAESTESKS

SEQ ID NO: 20872 - DNA, 1202 bp, Zea mays subsp. mays
  misc_feature (1)..(1202): Ceres Seq. ID no. 12388689
actgctcagcagtcagtcagcactcgccacccacacgcctccgctccgcccacgggtccactccaactctccgatctccaggaatccgcggctgaggcgccggcgatggcggctcccatggtcgacgccgaatacctgcgccaggtcgacagggcgcgccgccacctccgcgccctcatctccaacaagggatgcgccccgatcatgctccgcctcgcatggcatgatgctggaacttatgacctgaagacaaaaactggtggtgcaaatggttcgattagatatgaagaagagtacactcatggttcaaatgctggtttaaagattgctatcgatctccttgagcctatcaaagcaaagaatccaaagataacatatgcagacctgtatcagcttgctggagtggttgcagtcgaagtgactggggggccaactgttgaatttattcctggcagacgtgattcgtcggtgtgcccccgtgaagggcgtctgccagatgctaagaaaggtgcaccacatctgagggacatcttttatcggatgggcttatcggacaaagatattgtagctctatcagggggacatactctgggaagggctcaccctgagaggtctggattcgatggtgcctggacaaaggagcctcttaagtttgataactcatactttcttgagctgttgaatgaggaatctgagggacttttaaagctcccaactgacaaggcactgttatcagatcctgaatttaggcgctatgtggagctctatgcaaaggatgaagatgcgttcttcaaagattatgctgaatcacacaagaaactctctgagcttggcttcacgcctcgcagcacagcaccatccaaatcagatcttccaaccgccgccgtgcttgcacagagtgcctttggggtagcagttgctgcagccgtagttatcgctggctacttgtacgaggcttccaagaaggccaagtagagggcgaagttcttctccacatggctttgctttagtaagtctgaagatcgaataacaggaccatatctgaagatcgaataacggatcatataaatgagttactcggaaaatgttctgaaatccttacgaacagaacgttgccttcatgtttacactgtactcatgagtcacagtgatatggagatggcatagcctactattggaagtatatgcattctgtgtaatcc

SEQ ID NO: 20873 - protein, 324 aa, Zea mays subsp. mays
  misc_feature (1)..(324): Ceres Seq. ID no. 12388690
TAQQSVSTRHPHASAPPTGPLQLSDLQESAAEAPAMAAPMVDAEYLRQVDRARRHLRALISNKGCAPIMLRLAWHDAGTYDLKTKTGGANGSIRYEEEYTHGSNAGLKIAIDLLEPIKAKNPKITYADLYQLAGVVAVEVTGGPTVEFIPGRRDSSVCPREGRLPDAKKGAPHLRDIFYRMGLSDKDIVALSGGHTLGRAHPERSGFDGAWTKEPLKFDNSYFLELLNEESEGLLKLPTDKALLSDPEFRRYVELYAKDEDAFFKDYAESHKKLSELGFTPRSTAPSKSDLPTAAVLAQSAFGVAVAAAVVIAGYLYEASKKAK

SEQ ID NO: 20874 - protein, 289 aa, Zea mays subsp. mays
  misc_feature (1)..(289): Ceres Seq. ID no. 12388691
MAAPMVDAEYLRQVDRARRHLRALISNKGCAPIMLRLAWHDAGTYDLKTKTGGANGSIRYEEEYTHGSNAGLKIAIDLLEPIKAKNPKITYADLYQLAGVVAVEVTGGPTVEFIPGRRDSSVCPREGRLPDAKKGAPHLRDIFYRMGLSDKDIVALSGGHTLGRAHPERSGFDGAWTKEPLKFDNSYFLELLNEESEGLLKLPTDKALLSDPEFRRYVELYAKDEDAFFKDYAESHKKLSELGFTPRSTAPSKSDLPTAAVLAQSAFGVAVAAAVVIAGYLYEASKKAK

SEQ ID NO: 20875 - protein, 285 aa, Zea mays subsp. mays
  misc_feature (1)..(285): Ceres Seq. ID no. 12388692
MVDAEYLRQVDRARRHLRALISNKGCAPIMLRLAWHDAGTYDLKTKTGGANGSIRYEEEYTHGSNAGLKIAIDLLEPIKAKNPKITYADLYQLAGVVAVEVTGGPTVEFIPGRRDSSVCPREGRLPDAKKGAPHLRDIFYRMGLSDKDIVALSGGHTLGRAHPERSGFDGAWTKEPLKFDNSYFLELLNEESEGLLKLPTDKALLSDPEFRRYVELYAKDEDAFFKDYAESHKKLSELGFTPRSTAPSKSDLPTAAVLAQSAFGVAVAAAVVIAGYLYEASKKAK

SEQ ID NO: 20876 - DNA, 1231 bp, Zea mays subsp. mays
  misc_feature (1)..(1231): Ceres Seq. ID no. 12388992
aggctctagttccaacctccacctgcgccgcccgatagcaaaacgcagcgacctcgccccccctgccccgctcctccccttttcccggtagcagagacggagcaccgcagcccgccagaaaggaagacgaaacgcgccgcggcgcaacgcaccgcgtgctagtgaaagggcgcagcggaaggccgccgccgcgctgctatttagacaggaagcggggcgatcgaatcgcgtctctcaaccaatcgataaatctgccggtaggtcgatcaaggagagcgcggtccacgtctccgttccgttccgttgcggggaaggaaggaaggagagagaggagcgatggcgtccgggtaccgcgcggaggaggagtacgactacctgttcaaggtggtgctgatcggggacagcggcgtggggaagtcgaacctgctgtcgcggttcgccagggacgagttcagcctcgagaccaggtccaccatcggcgtcgagttcgccaccaagaccgtccaggtcgacgacaagctcgtcaaggcacagatctgggacaccgccgggcaggagaggtaccgcgccatcacgagcgcatactaccgcggcgcggtgggcgcgctggtggtgtacgacgtgagccgccgcaccaccttcgacaacgcggagcgctggctgcgggagccgcgggaccacacggacgccaacatcgtggtcatgctggtgggcaacaaggccgacctgcgccacctccgcgccgtctcgcccgaggacgcggcggccttcgccgagcggcacggcaccttctccatggagacgtcggcgctggacgccaccaacgtggagcgcgccttcgccgaggtgctccgccagatctaccacgtcgtcagccggaacgcgctcgacatcggggacgaccccgccgcgccgcccaggggcaagaccatcgacgtcagcgccgccaaggacgaggtctcccctgtgaacgcgggcgggtgctgctcgtcggcttagccctggtcaaacatacgctttgctgattaaggaagacataacgtgatgacaatctttgttgacttcgtcaagcggttgggggtggttggcgctcgtgatgtgtttgcagactagcaatcgctgtcctcgattgtatttttcgggctattttttgattgatgcacttgggtgacgcacacatttacaagtggcaggttatggaccatatggggagcgatttacactgatttgg

SEQ ID NO: 20877 - protein, 220 aa, Zea mays subsp. mays
  misc_feature (1)..(220): Ceres Seq. ID no. 12388993
MASGYRAEEEYDYLFKVVLIGDSGVGKSNLLSRFARDEFSLETRSTIGVEFATKTVQVDDKLVKAQIWDTAGQERYRAITSAYYRGAVGALVVYDVSRRTTFDNAERWLREPRDHTDANIVVMLVGNKADLRHLRAVSPEDAAAFAERHGTFSMETSALDATNVERAFAEVLRQIYHVVSRNALDIGDDPAAPPRGKTIDVSAAKDEVSPVNAGGCCSSA

SEQ ID NO: 20878 - DNA, 1402 bp, Zea mays subsp. mays
  misc_feature (1)..(1402): Ceres Seq. ID no. 12389013
actccctcctcgtcgcttgccacaagtcctcgggcgtccgtcgatcataccgcataccgccggcgcagtcctcgccggcgctggacggggtgaagttttagatcaccagaggggcatttttctctcatcgggcagtagaagttttggatcttatccagctagcctccaatccatcatggatcatgacggcacgaacctggctgtcaatgaggctgtgcgctcggtgcagctgctcaagattgacggctacagcgccaccgctaccatgagcgagttggatttcatcaaatccagaaggaacctcgctggccacgagtgggaggtccttttctatcctcagttcagccgttacggtggctgcatagctttgaagctcgtccttgtcagtgaacccccgagggacaaggacaagctgctgagggcgagcctgagatgccgccttgtatgccctagccagccgcatctccatgcctccatagagaagagcgtgtcccatgtatttaccagtgactctagatgctcgtctgaagttatcctcatcccaaaatatgagctaccatcatcaggttacctcgtgaacgattcactgaccgtggaatgcacggtcaccgtgctacgcgacttggacgccacggctaaggtgctgtccctgccagtgccactgccaccaccctccgacctacaccagcacttcgatgagctgttgcagagcaagaatggagcggacgtcacgttccgtgtctccgggaagtcattcgccgcccacaaggccattctcgccgcaaggtccccggttttcatggctcagttcttcggaggcatgaaggaaagaagctctgctcatgtggagatcagagacatggactctgctgcgttcagttccatgcttcacttcatctataccgacatggtcccagagctcgacggtgcccaggagcctgaggcggcagcgatcatggctcagcacctactggtagctgctgacatgtatgggctgaacaggctgaagctgatatgtgaatgcaagctctctggtggcatcgacatcggcacggcggcttcgacgttggctctcgccgaacagcacgactgctcgctgctcaaagccaagtgtctcgagttcatcaccaggtcgcctgagacacttgaagctgtcctggcaactgatggatacgcgcatctggcggcaagctgtcccttggttctggctgaactactgatggctgcgcgtggaaggaagatctgagctggatgatggttttcgttgacagtcctattattactagtttttaattatcccttcctcgtatgatgagttgctttggcttctcatattttggttatggtttcccaagatgtatggcctaaagcatgatgaactagtgcttgcagttgatttccc

SEQ ID NO: 20879 - protein, 414 aa, Zea mays subsp. mays
  misc_feature (1)..(414): Ceres Seq. ID no. 12389014
LPPRRLPQVLGRPSIIPHTAGAVLAGAGRGEVLDHQRGIFLSSGSRSFGSYPASLQSIMDHDGTNLAVNEAVRSVQLLKIDGYSATATMSELDFIKSRRNLAGHEWEVLFYPQFSRYGGCIALKLVLVSEPPRDKDKLLRASLRCRLVCPSQPHLHASIEKSVSHVFTSDSRCSSEVILIPKYELPSSGYLVNDSLTVECTVTVLRDLDATAKVLSLPVPLPPPSDLHQHFDELLQSKNGADVTFRVSGKSFAAHKAILAARSPVFMAQFFGGMKERSSAHVEIRDMDSAAFSSMLHFIYTDMVPELDGAQEPEAAAIMAQHLLVAADMYGLNRLKLICECKLSGGIDIGTAASTLALAEQHDCSLLKAKCLEFITRSPETLEAVLATDGYAHLAASCPLVLAELLMAARGRKI

SEQ ID NO: 20880 - protein, 356 aa, Zea mays subsp. mays
  misc_feature (1)..(356): Ceres Seq. ID no. 12389015
MDHDGTNLAVNEAVRSVQLLKIDGYSATATMSELDFIKSRRNLAGHEWEVLFYPQFSRYGGCIALKLVLVSEPPRDKDKLLRASLRCRLVCPSQPHLHASIEKSVSHVFTSDSRCSSEVILIPKYELPSSGYLVNDSLTVECTVTVLRDLDATAKVLSLPVPLPPPSDLHQHFDELLQSKNGADVTFRVSGKSFAAHKAILAARSPVFMAQFFGGMKERSSAHVEIRDMDSAAFSSMLHFIYTDMVPELDGAQEPEAAAIMAQHLLVAADMYGLNRLKLICECKLSGGIDIGTAASTLALAEQHDCSLLKAKCLEFITRSPETLEAVLATDGYAHLAASCPLVLAELLMAARGRKI

SEQ ID NO: 20881 - protein, 326 aa, Zea mays subsp. mays
  misc_feature (1)..(326): Ceres Seq. ID no. 12389016
MSELDFIKSRRNLAGHEWEVLFYPQFSRYGGCIALKLVLVSEPPRDKDKLLRASLRCRLVCPSQPHLHASIEKSVSHVFTSDSRCSSEVILIPKYELPSSGYLVNDSLTVECTVTVLRDLDATAKVLSLPVPLPPPSDLHQHFDELLQSKNGADVTFRVSGKSFAAHKAILAARSPVFMAQFFGGMKERSSAHVEIRDMDSAAFSSMLHFIYTDMVPELDGAQEPEAAAIMAQHLLVAADMYGLNRLKLICECKLSGGIDIGTAASTLALAEQHDCSLLKAKCLEFITRSPETLEAVLATDGYAHLAASCPLVLAELLMAARGRKI

SEQ ID NO: 20882 - DNA, 1830 bp, Zea mays subsp. mays
  misc_feature (1)..(1830): Ceres Seq. ID no. 12390089
gcacgagaccattacctagaacatcctaatcgaaaaactgtctcgtcggctcgtcgctccgtagaccccgcgcctccgcctccccgccactcgccggaggctgccgccatcgttatgccatggccgtcatcctctcctccgcggcgccaacgatactgactcgtcccacgcgccctcggaggcagccgaggagcggcctccgcgggggcctcgcgcgcctctcagctgcgctcggcctcgcgcacgcgggcgccggcgccggcgccgcactcgccgcgccgctctcctacgaggagatgctgcgcctctcgtccgactccggcggtgatgttggcgggttcgcgctcccggagctcggcctcgacgggctcgttgacttcgtcaacgataaccctctcgtcgtcgcggcaggcgtcgcggccatcgcagtgccgcttctccttgcgcagcttctcggcggaggcggcagctccaagcccctactccgtcctgtccgccaaggcggcctaccagcggctgctcgaggagcccgacgcgcagctcgtcgacatcaggccgctcaaggatgcacgagaggccggcacgcctgatctcaaggaggctaagaagaaggctgctgccgtaccttacaacggggaggacaaaaacggattcttgaaaaagttgacactaaagttcaaggacccggagaacaccacgctgatcatccttgacaaatttgatgggaactccgaactagttgctgagcttgtgacagccaatggttacaaagctgcttttgcagtgaaggatggtgcagaaggaagccgaggatggaagagcagtaaccttccctggaaggctccgccaaaaggattcagctttgacttgggcgaattatttggggatggttcagatggtttgcctgtgacaattggtctcgctgcagctactggtttgggagtacttgcctacacagagattgaaactttgctacagtttttggggtcagctgctgttgttcagctagtggtaaccaaactcttgtatgccgaggatcgacaaaagacacttaaacagatcgatgagttctttaacaagaaggttgctccgaaggagcttattgacgaaataaaggaaatcgggcaggctctactacctttacctggcgatgctaaaagccaaccagcactagcaacagcgactcaagttgctgccacacaaacagctgcaccagcagaggacgctaccgcagaagccaccacggaatcagatcctgcaacgccaacacctctttcaccttatacaaattacccagatctcaagccgccatcaacccctacgccaccgtcagtggagtctgaagtcgagacgaaggctagcagcaccgtgactgaaggaccagcagtggtcaattctgcacctatagcagacgctgccacgggatcatctcctgccactactaggcccagacctcagtcaccataccctaattatccagatttcaagccaccatcctcgccttcaccgtcagcaccttaatttggcaagagtacaagaaaccgggtctagaggatattaaagaagttgagttgttcatatggagccggcatctcactagaggtgtatgttgtactatgagcgtgacagtgtggctaagtcactgtggcgagttttctgcagcagtaaatatatgatgtaatgttcattagttatcaatgtgctatgattttctttttgttgtcttattttcgatacatgtaaatgtcgaataactagccgtgagaattgagagttcaagcctatagagcttgatatgtttgatcaaagtaaatgtatcttcttaaaaac

SEQ ID NO: 20883 - protein, 397 aa, Zea mays subsp. mays
  misc_feature (1)..(397): Ceres Seq. ID no. 12390090
MLAGSRSRSSASTGSLTSSTITLSSSRQASRPSQCRFSLRSFSAEAAAPSPYSVLSAKAAYQRLLEEPDAQLVDIRPLKDAREAGTPDLKEAKKKAAAVPYNGEDKNGFLKKLTLKFKDPENTTLIILDKFDGNSELVAELVTANGYKAAFAVKDGAEGSRGWKSSNLPWKAPPKGFSFDLGELFGDGSDGLPVTIGLAAATGLGVLAYTEIETLLQFLGSAAVVQLVVTKLLYAEDRQKTLKQIDEFFNKKVAPKELIDEIKEIGQALLPLPGDAKSQPALATATQVAATQTAAPAEDATAEATTESDPATPTPLSPYTNYPDLKPPSTPTPPSVESEVETKASSTVTEGPAVVNSAPIADAATGSSPATTRPRPQSPYPNYPDFKPPSSPSPSAP

SEQ ID NO: 20884 - DNA, 1275 bp, Zea mays subsp. mays
  misc_feature (1)..(1275): Ceres Seq. ID no. 12390143
aacaggcaagtcttcgcttcgctcctctctgcggctccctccggcgagcggcgatggccttctcacccccactgatcgactgggaggcggagagctaccctgcctacccagatttcgcggccattccccttttcgtcgtcttcttcctcgtcgtccgtttcttcctcgaccgcttcgtattcgagtggttagccaggaagctgattttcaaggaggaggatgagaagaagcttggccctactacatatgcaggcaagagaaagatcaggaaatttaaagaatcagcttggaaatgcatgtattttctttctggggagctattggcattgtctgtgacgtacaacgagccatggttcacaaccacaagaaatttctgggttggaccaggcgatcagatctggccagatcaaaaaattaaattgaaactcaagacagtctatatgtatgttgctggcttttacacatactcgatatttgcccttttgttttgggaaataaggcgttcagacttcggtatttcaatgactcatcatgtagcaaccgtctgtctgatagcactgtcttacatattcagatttgctcgggtgggttcagttgtccttgccattcatgatgctactgatgtgttcctggagcttggaaaaatttccaagtatagtggccatgagttgtttgcagatgtttcatttcttgttttcgtcagttcttgggtactcctccgccttatatattatccgttctggattctctggagcacgagctatgaagttgttctgactctagacaaggaaaagcataaagttgacgggccaatatactactatgtattcaacagtcttctcttctctctacttgttctacacatatattggtgggttttaatgtatcggatgcttgtgaagcaaatacagtctagagggcacgttggcgatgatatacgatctgattctgaaggtgaagaggaacatgaggattgattgagctgtgtagagtcggaagataataaataacatggggatggattgagctgtataagttccaaaggcgaaaaggaatacatggatggattgagctgtgtaaattctgaaggtgtatcaaatcattctgctgtttttcttctgtccttgttcttgataagtaacaataaattagtgcccttctctaggtgagcatcatcgatagatgtcacttgggcattatcattatctattgatgtaaaatcaggtcacattgcatagcacacacacaacagttaatggaaaatgttagcagtgc

SEQ ID NO: 20885 - protein, 324 aa, Zea mays subsp. mays
  misc_feature (1)..(324): Ceres Seq. ID no. 12390144
QASLRFAPLCGSLRRAAMAFSPPLIDWEAESYPAYPDFAAIPLFVVFFLVVRFFLDRFVFEWLARKLIFKEEDEKKLGPTTYAGKRKIRKFKESAWKCMYFLSGELLALSVTYNEPWFTTTRNFWVGPGDQIWPDQKIKLKLKTVYMYVAGFYTYSIFALLFWEIRRSDFGISMTHHVATVCLIALSYIFRFARVGSVVLAIHDATDVFLELGKISKYSGHELFADVSFLVFVSSWVLLRLIYYPFWILWSTSYEVVLTLDKEKHKVDGPIYYYVFNSLLFSLLVLHIYWWVLMYRMLVKQIQSRGHVGDDIRSDSEGEEEHED

SEQ ID NO: 20886 - protein, 307 aa, Zea mays subsp. mays
  misc_feature (1)..(307): Ceres Seq. ID no. 12390145
MAFSPPLIDWEAESYPAYPDFAAIPLFVVFFLVVRFFLDRFVFEWLARKLIFKEEDEKKLGPTTYAGKRKIRKFKESAWKCMYFLSGELLALSVTYNEPWFTTTRNFWVGPGDQIWPDQKIKLKLKTVYMYVAGFYTYSIFALLFWEIRRSDFGISMTHHVATVCLIALSYIFRFARVGSVVLAIHDATDVFLELGKISKYSGHELFADVSFLVFVSSWVLLRLIYYPFWILWSTSYEVVLTLDKEKHKVDGPIYYYVFNSLLFSLLVLHIYWWVLMYRMLVKQIQSRGHVGDDIRSDSEGEEEHED

SEQ ID NO: 20887 - protein, 226 aa, Zea mays subsp. mays
  misc_feature (1)..(226): Ceres Seq. ID no. 12390146
MYFLSGELLALSVTYNEPWFTTTRNFWVGPGDQIWPDQKIKLKLKTVYMYVAGFYTYSIFALLFWEIRRSDFGISMTHHVATVCLIALSYIFRFARVGSVVLAIHDATDVFLELGKISKYSGHELFADVSFLVFVSSWVLLRLIYYPFWILWSTSYEVVLTLDKEKHKVDGPIYYYVFNSLLFSLLVLHIYWWVLMYRMLVKQIQSRGHVGDDIRSDSEGEEEHED

SEQ ID NO: 20888 - DNA, 1980 bp, Zea mays subsp. mays
  misc_feature (1)..(1980): Ceres Seq. ID no. 12390151
gcacgagaccattacctagaacatcctaatcgaaaagaacccttcccgtctccaaccgtcgccatctccatccgcgatttaaccactcggccgccgctgagtcagagtcagtagcgagaagcagagcggctctgctcctctcggtcgcgcgccgcccacacaacgccgtccaaccatcagcaatgcctcctgcagttggactccttcccctcctcctcctcctcctcctcttccatctccccgtctccctctgctcccaccaccaccatcacagcaccccacccgcttctccgtccccgtccccgtccccagcaccctcctccgcgccgctagcggtgctcctggcctgcaacgccacccggttccatccggcctgcgtctccacgctctccggcgccgcgcccgatgcctccaccgccgacctcctcgacgcgacgctctcggcgctccgcgtccgcctcccgcccgccgtctccacggccaaatccgtgctggcgtcctcctccaacgtgaacctctccaacgccgccaccaactgcctcacgttcctcgcgctctcctcccgccgcctctcgccgtccccctcggcgccgccgctgctctccgcctccacggcgctgctccacctctacgactgctggtccgcgtacaagtacgtcaacttctcccgcaccatctccgacgccatggcctacctcgacgacaccatcaccgtgaacagcaactacatctccatgctcgccgcgcggcagcgctacggcgacgagacgtccctctggcggcccccgcagacggagcgcgacgggtactggccgccgcccgccgcgagctcgggggccgacgtcgacgcgctcggcgtgcccaagggcctgccggcgaacgcgacggtgtgcggcgccgggtgcgactacaggacggtgcgggaggcggtggcggccgcgccggactacggcgacggcgcgttcgtggtgcacgtgaaggagggggcgtacagggagacggtgagcgtgccgtgggagaagaccaacgtggtcctcgttggcgacggcatggggaagacggtcatcactggcgatctcaacgctgacacgtccggcgtgtccaccttcaacaccgccaccgtaggcgtgctggcggacgggttcatggcgcgtgacctgacgatcgcgaacacggcgggccccgacgcgcaccaggccgtggcgttccggtccacgggcgaccgcacggtgctggacggcgtggagctgctggggcaccaggacacgctgtacgcgcacgccatgcgccagttctacacccggtgccgcgtggcgggcaccgtcgacttcgtcttcggcaactccgccgcggtgctccacgacaccgccctcgtcgtgctgccgcggcagctgcggccggagaagggcgagaacgacgccgtcacggcgcagggccgcaccgacccggcccagcccacggggatcgtgctcagccgctgctccgtcaacggcagcgaggagtacatggcgctgtaccgcgagaggcccggcgtgcaccacgtgtacctgggccgcccgtggaaggagtactcccgcaccgtgtacgtcgggtgcatgctcgcggagatcgtgcagccgcaggggtggatgccgtggaacggggacttcgcgctccagacgctctactacggcgagtacgacagcgccggccccggcggcgccgcgggccagagggtggcgtggagcagccaggttcccaaggtccacgtcgacgcgtacagcgtcgccagcttcatacaggggcacgagtggatacccagagtgtagtgcagtaccgcgtaataactgtagagagtgtatttaccaacaatcgtgtcccacaattgacacggtgtccctgatgttgagcttgagcattgcagttactcctaataatacggagagagcaagtcaaagacatggaaataataaacctaccgcgataacgatcgcaacgggc

SEQ ID NO: 20889 - protein, 541 aa, Zea mays subsp. mays
  misc_feature (1)..(541): Ceres Seq. ID no. 12390152
MPPAVGLLPLLLLLLLFHLPVSLCSHHHHHSTPPASPSPSPSPAPSSAPLAVLLACNATRFHPACVSTLSGAAPDASTADLLDATLSALRVRLPPAVSTAKSVLASSSNVNLSNAATNCLTFLALSSRRLSPSPSAPPLLSASTALLHLYDCWSAYKYVNFSRTISDAMAYLDDTITVNSNYISMLAARQRYGDETSLWRPPQTERDGYWPPPAASSGADVDALGVPKGLPANATVCGAGCDYRTVREAVAAAPDYGDGAFVVHVKEGAYRETVSVPWEKTNVVLVGDGMGKTVITGDLNADTSGVSTFNTATVGVLADGFMARDLTIANTAGPDAHQAVAFRSTGDRTVLDGVELLGHQDTLYAHAMRQFYTRCRVAGTVDFVFGNSAAVLHDTALVVLPRQLRPEKGENDAVTAQGRTDPAQPTGIVLSRCSVNGSEEYMALYRERPGVHHVYLGRPWKEYSRTVYVGCMLAEIVQPQGWMPWNGDFALQTLYYGEYDSAGPGGAAGQRVAWSSQVPKVHVDAYSVASFIQGHEWIPRV

SEQ ID NO: 20890 - protein, 373 aa, Zea mays subsp. mays
  misc_feature (1)..(373): Ceres Seq. ID no. 12390153
MAYLDDTITVNSNYISMLAARQRYGDETSLWRPPQTERDGYWPPPAASSGADVDALGVPKGLPANATVCGAGCDYRTVREAVAAAPDYGDGAFVVHVKEGAYRETVSVPWEKTNVVLVGDGMGKTVITGDLNADTSGVSTFNTATVGVLADGFMARDLTIANTAGPDAHQAVAFRSTGDRTVLDGVELLGHQDTLYAHAMRQFYTRCRVAGTVDFVFGNSAAVLHDTALVVLPRQLRPEKGENDAVTAQGRTDPAQPTGIVLSRCSVNGSEEYMALYRERPGVHHVYLGRPWKEYSRTVYVGCMLAEIVQPQGWMPWNGDFALQTLYYGEYDSAGPGGAAGQRVAWSSQVPKVHVDAYSVASFIQGHEWIPRV

SEQ ID NO: 20891 - protein, 357 aa, Zea mays subsp. mays
  misc_feature (1)..(357): Ceres Seq. ID no. 12390154
MLAARQRYGDETSLWRPPQTERDGYWPPPAASSGADVDALGVPKGLPANATVCGAGCDYRTVREAVAAAPDYGDGAFVVHVKEGAYRETVSVPWEKTNVVLVGDGMGKTVITGDLNADTSGVSTFNTATVGVLADGFMARDLTIANTAGPDAHQAVAFRSTGDRTVLDGVELLGHQDTLYAHAMRQFYTRCRVAGTVDFVFGNSAAVLHDTALVVLPRQLRPEKGENDAVTAQGRTDPAQPTGIVLSRCSVNGSEEYMALYRERPGVHHVYLGRPWKEYSRTVYVGCMLAEIVQPQGWMPWNGDFALQTLYYGEYDSAGPGGAAGQRVAWSSQVPKVHVDAYSVASFIQGHEWIPRV

SEQ ID NO: 20892 - DNA, 1444 bp, Zea mays subsp. mays
  misc_feature (1)..(1444): Ceres Seq. ID no. 12390163
gcaattaaccctcactaaagggaacaaaagctggagctccaccgcggtggcggccgctctagaactagtggatcccccgggctgcaggaattcgcacgagaccattacctagaacatcctaatcgaaaacatatgaatagaaaagaacccctttgcgcaaggcaaacccccacccagctcacctcggcgatggcatcggcggcggccgtggagtgggaggcggcggcgcggaaggtgctggtggcgcgcaagccctggcttcgggctacctacggcctgcccaacctgcctccccgtgctcctctacctccgcatggcgcaggttcccttcgacatccacgtcgacacctccttccccgatgccgatcacataccatatgttgaatttggggattgcgtggctttcaacaacgagaaaggaggcgtaattgagtatctcaaggatgagaaaattgttgacttgaactcaaatcacccaaatatttcatccaccactgtgctagacacgaaggccatggtttcgtcctggcttgctaatgctttgctgtatgaactctgggtggttagtgatggaagcattgcaaatgatatctacttctctgatctcccttggcccattggaaagatactccattggaataaaactagacatgtgaagcagctacttggtataacaaagctcaatgctgcagaaaaagaagaggagatataccagaaggcaagtgctgcatatgagtcattgtctttcagattaggggatcaagtctttctatttgataatagccctacagatgttgatgctcttttccttggacatgttctttttgttctcagtgcgttgcctgatacatctgtgctgaggggcactttgcagaagcatgacaacttggtgagctttgctgagcatcacaaggtccagttgctggaagcctcatcatcatcatcatcagggttaggatcatcacctagcccatcatcatccacccccaggagaagaccatctgctgaccacagttataagccaaaacccagagccaagaaggaaacggacggaggaggaaaagaaattcaggcgaagagcaaagtatttcctggccacacaactcgttgcagttcttgtgttcctttcgctgatgggtggggttgatagttccgagctagacgacgaagatggcttggattatgatgattagatcctccctgtgctgttacacttgattagttccaaggacaaactgcctggttggttcggggtgctgtgagaatttgttccaacactggaaaatgtgttacgcttgattttagctaggaattcactgagttggtcacccatcggcagtttcataagctacttcggctgtaaacatacttgtctctgaaggttttttttttttgggcttcagtgaaccaaacttgtaagcaaattcgaattttggagttttgg

SEQ ID NO: 20893 - protein, 277 aa, Zea mays subsp. mays
  misc_feature (1)..(277): Ceres Seq. ID no. 12390164
MAQVPFDIHVDTSFPDADHIPYVEFGDCVAFNNEKGGVIEYLKDEKIVDLNSNHPNISSTTVLDTKAMVSSWLANALLYELWVVSDGSIANDIYFSDLPWPIGKILHWNKTRHVKQLLGITKLNAAEKEEEIYQKASAAYESLSFRLGDQVFLFDNSPTDVDALFLGHVLFVLSALPDTSVLRGTLQKHDNLVSFAEHHKVQLLEASSSSSSGLGSSPSPSSSTPRRRPSADHSYKPKPRAKKETDGGGKEIQAKSKVFPGHTTRCSSCVPFADGWG

SEQ ID NO: 20894 - protein, 210 aa, Zea mays subsp. mays
  misc_feature (1)..(210): Ceres Seq. ID no. 12390165
MVSSWLANALLYELWVVSDGSIANDIYFSDLPWPIGKILHWNKTRHVKQLLGITKLNAAEKEEEIYQKASAAYESLSFRLGDQVFLFDNSPTDVDALFLGHVLFVLSALPDTSVLRGTLQKHDNLVSFAEHHKVQLLEASSSSSSGLGSSPSPSSSTPRRRPSADHSYKPKPRAKKETDGGGKEIQAKSKVFPGHTTRCSSCVPFADGWG

SEQ ID NO: 20895 - DNA, 847 bp, Zea mays subsp. mays
  misc_feature (1)..(847): Ceres Seq. ID no. 12390186
gcacgagaccattacctagaacatcctaatcgaaaaagtggcgcttggggctgttcgttgtggtggtgcggcaggaagagacgatggcgcgaggtggcgcgtgggccgcggtggcggcggcggccgtgtggtggatggcggcgggggccggggcggtatggctggagattgcgccgtcagggactaagtgtgtgtcggaggagatccaatccaacgttgttgtcatcggcgactactccgtcctctatgatcaccaccacgcccagcctaccatctccgtcaaggttacgtccccttttggagacattgttcataagaaagagaaggtttcgatggggcaatttgcatttaccacagcagaagcagggaactaccttgcctgcttctcaattgatggtgaggacagagggttagtggtgaagctaaaccttgactggaaaattgggctggctagtagagactgggattctgttgccaaaaaggaaaagatcgagggagttgaactggagttgctcaagctcgaagttgctgtccaatcaatccatgacaacctgctgctactaaaatccaaagaagctaacatgagggacgtcagtgagcagacgaattctagggtcacgtggctgagcatgctgtctcttgttgtttgcattgcagtctctgttttacagctgtggcatctacaacagtacttccgaaagatgaagctcatctgacctgatgtctgaaatatagtgctctgcaataagcttatcttcatctttttttttttttgcatatgagatctggtagttccaccgtcgagcctagcaattgtaaataaaatggtataacaaactgaaatccc

SEQ ID NO: 20896 - protein, 210 aa, Zea mays subsp. mays
  misc_feature (1)..(210): Ceres Seq. ID no. 12390187
MARGGAWAAVAAAAVWWMAAGAGAVWLEIAPSGTKCVSEEIQSNVVVIGDYSVLYDHHHAQPTISVKVTSPFGDIVHKKEKVSMGQFAFTTAEAGNYLACFSIDGEDRGLVVKLNLDWKIGLASRDWDSVAKKEKIEGVELELLKLEVAVQSIHDNLLLLKSKEANMRDVSEQTNSRVTWLSMLSLVVCIAVSVLQLWHLQQYFRKMKLI

SEQ ID NO: 20897 - protein, 193 aa, Zea mays subsp. mays
  misc_feature (1)..(193): Ceres Seq. ID no. 12390188
MAAGAGAVWLEIAPSGTKCVSEEIQSNVVVIGDYSVLYDHHHAQPTISVKVTSPFGDIVHKKEKVSMGQFAFTTAEAGNYLACFSIDGEDRGLVVKLNLDWKIGLASRDWDSVAKKEKIEGVELELLKLEVAVQSIHDNLLLLKSKEANMRDVSEQTNSRVTWLSMLSLVVCIAVSVLQLWHLQQYFRKMKLI

SEQ ID NO: 20898 - protein, 137 aa, Zea mays subsp. mays
  misc_feature (1)..(137): Ceres Seq. ID no. 12390189
ARDHYLEHPNRKSGAWGCSLWWCGRKRRWREVARGPRWRRRPCGGWRRGPGRYGWRLRRQGLSVCRRRSNPTLLSSATTPSSMITTTPSLPSPSRLRPLLETLFIRKRRFRWGNLHLPQQKQGTTLPASQLMVRTEG

SEQ ID NO: 20899 - DNA, 1252 bp, Zea mays subsp. mays
  misc_feature (1)..(1252): Ceres Seq. ID no. 12390224
caaattattcgcaatcatgatatctatgtaaacaagcgaactcccaaaaacacttcaaaaggtattggtagggcattgagagaaagtgactacaaggactcacctgccttgtacaaaggtgttgatggtgagactactgtggtagatcgtgtaatgctgtgctcagatacaaatgataagttatccattaagtgtattattcgttacactagaaggccagaggttggtgacaaattcagtagcagacatgggcagaaaggtgtctgtggtacgattgttcagcaagaagacttccccttctctgagagaggaatctgtcctgatttaatcatgaatccacatggtttcccaagtcgtatgacaataggtaaaatgattgaacttcttggtggaaaggctggtgtttcttgtggacggtttcactatggcagtgcatttggtgagccaagtggtaatgctgacaaggttgcagacataagctctactctaatcaagcatggtttcagctataatggaaaagatttcttgtactcaggcattcttggtcagcctcttgaggcatacatcttcatgggaccaatctactatcagaaactaaagcacatggttcttgataagatgcatgctcgagctagtggaccgcgggtgttactgtcgaggcaaccaactgaggggcgaagccgtgatggaggtttgcgtcttggtgagatggaacgtgattgtctaattgcatatggcgcgagcatgctaatatttgaacgtctactgttatcaagtgatccttatcaagtccaggtttgcagaaaatgtggcttgttaggctactacaatcacaaactgaaaacttcatactgttcaatgtgcaagaatggggaaaacatggccaagatgaggctgccatacgcttgcaagcttctattccaggagttgcatgcaatgaatgtagtaccacgcttgaagttaaccgaagtatgacagatgctgggactgtacaatgagagagatgctggattcgaaatgtgtttagagctatataataaattaaagccctctttgataggggcatagggctttttttttttgttaactggttcgagagaaaccacgtttaggtgtgtggtttcagccgtctagctagtctcttcgcgggcttctcttctcccgcggaggtatacaagctatcgccgggcaattgttgtatatatagttttttcccgatgtcatatatgaaggaatctggacctctttgttc

SEQ ID NO: 20900 - protein, 324 aa, Zea mays subsp. mays
  misc_feature (1)..(324): Ceres Seq. ID no. 12390225
QIIRNHDIYVNKRTPKNTSKGIGRALRESDYKDSPALYKGVDGETTVVDRVMLCSDTNDKLSIKCIIRYTRRPEVGDKFSSRHGQKGVCGTIVQQEDFPFSERGICPDLIMNPHGFPSRMTIGKMIELLGGKAGVSCGRFHYGSAFGEPSGNADKVADISSTLIKHGFSYNGKDFLYSGILGQPLEAYIFMGPIYYQKLKHMVLDKMHARASGPRVLLSRQPTEGRSRDGGLRLGEMERDCLIAYGASMLIFERLLLSSDPYQVQVCRKCGLLGYYNHKLKTSYCSMCKNGENMAKMRLPYACKLLFQELHAMNVVPRLKLTEV

SEQ ID NO: 20901 - protein, 273 aa, Zea mays subsp. mays
  misc_feature (1)..(273): Ceres Seq. ID no. 12390226
MLCSDTNDKLSIKCIIRYTRRPEVGDKFSSRHGQKGVCGTIVQQEDFPFSERGICPDLIMNPHGFPSRMTIGKMIELLGGKAGVSCGRFHYGSAFGEPSGNADKVADISSTLIKHGFSYNGKDFLYSGILGQPLEAYIFMGPIYYQKLKHMVLDKMHARASGPRVLLSRQPTEGRSRDGGLRLGEMERDCLIAYGASMLIFERLLLSSDPYQVQVCRKCGLLGYYNHKLKTSYCSMCKNGENMAKMRLPYACKLLFQELHAMNVVPRLKLTEV

SEQ ID NO: 20902 - protein, 214 aa, Zea mays subsp. mays
  misc_feature (1)..(214): Ceres Seq. ID no. 12390227
MNPHGFPSRMTIGKMIELLGGKAGVSCGRFHYGSAFGEPSGNADKVADISSTLIKHGFSYNGKDFLYSGILGQPLEAYIFMGPIYYQKLKHMVLDKMHARASGPRVLLSRQPTEGRSRDGGLRLGEMERDCLIAYGASMLIFERLLLSSDPYQVQVCRKCGLLGYYNHKLKTSYCSMCKNGENMAKMRLPYACKLLFQELHAMNVVPRLKLTEV

SEQ ID NO: 20903 - DNA, 1248 bp, Zea mays subsp. mays
  misc_feature (1)..(1248): Ceres Seq. ID no. 12390236
aatcgaaaagagctcacttcctcatctaatctacatgtctagaattatatgttgatggtttcttatggtattgactggctgtcttgtaattgctggctatagaatgcaggtgatcaacaaacagaaggttcatctcagccagaaaggaattcaatggaggaggggaacagaaagatttcgcccaaaatacaaagcaaggaagattcttctgatggtgatggtactaaagaggactatgttcatatccgggcaaagcgaggtcaagccactaacagccacagcctcgcagaaagactgaggagaaaaaagataagtgagagaatgaagcttcttcaagatcttgttcctggatgcagtaagatcactggcaaggcagtcatgctcgatgagattatcaactatgtacagtcattgcaacgacaagtggagttcttgtcaatgaaactttcaactgttaaccctgaacttggctttgacattgagcagatcatatccaaacaaatgatgctttcacaagacagacatcttgctttctatggagtcgatccaggatcaagcagccttactgctccattcaaccaaggaatcgtgcagccagcaatgatgtgcaacatttctaatcctgccgatgttttgcacggaactattcatgacgtgtcaacaatgaaccagataccttccatgtgggaaggacttcagagcatgcctcagatgaacttcaaccctggtgtggcagctgatagcggcaccaacaactctggctccatgaagatcgaacagtgagctgctgtatagtagcttcgaaattgttgtgtgaatcactgaatcatcgtaaagcgctctcgagatgaagctttttttgtatagctggaggcctgaccattatgctggattcctgcggttgctcccatactgtgcggcacattgtttatggtatggcatatggatcgtgtacagctggagctgaagaactgattccactgtaaatttctgttgtgctttggcctgcgaaaattgggatggaaacctagtagcatccatgaaattcaaggacagaagcttgttgggattgggacttgggaccacgtgctgaatactgatgggcctaaacgtactagacgagtactaatagaatcgtagttgtaggtaaaaaaatgcagagtttgaaaccagtggttttgtcagaaattccatggagtttgctatatttatttatgatatcaaaacagaaactgaatggccgctggc

SEQ ID NO: 20904 - protein, 209 aa, Zea mays subsp. mays
  misc_feature (1)..(209): Ceres Seq. ID no. 12390237
MEEGNRKISPKIQSKEDSSDGDGTKEDYVHIRAKRGQATNSHSLAERLRRKKISERMKLLQDLVPGCSKITGKAVMLDEIINYVQSLQRQVEFLSMKLSTVNPELGFDIEQIISKQMMLSQDRHLAFYGVDPGSSSLTAPFNQGIVQPAMMCNISNPADVLHGTIHDVSTMNQIPSMWEGLQSMPQMNFNPGVAADSGTNNSGSMKIEQ

SEQ ID NO: 20905 - protein, 153 aa, Zea mays subsp. mays
  misc_feature (1)..(153): Ceres Seq. ID no. 12390238
MKLLQDLVPGCSKITGKAVMLDEIINYVQSLQRQVEFLSMKLSTVNPELGFDIEQIISKQMMLSQDRHLAFYGVDPGSSSLTAPFNQGIVQPAMMCNISNPADVLHGTIHDVSTMNQIPSMWEGLQSMPQMNFNPGVAADSGTNNSGSMKIEQ

SEQ ID NO: 20906 - protein, 134 aa, Zea mays subsp. mays
  misc_feature (1)..(134): Ceres Seq. ID no. 12390239
MLDEIINYVQSLQRQVEFLSMKLSTVNPELGFDIEQIISKQMMLSQDRHLAFYGVDPGSSSLTAPFNQGIVQPAMMCNISNPADVLHGTIHDVSTMNQIPSMWEGLQSMPQMNFNPGVAADSGTNNSGSMKIEQ

SEQ ID NO: 20907 - DNA, 1448 bp, Zea mays subsp. mays
  misc_feature (1)..(1448): Ceres Seq. ID no. 12390259
cgcaattaaccctcactaaagggaacaaaagctggagctccaccgcggtggcggccgctctagaactagtggatcccccgggctgcaggaattcgcacgagaccattacctagaacatcctaatcgaaaaacatacaggagttaattgttgggggatgccacactagctcctcacacatggacgatgagtggaggccggtgatggccatgctcgtcttcaacctcatctctgctgtgatgacggcgctggtgaagaaggcgctccagcaagggctcaacgccctggtcctcatcactcttcgccagttggtggccactctcttcctagcaccaatagcctacttcaaagaacggaacacaaggcctaagctcacgctagagatctttgtgtaccacttcttcagtgcagcgcttggtgcttccctgtcgcagtacagcttcttctacgggctcaagttgacaactgcgacgttcgccataacatttgccaacatggctcctgtcctcaccttcctcattgccatagctctacgggtggagtcgctcaacatgaagagcaaatcagggtctgcaaagatggtggggacgctcatgtcgctcggtggagtgctgctgctgagcctctacaagggcatggccgtgacacaccacagcagcggcactcctccgccctctcaagtacaactaggcaacgacggcgacaggaaggtctggatgctggggactgtagcgttactggccaactgcctcgtcttctccctgtggttgctgctgcaaagcaggctgacgaacaagtacccggcgctctactccagcaccgccttcatgttcttcatcagcacgctgcagacaggatcgctgacggtgacggtcgagtggcaccacgcgtcggtgtggattgtcacaaagaagctggagatggtcacgatattgtattcgggaatcatggcgtctgcagcaggcttcctgataatgacctggtgcgtccacaagaggggtccagttttcactgcagccttcatccccatcgtccagatcatggtggccatcatcgatttcttcttcctccatgagcagctataccttggcagtgttctgggatccgcgctgatgatatttggactttaccttctgttgtggggaaagaagaaggatgcaatggcggcatgctctgcaggtacgaccaaacatgacgaagaggccagcatcaacaagtagcttagtgaaataatcagcagtcagcatcatcgagtggtggcaaacacagacatgtactagtggcggcatctgcaattgtttgaagaaaagaaaatctacgatcgatccagaccccttttgccatgcatgcatgagatgtgtttccagcaacactaattaacagaactgccgatcgatgatatcacgagtttattgttcataaccacttgtcaataaaaacttttgctttt

SEQ ID NO: 20908 - protein, 346 aa, Zea mays subsp. mays
  misc_feature (1)..(346): Ceres Seq. ID no. 12390260
MDDEWRPVMAMLVFNLISAVMTALVKKALQQGLNALVLITLRQLVATLFLAPIAYFKERNTRPKLTLEIFVYHFFSAALGASLSQYSFFYGLKLTTATFAITFANMAPVLTFLIAIALRVESLNMKSKSGSAKMVGTLMSLGGVLLLSLYKGMAVTHHSSGTPPPSQVQLGNDGDRKVWMLGTVALLANCLVFSLWLLLQSRLTNKYPALYSSTAFMFFISTLQTGSLTVTVEWHHASVWIVTKKLEMVTILYSGIMASAAGFLIMTWCVHKRGPVFTAAFIPIVQIMVAIIDFFFLHEQLYLGSVLGSALMIFGLYLLLWGKKKDAMAACSAGTTKHDEEASINK

SEQ ID NO: 20909 - protein, 338 aa, Zea mays subsp. mays
  misc_feature (1)..(338): Ceres Seq. ID no. 12390261
MAMLVFNLISAVMTALVKKALQQGLNALVLITLRQLVATLFLAPIAYFKERNTRPKLTLEIFVYHFFSAALGASLSQYSFFYGLKLTTATFAITFANMAPVLTFLIAIALRVESLNMKSKSGSAKMVGTLMSLGGVLLLSLYKGMAVTHHSSGTPPPSQVQLGNDGDRKVWMLGTVALLANCLVFSLWLLLQSRLTNKYPALYSSTAFMFFISTLQTGSLTVTVEWHHASVWIVTKKLEMVTILYSGIMASAAGFLIMTWCVHKRGPVFTAAFIPIVQIMVAIIDFFFLHEQLYLGSVLGSALMIFGLYLLLWGKKKDAMAACSAGTTKHDEEASINK

SEQ ID NO: 20910 - protein, 336 aa, Zea mays subsp. mays
  misc_feature (1)..(336): Ceres Seq. ID no. 12390262
MLVFNLISAVMTALVKKALQQGLNALVLITLRQLVATLFLAPIAYFKERNTRPKLTLEIFVYHFFSAALGASLSQYSFFYGLKLTTATFAITFANMAPVLTFLIAIALRVESLNMKSKSGSAKMVGTLMSLGGVLLLSLYKGMAVTHHSSGTPPPSQVQLGNDGDRKVWMLGTVALLANCLVFSLWLLLQSRLTNKYPALYSSTAFMFFISTLQTGSLTVTVEWHHASVWIVTKKLEMVTILYSGIMASAAGFLIMTWCVHKRGPVFTAAFIPIVQIMVAIIDFFFLHEQLYLGSVLGSALMIFGLYLLLWGKKKDAMAACSAGTTKHDEEASINK

SEQ ID NO: 20911 - DNA, 1211 bp, Zea mays subsp. mays
  misc_feature (1)..(1211): Ceres Seq. ID no. 12390281
gcacgagaccattacctagaacatcctaatcgaaaaacccaaacgaatattatagaagctggctgaaaagctgagtgtttggcagtccgcagtagcttttggtggccagtagcttttggaaatggactccattgtcggttgtcgcctctgaccgtaccacctctgttacctgcaccgccgctccgttaaatcgcggcccgatcgccgatgcctccccgccccgtcccactattctctcgcctgcgcttccgcctcccgagttgcgccgccgtctccatctccacccctccatcctccgcggcgcccctgcactacggccatcgcactcccctcgctagcccttttcctctgtccccaccttgcccgcgcatcctccgtgcggccgtcgcggtttcttcgctggatctgcgcccgatcaccggcgggttcgcgctattcagcatggctgctgcctcctccgccacctccgtccacgacttcaccgtcaaggatgctagcgggaaagatgtggaccttagcacctataaggggaaggttctgctcatagtcaatgttgcatctcagtgtggcttaaccaattccaactacacagagctgagccagttgtatgagaagtacaaggaccagggttttgagatccttgcattcccatgcaaccagttcggtgggcaggagcctggcactaatgaggagattgtccagtttgcttgtactcgcttcaaggctgagtatccaattttcgacaaggttgatgtcaatggtgacaatactgcacccatttacaagttcctgaagtccagcaaaggtagtctctttggcgataacataaaatggaacttctccaaattcttggttgacaaagaggggcatgttgtggagcggtatgcaccaacaacttccccactgagcatcgagaaggacatcaagaaactactagggagttattaaaccttgtaattggattcagtagccctaccaaactgctgctttgcatcgagcacctgatgcctcagtagcgttttaataaagttgtttttataaccgagatgttttgtatttcttctgtattccctgctttgtggtaaatgtcatgtaataaaaatgatgcaatccacgatttatcttgaaaggttatgtatccaggtcggttgttatgagatatttgagaaatgagttttggcatgggggcatatcttgcgtacctgcctacc

SEQ ID NO: 20912 - protein, 246 aa, Zea mays subsp. mays
  misc_feature (1)..(246): Ceres Seq. ID no. 12390282
MPPRPVPLFSRLRFRLPSCAAVSISTPPSSAAPLHYGHRTPLASPFPLSPPCPRILRAAVAVSSLDLRPITGGFALFSMAAASSATSVHDFTVKDASGKDVDLSTYKGKVLLIVNVASQCGLTNSNYTELSQLYEKYKDQGFEILAFPCNQFGGQEPGTNEEIVQFACTRFKAEYPIFDKVDVNGDNTAPIYKFLKSSKGSLFGDNIKWNFSKFLVDKEGHVVERYAPTTSPLSIEKDIKKLLGSY

SEQ ID NO: 20913 - protein, 168 aa, Zea mays subsp. mays
  misc_feature (1)..(168): Ceres Seq. ID no. 12390283
MAAASSATSVHDFTVKDASGKDVDLSTYKGKVLLIVNVASQCGLTNSNYTELSQLYEKYKDQGFEILAFPCNQFGGQEPGTNEEIVQFACTRFKAEYPIFDKVDVNGDNTAPIYKFLKSSKGSLFGDNIKWNFSKFLVDKEGHVVERYAPTTSPLSIEKDIKKLLGSY

SEQ ID NO: 20914 - DNA, 2645 bp, Zea mays subsp. mays
  misc_feature (1)..(2645): Ceres Seq. ID no. 12390337
agaacccaaccccaatccaacggctgcgagagctctcgtcgcgccgccgccgccacctgacagtctcctctcccctgcgcgcgcacgacgagcgccgggcaggaacagccgccaactccctccaacttccttaaaccctagcgacagcagcaggcaaccagcgccgacgaggaggaggagcgcggagtagaggggctccggcgaccgcgtcggagatggcagcgagccacggcgcggggacgctcaagtccacctccatcaacggggtcaagctctactcgctcaccggcggccgctatgtcgccccctgggtcgtcgcgaagaagaagcgcgccctccgaaaggacaaagagtatcagcggaggctggatttgatccacgacctgaggttcgagacagccaccaccaagatcaagctgacgcccgatgaccagtacctgatcgcctcaggtatttaccccccgcaagttaaagtctacgagttgaaggaattgtcgatgaagttcgagcggcacatgatctcagaaattgtagatttccagatccttggtgatgactattccaaactcgcgtttttgtgtgctgatcgttctgtaaatttgcacgctaagtatggaagccattatagcctgagaattccaagagtgggaagggacatggcctacgattgctggtcctgcgacttgctatgtgctgcttcatcaccagatctgtacaggataaacctagagcagggacgattccttgcttctctttcctccgaatcaccagcaataaatgcggttacacgaagtaagatccatgggcttgttgcttgcggtggtgaggatggtgcggttgagtgttttgatatgaggaaaaaaacttctgttggcagaattaatattccagctgttagttctgaagattattctcaggaggtcacgtctttgcaatttgatgaagatcaaggatactttatggcagtggggaccagtacaggaaagatatcaatatatgatttacgcatgtcttctcctctgagagttaaggatcacatgtatggtagcccaatattaaatatcaaatggcaccagacacttaattctactgaacctaaactgatcactgctgataagcacatagtgagaatctgggatcctaatacaggaaataacatgactagcattgaaccagatggtggtgctatcaatgatgtctgtgtcttccggaatagtggtttagtgctattagccctggacaatagccagatacctgcccacttcattcctgcgctcggccctgctccaaagtggtgttcacatcttgataacttaactgaggagatggaagagaaaccagatacaacgctgtttgatgagtacaagttcttgactaaagaagagatggagcgactgaaccttactcaatacattggcagcagtgctgtaagagcatatttacatggatttattgtacgttatgaactatacaagaagcaacgggcagcagttgctcctgttgagtacgagacaattaaggatgagataaagaaaaagaaattagaagctcagagaaaatctcgtataacgcaagtcgtcaaaataccgaaggttaacaggcagattatggacagtataagggaagatgaaatagatcttgatatggagaatgttgataaatcaagtattaagaagaagaaaagaaaactagaactgaataaggccattttggatgatgatcggttcaaagaaatgtttgagaataaggattttgaaattgacgaagaatcaaaagaatacctcgcacttcatcctcaggcagccacaaaggagcctcgcctgattgaagaacattttgatagtgttagcgaggacgaccaacaatctgatggtaacgcatctgacactctagcggaatctgacagtgatgatgtcatgcataattcaaagcgtataaggttatacgaggtcaaggatgaacaccatgcggaagcatttttgaacagcgtctctctttcaaacgaggatgccgctccccttgaggataggatagctgccctggaaaggaaacagaactccaaagcacttgatgcggtcaagtacgggcctggtggctcacgagagatttcgtttttctctaaaagccggagaaggcacaaggaagagtcgtctagcgacgacgaacccaagggtgtcaaaaagagagctgtgcagccgctgggcttgaagcagggaaaagccgagttctatatgtttggcggaaatcgtggcagaggtagaggcggtagtggcagaggtagaagcgggcaaggaagaggtggaggtggaggtggaggaggaagaggtggaggtggaagaggtggaggtaggggcaggggcaggggcagaggatgaatggggcctgtaacattgaccccgttcggccgttcctgcctttgcaggggttttggtaagcttgaaaatggatggatcctgcacatgcagtgggtagaaagtgtgttccttcacaacataggcaagagctagagtaactgaggattgctgcttcagaatttttgggaagagaaatttgttagaagacaatattacatatcttttggtctaccttgtaacggattgttgcattctggtgggtgtctatgggtacggtatagcatttttttc

SEQ ID NO: 20915 - protein, 719 aa, Zea mays subsp. mays
  misc_feature (1)..(719): Ceres Seq. ID no. 12390338
MAASHGAGTLKSTSINGVKLYSLTGGRYVAPWVVAKKKRALRKDKEYQRRLDLIHDLRFETATTKIKLTPDDQYLIASGIYPPQVKVYELKELSMKFERHMISEIVDFQILGDDYSKLAFLCADRSVNLHAKYGSHYSLRIPRVGRDMAYDCWSCDLLCAASSPDLYRINLEQGRFLASLSSESPAINAVTRSKIHGLVACGGEDGAVECFDMRKKTSVGRINIPAVSSEDYSQEVTSLQFDEDQGYFMAVGTSTGKISIYDLRMSSPLRVKDHMYGSPILNIKWHQTLNSTEPKLITADKHIVRIWDPNTGNNMTSIEPDGGAINDVCVFRNSGLVLLALDNSQIPAHFIPALGPAPKWCSHLDNLTEEMEEKPDTTLFDEYKFLTKEEMERLNLTQYIGSSAVRAYLHGFIVRYELYKKQRAAVAPVEYETIKDEIKKKKLEAQRKSRITQVVKIPKVNRQIMDSIREDEIDLDMENVDKSSIKKKKRKLELNKAILDDDRFKEMFENKDFEIDEESKEYLALHPQAATKEPRLIEEHFDSVSEDDQQSDGNASDTLAESDSDDVMHNSKRIRLYEVKDEHHAEAFLNSVSLSNEDAAPLEDRIAALERKQNSKALDAVKYGPGGSREISFFSKSRRRHKEESSSDDEPKGVKKRAVQPLGLKQGKAEFYMFGGNRGRGRGGSGRGRSGQGRGGGGGGGGRGGGGRGGGRGRGRGRG

SEQ ID NO: 20916 - protein, 625 aa, Zea mays subsp. mays
  misc_feature (1)..(625): Ceres Seq. ID no. 12390339
MKFERHMISEIVDFQILGDDYSKLAFLCADRSVNLHAKYGSHYSLRIPRVGRDMAYDCWSCDLLCAASSPDLYRINLEQGRFLASLSSESPAINAVTRSKIHGLVACGGEDGAVECFDMRKKTSVGRINIPAVSSEDYSQEVTSLQFDEDQGYFMAVGTSTGKISIYDLRMSSPLRVKDHMYGSPILNIKWHQTLNSTEPKLITADKHIVRIWDPNTGNNMTSIEPDGGAINDVCVFRNSGLVLLALDNSQIPAHFIPALGPAPKWCSHLDNLTEEMEEKPDTTLFDEYKFLTKEEMERLNLTQYIGSSAVRAYLHGFIVRYELYKKQRAAVAPVEYETIKDEIKKKKLEAQRKSRITQVVKIPKVNRQIMDSIREDEIDLDMENVDKSSIKKKKRKLELNKAILDDDRFKEMFENKDFEIDEESKEYLALHPQAATKEPRLIEEHFDSVSEDDQQSDGNASDTLAESDSDDVMHNSKRIRLYEVKDEHHAEAFLNSVSLSNEDAAPLEDRIAALERKQNSKALDAVKYGPGGSREISFFSKSRRRHKEESSSDDEPKGVKKRAVQPLGLKQGKAEFYMFGGNRGRGRGGSGRGRSGQGRGGGGGGGGRGGGGRGGGRGRGRGRG

SEQ ID NO: 20917 - protein, 619 aa, Zea mays subsp. mays
  misc_feature (1)..(619): Ceres Seq. ID no. 12390340
MISEIVDFQILGDDYSKLAFLCADRSVNLHAKYGSHYSLRIPRVGRDMAYDCWSCDLLCAASSPDLYRINLEQGRFLASLSSESPAINAVTRSKIHGLVACGGEDGAVECFDMRKKTSVGRINIPAVSSEDYSQEVTSLQFDEDQGYFMAVGTSTGKISIYDLRMSSPLRVKDHMYGSPILNIKWHQTLNSTEPKLITADKHIVRIWDPNTGNNMTSIEPDGGAINDVCVFRNSGLVLLALDNSQIPAHFIPALGPAPKWCSHLDNLTEEMEEKPDTTLFDEYKFLTKEEMERLNLTQYIGSSAVRAYLHGFIVRYELYKKQRAAVAPVEYETIKDEIKKKKLEAQRKSRITQVVKIPKVNRQIMDSIREDEIDLDMENVDKSSIKKKKRKLELNKAILDDDRFKEMFENKDFEIDEESKEYLALHPQAATKEPRLIEEHFDSVSEDDQQSDGNASDTLAESDSDDVMHNSKRIRLYEVKDEHHAEAFLNSVSLSNEDAAPLEDRIAALERKQNSKALDAVKYGPGGSREISFFSKSRRRHKEESSSDDEPKGVKKRAVQPLGLKQGKAEFYMFGGNRGRGRGGSGRGRSGQGRGGGGGGGGRGGGGRGGGRGRGRGRG

SEQ ID NO: 20918 - DNA, 944 bp, Zea mays subsp. mays
  misc_feature (1)..(944): Ceres Seq. ID no. 12390522
atttttcccctcgtcctccctgcgatttcgcgacctccatccaatccctctgcacggagaatcgtctaatggcggaggagggctacagaggtgacgctgaacgtgtacgacctcagcaacggcctcagcaacggcaagcccattgaggccatctggcacacgggagtggtggtgtacgggaacgagtactacttcggcggcgggatccagtcgtcccccgcgggacgacgccgtacgggcggccgctgcgggtggtggagctgggcgtcacgcacatcccgcgggaggtgttcgaggactacctccgcgacatcgcgccccggtacacggccgagacctaccgcctgctcacccacaactgcaacaacttcagtcacgaggtggcgcagttcctcgtcggcactggcgccggcgtgcccgattacatcctcaacctccccgccgaggtcatgtccagccccatgggcccgctcatcatgcccatgatccagaacctcgagtccacgctcaggagcaacgtcgctccgcagaccacgcagttcgtgcccacgcccgcctccgtntccgcgccgaccgaggctcccgcctccgagcgaaaagcgccggcgccggcgccggcggagaaggcttcgaaggaagctcctgcgcctgcgaagaaggaagcccctactcctgcggctgaccctctcgggagcgccagggggaaggtgcaggaggaggtgatgaaggagttcgcggccatcatggccagcggtacgctacgggccagcgaggcggcggcgctggccatgcgccgggtcatggagcgccacggcgacggcgccacgatgcagcagggctagacgaatcaggctgtgaacgcgttccggttccatgggaattggaatttgtcatctgcatgctgatgccgccgccgtatggaaaaatttggagaagttattcct

SEQ ID NO: 20919 - protein, 130 aa, Zea mays subsp. mays
  misc_feature (1)..(130): Ceres Seq. ID no. 12390523
  misc_feature (38)..(38): Xaa is any aa, unknown or other
MSSPMGPLIMPMIQNLESTLRSNVAPQTTQFVPTPASXSAPTEAPASERKAPAPAPAEKASKEAPAPAKKEAPTPAADPLGSARGKVQEEVMKEFAAIMASGTLRASEAAALAMRRVMERHGDGATMQQG

SEQ ID NO: 20920 - protein, 126 aa, Zea mays subsp. mays
  misc_feature (1)..(126): Ceres Seq. ID no. 12390524
  misc_feature (34)..(34): Xaa is any aa, unknown or other
MGPLIMPMIQNLESTLRSNVAPQTTQFVPTPASXSAPTEAPASERKAPAPAPAEKASKEAPAPAKKEAPTPAADPLGSARGKVQEEVMKEFAAIMASGTLRASEAAALAMRRVMERHGDGATMQQG

SEQ ID NO: 20921 - protein, 121 aa, Zea mays subsp. mays
  misc_feature (1)..(121): Ceres Seq. ID no. 12390525
  misc_feature (29)..(29): Xaa is any aa, unknown or other
MPMIQNLESTLRSNVAPQTTQFVPTPASXSAPTEAPASERKAPAPAPAEKASKEAPAPAKKEAPTPAADPLGSARGKVQEEVMKEFAAIMASGTLRASEAAALAMRRVMERHGDGATMQQG

SEQ ID NO: 20922 - DNA, 1749 bp, Zea mays subsp. mays
  misc_feature (1)..(1749): Ceres Seq. ID no. 12390530
agttcccatccattggtgtggacgtgtggtggttgcgttgcgttgcttcgagttggaggttggttggagttggagtgggccgcgtgccgcgtgcgagatgatctgagtggagaggccatggagtggtgtgattagcggttgctgggtcaggagaaggcggcgtgtgttttgatcctactcgcgtttgaggggccccgatttcgagcgggtgttcaattttggtgccggatttttaaggaggatccaatttaggaagaattttggttttggggacaatggttttggactgcctgatattcgattcataggttggtcaaacgcttaggagtagagaatttttttttcccggaaaacaagagccatttttctaattgtgctactcgtcaatcaatccatggaagctgaactctggaagaagaaactttcctaattagacccggtatttcgtggttggccgttggcgtctaaagcgcgttttagtttaaatatgaacacattttcctgtttactccgcccaaaatctttccgctggatctacttgtgaatcgggtttgtttgttttttacctgagctattcttgtcgatttaggatttcaagtcggcagatccaagggaacgccgaattttgcctgatttcttcgcaatttttggtccgaccaagaggttcctagcctatttttttcctcgcgagaagcaagggctctcccttttcttctttcgccatgtccatggcgttgagccgcttcacgcaatggctgtggccggggggcgccgcggcgcgggtggacacccacgagcaccccagcggggggctaacgagctcctccttccctgacttcccctccgggttccgggagcccgacaccgtcacgttctacaccggccgccagcgcgcgcgcccgaggagggtcaggaatcgtcgccgcagccgcggggaggcccgtgtcgaccgggagtacgacatggtcatcgtcccgtccgacggcggtggctgcctgtctggctccgactccgacgactccgactggtccatcggctggctcgagccacaggcgccggagcttcagacggacggcgaccccgagaactgcttcgccgtcctcgtgccgtgttaccgccacggccgccaagagcagcagccccggaggcaggagggcaggtttcttggcgccggcgccctcaccgatggtggtccctctgatggaaagaattttgtagagcagtggctttcttctttccagaactaatatcgtcagacctcgcctaagctaccctgtaaatagtatcactctgttttagttctactacgtttgtcctagtcgcacaacgtatcgatgaaggaagacatgaaaaagccctaaaaaaagaaggaaatctaaaaagaaaaatgaggagcagtgggattctgaagcggcaccaaatgggtatgtccttcctgaggtgttcccaggccattctactcttgcaaagcaatgcgaaagctgaactacacaaactgcacgccatcaaaaatgattttgccgtcctgatatgtgcggagtgctaacctgatgattgataacacgtagagatgaactgctattccattgttaatttgtcccacttgctcgtggacctcgaattctactgcatgtacattatgttcttgcagtgtatatatatagtcttgcccagagctgcagtggcgtgattgttcagtctgcctgtatatagtgttcttgcagtgtatataagccttgcgcagagctg

SEQ ID NO: 20923 - protein, 174 aa, Zea mays subsp. mays
  misc_feature (1)..(174): Ceres Seq. ID no. 12390531
MSMALSRFTQWLWPGGAAARVDTHEHPSGGLTSSSFPDFPSGFREPDTVTFYTGRQRARPRRVRNRRRSRGEARVDREYDMVIVPSDGGGCLSGSDSDDSDWSIGWLEPQAPELQTDGDPENCFAVLVPCYRHGRQEQQPRRQEGRFLGAGALTDGGPSDGKNFVEQWLSSFQN

SEQ ID NO: 20924 - protein, 172 aa, Zea mays subsp. mays
  misc_feature (1)..(172): Ceres Seq. ID no. 12390532
MALSRFTQWLWPGGAAARVDTHEHPSGGLTSSSFPDFPSGFREPDTVTFYTGRQRARPRRVRNRRRSRGEARVDREYDMVIVPSDGGGCLSGSDSDDSDWSIGWLEPQAPELQTDGDPENCFAVLVPCYRHGRQEQQPRRQEGRFLGAGALTDGGPSDGKNFVEQWLSSFQN

SEQ ID NO: 20925 - protein, 94 aa, Zea mays subsp. mays
  misc_feature (1)..(94): Ceres Seq. ID no. 12390533
MVIVPSDGGGCLSGSDSDDSDWSIGWLEPQAPELQTDGDPENCFAVLVPCYRHGRQEQQPRRQEGRFLGAGALTDGGPSDGKNFVEQWLSSFQN

SEQ ID NO: 20926 - DNA, 705 bp, Zea mays subsp. mays
  misc_feature (1)..(705): Ceres Seq. ID no. 12391325
aacgtgatgaaggttaaaggaggacggatgggagctgtaaatggtatgactccaaagggaaaggtggacgagacatgcatgcaatcacgtgaaatctggactggtgttacatacgctgttgctgcaaatatgctgctccatggaatggagcatcaaggctttacgaccgcagaaggaatttttactgcgggatggtcagaagaaggatatgggtatttgttccaaacaccagaaggatggaccacagatgggcattatagatccctcgtatacatgcggcctcttgccatttgggcgatccagtatgcagtttctcctcccaaggctattcttgaggcccccaaagttaacctaatggaccgaatacatatctcccctcacatggtccgagcaattagcgagataagcattagaaaggtagcacccgacaatagatgtttccctagctctgccttccactgtgaatgctgatccgaaggtaaacatgcagctgctgagcaacttgcaaccttttttttggcttttttcggtttctccttgccccccccccccccccccccccntttcaaggtccaggtgggggggctcaggagttcttttcttggatcagagggcttatccaaaccaccaccaaactcgtgactcaagagagttcatgttgtataattgtacagcaaactgttagtcacataatctttttttttc

SEQ ID NO: 20927 - protein, 156 aa, Zea mays subsp. mays
  misc_feature (1)..(156): Ceres Seq. ID no. 12391326
NVMKVKGGRMGAVNGMTPKGKVDETCMQSREIWTGVTYAVAANMLLHGMEHQGFTTAEGIFTAGWSEEGYGYLFQTPEGWTTDGHYRSLVYMRPLAIWAIQYAVSPPKAILEAPKVNLMDRIHISPHMVRAISEISIRKVAPDNRCFPSSAFHCEC

SEQ ID NO: 20928 - protein, 154 aa, Zea mays subsp. mays
  misc_feature (1)..(154): Ceres Seq. ID no. 12391327
MKVKGGRMGAVNGMTPKGKVDETCMQSREIWTGVTYAVAANMLLHGMEHQGFTTAEGIFTAGWSEEGYGYLFQTPEGWTTDGHYRSLVYMRPLAIWAIQYAVSPPKAILEAPKVNLMDRIHISPHMVRAISEISIRKVAPDNRCFPSSAFHCEC

SEQ ID NO: 20929 - protein, 147 aa, Zea mays subsp. mays
  misc_feature (1)..(147): Ceres Seq. ID no. 12391328
MGAVNGMTPKGKVDETCMQSREIWTGVTYAVAANMLLHGMEHQGFTTAEGIFTAGWSEEGYGYLFQTPEGWTTDGHYRSLVYMRPLAIWAIQYAVSPPKAILEAPKVNLMDRIHISPHMVRAISEISIRKVAPDNRCFPSSAFHCEC

SEQ ID NO: 20930 - DNA, 1127 bp, Zea mays subsp. mays
  misc_feature (1)..(1127): Ceres Seq. ID no. 12391329
gcacgagaccattacctagaacatcctaatcgaaaaaataaacaaaaaagattgactaaactgcaccaatgtaaagctggttcactcgtgtaactgatgcaatgcagtatgcaaagctcctgcctttggccttgatccacatgcttggaaatgttttcaccaatatgagtttgggtaaggtgtctgtctccttcacccacaccatcaaggccatggagcccttcttctcggtcctcctctctatcctattcctaggagagacaccttctctaccagtgttgggttcacttgtccctattgttggcggagttgtattggcgtcgatgactgaagtttcattcaactggattggattctggagtgccatgacttcgaatcttatgaatcaatcgcggaacgtttacagcaagaaaattctcgctgataaagaggacagtttggatgacataaatctcttctcaataataactgtcatggcattcttgttatctgctccactgatgctatgtgtagaaggaatcaagtttagcccatcatatctacagaatgctggagttaatgtaaaagaattatttataagagcggcacttgctgggacatctttctatttttaccaacaggtttcgtacagtttattggctagagtatctcccgtgacccattcggttgccaactctcttaaacgtgtggtggtcattgtgtcatccgttctcttctttagaactttaatttcacctataaatgccttaggaaccggtgttgctcttgctggagtgttcctgtactcgcagttcaaaaagtcaaaaccaaaggctacggctgcatgaagagactatagaatgatggaggatttggaactatcagtcgacgtggtgaagcagactggccttcacggtagcaaacacatatagtttccccatgttgcatcttaaaaaaaatgtgttctcttgtcaggttctttggatgtgagaagcttgtacgtaagtttcatccacaaggtgtggtggaacacgtgaacaacggagatatagcattcttagatttcaagagaatacaaattttggaatatacttccatgtcattgaaactgacagaatgctctcactattatatatattctttacgcc

SEQ ID NO: 20931 - protein, 241 aa, Zea mays subsp. mays
  misc_feature (1)..(241): Ceres Seq. ID no. 12391330
MQYAKLLPLALIHMLGNVFTNMSLGKVSVSFTHTIKAMEPFFSVLLSILFLGETPSLPVLGSLVPIVGGVVLASMTEVSFNWIGFWSAMTSNLMNQSRNVYSKKILADKEDSLDDINLFSIITVMAFLLSAPLMLCVEGIKFSPSYLQNAGVNVKELFIRAALAGTSFYFYQQVSYSLLARVSPVTHSVANSLKRVVVIVSSVLFFRTLISPINALGTGVALAGVFLYSQFKKSKPKATAA

SEQ ID NO: 20932 - protein, 228 aa, Zea mays subsp. mays
  misc_feature (1)..(228): Ceres Seq. ID no. 12391331
MLGNVFTNMSLGKVSVSFTHTIKAMEPFFSVLLSILFLGETPSLPVLGSLVPIVGGVVLASMTEVSFNWIGFWSAMTSNLMNQSRNVYSKKILADKEDSLDDINLFSIITVMAFLLSAPLMLCVEGIKFSPSYLQNAGVNVKELFIRAALAGTSFYFYQQVSYSLLARVSPVTHSVANSLKRVVVIVSSVLFFRTLISPINALGTGVALAGVFLYSQFKKSKPKATAA

SEQ ID NO: 20933 - protein, 220 aa, Zea mays subsp. mays
  misc_feature (1)..(220): Ceres Seq. ID no. 12391332
MSLGKVSVSFTHTIKAMEPFFSVLLSILFLGETPSLPVLGSLVPIVGGVVLASMTEVSFNWIGFWSAMTSNLMNQSRNVYSKKILADKEDSLDDINLFSIITVMAFLLSAPLMLCVEGIKFSPSYLQNAGVNVKELFIRAALAGTSFYFYQQVSYSLLARVSPVTHSVANSLKRVVVIVSSVLFFRTLISPINALGTGVALAGVFLYSQFKKSKPKATAA

SEQ ID NO: 20934 - DNA, 1718 bp, Zea mays subsp. mays
  misc_feature (1)..(1718): Ceres Seq. ID no. 12391349
aaaaaaactcacatcgttccctacaccctactccctccgtcagccagcgaagttccttcagtcactcaacaccttacgtccctagccatcctccgccgcctccgtctctgcttccctagagccgtcgcgatggcagcagcccctgccggtgcccctgcaatcaccgcatcctcctcctttgtttcttcgtctccgttctgtctcaaggcatcgatgaccagccagcgccgacccgcggggagagtctccatcgtcatccgctgcgtcagtagcccgccggccgtcgacacatctttcaagactaatgtcccgcgcaatgctaatatggccaaactccaagcaggatatttgtttcctgagattgccaggagaagagccgctcatttgctgaagtttccagatgccaaaattataagccttggaataggcgacactaccgagcccattccaaatgtcataacaaatgccatggcagagagagcacatgccttgtcaacaattgatggctacagcggttatggagctgagcaaggtgaaaagaaactcagagcagcaattgctgcaacctactatgcggaccttggtattgaagattcagacatatttgtctctgatggtgccaaatgtgacatatctcgcttgcaggtcctttttggatctaatgtgacaattgcggtccaagatccatcataccctgcatatgttgattcaagtgttatcatggggcaaactgatttatatcagcaagacgttcagaagtatggaaacattgagtacatgagatgcggtccagaaaatggattttttcctgatctgtcaactgtccctaggacagatattattttcttttgttcacccaacaatcctactggtgctgctgcatctcgggaccaactaaccaaattagtaaaatttgcaaaggacaacgggtccatcatagtctatgattctgcttatgcaatgtacatatcagatgacagcccaaagtctatctttgaaattcctggagcaaaggaggttgctattgagacagcctcattctcgaaatacgctgggttcacaggtgtccgtntaggttggactgttgtccccaaggagctccttttctcggatggacatccagttgctaaagatttcaatcgcatagtttgcacttgcttcaatggtgcatcaaacattgcgcaagctggtggtttagcctgcctctctccagacggtctaaaggctatgcaagatgttgttggcttctacaaggagaacactgaaataatcgttgagacatttacatcactcggattcaacgtgtatggcgccaagaacgctccatacgtatgggtgcacttccctggccgcaattcgtgggatgtgttcgctgagatcctggagaaggccaatgtggtcactactcctggcactggatttggaccgggtggcgaaggctttgtgagggtcagcgcgttcgggcacagagagaacatcattgaagccgcaaggaggttaaagcagctgtataagtgagcaccgatgcagcttctgtgccctcctagacagatgtatcaataagaacacatcagggcaccaaaaatcgcttggtgaagctgccagaagatgttagattttgaacttttttttttaattctcgtgcggtgtctacattcaaaccatttcgaactctagacaatgcttgttgtaatcctgagacccttcattcactggtg

SEQ ID NO: 20935 - protein, 505 aa, Zea mays subsp. mays
  misc_feature (1)..(505): Ceres Seq. ID no. 12391350
  misc_feature (358)..(358): Xaa is any aa, unknown or other
KKTHIVPYTLLPPSASEVPSVTQHLTSLAILRRLRLCFPRAVAMAAAPAGAPAITASSSFVSSSPFCLKASMTSQRRPAGRVSIVIRCVSSPPAVDTSFKTNVPRNANMAKLQAGYLFPEIARRRAAHLLKFPDAKIISLGIGDTTEPIPNVITNAMAERAHALSTIDGYSGYGAEQGEKKLRAAIAATYYADLGIEDSDIFVSDGAKCDISRLQVLFGSNVTIAVQDPSYPAYVDSSVIMGQTDLYQQDVQKYGNIEYMRCGPENGFFPDLSTVPRTDIIFFCSPNNPTGAAASRDQLTKLVKFAKDNGSIIVYDSAYAMYISDDSPKSIFEIPGAKEVAIETASFSKYAGFTGVRXGWTVVPKELLFSDGHPVAKDFNRIVCTCFNGASNIAQAGGLACLSPDGLKAMQDVVGFYKENTEIIVETFTSLGFNVYGAKNAPYVWVHFPGRNSWDVFAEILEKANVVTTPGTGFGPGGEGFVRVSAFGHRENIIEAARRLKQLYK

SEQ ID NO: 20936 - protein, 462 aa, Zea mays subsp. mays
  misc_feature (1)..(462): Ceres Seq. ID no. 12391351
  misc_feature (315)..(315): Xaa is any aa, unknown or other
MAAAPAGAPAITASSSFVSSSPFCLKASMTSQRRPAGRVSIVIRCVSSPPAVDTSFKTNVPRNANMAKLQAGYLFPEIARRRAAHLLKFPDAKIISLGIGDTTEPIPNVITNAMAERAHALSTIDGYSGYGAEQGEKKLRAAIAATYYADLGIEDSDIFVSDGAKCDISRLQVLFGSNVTIAVQDPSYPAYVDSSVIMGQTDLYQQDVQKYGNIEYMRCGPENGFFPDLSTVPRTDIIFFCSPNNPTGAAASRDQLTKLVKFAKDNGSIIVYDSAYAMYISDDSPKSIFEIPGAKEVAIETASFSKYAGFTGVRXGWTVVPKELLFSDGHPVAKDFNRIVCTCFNGASNIAQAGGLACLSPDGLKAMQDVVGFYKENTEIIVETFTSLGFNVYGAKNAPYVWVHFPGRNSWDVFAEILEKANVVTTPGTGFGPGGEGFVRVSAFGHRENIIEAARRLKQLYK

SEQ ID NO: 20937 - protein, 434 aa, Zea mays subsp. mays
  misc_feature (1)..(434): Ceres Seq. ID no. 12391352
  misc_feature (287)..(287): Xaa is any aa, unknown or other
MTSQRRPAGRVSIVIRCVSSPPAVDTSFKTNVPRNANMAKLQAGYLFPEIARRRAAHLLKFPDAKIISLGIGDTTEPIPNVITNAMAERAHALSTIDGYSGYGAEQGEKKLRAAIAATYYADLGIEDSDIFVSDGAKCDISRLQVLFGSNVTIAVQDPSYPAYVDSSVIMGQTDLYQQDVQKYGNIEYMRCGPENGFFPDLSTVPRTDIIFFCSPNNPTGAAASRDQLTKLVKFAKDNGSIIVYDSAYAMYISDDSPKSIFEIPGAKEVAIETASFSKYAGFTGVRXGWTVVPKELLFSDGHPVAKDFNRIVCTCFNGASNIAQAGGLACLSPDGLKAMQDVVGFYKENTEIIVETFTSLGFNVYGAKNAPYVWVHFPGRNSWDVFAEILEKANVVTTPGTGFGPGGEGFVRVSAFGHRENIIEAARRLKQLYK

SEQ ID NO: 20938 - DNA, 1639 bp, Zea mays subsp. mays
  misc_feature (1)..(1639): Ceres Seq. ID no. 12391357
aaactccaatccagcgttgagctcgacagctcgtgccaaactaggccgcagctggaaataccctccgctccacttacctgctgctggtgagcaccgcaagcaccaactcgcgcccaccgctccgctacaccagccgacgccatcatgtctaccgtcgccgccgcccccaccgtcgtgaaatcggctccggagctcgtcgcgccagtggggccaacacccggcggcaccctcccactgtcctccatcgacaagaccgcggcggtgcgtgtgtcggtggatttcatccaggtttttcccccggccgtaggagcaggcggggacaaagacgccgccgtggccgcgatgcgcgacggcttcgcgaaggcactggtgccgtactacccggtggccggccgcatcgcggacgccagccccggggagcccgtggtggagtgcaccgggcagggcgtctggttcgtggaggccgctgcgagctgcgcgctcgccgacgtcaactacctcgagcgccctctgctcatccccaaggaggagctcctcccgcgacctccccccgaggagaagctcgaggacctcgtcctcatggcacaggtgaccaagttcgcctgcggcgggttcgcggtcgggatctgcttcagccacctggtgttcgacgggcagggcgcggcgcagttcctcaaggcggccggcgagatggcgcgggggctgccggcgccgtcggttgcgccggtctgggaccgcgacgcgatcccggacccgcctaagctgccgcgcggccccccgccgtcgttcacggcgttcagcttcgtgacccaggtggtcgagatctcgccggagagcatcgcgcgcatcaaggacgacttcaaggacgcgacggggcagacctgctccaccttcgacgctgtcacggcggtggtgttcaagtgccgcgcgctggcgatggcgctccccgacgatgccgaggtccggctcggcttcgccgccagcacgcggcacctcctccacggcgtgctgccgtcggtggacggctactacggcaactgcgtgtaccccgtgggcatcacccggaccagcaaggcgatccgtgaggcgtcgcttccggaggtggtcggcgtgatgcgggaggccaaggaggcgcttaccacgcggttcacagactggatgcgcggcggcgccaaggacgaccactacaacgtgccgttggactacggcacggngacggtgtcggactggagccgcgtcgggttcaacgaggtggactacggcttcggtgaaccggggtacgtcttcacgctcaacgacgacgtcaacatcgtcgcgtcggtgatctacctcaaaccgcccgcgcccaagcgcggcatccggctcatgcttcgctgcgtcgaggaacctccacgctgcggcgttcgccgaggagctcgccaaattcgcgtagatggttgtttagtcttggtttatctatacttcattggtgtcggacactcggacctcatcttttacaatattatccatacttcattggtgtcaggcgctcattgattgtcatcggcattgttggatgtgcgggggacatgaaaaagctattacaagaacatttctggtatgcctaaaagtacacatattaaatcatgaccatttatct

SEQ ID NO: 20939 - protein, 463 aa, Zea mays subsp. mays
  misc_feature (1)..(463): Ceres Seq. ID no. 12391358
  misc_feature (357)..(357): Xaa is any aa, unknown or other
MSTVAAAPTVVKSAPELVAPVGPTPGGTLPLSSIDKTAAVRVSVDFIQVFPPAVGAGGDKDAAVAAMRDGFAKALVPYYPVAGRIADASPGEPVVECTGQGVWFVEAAASCALADVNYLERPLLIPKEELLPRPPPEEKLEDLVLMAQVTKFACGGFAVGICFSHLVFDGQGAAQFLKAAGEMARGLPAPSVAPVWDRDAIPDPPKLPRGPPPSFTAFSFVTQVVEISPESIARIKDDFKDATGQTCSTFDAVTAVVFKCRALAMALPDDAEVRLGFAASTRHLLHGVLPSVDGYYGNCVYPVGITRTSKAIREASLPEVVGVMREAKEALTTRFTDWMRGGAKDDHYNVPLDYGTXTVSDWSRVGFNEVDYGFGEPGYVFTLNDDVNIVASVIYLKPPAPKRGIRLMLRCVEEPPRCGVRRGARQIRVDGCLVLVYLYFIGVGHSDLIFYNIIHTSLVSGAH

SEQ ID NO: 20940 - protein, 397 aa, Zea mays subsp. mays
  misc_feature (1)..(397): Ceres Seq. ID no. 12391359
  misc_feature (291)..(291): Xaa is any aa, unknown or other
MRDGFAKALVPYYPVAGRIADASPGEPVVECTGQGVWFVEAAASCALADVNYLERPLLIPKEELLPRPPPEEKLEDLVLMAQVTKFACGGFAVGICFSHLVFDGQGAAQFLKAAGEMARGLPAPSVAPVWDRDAIPDPPKLPRGPPPSFTAFSFVTQVVEISPESIARIKDDFKDATGQTCSTFDAVTAVVFKCRALAMALPDDAEVRLGFAASTRHLLHGVLPSVDGYYGNCVYPVGITRTSKAIREASLPEVVGVMREAKEALTTRFTDWMRGGAKDDHYNVPLDYGTXTVSDWSRVGFNEVDYGFGEPGYVFTLNDDVNIVASVIYLKPPAPKRGIRLMLRCVEEPPRCGVRRGARQIRVDGCLVLVYLYFIGVGHSDLIFYNIIHTSLVSGAH

SEQ ID NO: 20941 - protein, 318 aa, Zea mays subsp. mays
  misc_feature (1)..(318): Ceres Seq. ID no. 12391360
  misc_feature (212)..(212): Xaa is any aa, unknown or other
MAQVTKFACGGFAVGICFSHLVFDGQGAAQFLKAAGEMARGLPAPSVAPVWDRDAIPDPPKLPRGPPPSFTAFSFVTQVVEISPESIARIKDDFKDATGQTCSTFDAVTAVVFKCRALAMALPDDAEVRLGFAASTRHLLHGVLPSVDGYYGNCVYPVGITRTSKAIREASLPEVVGVMREAKEALTTRFTDWMRGGAKDDHYNVPLDYGTXTVSDWSRVGFNEVDYGFGEPGYVFTLNDDVNIVASVIYLKPPAPKRGIRLMLRCVEEPPRCGVRRGARQIRVDGCLVLVYLYFIGVGHSDLIFYNIIHTSLVSGAH

SEQ ID NO: 20942 - DNA, 1406 bp, Zea mays subsp. mays
  misc_feature (1)..(1406): Ceres Seq. ID no. 12391368
aaagctaaaacagggcgggggcgggggcgtcgcttcgtggggacagccctcgtgatcgatccgcccgtgggatctcgcgcacgccaggattggagagctgcggcctccctccgccccaaccagccatgggttcccgcgttgattgcggcgcttagacgcggaggaggagagagacacggggaggggggaggccgaggcctaggaggcgtagcgctgtgcagggcgcgagcgcgttcgttcggcatggaacagaacgccggctcgttcctcgccgtgcgtcgcctctccggtggcgccatccaccaccatcgtcaccactcttccccggctgaggtcgtgggcgtgtccactgcgtggctcggtaaggggctttcatgcgtctgcgcgcagaggagggagagcgacgtgcgcctgtccttcgatttgagtcccattcaggaagagtgcttgaataggttgcagaaccggatagaggtgcagtatgatggttcaaatctggagcatcagaaagcactggaagccctttggcgttcttcttttcctggaactgaacttctagggttagtatcagaccagtggaaggagatgggatggcaagggaaagatccatctacagatttcaggggcggtggttttatatctttggagaatttactgtatttctctaggaactatccaaaatccttccaggagctccttcgtaagcagaatggtgatagagcattgtgggaatatccctttgctgtagctggtgtaaatattacattcatgctgattcagatgcttgaccttcaagcagctaagccaacgtcgttggttggagcggttttcctaaatctactcttagaaaatgatcgagcgttcgacattctttactgcataaccttcaaactgatggatcagaaatggcttgaaatgcacgccagttacatggatttcaatacggttattaaatcaacacggcgccagctcgagagggagctgttgctagaagatatccagagaatcgaggacatgccatcgtacaggtttctcgcctgctagcaattgaacctcctggtcgtaccgaacattgccacaagatagtgcagctccatacactcgaagaagaagctgagaggttggaaccacgtacaccgagcgaagggtgaatctaggttcatggactgtggatgtgttgttgctttgaattgcgctgtcgtgtttacctactccgagtccgacaacagcctcgacgccgagtgccttttcgtttcaacgatgtgctatatcttggggccacggaacggcagatcctagctttctttgtaaacaagaggatgtggaaagttggctgcgtatgctttgtggccatgtgcatggataatcttgctgctcgcctgaaagaaaaaaaggccgatcttaag

SEQ ID NO: 20943 - protein, 347 aa, Zea mays subsp. mays
  misc_feature (1)..(347): Ceres Seq. ID no. 12391369
KAKTGRGRGRRFVGTALVIDPPVGSRARQDWRAAASLRPNQPWVPALIAALRRGGGERHGEGGGRGLGGVALCRARARSFGMEQNAGSFLAVRRLSGGAIHHHRHHSSPAEVVGVSTAWLGKGLSCVCAQRRESDVRLSFDLSPIQEECLNRLQNRIEVQYDGSNLEHQKALEALWRSSFPGTELLGLVSDQWKEMGWQGKDPSTDFRGGGFISLENLLYFSRNYPKSFQELLRKQNGDRALWEYPFAVAGVNITFMLIQMLDLQAAKPTSLVGAVFLNLLLENDRAFDILYCITFKLMDQKWLEMHASYMDFNTVIKSTRRQLERELLLEDIQRIEDMPSYRFLAC

SEQ ID NO: 20944 - protein, 266 aa, Zea mays subsp. mays
  misc_feature (1)..(266): Ceres Seq. ID no. 12391370
MEQNAGSFLAVRRLSGGAIHHHRHHSSPAEVVGVSTAWLGKGLSCVCAQRRESDVRLSFDLSPIQEECLNRLQNRIEVQYDGSNLEHQKALEALWRSSFPGTELLGLVSDQWKEMGWQGKDPSTDFRGGGFISLENLLYFSRNYPKSFQELLRKQNGDRALWEYPFAVAGVNITFMLIQMLDLQAAKPTSLVGAVFLNLLLENDRAFDILYCITFKLMDQKWLEMHASYMDFNTVIKSTRRQLERELLLEDIQRIEDMPSYRFLAC

SEQ ID NO: 20945 - DNA, 1440 bp, Zea mays subsp. mays
  misc_feature (1)..(1440): Ceres Seq. ID no. 12391399
gcacgagaccattacctagaacatcntaatcgaaaagcgccgctgttcgcaacccaagcagtagccgagccaacgaaggcgtgcgagcggaggcaatcatacatggacggcagccgcaagagggtggacgcggaagacgtcaaaggggattccaccggcgggaagcgattgcgagcatcggagtcatttcaaagtggcgtaggaagcaaagtgaagctatgcaccaattttttcagtacttatggttgtccctttggtgagggctgccattttgtccattacttccctggtgactaccgggccgtttcagaaatgaccaacctgggtggcgcaacaatcgcacctcctggaggaatgatgatggatgggccacctacacccatcgtgaagactcgcttgtgcaacaagtacaacactgcagagggatgcaaatggggggacagatgccactttgcacatggtgaaagtgagcttggcaagtctatgatggacaactatatgccaccccccatcggaccaccaccaaccggttattttgcacctccacctatggcacctccacctatggcgcctccacccatggcacctccacctatggcacctctacctatggcgcctccacccatggcacctccacctatggcgcctccacccatggcacctccacctatggcgcctctacctatggcgcctccacctatggcacctccacctatggcacctccacccatggcgcctccacccatggcacctctacctatggcgcctccacccatggcacctccacctatggccaaccctggtttggccactccagctagcttcggcgcttatgccacggccaagatcagtgtcgatgcgtcccttgcaggtggcatcattgggaagggtggagctaacataaagcaaatatcttccgtcacaggggccaaggtggtcattcaggaggaccgccatgaatcagacaccagctttgaaaaacattgagttttgagggcacctttgatcagatcaggaacgctagtgctatggtcatcgagctgattgttagcatcagtggcataggaagcaacttcaagaccaagatgtgtgagaacttcgcaaaagggtcatgctcttatggcggcaaatgcccactttgcccatggtgagagtgagctgcgcaagcctgccgctgcttgagatccatgccctgtttcttacctcatagtcattagtcaatgtaactcaaaacttggcctctgatgatggatttgttggcttctttaggtctacgctaatgaattgctggcttcaggcctactactaaatttgctgacttctttagtccttcgctgttggccaactaaatctgttttctgcgtttgttcttgaatgttctcctatgatctaatcctctatttaggttcaaccagagaagtgttgatgctgatgatttgc

SEQ ID NO: 20946 - protein, 328 aa, Zea mays subsp. mays
  misc_feature (1)..(328): Ceres Seq. ID no. 12391400
  misc_feature (9)..(9): Xaa is any aa, unknown or other
ARDHYLEHXNRKAPLFATQAVAEPTKACERRQSYMDGSRKRVDAEDVKGDSTGGKRLRASESFQSGVGSKVKLCTNFFSTYGCPFGEGCHFVHYFPGDYRAVSEMTNLGGATIAPPGGMMMDGPPTPIVKTRLCNKYNTAEGCKWGDRCHFAHGESELGKSMMDNYMPPPIGPPPTGYFAPPPMAPPPMAPPPMAPPPMAPLPMAPPPMAPPPMAPPPMAPPPMAPLPMAPPPMAPPPMAPPPMAPPPMAPLPMAPPPMAPPPMANPGLATPASFGAYATAKISVDASLAGGIIGKGGANIKQISSVTGAKVVIQEDRHESDTSFEKH

SEQ ID NO: 20947 - protein, 294 aa, Zea mays subsp. mays
  misc_feature (1)..(294): Ceres Seq. ID no. 12391401
MDGSRKRVDAEDVKGDSTGGKRLRASESFQSGVGSKVKLCTNFFSTYGCPFGEGCHFVHYFPGDYRAVSEMTNLGGATIAPPGGMMMDGPPTPIVKTRLCNKYNTAEGCKWGDRCHFAHGESELGKSMMDNYMPPPIGPPPTGYFAPPPMAPPPMAPPPMAPPPMAPLPMAPPPMAPPPMAPPPMAPPPMAPLPMAPPPMAPPPMAPPPMAPPPMAPLPMAPPPMAPPPMANPGLATPASFGAYATAKISVDASLAGGIIGKGGANIKQISSVTGAKVVIQEDRHESDTSFEKH

SEQ ID NO: 20948 - protein, 224 aa, Zea mays subsp. mays
  misc_feature (1)..(224): Ceres Seq. ID no. 12391402
MTNLGGATIAPPGGMMMDGPPTPIVKTRLCNKYNTAEGCKWGDRCHFAHGESELGKSMMDNYMPPPIGPPPTGYFAPPPMAPPPMAPPPMAPPPMAPLPMAPPPMAPPPMAPPPMAPPPMAPLPMAPPPMAPPPMAPPPMAPPPMAPLPMAPPPMAPPPMANPGLATPASFGAYATAKISVDASLAGGIIGKGGANIKQISSVTGAKVVIQEDRHESDTSFEKH

SEQ ID NO: 20949 - DNA, 970 bp, Zea mays subsp. mays
  misc_feature (1)..(970): Ceres Seq. ID no. 12391403
gtcgaaaccacagccacacaggcagccggtgctgggcctcggcactcggcagccatggttcgccttgcgaagttctatctcgtctgctacaactccctccaatcgctcggatggttcgtcgccctcctccgcctcgtgccctgcctcgtccctcccttccctgtccactccgcgtacgtggtcgccggcgacctcatctgtttcctgcagacatgtgcgatccttgaaacggtccacgctgccatcggattggtgccgaccgcgccacttcttgctttcttgcaatggggagggaggatccacttcatcctggctgttgtccggcaaattcgcgaggttcagagcagtccatctgtgttcataacatttatagcttggagcatatctgaggtcatccgttactctcactatgctctgagtaccttaaaagtttgtccagcatggctgacttatctcaggtacactgcttttatcccgctgtatccaatcggggttggtccaggagaaatgtggacaatgtaccaagccctcccatttgtgaagaagagggacctttactcaggtttcttcgagaagttctccatgagctaccgttcctttctagtgggtgtgctggtgctctacccgttcctgtggctgaagctgtaccagcacgtgttcaagcagcgcaagtccaagctggggaaggggagcaggaagaaacgggcctgagaaaatctggctctgctcagctcagctcagctcagctgccacttgttgctgtcatgtgaaacgctaacgggtcattgtggatttttgttttggaagaaaatctttgagttgttgtctgatgcgacggtgaaggttttgctgaatcgggcagtaattggattacgctttgggttctctgtttgtttcaattgctctgcgttttatgtctgtattaacatacatcaagcatatataatagtcatgttgctgctgcgagtct

SEQ ID NO: 20950 - protein, 236 aa, Zea mays subsp. mays
  misc_feature (1)..(236): Ceres Seq. ID no. 12391404
VETTATQAAGAGPRHSAAMVRLAKFYLVCYNSLQSLGWFVALLRLVPCLVPPFPVHSAYVVAGDLICFLQTCAILETVHAAIGLVPTAPLLAFLQWGGRIHFILAVVRQIREVQSSPSVFITFIAWSISEVIRYSHYALSTLKVCPAWLTYLRYTAFIPLYPIGVGPGEMWTMYQALPFVKKRDLYSGFFEKFSMSYRSFLVGVLVLYPFLWLKLYQHVFKQRKSKLGKGSRKKRA

SEQ ID NO: 20951 - protein, 218 aa, Zea mays subsp. mays
  misc_feature (1)..(218): Ceres Seq. ID no. 12391405
MVRLAKFYLVCYNSLQSLGWFVALLRLVPCLVPPFPVHSAYVVAGDLICFLQTCAILETVHAAIGLVPTAPLLAFLQWGGRIHFILAVVRQIREVQSSPSVFITFIAWSISEVIRYSHYALSTLKVCPAWLTYLRYTAFIPLYPIGVGPGEMWTMYQALPFVKKRDLYSGFFEKFSMSYRSFLVGVLVLYPFLWLKLYQHVFKQRKSKLGKGSRKKRA

SEQ ID NO: 20952 - protein, 120 aa, Zea mays subsp. mays
  misc_feature (1)..(120): Ceres Seq. ID no. 12391406
SKPQPHRQPVLGLGTRQPWFALRSSISSATTPSNRSDGSSPSSASCPASSLPSLSTPRTWSPATSSVSCRHVRSLKRSTLPSDWCRPRHFLLSCNGEGGSTSSWLLSGKFARFRAVHLCS

SEQ ID NO: 20953 - DNA, 1632 bp, Zea mays subsp. mays
  misc_feature (1)..(1632): Ceres Seq. ID no. 12391417
gcacgagaccattacctagaacatcctaatcgaaaaaacaacatacttctagattctggtcgatcgtcgatgaggccggcgccggagacaagcacgcggcggccgcagctgcgtcgccgtcgtccagtgccattggtgacggtggccgtgtctttggcgctcatctcgctggcgtgccttcctgtcttcgcggatgcaagcagagcgctgcaccgcgaccgggaggagcaccggaggcagcaccaccgcacggaggacaagaagagccgcgtctcgctccctcccgacgctgacggcgactctccgcccgagcctccggactccggcggcgcgccgccgcctgccgacgacagcgactgcggcaacgtgttcgacgtgagggcgttcggcgcgtcgggcgacggctcgtgcgtcgacgacgacacggccgcgttccgcgcggtgtggaaggcggcgtgctcctccgactccgccgcggccacgctgctggtgccgtcggacggcgtgttcaccatcgcctccaccatcttctccgggccgtgcaagcccgacctcaccttccaaatcgatggcgtcctcatgccgccggacggcccggcgagctggccggcgacggacagccggaaacagtggatagtcttctacaaggccgatcgcttgacgctggcgggggaaggcaccatcgaaggcaacggtgaggagtggtgggatctgccgtgcaagcctcacaggggtccaaacggatcgacgctgcgcggaccatgtgacagccccgcgctcatacgattcttctcgagcaatgacgtgacggtatgcggcctgcggatcgagaacagcccgcagttccacctcaggttcgacgactgcgagcgcgtgcgcgtcgacggcctcttcgtcagctcgccggcgtccagccccaacacggacggcgtccacgtcgagaacaccaagtccgtccagatcctcaactctaggatctacaacggcgacgactgcgtctccatcggcgccggatgctccgatgtccacgtcgagaacataacatgcggccacggccatggaattagcatcggcagcctgggtgtccacaacacccacgcctgcgtgtccaacgtcacggtccggaacgtgcggatactcgactccgacaacggcgtccggatcaagacgtggcagggcggcgccggcgcggtgtcggcggtcgagttcaccggcgtgcagatgcagaacgtgaagaactgcatcgtcatcgaccagtactactgcctcggccacgggtgcgccaaccagacctccgcggtgcgcgtggccggcgtcgcgtacagggacatccacggcacgtacaacccgcaggccggcgcgcccatccgcctcgcgtgcagcgacgccgtcgcctgcacggacatcaccatgtctggcgtcgagctgctgccggccggcggggacgacggagcactgctcgccgacccctactgctggaacgcgtacggggtcatggagacgctcacgctgccaccggtgtactgcttgctggagggcagcccggagtctctccaggatccgctcaccagttgctgagatgagatcgttttctttactaacaaagatttctctcctgagacagtcaacgcg

SEQ ID NO: 20954 - protein, 525 aa, Zea mays subsp. mays
  misc_feature (1)..(525): Ceres Seq. ID no. 12391418
ARDHYLEHPNRKNNILLDSGRSSMRPAPETSTRRPQLRRRRPVPLVTVAVSLALISLACLPVFADASRALHRDREEHRRQHHRTEDKKSRVSLPPDADGDSPPEPPDSGGAPPPADDSDCGNVFDVRAFGASGDGSCVDDDTAAFRAVWKAACSSDSAAATLLVPSDGVFTIASTIFSGPCKPDLTFQIDGVLMPPDGPASWPATDSRKQWIVFYKADRLTLAGEGTIEGNGEEWWDLPCKPHRGPNGSTLRGPCDSPALIRFFSSNDVTVCGLRIENSPQFHLRFDDCERVRVDGLFVSSPASSPNTDGVHVENTKSVQILNSRIYNGDDCVSIGAGCSDVHVENITCGHGHGISIGSLGVHNTHACVSNVTVRNVRILDSDNGVRIKTWQGGAGAVSAVEFTGVQMQNVKNCIVIDQYYCLGHGCANQTSAVRVAGVAYRDIHGTYNPQAGAPIRLACSDAVACTDITMSGVELLPAGGDDGALLADPYCWNAYGVMETLTLPPVYCLLEGSPESLQDPLTSC

SEQ ID NO: 20955 - protein, 502 aa, Zea mays subsp. mays
  misc_feature (1)..(502): Ceres Seq. ID no. 12391419
MRPAPETSTRRPQLRRRRPVPLVTVAVSLALISLACLPVFADASRALHRDREEHRRQHHRTEDKKSRVSLPPDADGDSPPEPPDSGGAPPPADDSDCGNVFDVRAFGASGDGSCVDDDTAAFRAVWKAACSSDSAAATLLVPSDGVFTIASTIFSGPCKPDLTFQIDGVLMPPDGPASWPATDSRKQWIVFYKADRLTLAGEGTIEGNGEEWWDLPCKPHRGPNGSTLRGPCDSPALIRFFSSNDVTVCGLRIENSPQFHLRFDDCERVRVDGLFVSSPASSPNTDGVHVENTKSVQILNSRIYNGDDCVSIGAGCSDVHVENITCGHGHGISIGSLGVHNTHACVSNVTVRNVRILDSDNGVRIKTWQGGAGAVSAVEFTGVQMQNVKNCIVIDQYYCLGHGCANQTSAVRVAGVAYRDIHGTYNPQAGAPIRLACSDAVACTDITMSGVELLPAGGDDGALLADPYCWNAYGVMETLTLPPVYCLLEGSPESLQDPLTSC

SEQ ID NO: 20956 - protein, 332 aa, Zea mays subsp. mays
  misc_feature (1)..(332): Ceres Seq. ID no. 12391420
MPPDGPASWPATDSRKQWIVFYKADRLTLAGEGTIEGNGEEWWDLPCKPHRGPNGSTLRGPCDSPALIRFFSSNDVTVCGLRIENSPQFHLRFDDCERVRVDGLFVSSPASSPNTDGVHVENTKSVQILNSRIYNGDDCVSIGAGCSDVHVENITCGHGHGISIGSLGVHNTHACVSNVTVRNVRILDSDNGVRIKTWQGGAGAVSAVEFTGVQMQNVKNCIVIDQYYCLGHGCANQTSAVRVAGVAYRDIHGTYNPQAGAPIRLACSDAVACTDITMSGVELLPAGGDDGALLADPYCWNAYGVMETLTLPPVYCLLEGSPESLQDPLTSC

SEQ ID NO: 20957 - DNA, 2008 bp, Zea mays subsp. mays
  misc_feature (1)..(2008): Ceres Seq. ID no. 12391445
aaagaagtagtagtagttcgctggaggagttggcctcgtcctcggatccagagcgcggaaacccgtgcgcgcgtccggatcgacccgctcgctcgacggccgcgggcgcgaggctagggatcaggatcggcggcggcggcggcggcgatggggaagtccgtggtggtgggcgcggcggtcgtggcgtgcgcggcggtgggggtggcggcggtgctggtgcaccgccggcgcaggcgcgacgccgcgctcctggggtccgcggaggcggagaggaggcggcgcgcggccgccgtgatcgaggaggtggagcgcagcctcgccacgcccacggcgctgctgcggggcatcgcggacgccatggtcgccgagatggagcgcggcctgcgcggggacatccacgcgcagctcaagatgctcattagctacgtcgacaacctccccaccggagatgaacatgggctgttttatgcactggatcttggagggaccaacttccgtgtgctgcgagtccaactaggaggaagggagaaacgtgttgtcaaacaacagtacgaggaggtttccattccaccgcatttgatggttgggacttccattgaactatttgatttcattgctgctgcattggctaaatttgttgatactgaaggtgatgatttccacctcccagagggtaggcagagagaacttggtttcacgttttccttcccggtgaaccaaacatcaatatcatcaggaacactcatcaagtggacaaagggcttttccatcaatggcacggttggtgaagatgttgtttctgagttgagcagggccatggagaggcagggactagatatgaaagttacggcattggtcaatgatacagttggcacattggctggtgggagatatatggataacgatgtagttgcagccgtaatattgggcactggtacaaatgcagcatatgtggagcatgcaaatgcaattcctaaatggactgggttactgcctaaatctggaaacatggtaattaatacggaatggggaagctttaaatccggcaagcttcctctctcagaatatgacaaagccatggactttgaaagtttgaaccctggagagcagatatacgaaaaaatgatttctggcatgtatctgggagagattgttcgaagaattttactcaagttggcacatgacgcttctctatttggagatgttgttccaactaagctggagcagccatttatattgaggacgccagatatgtcagccatgcatcatgactcttcgcacgacctcaaaactcttggatctaaactgaaggatatagttggggtcgcagatacttccctggaagtaagatacattactcgtcacatctgcgaccttgtcgcagagcgtggagcacgcttggctgccgcaggtatatatagcatcctgaagaagataggccgggacaaagtaccaagcagtggcagtaaaatgccaaggactgtaattgccttggatggtgggctctatgagcattacaagaagttcagcagctgcgtcgaagcaactcttacagacttgctcggcgaagaggcctcttcctccgtggttgccaaactggccaacgatggctctggcattggagctgctctccttgcagcctcacactcccagtatggcaagagtgactagtcttgataacgggcgtcgatcgaacttcgagtgtagctctcatttttatcttttttcccttcaaaacatccctaatattccggctctcctcggggaatttttcggcttcctttcttggctattctgtggatgcacttaaggctctgcagcgggatatagctagtatagagccaatcagtttggaggttatctaatggcataaggtttggacggcaggagcatagaaatggaagctgaacaatgccattcatgttctgcccagtttttcttctccttgtatggtgttgtaaaccaatcaaaacttttaacctttttgtgttggcaataaagaggaggc

SEQ ID NO: 20958 - protein, 507 aa, Zea mays subsp. mays
  misc_feature (1)..(507): Ceres Seq. ID no. 12391446
MGKSVVVGAAVVACAAVGVAAVLVHRRRRRDAALLGSAEAERRRRAAAVIEEVERSLATPTALLRGIADAMVAEMERGLRGDIHAQLKMLISYVDNLPTGDEHGLFYALDLGGTNFRVLRVQLGGREKRVVKQQYEEVSIPPHLMVGTSIELFDFIAAALAKFVDTEGDDFHLPEGRQRELGFTFSFPVNQTSISSGTLIKWTKGFSINGTVGEDVVSELSRAMERQGLDMKVTALVNDTVGTLAGGRYMDNDVVAAVILGTGTNAAYVEHANAIPKWTGLLPKSGNMVINTEWGSFKSGKLPLSEYDKAMDFESLNPGEQIYEKMISGMYLGEIVRRILLKLAHDASLFGDVVPTKLEQPFILRTPDMSAMHHDSSHDLKTLGSKLKDIVGVADTSLEVRYITRHICDLVAERGARLAAAGIYSILKKIGRDKVPSSGSKMPRTVIALDGGLYEHYKKFSSCVEATLTDLLGEEASSSVVAKLANDGSGIGAALLAASHSQYGKSD

SEQ ID NO: 20959 - protein, 437 aa, Zea mays subsp. mays
  misc_feature (1)..(437): Ceres Seq. ID no. 12391447
MVAEMERGLRGDIHAQLKMLISYVDNLPTGDEHGLFYALDLGGTNFRVLRVQLGGREKRVVKQQYEEVSIPPHLMVGTSIELFDFIAAALAKFVDTEGDDFHLPEGRQRELGFTFSFPVNQTSISSGTLIKWTKGFSINGTVGEDVVSELSRAMERQGLDMKVTALVNDTVGTLAGGRYMDNDVVAAVILGTGTNAAYVEHANAIPKWTGLLPKSGNMVINTEWGSFKSGKLPLSEYDKAMDFESLNPGEQIYEKMISGMYLGEIVRRILLKLAHDASLFGDVVPTKLEQPFILRTPDMSAMHHDSSHDLKTLGSKLKDIVGVADTSLEVRYITRHICDLVAERGARLAAAGIYSILKKIGRDKVPSSGSKMPRTVIALDGGLYEHYKKFSSCVEATLTDLLGEEASSSVVAKLANDGSGIGAALLAASHSQYGKSD

SEQ ID NO: 20960 - protein, 433 aa, Zea mays subsp. mays
  misc_feature (1)..(433): Ceres Seq. ID no. 12391448
MERGLRGDIHAQLKMLISYVDNLPTGDEHGLFYALDLGGTNFRVLRVQLGGREKRVVKQQYEEVSIPPHLMVGTSIELFDFIAAALAKFVDTEGDDFHLPEGRQRELGFTFSFPVNQTSISSGTLIKWTKGFSINGTVGEDVVSELSRAMERQGLDMKVTALVNDTVGTLAGGRYMDNDVVAAVILGTGTNAAYVEHANAIPKWTGLLPKSGNMVINTEWGSFKSGKLPLSEYDKAMDFESLNPGEQIYEKMISGMYLGEIVRRILLKLAHDASLFGDVVPTKLEQPFILRTPDMSAMHHDSSHDLKTLGSKLKDIVGVADTSLEVRYITRHICDLVAERGARLAAAGIYSILKKIGRDKVPSSGSKMPRTVIALDGGLYEHYKKFSSCVEATLTDLLGEEASSSVVAKLANDGSGIGAALLAASHSQYGKSD

SEQ ID NO: 20961 - DNA, 1966 bp, Zea mays subsp. mays
  misc_feature (1)..(1966): Ceres Seq. ID no. 12391453
aacccaaccggatcctctggtggaacttccagggtgccctcgtcggcggcgcgcttctcctcctctacatcgtcgacgccgccgttggttgaaagctcagaggtcatgcctcactcggcgcggcctccggggaccggagccaacttcaaccgcgcgcgcgaccagcgcggcacccgccgcgtctttctgcgtcgcccgccgcctccgcttcggcgtcctcctcatgtcacagccaatggtcatcgaggcgagggaggcagcggcggcgggggagcgcgtcggagcgcgggagaggaggcgggcgggcggtacacgaggcgcggcggcgtggcggaccgtgaggtggcggtgagtgccagcgcggaccctgtgggacggaatgctgcgaccgtcgccactggtggtgaggctccaccgccgcgggaggaggatggcggcggacgaggtggtgttcttgtgagcaagcgcccgtctgctgcgcccgtgctcccaccgcccaagcggagggcggtctccgtcactcggcagttcccacccgcctccaggtggacctcggctgctcctgctccgctcgctggtgcagatgccgacggaggtttgcggacacgatacgaagggcaacgtgagaacagagcttctgatgcattcaagaagccggcagttgctcgtcccctcgcgggcctcaaggatggtgttggtgttggtgtgatgtcgagagcggtgtcccccaaagctgctggcacgagggttctcaaaaagccgtgtgccagggatggagctgctccaatgtcgaacacagatcgtcatgatgctggattggtgaagtgatgaagatgataaattcaaccatagctggactggagaaagggcacctgcctgtgatgtcagctgaaggttcaggaggtgtttatttcatgcgagatgcaacaggccagaagaatgttgctgtgtttaagcctattgatgaggaacccatggccaaaaacaacccaaggggcgttcctgtgtccacagacggcgaggggatgaagaggggaacaattgtaggggaaggtgcattcagggaggttgcagcttatattctcgaccatccagttagtgatagtaaatatggtcacagtgttgggttttctggtgtgcctcccaccacattggtccgaaccttacatagggggaagagcttcaagattggttcactgcagatgttcatggagaacaatggaagcactgaagatatgggtcctcgatcttttcctgtcaaggaggttcacaaaatagcagtactagatattaggttagctaatgctgatcgtcatgctgggaatattctagtgtgcaaggagggagaaggtggcaactacaagctgattccaattgatcatggttattgcttgccagagaagtttgaagatgttacatttgagtggctctactggccccaagcccgtgagccattcagtgatgaaaccattgaatacatcaaatcacttgatgctgaagaagacatcaagcttctcaagttccatgggtgggagctgcccccacgatgcgctcgtgttctgcgcatcagcaccatgcttttgaagaaaggtgcagctcgtggcttcacaccatatgacatagggcgcattctatgcagggaaactgtgaatagtgagtctgagattgaggacatcattcaggaagcagaggatgctgttctcccagggtccagtgaaaacatgttcttagaaactgtatctgaaatcatggaccgtcacctcgacaaggagtgagtttagaaattcagaataactgatctagttgttccagttccagctgtatccggtttgttgtttctattgttgacaagcactgatcaacagactaataatttgatttgtttgtacctctcaaatgtttctttcggttgtaatgctcgagtactttgcttagcacactttgtgaataatatatttgttcagtt

SEQ ID NO: 20962 - protein, 315 aa, Zea mays subsp. mays
  misc_feature (1)..(315): Ceres Seq. ID no. 12391454
MKMINSTIAGLEKGHLPVMSAEGSGGVYFMRDATGQKNVAVFKPIDEEPMAKNNPRGVPVSTDGEGMKRGTIVGEGAFREVAAYILDHPVSDSKYGHSVGFSGVPPTTLVRTLHRGKSFKIGSLQMFMENNGSTEDMGPRSFPVKEVHKIAVLDIRLANADRHAGNILVCKEGEGGNYKLIPIDHGYCLPEKFEDVTFEWLYWPQAREPFSDETIEYIKSLDAEEDIKLLKFHGWELPPRCARVLRISTMLLKKGAARGFTPYDIGRILCRETVNSESEIEDIIQEAEDAVLPGSSENMFLETVSEIMDRHLDKE

SEQ ID NO: 20963 - protein, 313 aa, Zea mays subsp. mays
  misc_feature (1)..(313): Ceres Seq. ID no. 12391455
MINSTIAGLEKGHLPVMSAEGSGGVYFMRDATGQKNVAVFKPIDEEPMAKNNPRGVPVSTDGEGMKRGTIVGEGAFREVAAYILDHPVSDSKYGHSVGFSGVPPTTLVRTLHRGKSFKIGSLQMFMENNGSTEDMGPRSFPVKEVHKIAVLDIRLANADRHAGNILVCKEGEGGNYKLIPIDHGYCLPEKFEDVTFEWLYWPQAREPFSDETIEYIKSLDAEEDIKLLKFHGWELPPRCARVLRISTMLLKKGAARGFTPYDIGRILCRETVNSESEIEDIIQEAEDAVLPGSSENMFLETVSEIMDRHLDKE

SEQ ID NO: 20964 - protein, 297 aa, Zea mays subsp. mays
  misc_feature (1)..(297): Ceres Seq. ID no. 12391456
MSAEGSGGVYFMRDATGQKNVAVFKPIDEEPMAKNNPRGVPVSTDGEGMKRGTIVGEGAFREVAAYILDHPVSDSKYGHSVGFSGVPPTTLVRTLHRGKSFKIGSLQMFMENNGSTEDMGPRSFPVKEVHKIAVLDIRLANADRHAGNILVCKEGEGGNYKLIPIDHGYCLPEKFEDVTFEWLYWPQAREPFSDETIEYIKSLDAEEDIKLLKFHGWELPPRCARVLRISTMLLKKGAARGFTPYDIGRILCRETVNSESEIEDIIQEAEDAVLPGSSENMFLETVSEIMDRHLDKE

SEQ ID NO: 20965 - DNA, 992 bp, Zea mays subsp. mays
  misc_feature (1)..(992): Ceres Seq. ID no. 12391473
gcacgagaccattacctagaacatcctaatcgaaaagatcgaagtgtgcttgcgtcctgatcccaccaaccgcagaggacagaggaccatggagagcggcacggagcggcggcggcaccacttcgtgctggtgcacggcacctgccacggcgcgtggtgctggtacaaggtggccaccctcctgtcatccgcgggccaccgcgtgacggcgctggacatggccgcgtgcggcgccagccccgggcgcgccgaggaggtgccgtcctttgaggagtacagccgcccgctcctggccacggtggccggcctggcgcccgaggagaaggtggtcctcgtcggccacagcttcggcggggtcagcctcgcgctggccatggagcagtacccggacagggtcgccgtcgccgtcttcgtcgcgaccggcatgccctccgctgggaagccgatggcgttcgtcttcgagcagtttttgcaagaagagtacccagcggaccgctacatggactgcgaattcgaaaccagcggcgacccccagcgtcccgtggagacatttcggttcgggccacagtacctgaagcagagactgtaccagctcagccccccagaggatttgaccctggcaatggcgatgttgaggccgtcacagcggttccgagacgacgcgacgatgaaggggggcgtcctgacggcggagcggtacggcggcgtgaggcgggtgtgcgtcgtcgccgaggacgacgcgtcagtgccggcaggcttcctgcggcggatggcgtcgtggaaccccggcacggaggtgagggggttgcagggagccgatcatatgtccatgctctcgaaaccaggggagctgtcagaacttctcatggaggttgccaacaagtacagctgaaacttgtatcatgtaaatggctatcagcaaaatggttgttcaggtacgcttgtttcagatgaacaaatggagacggaagtttgaagtaacacgatgaaat

SEQ ID NO: 20966 - protein, 267 aa, Zea mays subsp. mays
  misc_feature (1)..(267): Ceres Seq. ID no. 12391474
MESGTERRRHHFVLVHGTCHGAWCWYKVATLLSSAGHRVTALDMAACGASPGRAEEVPSFEEYSRPLLATVAGLAPEEKVVLVGHSFGGVSLALAMEQYPDRVAVAVFVATGMPSAGKPMAFVFEQFLQEEYPADRYMDCEFETSGDPQRPVETFRFGPQYLKQRLYQLSPPEDLTLAMAMLRPSQRFRDDATMKGGVLTAERYGGVRRVCVVAEDDASVPAGFLRRMASWNPGTEVRGLQGADHMSMLSKPGELSELLMEVANKYS

SEQ ID NO: 20967 - protein, 224 aa, Zea mays subsp. mays
  misc_feature (1)..(224): Ceres Seq. ID no. 12391475
MAACGASPGRAEEVPSFEEYSRPLLATVAGLAPEEKVVLVGHSFGGVSLALAMEQYPDRVAVAVFVATGMPSAGKPMAFVFEQFLQEEYPADRYMDCEFETSGDPQRPVETFRFGPQYLKQRLYQLSPPEDLTLAMAMLRPSQRFRDDATMKGGVLTAERYGGVRRVCVVAEDDASVPAGFLRRMASWNPGTEVRGLQGADHMSMLSKPGELSELLMEVANKYS

SEQ ID NO: 20968 - protein, 172 aa, Zea mays subsp. mays
  misc_feature (1)..(172): Ceres Seq. ID no. 12391476
MEQYPDRVAVAVFVATGMPSAGKPMAFVFEQFLQEEYPADRYMDCEFETSGDPQRPVETFRFGPQYLKQRLYQLSPPEDLTLAMAMLRPSQRFRDDATMKGGVLTAERYGGVRRVCVVAEDDASVPAGFLRRMASWNPGTEVRGLQGADHMSMLSKPGELSELLMEVANKYS

SEQ ID NO: 20969 - DNA, 1962 bp, Zea mays subsp. mays
  misc_feature (1)..(1962): Ceres Seq. ID no. 12391483
cgccttcgccatttctccgctcctccgcctcgcctcgcctcgcccatcgttccatgtctttctcctccggcggtcaccacccctcccggccggaccaaccccggatcccatttccagttagatgcttccccttcaccaccaccccgccgccgcgccggagtcggcggccccggcgacagaccctccgcccccgccggtcctcgatccgtcctccctccgcatccacatcccgtcaagcccgcaccacgcactgccctccaccccgcacaagcgccccgtcgtcatgacctcgtcgtcctcctcgtccacccccacccgcccctcaccgttgcccttcaccccgcctcggaggcgcaaggtccccgcgcccgctgctcccgcggggacagcggcggccaggcatctccttcgctgcctgcacctccgcctgcgtgtcctcctcctcatctcgcttccctccctctactttctctccccgacccctgccatttttccgcgctccctcctcgccgacttcctttccgcggcggccttctcctgcgcgctcctccttctcctctgcctctccctgccgcggcttcccttcgcgctgacgctgccgctccccctccgccgcgcgcgccgatcccccatcctttggtccatcggttcctcgccatccgcatctgcgaccacccccacaaccggccatttcgtccaggtttatagcaacggtgacgtctacgagggccagttccaccgcggccgctgcactggcagcggcgtctactactactacatgagcgggaggtacgagggagattgggtcgacggcaagtacagcggcttcggcgtcgagacatgggccagaggtagccggtaccggggccagtaccggcagggactcaggcatggctacggcgtgtacaggttctacactggggatgtgtatgccggggagtggtcaaacggccagagccatgggtatggtgtgcacacctgtgaggacggtagccggtatataggggagtttaagaggggcgtcaagcatggtctcggccactaccatttcaggaatggtgacacctacgctggagagtactttgctgataggatgcacggctttggaatctacagctttgccaatggccatagatatgagggagcatggcatgagggtagaaggcagggtttaggcatgtatagtttcaggaatggagagacacaagctgggcactggcaaaatggagttcttgatactttaagcacccagaacttcatccctggatcacctattgctgtgaaccattccaaggtcctcaatgcagtgcaggaagcgagaagagctgcagagaaggcctatgacatcccaagagttgatgataaggtgaacagggcggttgcagcagctaataaagcagccaatgcagccagggtggctgccgtgaaggctgcacaaaagcgcatccccagtaatggtgacgatctaccactgtcagtagtgtgacaatgaagccaatatatgttggcatggagctgcttcgcgatgccatcgcatcaccaattgcccgacataaccttcaacttcccagtaggtgaagccactgctcgtccatcaggccatggcgtgttggcgacacctgagtcattgccagcagcattcaagcttgcgggagaagaccaagttttcagccatcccttccatacatctttgtgatgtcttttgcgatgcagcagaaccactgctctgaggactttccattgtccaaggcagccggtcgaggtcagcagtaggttttatcctgccttttctgcagtgtaatactcacccgatgttagtagagatatgatgaatgtacaccccaacatcagtcgataaaaaactgtgtttattttctctcttggactatgtacagaacctacaaatttagcggttgttggccgtgctggttggagaaacgacaggtgccttcgggttcggtc

SEQ ID NO: 20970 - protein, 454 aa, Zea mays subsp. mays
  misc_feature (1)..(454): Ceres Seq. ID no. 12391484
MLPLHHHPAAAPESAAPATDPPPPPVLDPSSLRIHIPSSPHHALPSTPHKRPVVMTSSSSSSTPTRPSPLPFTPPRRRKVPAPAAPAGTAAARHLLRCLHLRLRVLLLISLPSLYFLSPTPAIFPRSLLADFLSAAAFSCALLLLLCLSLPRLPFALTLPLPLRRARRSPILWSIGSSPSASATTPTTGHFVQVYSNGDVYEGQFHRGRCTGSGVYYYYMSGRYEGDWVDGKYSGFGVETWARGSRYRGQYRQGLRHGYGVYRFYTGDVYAGEWSNGQSHGYGVHTCEDGSRYIGEFKRGVKHGLGHYHFRNGDTYAGEYFADRMHGFGIYSFANGHRYEGAWHEGRRQGLGMYSFRNGETQAGHWQNGVLDTLSTQNFIPGSPIAVNHSKVLNAVQEARRAAEKAYDIPRVDDKVNRAVAAANKAANAARVAAVKAAQKRIPSNGDDLPLSVV

SEQ ID NO: 20971 - protein, 400 aa, Zea mays subsp. mays
  misc_feature (1)..(400): Ceres Seq. ID no. 12391485
MTSSSSSSTPTRPSPLPFTPPRRRKVPAPAAPAGTAAARHLLRCLHLRLRVLLLISLPSLYFLSPTPAIFPRSLLADFLSAAAFSCALLLLLCLSLPRLPFALTLPLPLRRARRSPILWSIGSSPSASATTPTTGHFVQVYSNGDVYEGQFHRGRCTGSGVYYYYMSGRYEGDWVDGKYSGFGVETWARGSRYRGQYRQGLRHGYGVYRFYTGDVYAGEWSNGQSHGYGVHTCEDGSRYIGEFKRGVKHGLGHYHFRNGDTYAGEYFADRMHGFGIYSFANGHRYEGAWHEGRRQGLGMYSFRNGETQAGHWQNGVLDTLSTQNFIPGSPIAVNHSKVLNAVQEARRAAEKAYDIPRVDDKVNRAVAAANKAANAARVAAVKAAQKRIPSNGDDLPLSVV

SEQ ID NO: 20972 - protein, 235 aa, Zea mays subsp. mays
  misc_feature (1)..(235): Ceres Seq. ID no. 12391486
MSGRYEGDWVDGKYSGFGVETWARGSRYRGQYRQGLRHGYGVYRFYTGDVYAGEWSNGQSHGYGVHTCEDGSRYIGEFKRGVKHGLGHYHFRNGDTYAGEYFADRMHGFGIYSFANGHRYEGAWHEGRRQGLGMYSFRNGETQAGHWQNGVLDTLSTQNFIPGSPIAVNHSKVLNAVQEARRAAEKAYDIPRVDDKVNRAVAAANKAANAARVAAVKAAQKRIPSNGDDLPLSVV

SEQ ID NO: 20973 - DNA, 1483 bp, Zea mays subsp. mays
  misc_feature (1)..(1483): Ceres Seq. ID no. 12391498
atgttggccgccaatcgcagtatcggcaccgttcttccccgcttctccagtccagctcaccagccgccccccctccgctgctgacactgcgaagtgcgaatcaaagccaccaccgcgcagaaaccatggcaccggtggaagcggagcagcaccggcggagggcgctggcgctcgcggcgcacgacgcctccggcgccgtctcccccatccgcatctcgcgaagggacactggagatgacgatgttgccatacagatactgtactgcgggatatgccactctgacctgcacaccatcaagaacgagtggaagaacgccaactatcctgttgtccctgggcacgagatcgccgggctgatcaccgaggttggcaagaatgtgaagaggttcaacgtcggagacaaggttggcgtcgggtgcatggtcaacacatgccagtcctgcgagagctgcgagggagggcacgagaactactgctccaagatcatcttcacctacaactcccacgacagggacggcaccgtcacctacggtggctactctgacatggttgtcgtcgacgagcgcttcgtcatccggttccctgatggcatgcccctcgacagaggcgcgccgctgctctgcgctgggataaccgtgtacaaccccatgaagcaccacgggctgaacgaggcaggcaagcacatcggcgtggttggacttggggggcttgggcatgtcgccgtgaagttcgcgaaggcgttcgggatgagggtgaccgtgatcagcacgtccccggggaagagggaggaagctatggagacgcttggtgcggacgcctttgttgtcagcagtgatgctaaccagatgaaggcggcgaagggcacaatggatggcattatgaacacggcctccgcaagcatgtccatgtacgcttaccttgctctcctcaagccccagggcaagatgatcctgcttggcctgcctgagaagcctctgcagatctccgccttctctttggttactgggggcaagactctggccgggagctgcatggggagcatcagggacacgcaggagatgatggacttcgcagccaagcacgggttgacagcggacatcgaactgatcggcaccgaagaagttaatgaggccatggaacgcctcgccaagggcgaggtcaggtaccgcttcgtcatcgacatcggcaacaccatcagcgcggcatcactagggagctcgccggtcccagctctgtagctgcgacacttgttcctgcttggatatatcgtgcgataagcaagtatatttggaataaaaaggaactcaatttaaacgcaagtaatactgtttgtctttggtcctatttgggctttggtttattgggtactgcatagttttgccctcctcttgtagtctagtagtaacggatcaaacgttttttactgagagagacaaaaccagtccgtgctgctgaattaaggacacaaatttaaaaatccctt

SEQ ID NO: 20974 - protein, 411 aa, Zea mays subsp. mays
  misc_feature (1)..(411): Ceres Seq. ID no. 12391499
VGRQSQYRHRSSPLLQSSSPAAPPPLLTLRSANQSHHRAETMAPVEAEQHRRRALALAAHDASGAVSPIRISRRDTGDDDVAIQILYCGICHSDLHTIKNEWKNANYPVVPGHEIAGLITEVGKNVKRFNVGDKVGVGCMVNTCQSCESCEGGHENYCSKIIFTYNSHDRDGTVTYGGYSDMVVVDERFVIRFPDGMPLDRGAPLLCAGITVYNPMKHHGLNEAGKHIGVVGLGGLGHVAVKFAKAFGMRVTVISTSPGKREEAMETLGADAFVVSSDANQMKAAKGTMDGIMNTASASMSMYAYLALLKPQGKMILLGLPEKPLQISAFSLVTGGKTLAGSCMGSIRDTQEMMDFAAKHGLTADIELIGTEEVNEAMERLAKGEVRYRFVIDIGNTISAASLGSSPVPAL

SEQ ID NO: 20975 - protein, 370 aa, Zea mays subsp. mays
  misc_feature (1)..(370): Ceres Seq. ID no. 12391500
MAPVEAEQHRRRALALAAHDASGAVSPIRISRRDTGDDDVAIQILYCGICHSDLHTIKNEWKNANYPVVPGHEIAGLITEVGKNVKRFNVGDKVGVGCMVNTCQSCESCEGGHENYCSKIIFTYNSHDRDGTVTYGGYSDMVVVDERFVIRFPDGMPLDRGAPLLCAGITVYNPMKHHGLNEAGKHIGVVGLGGLGHVAVKFAKAFGMRVTVISTSPGKREEAMETLGADAFVVSSDANQMKAAKGTMDGIMNTASASMSMYAYLALLKPQGKMILLGLPEKPLQISAFSLVTGGKTLAGSCMGSIRDTQEMMDFAAKHGLTADIELIGTEEVNEAMERLAKGEVRYRFVIDIGNTISAASLGSSPVPAL

SEQ ID NO: 20976 - protein, 272 aa, Zea mays subsp. mays
  misc_feature (1)..(272): Ceres Seq. ID no. 12391501
MVNTCQSCESCEGGHENYCSKIIFTYNSHDRDGTVTYGGYSDMVVVDERFVIRFPDGMPLDRGAPLLCAGITVYNPMKHHGLNEAGKHIGVVGLGGLGHVAVKFAKAFGMRVTVISTSPGKREEAMETLGADAFVVSSDANQMKAAKGTMDGIMNTASASMSMYAYLALLKPQGKMILLGLPEKPLQISAFSLVTGGKTLAGSCMGSIRDTQEMMDFAAKHGLTADIELIGTEEVNEAMERLAKGEVRYRFVIDIGNTISAASLGSSPVPAL

SEQ ID NO: 20977 - DNA, 1361 bp, Zea mays subsp. mays
  misc_feature (1)..(1361): Ceres Seq. ID no. 12391506
attaccaaaccaacagtttccagttcagcggtaggaacagaccgtcacggcgtcatccgccaaaggataatccatttgctcacacaggcgcaaacgctgagcgcctgagcctgctctcgcggtctaggagatggcgttgatcacgaatgtctctgactatgaggagcttgcagagcagaagctgcctaagatggtttatgacttctatgccgggggtgcagaagaccagtggacactcaaggagaataagggggcattctccaagattctggttcgaccacgggtgctgattgatgtgtctcatattgacatgtctacaagtatattgggttacaaaatttccatgcctattatggtggctcccactgctttgcacaaactggcccaccaagaaggagaggttgcttctgcccaggcagcagctgctgcaggaactataatgacgttgtcttcatggtcatcttgcagcattgaggaagttagctcaagtgcaccaggactccgtttcttccaactttcagtattcaaggatagggatatcgtgcaacagcttgtcagaagggctgaaaatgctggctacaaggcaatcgccgtcactgtcgacgctccacgccttggtcgcagggaagccgacgtcaggaacagattcacgctgcctgaaaatgtggtgttgaagtgctttgaaggactggatctcagcaagatggacaagactaagggttcaggccttgctgcttacgccactagccagattgacagctctctttcttggaaggatatcaagtggctacagacgattaccgggctgcctatcttagtgaaaggagtcataacagcagaagatgctcgaattgctatcgaatgcggtgtcgccggcattatcgtgtccaaccacgggggacgccagctagactatcttcctgcaaccatcagctgcctggaagaggtcgtgagagaagtgaagggccgccgtgtgcctgtgttcctcgacggcggcatccgccgtggcactgacgtgttcaaggccttggcgctgggagcctcaggagtgtttattggaaggcccgtactgttcgccctcgccgtggacggcagggcaggggtgaggaatgcgctgcggatgctgagggatgagctcgagatcaccatggcgctgagcggctgctcgtcgctgaaagatatcacccgcgatcgcgttatcactgagagcgacatgatccgtcgctctcggatgtaggcttcgattcgtttgctgttgtgttgtgttgtgccctggcatgactgtcttattcgaaactgaccggaccatcagattggttttgacttttgacctattggctaatgatgtgttaggttttctc

SEQ ID NO: 20978 - protein, 368 aa, Zea mays subsp. mays
  misc_feature (1)..(368): Ceres Seq. ID no. 12391507
MALITNVSDYEELAEQKLPKMVYDFYAGGAEDQWTLKENKGAFSKILVRPRVLIDVSHIDMSTSILGYKISMPIMVAPTALHKLAHQEGEVASAQAAAAAGTIMTLSSWSSCSIEEVSSSAPGLRFFQLSVFKDRDIVQQLVRRAENAGYKAIAVTVDAPRLGRREADVRNRFTLPENVVLKCFEGLDLSKMDKTKGSGLAAYATSQIDSSLSWKDIKWLQTITGLPILVKGVITAEDARIAIECGVAGIIVSNHGGRQLDYLPATISCLEEVVREVKGRRVPVFLDGGIRRGTDVFKALALGASGVFIGRPVLFALAVDGRAGVRNALRMLRDELEITMALSGCSSLKDITRDRVITESDMIRRSRM

SEQ ID NO: 20979 - protein, 348 aa, Zea mays subsp. mays
  misc_feature (1)..(348): Ceres Seq. ID no. 12391508
MVYDFYAGGAEDQWTLKENKGAFSKILVRPRVLIDVSHIDMSTSILGYKISMPIMVAPTALHKLAHQEGEVASAQAAAAAGTIMTLSSWSSCSIEEVSSSAPGLRFFQLSVFKDRDIVQQLVRRAENAGYKAIAVTVDAPRLGRREADVRNRFTLPENVVLKCFEGLDLSKMDKTKGSGLAAYATSQIDSSLSWKDIKWLQTITGLPILVKGVITAEDARIAIECGVAGIIVSNHGGRQLDYLPATISCLEEVVREVKGRRVPVFLDGGIRRGTDVFKALALGASGVFIGRPVLFALAVDGRAGVRNALRMLRDELEITMALSGCSSLKDITRDRVITESDMIRRSRM

SEQ ID NO: 20980 - protein, 308 aa, Zea mays subsp. mays
  misc_feature (1)..(308): Ceres Seq. ID no. 12391509
MSTSILGYKISMPIMVAPTALHKLAHQEGEVASAQAAAAAGTIMTLSSWSSCSIEEVSSSAPGLRFFQLSVFKDRDIVQQLVRRAENAGYKAIAVTVDAPRLGRREADVRNRFTLPENVVLKCFEGLDLSKMDKTKGSGLAAYATSQIDSSLSWKDIKWLQTITGLPILVKGVITAEDARIAIECGVAGIIVSNHGGRQLDYLPATISCLEEVVREVKGRRVPVFLDGGIRRGTDVFKALALGASGVFIGRPVLFALAVDGRAGVRNALRMLRDELEITMALSGCSSLKDITRDRVITESDMIRRSRM

SEQ ID NO: 20981 - DNA, 1860 bp, Zea mays subsp. mays
  misc_feature (1)..(1860): Ceres Seq. ID no. 12391528
acttctcattcctcacttccgtcctcgcgcaccaccccctccatccgttccggatggtgccttcgaaatcccgtccggcgccctagcgtagctcgggctcggccaggctccgggcccgccgcgccgttccgcagtccagctccacctccagatcttttcttgagtttaaggaagatgcttgcctttatttagaaggccctttttggtacgtcagcagtgttctttcctataggagtaaatgccattccgtagcatcgtgcgtgatgtaagggatggtttcgggagcttgtctaggaggggatttgaggtcaggtttctgagtcatcgcagagggaaatctcatggtgctgtccatgagctgcacgacccagtgcttgtggtacagagtagctgctgggctagcttgcctcctgaattacttcgagatgtgattgagaggttggagaccagtgaggatacatggccttctaggaaacatgtagttgcttgtgcagctgtctgcagaacatggagagagatgtgtagagagattgtcaagagcccagagttttctggaaaaatcacttttcctgtttccttgaagcagcctgggcctcgagatggaactattcagtgttttattaagagggataaatctacccaaatctacagtctgtaccttagttttagctctgccgtgcctgtcgaaaatggcaaattccttctatccgcaaaaaggaactgccgtgcaacatatacagaatatataatatcaataaattctggtgatacatctaggtgtacaagtaacaacacatacattgggaaattaaggtcaaatttccttggcacaaaatttgtaatatacgatactcatccgccatacaatggaactagtcaaacagtggcagggaaaacaagtcagagattctactccaagaagggatcaaccaaggtttcttgcaggtggtacagtattgcacaaatctcatacgagctgaatgtcttgggaactcgaggcccaaggcggatgaactgtgtaatgcactccatcccagcttcatgccttgaggctggtggcagtgtcccttgccagccggacagcattgcagcccactctgttggcggatcattcagcagtgtgtccttgtcaaagtcatcgactatggaccactctatgcatttcaccagttcccggctctctgatgccataacaggagatggcattgtgaacagaggccaggcattgaatgatgctgacgatgaagagtgcaaggacatgcctttgatcctccgcaacaaggccccaaggtggcacgagcagcttcagtgctggtgcctcaacttccggggccgggtgactgtcgcctcggtcaagaacttccagctagtcgcggcgacacagcctgccgccggagccctgaccccatcacaggcagccccgcagccagctccgcctcctccgccggaccaagagaaggtcatactgcagtttgggaaggtcggcaaggacatcttcaccatggactactgctacccgctgtcagccttccaggccttcgccatctgcctgagcagcttcgacaccaagttggcctgcgaataaatcctacctacaattctggtacctaccaaataatcaaaaacactgattgtcgtggtgttcgtccaagaaccgagtttagctgagacgccattgggcaccatgtgctggtgccttgttaactcagaaacgcgtgggggctgaatctgtttcagcagcttccttgtgataatctgtagctgctgcttcgctgctgttgtatcctatgctttcatttctttccggttccgctgtagcttcttaccccccggtgacattagttcggtacccgtatctgc

SEQ ID NO: 20982 - protein, 448 aa, Zea mays subsp. mays
  misc_feature (1)..(448): Ceres Seq. ID no. 12391529
MPFRSIVRDVRDGFGSLSRRGFEVRFLSHRRGKSHGAVHELHDPVLVVQSSCWASLPPELLRDVIERLETSEDTWPSRKHVVACAAVCRTWREMCREIVKSPEFSGKITFPVSLKQPGPRDGTIQCFIKRDKSTQIYSLYLSFSSAVPVENGKFLLSAKRNCRATYTEYIISINSGDTSRCTSNNTYIGKLRSNFLGTKFVIYDTHPPYNGTSQTVAGKTSQRFYSKKGSTKVSCRWYSIAQISYELNVLGTRGPRRMNCVMHSIPASCLEAGGSVPCQPDSIAAHSVGGSFSSVSLSKSSTMDHSMHFTSSRLSDAITGDGIVNRGQALNDADDEECKDMPLILRNKAPRWHEQLQCWCLNFRGRVTVASVKNFQLVAATQPAAGALTPSQAAPQPAPPPPPDQEKVILQFGKVGKDIFTMDYCYPLSAFQAFAICLSSFDTKLACE

SEQ ID NO: 20983 - protein, 355 aa, Zea mays subsp. mays
  misc_feature (1)..(355): Ceres Seq. ID no. 12391530
MCREIVKSPEFSGKITFPVSLKQPGPRDGTIQCFIKRDKSTQIYSLYLSFSSAVPVENGKFLLSAKRNCRATYTEYIISINSGDTSRCTSNNTYIGKLRSNFLGTKFVIYDTHPPYNGTSQTVAGKTSQRFYSKKGSTKVSCRWYSIAQISYELNVLGTRGPRRMNCVMHSIPASCLEAGGSVPCQPDSIAAHSVGGSFSSVSLSKSSTMDHSMHFTSSRLSDAITGDGIVNRGQALNDADDEECKDMPLILRNKAPRWHEQLQCWCLNFRGRVTVASVKNFQLVAATQPAAGALTPSQAAPQPAPPPPPDQEKVILQFGKVGKDIFTMDYCYPLSAFQAFAICLSSFDTKLACE

SEQ ID NO: 20984 - DNA, 1279 bp, Zea mays subsp. mays
  misc_feature (1)..(1279): Ceres Seq. ID no. 12391531
atttctaattttgatcaaggcattggaactccatccggaaggaacccacaaaaagtgaaaacctcatatgatgcaagcaaggacgtgccatctgtagacccttcagctggtatttcggaacggcccagtccaatgtctgtgttggactcttcatttgatcatgaggatttgttcccgagcagcaggaatccaaattcacttgctgttgatgacgagcgtcaaacattaggtgaaccctggaaaccttctgttacaaagccaacagaggtgggcatgcagtccaagaacaataagctcgctaatgtcgtgagcctgcttcagaagctcgagcagcttagcgtgagcaaggatgaggacgcacctccggtcgaccatatggctttcctgtgcgagacagaaagcccggaccaccgttacgtgtctgagatactgctggcctcgggtcttctgatgaaagagctaggttcaggacaggcaggcctccagctccagctccactcctctggctacccgatcaaccctgacttgttccacgtgctggagcaaagaaaggcaggatgggccagcatacctgacggcatccaccagagcaggagcggcgccaagtctgatcccaagagagcgcaccggaagctggtgtttgacaccgcgaacgagcttctcctccagaagtttgagaaggaaaccacagtttacgcggtcagttcctccaccggagcgaaggatcatccacctgcaaaggctcttagcgggcagcaactgctgaagtttgtatcttcagaaatcgaaggcatgggtacggagcgatcgtccacctgccagatggaaggaggcgtgatacctgacgcagagatcctgcagaggctgcagggatggacgagcttcagcagggagctccctgggatggtgctggagatcgagaggtcggtattcaaggagctggtggacgaggtggtgcatggggagtctgccgacggcccggagatgaaggcggcaggcaggcggagaaggcggcggctctttgcttgatatagtttgtgtgaccatcaccatgcaccgggcgggttgtccaagtggatgggcctgatcatgctgtaactttgattgccgtatgaacttttttttctctctcaagggagaggtgcacaagttgtactgttgtagtataggcagcgcagatttgcagaggcatgaaaaatgggcatttgtttgtgctgtatagatactctgtattaccttgtgaagtccgttgtgtctggtttctacctgaccgtttcgt

SEQ ID NO: 20985 - protein, 342 aa, Zea mays subsp. mays
  misc_feature (1)..(342): Ceres Seq. ID no. 12391532
ISNFDQGIGTPSGRNPQKVKTSYDASKDVPSVDPSAGISERPSPMSVLDSSFDHEDLFPSSRNPNSLAVDDERQTLGEPWKPSVTKPTEVGMQSKNNKLANVVSLLQKLEQLSVSKDEDAPPVDHMAFLCETESPDHRYVSEILLASGLLMKELGSGQAGLQLQLHSSGYPINPDLFHVLEQRKAGWASIPDGIHQSRSGAKSDPKRAHRKLVFDTANELLLQKFEKETTVYAVSSSTGAKDHPPAKALSGQQLLKFVSSEIEGMGTERSSTCQMEGGVIPDAEILQRLQGWTSFSRELPGMVLEIERSVFKELVDEVVHGESADGPEMKAAGRRRRRRLFA

SEQ ID NO: 20986 - protein, 298 aa, Zea mays subsp. mays
  misc_feature (1)..(298): Ceres Seq. ID no. 12391533
MSVLDSSFDHEDLFPSSRNPNSLAVDDERQTLGEPWKPSVTKPTEVGMQSKNNKLANVVSLLQKLEQLSVSKDEDAPPVDHMAFLCETESPDHRYVSEILLASGLLMKELGSGQAGLQLQLHSSGYPINPDLFHVLEQRKAGWASIPDGIHQSRSGAKSDPKRAHRKLVFDTANELLLQKFEKETTVYAVSSSTGAKDHPPAKALSGQQLLKFVSSEIEGMGTERSSTCQMEGGVIPDAEILQRLQGWTSFSRELPGMVLEIERSVFKELVDEVVHGESADGPEMKAAGRRRRRRLFA

SEQ ID NO: 20987 - protein, 251 aa, Zea mays subsp. mays
  misc_feature (1)..(251): Ceres Seq. ID no. 12391534
MQSKNNKLANVVSLLQKLEQLSVSKDEDAPPVDHMAFLCETESPDHRYVSEILLASGLLMKELGSGQAGLQLQLHSSGYPINPDLFHVLEQRKAGWASIPDGIHQSRSGAKSDPKRAHRKLVFDTANELLLQKFEKETTVYAVSSSTGAKDHPPAKALSGQQLLKFVSSEIEGMGTERSSTCQMEGGVIPDAEILQRLQGWTSFSRELPGMVLEIERSVFKELVDEVVHGESADGPEMKAAGRRRRRRLFA

SEQ ID NO: 20988 - DNA, 1444 bp, Zea mays subsp. mays
  misc_feature (1)..(1444): Ceres Seq. ID no. 12391561
atatagtgtgtcactttgtcccctcctacgcgacttcccctccaattcaggcgctctctctctcgatccatgcatctcaactcaaaggcattcaattaattaattatactagctagctaggaggaggagtactccggccggccggccggcgcccataagaacctctcgtgttgtgtatgcatcgatcgatcgatcgatcgatctccgactccgacgacctcgctatccgccatggctagcagcagcagtcttgtcaagtgcctggcggtcacggtggcggtggcgctcctggcgctgtcgtcgtgtggcgtggttgcctcggcggcggcgtggaggggcaagcctcagaagttgaagcccggggagaagccctccggcaaatccaagttcttcgccctcacccccggaatgttcggccacaagcgcgactaccaggccgcctgctccgacgagggtggcccggcatgctacgtgggttgcccaaaggattgccctaacaaatgcctcgtcttctgcgcctactgcctcagcttctgcatgtgtgatatcttccccggcacctcctgcggcgacccgcgcttcaccggcggcgacggcaacaccttctacttccatggaaacaaggacaaggacttctgcctcgtctccgacgcgggcctccacatcaacgcccacttcatcggcaaccacaacccggccctcaaccgcgacttcacgtgggtgcaggcgctgggggtcaccttcgtcgcaccaggcggcgccggcgaccgccaccgcctctacgtcggcgcccgcagggccgcggagtgggacgaggaggacgaccacatccagctcaccttggacgccgagcccgtcgacgtcgacgccgtcaagaacgcgcgctgggcgtccaaggccctcccggggctctccgtcacgcgcatggacgccgtcaacaccgtcatggtggagctggacggcgtcttcgccatctccgccaacgccgtgcccatcaccgacagggacgaccggatccacggctacggcaagacgggcgccgacagcctcgtgcacctcgacctggccttccagttccataacctcaccgcggacgtccacggcgtcctgggccagacctaccgccctggctacgtcagcaagctcgacatcggcgccaagatgcccgtcatgggcggcgcgcccaagtacctgtccgccggtctcttctccacggactgcgccgtctcccggttccactctttcgcctccgcctaatactaagtcccaagcgcgaccgatcctattcctatccacggcgtgaaataagatttctgtatgtaggctcttatctcatctcatcgtatgaaaatgtacacgtgcgttgctgcattggaagtacgtattgttgcacgatcaactgaataacttgcgtctcgaaaattttatgcactagtacgttcgc

SEQ ID NO: 20989 - protein, 341 aa, Zea mays subsp. mays
  misc_feature (1)..(341): Ceres Seq. ID no. 12391562
MASSSSLVKCLAVTVAVALLALSSCGVVASAAAWRGKPQKLKPGEKPSGKSKFFALTPGMFGHKRDYQAACSDEGGPACYVGCPKDCPNKCLVFCAYCLSFCMCDIFPGTSCGDPRFTGGDGNTFYFHGNKDKDFCLVSDAGLHINAHFIGNHNPALNRDFTWVQALGVTFVAPGGAGDRHRLYVGARRAAEWDEEDDHIQLTLDAEPVDVDAVKNARWASKALPGLSVTRMDAVNTVMVELDGVFAISANAVPITDRDDRIHGYGKTGADSLVHLDLAFQFHNLTADVHGVLGQTYRPGYVSKLDIGAKMPVMGGAPKYLSAGLFSTDCAVSRFHSFASA

SEQ ID NO: 20990 - protein, 282 aa, Zea mays subsp. mays
  misc_feature (1)..(282): Ceres Seq. ID no. 12391563
MFGHKRDYQAACSDEGGPACYVGCPKDCPNKCLVFCAYCLSFCMCDIFPGTSCGDPRFTGGDGNTFYFHGNKDKDFCLVSDAGLHINAHFIGNHNPALNRDFTWVQALGVTFVAPGGAGDRHRLYVGARRAAEWDEEDDHIQLTLDAEPVDVDAVKNARWASKALPGLSVTRMDAVNTVMVELDGVFAISANAVPITDRDDRIHGYGKTGADSLVHLDLAFQFHNLTADVHGVLGQTYRPGYVSKLDIGAKMPVMGGAPKYLSAGLFSTDCAVSRFHSFASA

SEQ ID NO: 20991 - protein, 239 aa, Zea mays subsp. mays
  misc_feature (1)..(239): Ceres Seq. ID no. 12391564
MCDIFPGTSCGDPRFTGGDGNTFYFHGNKDKDFCLVSDAGLHINAHFIGNHNPALNRDFTWVQALGVTFVAPGGAGDRHRLYVGARRAAEWDEEDDHIQLTLDAEPVDVDAVKNARWASKALPGLSVTRMDAVNTVMVELDGVFAISANAVPITDRDDRIHGYGKTGADSLVHLDLAFQFHNLTADVHGVLGQTYRPGYVSKLDIGAKMPVMGGAPKYLSAGLFSTDCAVSRFHSFASA

SEQ ID NO: 20992 - DNA, 971 bp, Zea mays subsp. mays
  misc_feature (1)..(971): Ceres Seq. ID no. 12391568
acacctccttatcgcaacgcgagcagcagttgcattggaggcgaggaggagccacgccggggctcaaggaatggccgctctccgccacctcgctgccggccccacctgccaccaccaccaccacggcgtcgcggcagccaccgcctccctccggctccatcgcctccccctccccttccgcccccttcgctcccgctccggctccttcaccagggtttatgcgatctccagcaatgacatcagggtcggcaccaacgtcgaggtcgacggcgcgccatggaaagttctagagttcctccacgtcaagcctggaaaaggcgctgctttcgtcaggacaaaactgcgtaactatgtaactggcaacacggtcgagaaaaccttccgtgctggaagtacgctacaggaaccatccctttcaaaggagaccaagcaatttacatacaaggatggctcccagttcgtgttcatggatctgacaacatttgaagaaagtcggttaaatgaagcagatgtcggtgacaaacaaaaatggctgaaagaggggatggactgcaatttgttgtactggaatgggaagatcattgatttcgacctcccaatcactgtgaggctgactgtaactgatactgacccaggggcaagtgatagtgcgcaaggaggaacaaagcctgcaaccctggaaactggagctgttgtcactgtgccctcttttgtgaacgtaggcgatgatattctggtggattcaagaactgggcagtatatgaatcgagcataacgaattgaagaggatttcggatttgaggagagtactgcttttttgtttgaccattttagtcccattcacttgtacaaacgccctgggtctttggccccaggaaatttacatttctgctgcatgtgaatcctcactctgattataaccatgtacatctttggtttccagatataaggaaaattgtgttcagattttt

SEQ ID NO: 20993 - protein, 257 aa, Zea mays subsp. mays
  misc_feature (1)..(257): Ceres Seq. ID no. 12391569
HLLIATRAAVALEARRSHAGAQGMAALRHLAAGPTCHHHHHGVAAATASLRLHRLPLPFRPLRSRSGSFTRVYAISSNDIRVGTNVEVDGAPWKVLEFLHVKPGKGAAFVRTKLRNYVTGNTVEKTFRAGSTLQEPSLSKETKQFTYKDGSQFVFMDLTTFEESRLNEADVGDKQKWLKEGMDCNLLYWNGKIIDFDLPITVRLTVTDTDPGASDSAQGGTKPATLETGAVVTVPSFVNVGDDILVDSRTGQYMNRA

SEQ ID NO: 20994 - protein, 234 aa, Zea mays subsp. mays
  misc_feature (1)..(234): Ceres Seq. ID no. 12391570
MAALRHLAAGPTCHHHHHGVAAATASLRLHRLPLPFRPLRSRSGSFTRVYAISSNDIRVGTNVEVDGAPWKVLEFLHVKPGKGAAFVRTKLRNYVTGNTVEKTFRAGSTLQEPSLSKETKQFTYKDGSQFVFMDLTTFEESRLNEADVGDKQKWLKEGMDCNLLYWNGKIIDFDLPITVRLTVTDTDPGASDSAQGGTKPATLETGAVVTVPSFVNVGDDILVDSRTGQYMNRA

SEQ ID NO: 20995 - DNA, 1385 bp, Zea mays subsp. mays
  misc_feature (1)..(1385): Ceres Seq. ID no. 12391575
aacacttctcttttgaggaccagtccaccgtccactcccagagtccaaaaccctacgatccgcgccaccatgccgcgcctcgccgccgccgccgccgccgtctcacgccgcgccggcgaggccctgcgccgcggcgcgtttgggggactgcggcctctctcctccctgcaaccgttaaacgccgcctccagcgacgaggtgctcgttgaaggaaagacaagtgcgcgcgctgccgtgctcaaccgccctggctacctcaacgccctcaccaccaccatgggagctaggctcaataaattttatcaatcatgggaggacaacccagacattggctttgtcatgatgaagggcagcggccgagcattctgtgctggtggggatgttgttagattacatgaacttatcactgaaggcaagctggaggaatgtaaggattttttcaagactttgtacatgttcatttattttctgggcacatacttgaaaccacatgttgccattcttgatggcattactatgggtggtggtggaggtgtttccatccctggaacattccgtgttgcaactgataggacagtctttgcaactccagaagttcatattggattccatcctgatgctgcagcctccttttatttgtcgcatctaactggccatgttggggaatatgtggccttgactggtgaaaagcttaatggaacagatatgattgctcttggcctcgctacacactatttcatgagtggccatctggatctgatcgatgaacgacttgcaaagttagtaactgatgatccatcagttattgattcgtcccttgcacaatattgagacatggtttatccgtacaaaaatagcattgttcataggctggaggtgattgataaatgcttcagccatgacacagttgaagagattgttgatgccttggaaagtgaagcagccagctcaaatgaagaatggtgtatcttggcgctgaaacgattgaaagaggcctctccgttagctttgaaggtctcactgcgatcgatacgcgagggtagatatcagacacttgatgagtgccttgtccgtgagtaccgcatgtccatgaatggaatctcaaagcaattttctcatgaattctgcgagggagtcagagcacgactagtcgacaaggacttcactcctaagtgggatcctcctgcccttgagtatgttacgaatgacatggttgacgcatacttcgcacctcttggcgattcggagcctgagttgaagctgcctatagaatcgcgagaggcatttgtatgatcacaaatcattccaagaaccggatcattgcaaggaccggactgggacctgataaacgtgttataatctgtgtagccattatttttggcagc

SEQ ID NO: 20996 - protein, 276 aa, Zea mays subsp. mays
  misc_feature (1)..(276): Ceres Seq. ID no. 12391576
NTSLLRTSPPSTPRVQNPTIRATMPRLAAAAAAVSRRAGEALRRGAFGGLRPLSSLQPLNAASSDEVLVEGKTSARAAVLNRPGYLNALTTTMGARLNKFYQSWEDNPDIGFVMMKGSGRAFCAGGDVVRLHELITEGKLEECKDFFKTLYMFIYFLGTYLKPHVAILDGITMGGGGGVSIPGTFRVATDRTVFATPEVHIGFHPDAAASFYLSHLTGHVGEYVALTGEKLNGTDMIALGLATHYFMSGHLDLIDERLAKLVTDDPSVIDSSLAQY

SEQ ID NO: 20997 - protein, 253 aa, Zea mays subsp. mays
  misc_feature (1)..(253): Ceres Seq. ID no. 12391577
MPRLAAAAAAVSRRAGEALRRGAFGGLRPLSSLQPLNAASSDEVLVEGKTSARAAVLNRPGYLNALTTTMGARLNKFYQSWEDNPDIGFVMMKGSGRAFCAGGDVVRLHELITEGKLEECKDFFKTLYMFIYFLGTYLKPHVAILDGITMGGGGGVSIPGTFRVATDRTVFATPEVHIGFHPDAAASFYLSHLTGHVGEYVALTGEKLNGTDMIALGLATHYFMSGHLDLIDERLAKLVTDDPSVIDSSLAQY

SEQ ID NO: 20998 - protein, 184 aa, Zea mays subsp. mays
  misc_feature (1)..(184): Ceres Seq. ID no. 12391578
MGARLNKFYQSWEDNPDIGFVMMKGSGRAFCAGGDVVRLHELITEGKLEECKDFFKTLYMFIYFLGTYLKPHVAILDGITMGGGGGVSIPGTFRVATDRTVFATPEVHIGFHPDAAASFYLSHLTGHVGEYVALTGEKLNGTDMIALGLATHYFMSGHLDLIDERLAKLVTDDPSVIDSSLAQY

SEQ ID NO: 20999 - DNA, 2052 bp, Zea mays subsp. mays
  misc_feature (1)..(2052): Ceres Seq. ID no. 12391582
aaatgagctcgctctcctgctcctacaggctgcagttgcgctgtgcctgtgcttccagttccatcgctttcccctcctccccagtccccactcccagatgcgatttccctctccaccgccacagcgcctagcttagccagccagccggcggccatcgccgccgcaatggcgaccgcgtcggaggacgaggccgcctcggaccgctgcagcggcagctacagccccagcgccgacgtcagcgagtccgaaacctccagtgactgctccgcgcccaccacgcgccgcttcgcctcctcctcctcggcctccgccaccgtctcccgcctcgcgtcctcctcctcgtcgctccccaccccggcatcggccaccgccttctacctctccaagccaacccccgacctctccgagatcgacatgatgaaggagcgcttcgcgaagctcctgctcggcgaggacatgtcgggcagcgggaagggcgtctgcaccgcgctcgccatctccaatgccatcaccaacctctccgccaccgtgttcggcgagctgtggaggctggagccgctcgcgacggcgaggaaggcgatgtggacgcgggagatggagtggctgctctccgtcgctgactccatcgtcgagctcaccccctccatccaggagctccccgaaggcggcggccagttcgaggtcatggtcccgcgcccgcgcagcgacctctacatgaacctccccgcgctcaagaagctcgacgccatgctcctcgcgatgattgacgggttcaaggatacggagttctggtacgtggacagaggggttatggtcgaggatagcgggggtccgttcccgtcctcatcctcgtcgtcttgtggccggccgtcagtgcggcaggaggacaagtggtggttgccctgcccaagagtgccgcccaaggggctgtccgtggacgcgaggaggaagctgcagcaaagcagggattgtgcaaaccagatactcaaggcggccatggcgattaacagcgatgtgctcgccgagatggaaatccccgaagtgtacctggagacactgcccaagaacggtaaatcttgcttgggtgagataatttatcgatacataacagctgagcagttctcaccagaatgtctcctagattgcttggatctatcatctgagcaccacacacttgaagtggcaaacagaatagaaggtgccatccatgtttggaaactgaaaggccaaaaaaagtcgacgcctcaagccaaatcaaagatatcttggggtggaaaagtgaagggtcttgttggagataaggagaagaaccacactttgtctgaaagagctgatggtctattgcagagcttaaggttgagatatccaggcctgccacaaacttcccttgacatgaacaagatacagtataacaaggatgtcgggcagtccatacttgaaagctactcaagggttctggagagcttggcatttaacataattgcaagaattgatgatgtgatctatgttgatgacgctacaaacagatcagctgctgccgagtctgtttcgatcttcaatcgtggcacaggcgtgccagttcagaagagaatctctccaagcccattctctattcagaattcgccgtatggctctccgttcgcaacacccactttctgctcctccaccccagttacaggcagtcctggaagggtacagcccccattaaacaaaaatattctaggaactcaagaaatcaaggtcgaaaagctcttttctggtgatctagagaaggtctggacatatgcaggaaacttgagcgctaggaaagacgctggagatgctcctgagagagactgaagggcgatggaggaaggtagacatgtaccgacagccgacagatcctgtaattgctagtagctagatcttcctgtacagaagcagcatgagtttttttttgttctttttgtagcgagccgatcattgtgtgctctgcttacaatgaatggatgtcacctgatctgaacagagaaacttgtagtttcagctgtagtttttttgtctggattggtt

SEQ ID NO: 21000 - protein, 557 aa, Zea mays subsp. mays
  misc_feature (1)..(557): Ceres Seq. ID no. 12391583
MATASEDEAASDRCSGSYSPSADVSESETSSDCSAPTTRRFASSSSASATVSRLASSSSSLPTPASATAFYLSKPTPDLSEIDMMKERFAKLLLGEDMSGSGKGVCTALAISNAITNLSATVFGELWRLEPLATARKAMWTREMEWLLSVADSIVELTPSIQELPEGGGQFEVMVPRPRSDLYMNLPALKKLDAMLLAMIDGFKDTEFWYVDRGVMVEDSGGPFPSSSSSSCGRPSVRQEDKWWLPCPRVPPKGLSVDARRKLQQSRDCANQILKAAMAINSDVLAEMEIPEVYLETLPKNGKSCLGEIIYRYITAEQFSPECLLDCLDLSSEHHTLEVANRIEGAIHVWKLKGQKKSTPQAKSKISWGGKVKGLVGDKEKNHTLSERADGLLQSLRLRYPGLPQTSLDMNKIQYNKDVGQSILESYSRVLESLAFNIIARIDDVIYVDDATNRSAAAESVSIFNRGTGVPVQKRISPSPFSIQNSPYGSPFATPTFCSSTPVTGSPGRVQPPLNKNILGTQEIKVEKLFSGDLEKVWTYAGNLSARKDAGDAPERD

SEQ ID NO: 21001 - protein, 474 aa, Zea mays subsp. mays
  misc_feature (1)..(474): Ceres Seq. ID no. 12391584
MMKERFAKLLLGEDMSGSGKGVCTALAISNAITNLSATVFGELWRLEPLATARKAMWTREMEWLLSVADSIVELTPSIQELPEGGGQFEVMVPRPRSDLYMNLPALKKLDAMLLAMIDGFKDTEFWYVDRGVMVEDSGGPFPSSSSSSCGRPSVRQEDKWWLPCPRVPPKGLSVDARRKLQQSRDCANQILKAAMAINSDVLAEMEIPEVYLETLPKNGKSCLGEIIYRYITAEQFSPECLLDCLDLSSEHHTLEVANRIEGAIHVWKLKGQKKSTPQAKSKISWGGKVKGLVGDKEKNHTLSERADGLLQSLRLRYPGLPQTSLDMNKIQYNKDVGQSILESYSRVLESLAFNIIARIDDVIYVDDATNRSAAAESVSIFNRGTGVPVQKRISPSPFSIQNSPYGSPFATPTFCSSTPVTGSPGRVQPPLNKNILGTQEIKVEKLFSGDLEKVWTYAGNLSARKDAGDAPERD

SEQ ID NO: 21002 - protein, 473 aa, Zea mays subsp. mays
  misc_feature (1)..(473): Ceres Seq. ID no. 12391585
MKERFAKLLLGEDMSGSGKGVCTALAISNAITNLSATVFGELWRLEPLATARKAMWTREMEWLLSVADSIVELTPSIQELPEGGGQFEVMVPRPRSDLYMNLPALKKLDAMLLAMIDGFKDTEFWYVDRGVMVEDSGGPFPSSSSSSCGRPSVRQEDKWWLPCPRVPPKGLSVDARRKLQQSRDCANQILKAAMAINSDVLAEMEIPEVYLETLPKNGKSCLGEIIYRYITAEQFSPECLLDCLDLSSEHHTLEVANRIEGAIHVWKLKGQKKSTPQAKSKISWGGKVKGLVGDKEKNHTLSERADGLLQSLRLRYPGLPQTSLDMNKIQYNKDVGQSILESYSRVLESLAFNIIARIDDVIYVDDATNRSAAAESVSIFNRGTGVPVQKRISPSPFSIQNSPYGSPFATPTFCSSTPVTGSPGRVQPPLNKNILGTQEIKVEKLFSGDLEKVWTYAGNLSARKDAGDAPERD

SEQ ID NO: 21003 - DNA, 1990 bp, Zea mays subsp. mays
  misc_feature (1)..(1990): Ceres Seq. ID no. 12391586
attcctgagcaaaaatcccctgcaacccgacccatagccatgggcaagctcgaggagaggacgcgtgcgttctggacgaaccgatggcttgtgttcgttggggccatgtggatgcagtccatggccggcaccacttacatcttcggcgccatctcgccggtggtcaaggccaggctgggctacgaccagccgcaggtggccgcgctgggtgtcgccaagaacctcggcggctgcctcggcctcctcgccggcgcgctctcggcgacgtggccgccgtgggcgctgctggccatcggcgccgcgcagaacttcctcggctacggctggctctggctcgtcgtctccgggaacgtgccggcgctgcccctctggctgatgtgtgttgttatctttattggaacaaatggccagacgtatttcatcacggcttcacttgttacaagcatccagaatttcccaaagagcaggggcccaacagtgggcatcctcaaaggatttatgggcctaactagcgccattctgacacaagtttatacagtgatgcacactccagaccatgctgcgcttatcttcatggttgctgttggtccgtcgctggttgccattggcttgatgtttgttattaggcctgttggtggtcacaggcagatacggccatctgacaagaacagcttcatgttcatctacactgtatgcttgctcctcgcctcataccttgtcggtgctatgcttatccaagatttcctgcaaccaagctatgatgtggttgtttttctgactgtgattctgttcgtcctccttatttcaccaatcgcaatccctgtgattgtgtcgttcatgccggaaaaagctcagcatctcatggaagatgctctcttatctgaaccattgacaggagaggcaagcagttcacgacaaaaggaggatcaaccagaggtcattttaagtgaggtagaagaggagaagtctaaggaaactgattcattgccgccatctgaaaggagaaagaggattgcggaattgcaggccaagctagtggaagcagcggcaagaggtggggttagaatcaaaagaaggccacaccgaggggataacttcaccctgatgcaggcattggtgaaggctgatttttggcttatttggctatcacttttgcttgggtcgggatcagggctgacagtgattgataacctgggtcagatgagccaggctattggttataaaaatgcacatatcttttgtcactcgtgagcatatggaactttcttggtcgtgttggaggtggctacttctctgagatcattgtcagggaacgtacatacccaaggcacatagcattggcagttgctcagatcgtgatggctgctgggcatttcctctttgctatggcttggcctggaactatgtacattgcgagcttgctggttggacttggatatggagctcactgggctattgtgccagctgctgtctccgagctttttggtgtaaaacactttggtgcgatgtacaattttctcatactagcgaaccccgcaggatccctcatcttctcagagctaattgtcagcaacctctatgaacatgaagctgagaaacaagctagccaacagcagatgtcagcattgctgtctccacgattgcttcgtgataccggctttcttgcagatgatgcactcaagtgtgaagggcctgcttgcttctttttcagctctctgattatgtcggtgttctgtgctgttgccgctgggttgagcctcctcgtcgttcaaaggaccagacaagtttatcctcgcctctacagttctgtccgcacttgagattctccaattctccatggatgggaagctcaaatcctcgtattctatgtccgtttattcttgcatacatatgcacaaagataagtatgtgaataaattctcaaatcttttcctaagctggtattgtaaaaacagatattcttgaatggactgtcccttgtgacttgcct

SEQ ID NO: 21004 - protein, 416 aa, Zea mays subsp. mays
  misc_feature (1)..(416): Ceres Seq. ID no. 12391587
IPEQKSPATRPIAMGKLEERTRAFWTNRWLVFVGAMWMQSMAGTTYIFGAISPVVKARLGYDQPQVAALGVAKNLGGCLGLLAGALSATWPPWALLAIGAAQNFLGYGWLWLVVSGNVPALPLWLMCVVIFIGTNGQTYFITASLVTSIQNFPKSRGPTVGILKGFMGLTSAILTQVYTVMHTPDHAALIFMVAVGPSLVAIGLMFVIRPVGGHRQIRPSDKNSFMFIYTVCLLLASYLVGAMLIQDFLQPSYDVVVFLTVILFVLLISPIAIPVIVSFMPEKAQHLMEDALLSEPLTGEASSSRQKEDQPEVILSEVEEEKSKETDSLPPSERRKRIAELQAKLVEAAARGGVRIKRRPHRGDNFTLMQALVKADFWLIWLSLLLGSGSGLTVIDNLGQMSQAIGYKNAHIFCHS

SEQ ID NO: 21005 - protein, 403 aa, Zea mays subsp. mays
  misc_feature (1)..(403): Ceres Seq. ID no. 12391588
MGKLEERTRAFWTNRWLVFVGAMWMQSMAGTTYIFGAISPVVKARLGYDQPQVAALGVAKNLGGCLGLLAGALSATWPPWALLAIGAAQNFLGYGWLWLVVSGNVPALPLWLMCVVIFIGTNGQTYFITASLVTSIQNFPKSRGPTVGILKGFMGLTSAILTQVYTVMHTPDHAALIFMVAVGPSLVAIGLMFVIRPVGGHRQIRPSDKNSFMFIYTVCLLLASYLVGAMLIQDFLQPSYDVVVFLTVILFVLLISPIAIPVIVSFMPEKAQHLMEDALLSEPLTGEASSSRQKEDQPEVILSEVEEEKSKETDSLPPSERRKRIAELQAKLVEAAARGGVRIKRRPHRGDNFTLMQALVKADFWLIWLSLLLGSGSGLTVIDNLGQMSQAIGYKNAHIFCHS

SEQ ID NO: 21006 - protein, 381 aa, Zea mays subsp. mays
  misc_feature (1)..(381): Ceres Seq. ID no. 12391589
MWMQSMAGTTYIFGAISPVVKARLGYDQPQVAALGVAKNLGGCLGLLAGALSATWPPWALLAIGAAQNFLGYGWLWLVVSGNVPALPLWLMCVVIFIGTNGQTYFITASLVTSIQNFPKSRGPTVGILKGFMGLTSAILTQVYTVMHTPDHAALIFMVAVGPSLVAIGLMFVIRPVGGHRQIRPSDKNSFMFIYTVCLLLASYLVGAMLIQDFLQPSYDVVVFLTVILFVLLISPIAIPVIVSFMPEKAQHLMEDALLSEPLTGEASSSRQKEDQPEVILSEVEEEKSKETDSLPPSERRKRIAELQAKLVEAAARGGVRIKRRPHRGDNFTLMQALVKADFWLIWLSLLLGSGSGLTVIDNLGQMSQAIGYKNAHIFCHS

SEQ ID NO: 21007 - DNA, 1621 bp, Zea mays subsp. mays
  misc_feature (1)..(1621): Ceres Seq. ID no. 12391606
aggctctgggtctcgcatcacgatcagatccaatccaaggccgcgccccagcccggcggatggattccgccgccgtggccatcgtgacggtgccgttcccggcgcagggccacctgaaccagctgctgcacctgtccctgctcctggcatcgcgggggcttcctgtccacttcgtcgcgccggagccgcacctccgggaggcccgcgcgcgcctgcacggctgggggcccgaccccgcgtcggtgtgcttccgcgcgctggacgtgcccgcgcacgactccccctccccggacccatcctccccgttcccggcgcacatgcagcccctgttcgaggccttctgcaccggcgcgcgggcctcgctagccgcgctcctggcggagctggccgcgtcgcaccgccgcgtcgtcgtcctctacgaccgcatggcggccttcgcggcggccgaggccgcgcgcttacccaacgccgaggccctcggcgtgcactgcctcgccgcctcctacaacgtcgggtgggcggacccggggcacgccctcctgcgccgccacggcctcgtgttccacccgcccgacgcttgcgccacgccggagttcgtcgcgctcgccaggcggatgggccaggagcgccggcgcgcgcccggagccggcatggtcgtcaacacctgccgcgcgctcgagggcgacttcctcgacgcactccgggggatcccgtcctccgacggcccaaggctgttcgccgtcgggcctctcagcccggtgctccccctccccggcgcgagcgggactcggcacgagtgcctgggctggctcgacgcgcagccgccctcgtcggtgctctacgtgtcgttcggtacgacgtcgtcgctccgcccggagcaggtgcgcgagctggccgccgcgctgcgggacagcggggcgcgcttcgtgtgggcgctgcgggacgccgaccgcgcgggcatgcgcggcggagagggggatactacgaccgaggccctccacgccgccgcggcgtccgagctcggccccgacggcgctggcgtggtggtcaccgggtgggcgccgcagctggagatcctggcgcacggcgccaccgcggcgttcatgagccactgcggctggaactccaccgtggagagcatcagccacgggaagcccatcctggcgtggcccatgcatagcgaccagccctgggacgccgagctcgtgtgcaagtacctccgcgccggcgtcctggtgcgcccgtgggagcggcgccatgacgtgacccccgcggccgacatccgcgacgctatcgacagggtcatggcctcggaggaaggggctgagatccggcggcgggccggggcgctcggggaggccgttcgcggcgccgtggccgagggcgggtcgtctaggcaggacctggaggagctcgtcgcgtacgtgacgaggtgattccgtcgcgatggcccatgcggcgactgtgccgcgtggcggcgctgctgcctgcattaacgatttgtttccatggactatattagttgaaatgaaatccgaaggttttaggccaggctatggtttcatttgagggttggccaggccatcttcagtagtctatctatctattttataaacttgtg

SEQ ID NO: 21008 - protein, 477 aa, Zea mays subsp. mays
  misc_feature (1)..(477): Ceres Seq. ID no. 12391607
ALGLASRSDPIQGRAPARRMDSAAVAIVTVPFPAQGHLNQLLHLSLLLASRGLPVHFVAPEPHLREARARLHGWGPDPASVCFRALDVPAHDSPSPDPSSPFPAHMQPLFEAFCTGARASLAALLAELAASHRRVVVLYDRMAAFAAAEAARLPNAEALGVHCLAASYNVGWADPGHALLRRHGLVFHPPDACATPEFVALARRMGQERRRAPGAGMVVNTCRALEGDFLDALRGIPSSDGPRLFAVGPLSPVLPLPGASGTRHECLGWLDAQPPSSVLYVSFGTTSSLRPEQVRELAAALRDSGARFVWALRDADRAGMRGGEGDTTTEALHAAAASELGPDGAGVVVTGWAPQLEILAHGATAAFMSHCGWNSTVESISHGKPILAWPMHSDQPWDAELVCKYLRAGVLVRPWERRHDVTPAADIRDAIDRVMASEEGAEIRRRAGALGEAVRGAVAEGGSSRQDLEELVAYVTR

SEQ ID NO: 21009 - protein, 458 aa, Zea mays subsp. mays
  misc_feature (1)..(458): Ceres Seq. ID no. 12391608
MDSAAVAIVTVPFPAQGHLNQLLHLSLLLASRGLPVHFVAPEPHLREARARLHGWGPDPASVCFRALDVPAHDSPSPDPSSPFPAHMQPLFEAFCTGARASLAALLAELAASHRRVVVLYDRMAAFAAAEAARLPNAEALGVHCLAASYNVGWADPGHALLRRHGLVFHPPDACATPEFVALARRMGQERRRAPGAGMVVNTCRALEGDFLDALRGIPSSDGPRLFAVGPLSPVLPLPGASGTRHECLGWLDAQPPSSVLYVSFGTTSSLRPEQVRELAAALRDSGARFVWALRDADRAGMRGGEGDTTTEALHAAAASELGPDGAGVVVTGWAPQLEILAHGATAAFMSHCGWNSTVESISHGKPILAWPMHSDQPWDAELVCKYLRAGVLVRPWERRHDVTPAADIRDAIDRVMASEEGAEIRRRAGALGEAVRGAVAEGGSSRQDLEELVAYVTR

SEQ ID NO: 21010 - protein, 392 aa, Zea mays subsp. mays
  misc_feature (1)..(392): Ceres Seq. ID no. 12391609
GSGSRITIRSNPRPRPSPADGFRRRGHRDGAVPGAGPPEPAAAPVPAPGIAGASCPLRRAGAAPPGGPRAPARLGARPRVGVLPRAGRARARLPLPGPILPVPGAHAAPVRGLLHRRAGLASRAPGGAGRVAPPRRRPLRPHGGLRGGRGRALTQRRGPRRALPRRLLQRRVGGPGARPPAPPRPRVPPARRLRHAGVRRARQADGPGAPARARSRHGRQHLPRARGRLPRRTPGDPVLRRPKAVRRRASQPGAPPPRRERDSARVPGLARRAAALVGALRVVRYDVVAPPGAGARAGRRAAGQRGALRVGAAGRRPRGHARRRGGYYDRGPPRRRGVRARPRRRWRGGHRVGAAAGDPGARRHRGVHEPLRLELHRGEHQPREAHPGVAHA

SEQ ID NO: 21011 - DNA, 1425 bp, Zea mays subsp. mays
  misc_feature (1)..(1425): Ceres Seq. ID no. 12391880
aactaaccaacggacggaagtggcgtggcgaggcaaggccgccgcgaagccgagcaaatccaagcctccctcctctacccgttcctctcctgccttctcgggatctgcccgcccgccttgtgtgatcttgccgcctcgccccccgcggttggagctccggctgcacgacaccatgagcccccgcgcgtagaggctgggagagagggagcggggaacaaagttaggcaccaacaaagttaagtggggaggccagagctgcccagctgggtcgctgttctaccagagggatggacgggagcgccggctccttcgtcgccgtccgccggctctccggctccgaccgcgccgccgccttccaccactcctcttcggcggaggtcgtgacggggtcgacggcgtggatcgggagggggctctcctgcgtctgcgcgcagaggagggacagcgatgcgcgcctttccttcgatttgacgcctgtgcaggaagaatgcctacagaggttacaaaaccgtatagaagttcagtatgatagtgcaaacagagagcatcaggaagcactacagtccctttggtgtgcttcttttcctggcaccgagcttcgggggctaatatcagaacagtggaaagagatgggttggcaagggaaagacccatctacagattttagaggtggaggcttcatctccttggagaatctattgtactttgctaggaactatccaaaatctttccaggaactccttcgcaagcagaatggtgaccgtgcaatctgggagtatccatttgctgtcgctggtgtaaatataaccttcatgctcattcagatgcttgatctccaatcagttaaaccgaggtcattgttcggagcagttttcctaaagcttctttcagaaaacgatcaagcttttgacattctctactgcataaccttcaagctgatggatcagcaatggcttgacatgcatgctacttacatggacttcaacacggtcatgaagtctacacggcgtcagctagaaagggagctgttaattgaagatattcagaggattgaggacatgccatcatacaggcttctggcccggtagctagaagaaactgaaaccttaacatggctacatattgcaaggcggcttgagatgctaatggatcgcaacttatgtggacggcgacaatcttgaaatgtagatgacatgtatccttgtgtgttaggtacttgtggtctctggtaacctgatctctgaagattacaagatagggtttttttcctggtgatagaatgccacgtagggtaactgaagtgtctgatcagctcccatggccaaaaaaaaatttgtagggtgtgttattacaatctggtcgttgtccatcataccacgaaaggaagtattcctagggttgttgttgtaaacaggaggatttggg

SEQ ID NO: 21012 - protein, 266 aa, Zea mays subsp. mays
  misc_feature (1)..(266): Ceres Seq. ID no. 12391881
MDGSAGSFVAVRRLSGSDRAAAFHHSSSAEVVTGSTAWIGRGLSCVCAQRRDSDARLSFDLTPVQEECLQRLQNRIEVQYDSANREHQEALQSLWCASFPGTELRGLISEQWKEMGWQGKDPSTDFRGGGFISLENLLYFARNYPKSFQELLRKQNGDRAIWEYPFAVAGVNITFMLIQMLDLQSVKPRSLFGAVFLKLLSENDQAFDILYCITFKLMDQQWLDMHATYMDFNTVMKSTRRQLERELLIEDIQRIEDMPSYRLLAR

SEQ ID NO: 21013 - protein, 152 aa, Zea mays subsp. mays
  misc_feature (1)..(152): Ceres Seq. ID no. 12391882
MGWQGKDPSTDFRGGGFISLENLLYFARNYPKSFQELLRKQNGDRAIWEYPFAVAGVNITFMLIQMLDLQSVKPRSLFGAVFLKLLSENDQAFDILYCITFKLMDQQWLDMHATYMDFNTVMKSTRRQLERELLIEDIQRIEDMPSYRLLAR

SEQ ID NO: 21014 - DNA, 1421 bp, Zea mays subsp. mays
  misc_feature (1)..(1421): Ceres Seq. ID no. 12391904
atgactactccaagcgcgcaattaaccctcactaaagggaacaaaagctggagctccaccgcggtggcggccgctctagaactagtggatcccccgggctgcaggaattcgcacgagaccattacctagaacatcctaatcgaaaaccttttgccgatccagttgtgccgatcggtattttcccgcgtccaccaaaacccgttgccgccgtttttttcgtcgccgccacggaccaggatcgaccggtgccgatgaagccagcggaggacgcggatgcgccggcgccggagacggcggcagcgcagacggtctggtacgaccccatgacttcgccgcaggcgccggcgccgcagcagcaaccggcgatagaggctgcgatgcggggggcctcgccgtcggtgagctccaacgcgcgggcctctcagggtgtacgccgacggcatctatgatctcttccacttcggccatgcgcgcgcgctcgaacaggccaagaagtcatttcccaacacctacttgctggtaggttgctgcagcgacgagatcacccacatgtacaaaggaaagaccgtcatgaccgaggacgagcgctacgaatcgcttcggcattgcaagtgggtcgacgaggtcataccggacgctccatgggtgatcaaccaggagttcatcgacaagcacgacatcgactacgtcgctcacgacgcgctcccatacgctgacacgagtggagctgccaatgatgtctatgaatttgtgaaagccatcgggaagttcaaggagacgaagcgcaccgagggcatctcgacgtcggacatcatcatgaggatcttgaaggactacaaccagtacatcatgcggaacctcacccgcgggtacagccgcaaagatctcggcgtcagctatgtcaaggagaagcagctgagagtcaacatggggatcagcaagctacgggagaaggtgaaggagcaccaggagaagttccacagcgcggcgaagatcgctgggaccaaccctgtggagtggatggagaacgcggaccgctggatcgttggcttccttgagaagttcgaggaaggctgccacatgatggaaactgccattaaaggtcggattcaggaggggttgaagcggcaaggcaggtcggagtcaaacctttctggagaggagttcgaatcgtagttctgtgatctcctccaaatgaaactagacaaaaggagaactggagatcatttcccagtctgtgtaacagtatgagattggttaattagcatgttattgtaggatgccatggatcattgtttagttgtacctggagatcatgtagttttgaagaacaatcgtgtttctgtatgcgatcagttgctccttcattgagcatatctgcatatggcacctgctaggaagtaggaactgctgttcatttg

SEQ ID NO: 21015 - protein, 208 aa, Zea mays subsp. mays
  misc_feature (1)..(208): Ceres Seq. ID no. 12391905
MYKGKTVMTEDERYESLRHCKWVDEVIPDAPWVINQEFIDKHDIDYVAHDALPYADTSGAANDVYEFVKAIGKFKETKRTEGISTSDIIMRILKDYNQYIMRNLTRGYSRKDLGVSYVKEKQLRVNMGISKLREKVKEHQEKFHSAAKIAGTNPVEWMENADRWIVGFLEKFEEGCHMMETAIKGRIQEGLKRQGRSESNLSGEEFES

SEQ ID NO: 21016 - protein, 201 aa, Zea mays subsp. mays
  misc_feature (1)..(201): Ceres Seq. ID no. 12391906
MTEDERYESLRHCKWVDEVIPDAPWVINQEFIDKHDIDYVAHDALPYADTSGAANDVYEFVKAIGKFKETKRTEGISTSDIIMRILKDYNQYIMRNLTRGYSRKDLGVSYVKEKQLRVNMGISKLREKVKEHQEKFHSAAKIAGTNPVEWMENADRWIVGFLEKFEEGCHMMETAIKGRIQEGLKRQGRSESNLSGEEFES

SEQ ID NO: 21017 - protein, 119 aa, Zea mays subsp. mays
  misc_feature (1)..(119): Ceres Seq. ID no. 12391907
MRILKDYNQYIMRNLTRGYSRKDLGVSYVKEKQLRVNMGISKLREKVKEHQEKFHSAAKIAGTNPVEWMENADRWIVGFLEKFEEGCHMMETAIKGRIQEGLKRQGRSESNLSGEEFES

SEQ ID NO: 21018 - DNA, 1163 bp, Zea mays subsp. mays
  misc_feature (1)..(1163): Ceres Seq. ID no. 12391908
acaggctcccagcagctcgattcgctcgcctagtcgccttctcgaattctcccgcaaacttgacgctgaagcctgcacgagaggacatggccatggccacgcgtgtcacggcagcagcggtcgtcctccgggttctctcgttgctgatcctgctgcgcacgggcacgtgcgccgacgactactcggcgttcgtgtacgcggggtgctcgcagggccgctacagcgccgattcgcagtacgcgtcgggggtggactccgtgctcacctcggtcgccagcagcgcgccgtacgccccctacgacaacttcacctcgccgaccgactcgtccgtggtcggcctctaccagtgccgctccgacctccccgcctccgtctgcagcggctgcgtccgctccgccatctccaggctctcctctctctgcgcctgggcggtcggcggcgcggtgcagctgcgggcctgcttcgtgcgatacgggaacgactcgttcctggggaagcaggacacgncggtgctgttcaagaaatgcggcggcacgcccggggacgccggcggggtggccatgagggactcggcgctcggcgcgctcgtggccgcgncggcgccggcgggcggagggttccgcaccggagggtccggcgccgtgcaggccatgtcgcagtgcgtgggggacctcggcgccaagccctgctccgantgcgtctcggccgcgnccgcacagctcaaggccgggtgcggttacgccacggccggcgaggtctacctcggcaagtgctacgcgcgcttctgggccaacggtggcggaggtttcagtagcagcagcagcagcgccggccggcatggatttcgtctagtccacgtggtcgccgccggtttattcttcccctccttggcttatgcctcacttgccatataggtattgttgcaccgtgcggtgatgttgagactggagcagtagctatgctgtgttttgtcatcatgcttgagatttacagctcagtttttgctcttgtgctcaaactcaaatggtgttcatgtagcttaactctgtctctttctttctcaagtcttataactgtaaatttcttacgtcgtatgcatgcaaactatgctaaatcatgtataagtaatctttttactacagcttaccaccattattaatctt

SEQ ID NO: 21019 - protein, 303 aa, Zea mays subsp. mays
  misc_feature (1)..(303): Ceres Seq. ID no. 12391909
  misc_feature (169)..(169): Xaa is any aa, unknown or other
  misc_feature (199)..(199): Xaa is any aa, unknown or other
  misc_feature (231)..(231): Xaa is any aa, unknown or other
  misc_feature (237)..(237): Xaa is any aa, unknown or other
RLPAARFARLVAFSNSPANLTLKPAREDMAMATRVTAAAVVLRVLSLLILLRTGTCADDYSAFVYAGCSQGRYSADSQYASGVDSVLTSVASSAPYAPYDNFTSPTDSSVVGLYQCRSDLPASVCSGCVRSAISRLSSLCAWAVGGAVQLRACFVRYGNDSFLGKQDTXVLFKKCGGTPGDAGGVAMRDSALGALVAAXAPAGGGFRTGGSGAVQAMSQCVGDLGAKPCSXCVSAAXAQLKAGCGYATAGEVYLGKCYARFWANGGGGFSSSSSSAGRHGFRLVHVVAAGLFFPSLAYASLAI

SEQ ID NO: 21020 - protein, 275 aa, Zea mays subsp. mays
  misc_feature (1)..(275): Ceres Seq. ID no. 12391910
  misc_feature (141)..(141): Xaa is any aa, unknown or other
  misc_feature (171)..(171): Xaa is any aa, unknown or other
  misc_feature (203)..(203): Xaa is any aa, unknown or other
  misc_feature (209)..(209): Xaa is any aa, unknown or other
MAMATRVTAAAVVLRVLSLLILLRTGTCADDYSAFVYAGCSQGRYSADSQYASGVDSVLTSVASSAPYAPYDNFTSPTDSSVVGLYQCRSDLPASVCSGCVRSAISRLSSLCAWAVGGAVQLRACFVRYGNDSFLGKQDTXVLFKKCGGTPGDAGGVAMRDSALGALVAAXAPAGGGFRTGGSGAVQAMSQCVGDLGAKPCSXCVSAAXAQLKAGCGYATAGEVYLGKCYARFWANGGGGFSSSSSSAGRHGFRLVHVVAAGLFFPSLAYASLAI

SEQ ID NO: 21021 - protein, 273 aa, Zea mays subsp. mays
  misc_feature (1)..(273): Ceres Seq. ID no. 12391911
  misc_feature (139)..(139): Xaa is any aa, unknown or other
  misc_feature (169)..(169): Xaa is any aa, unknown or other
  misc_feature (201)..(201): Xaa is any aa, unknown or other
  misc_feature (207)..(207): Xaa is any aa, unknown or other
MATRVTAAAVVLRVLSLLILLRTGTCADDYSAFVYAGCSQGRYSADSQYASGVDSVLTSVASSAPYAPYDNFTSPTDSSVVGLYQCRSDLPASVCSGCVRSAISRLSSLCAWAVGGAVQLRACFVRYGNDSFLGKQDTXVLFKKCGGTPGDAGGVAMRDSALGALVAAXAPAGGGFRTGGSGAVQAMSQCVGDLGAKPCSXCVSAAXAQLKAGCGYATAGEVYLGKCYARFWANGGGGFSSSSSSAGRHGFRLVHVVAAGLFFPSLAYASLAI

SEQ ID NO: 21022 - DNA, 776 bp, Zea mays subsp. mays
  misc_feature (1)..(776): Ceres Seq. ID no. 12400260
agcaagcaaagattgcgccggtgagggtgttcgggacggcggacttcgtgaacgctgcgagggttatggcttgcctggaggaagttggcgtggagtacgaggtcgtcgaggtcgactacgcggccatggagcacaagggcgcccagcacctcgcaagaaacccgttcggccaaatcccagcgtttcaggacggggacacgatgctctttgaatcccgagcaatcgccaagtacgtgctccgcaaatactccaagtcagctcaagtcgacctgctccgtgagggcaacccggaggaagccgccatggtagacgtgtggacggaggtcgaggcgcacacctacctacccggccatcgcgcccatcttctacgagtacgtggtgtaccccgccgagcatggcaccacgcccaaccaggaggtggtggacgagagtgtggagaggctcaggaaggtcctcgacgtctacgaggcgcacctgtacaagaccaagcagctctatctcgccggggactacttcagcctcgccgatctcaaccacgtcccgtacaccttccacctcatgaggacaccgcacgcgtcgctcttcgaggcgtatcctcacgttaaggcctggtgggagagagttatagcacgcccgtcgctgcagaagctcgccccggatatggtgatcaaagcctgattgcacgtacctttgtatcatcagattcttccttggggtgtatatatgcaaggggtacctttcttgcaaaataaataaagaaataaataaatccgatc

SEQ ID NO: 21023 - protein, 200 aa, Zea mays subsp. mays
  misc_feature (1)..(200): Ceres Seq. ID no. 12400261
QAKIAPVRVFGTADFVNAARVMACLEEVGVEYEVVEVDYAAMEHKGAQHLARNPFGQIPAFQDGDTMLFESRAIAKYVLRKYSKSAQVDLLREGNPEEAAMVDVWTEVEAHTYLPGHRAHLLRVRGVPRRAWHHAQPGGGGRECGEAQEGPRRLRGAPVQDQAALSRRGLLQPRRSQPRPVHLPPHEDTARVALRGVSSR

SEQ ID NO: 21024 - protein, 179 aa, Zea mays subsp. mays
  misc_feature (1)..(179): Ceres Seq. ID no. 12400262
MACLEEVGVEYEVVEVDYAAMEHKGAQHLARNPFGQIPAFQDGDTMLFESRAIAKYVLRKYSKSAQVDLLREGNPEEAAMVDVWTEVEAHTYLPGHRAHLLRVRGVPRRAWHHAQPGGGGRECGEAQEGPRRLRGAPVQDQAALSRRGLLQPRRSQPRPVHLPPHEDTARVALRGVSSR

SEQ ID NO: 21025 - protein, 159 aa, Zea mays subsp. mays
  misc_feature (1)..(159): Ceres Seq. ID no. 12400263
MEHKGAQHLARNPFGQIPAFQDGDTMLFESRAIAKYVLRKYSKSAQVDLLREGNPEEAAMVDVWTEVEAHTYLPGHRAHLLRVRGVPRRAWHHAQPGGGGRECGEAQEGPRRLRGAPVQDQAALSRRGLLQPRRSQPRPVHLPPHEDTARVALRGVSSR

SEQ ID NO: 21026 - DNA, 932 bp, Zea mays subsp. mays
  misc_feature (1)..(932): Ceres Seq. ID no. 12400274
gccgccgtagctggtagctaagctacgtgaagaagatggttgggctcctccgtccactctccgccgccgccaccttactcctcgcccccgccacgccactcactggttcctcagtctccgctagttccgtcggcggcaggcggtggagaagcgtgagggcggacgccggcgggggctggctatccgggctgctgggcggcaagggcggcggcgcgtccacggcgatgatggtgacgccgggaaccgtgaaggccggcgaccccgtcctgcacgagcccgcgcaggaggtggcgccgggggacgtgctgtccgagaaggtgcagggcgtcatcgaccggatggtcgacgtcatgcgcagggccccaggcgtcggcctcgccgcccccgcagatcggcgtcccgctcaggattattgttctcgaggatacgcaggagtacatcagctatgcacccaagaaggacatcgaagcacaagaccgccgcccctttgatcttctcgtcggtcattatcaatccaaagattaagagcacgagtaaaagaaccgcgctgttctttgagggatgtctcagtgttgatggatacagggcggtcgtggagcggcatctggacgttgaagtttcaggtctggaccggaatgggagcaccatgaaggtacgggcttcaggatggcaagcgcgcatcctccagcatgaatgtgatcatcttgaaggcacgctgtatgttgacaagatggtagcaaggacattcagggtcgtcgagaacttggatttgccccttcccactggatgccctcaactaggtgcaagataatggggatagctttccatttttcctcgtcgaatagatgtgattctctctctctttttgaaaattacaacgtctcatgtacagtattgcattttgcttcccgtctaattgctgtgtttgttct

SEQ ID NO: 21027 - protein, 151 aa, Zea mays subsp. mays
  misc_feature (1)..(151): Ceres Seq. ID no. 12400275
MVGLLRPLSAAATLLLAPATPLTGSSVSASSVGGRRWRSVRADAGGGWLSGLLGGKGGGASTAMMVTPGTVKAGDPVLHEPAQEVAPGDVLSEKVQGVIDRMVDVMRRAPGVGLAAPADRRPAQDYCSRGYAGVHQLCTQEGHRSTRPPPL

SEQ ID NO: 21028 - protein, 121 aa, Zea mays subsp. mays
  misc_feature (1)..(121): Ceres Seq. ID no. 12400276
MHPRRTSKHKTAAPLIFSSVIINPKIKSTSKRTALFFEGCLSVDGYRAVVERHLDVEVSGLDRNGSTMKVRASGWQARILQHECDHLEGTLYVDKMVARTFRVVENLDLPLPTGCPQLGAR

SEQ ID NO: 21029 - protein, 88 aa, Zea mays subsp. mays
  misc_feature (1)..(88): Ceres Seq. ID no. 12400277
MMVTPGTVKAGDPVLHEPAQEVAPGDVLSEKVQGVIDRMVDVMRRAPGVGLAAPADRRPAQDYCSRGYAGVHQLCTQEGHRSTRPPPL

SEQ ID NO: 21030 - DNA, 870 bp, Zea mays subsp. mays
  misc_feature (1)..(870): Ceres Seq. ID no. 12400389
aatccatcaatcctcatcgccacccaacccgccaagtccccaagcaagttgagcatccatccatccatggcgggaggcaagtccaccggcaatgccgcgcgcagcaggaagcgcgtcgaggcaaccgtcctcaagcgctccagggacgggagcgccttcaccagatgcgaggcctgcaacaaggacgtccccgtcgtcctcatcgacatgcacagctgcagcctcgaggagaagatcaggatgacgctcgaggcgcaggtcgtcgagaagaccgtcgaggtcgccagtgcggaccgcaagaagtcctccgccaagggaggtggtaacaaggacgccaagcgcaagcgctcgcccaccgccttcttcctcttcatggacgacttcaggaaggagttcaaggccacccatcctgacaacaagagtgtcgccaccgttgcaaaggaaggaggggagaggtggaagtccatgacagacgaggagaagaagccttacattgaaaaggccgcggagctcaaggctgaggccgagaatggcgagggcagtggtgagaacaatgttgccactaagaaagccaagacagatgaccaggaggtggatcagccagcaaagaagctcagaaagtgcaaggctcttcacgaggacgaggatgacgatggtgaccaggaagacgaggatgagaagaacgagttggatgacgacatgtagatggcagaggccactctcccatctctgtaaatggatggcagatgtgagcgtctagttagaaatgtcacttgtttcaagctagagggaagaggaagatagtcagtagtgaatatcccccgttatcgttgctacatgaatgaactattctatgatgcagttctgtcc

SEQ ID NO: 21031 - protein, 234 aa, Zea mays subsp. mays
  misc_feature (1)..(234): Ceres Seq. ID no. 12400390
NPSILIATQPAKSPSKLSIHPSMAGGKSTGNAARSRKRVEATVLKRSRDGSAFTRCEACNKDVPVVLIDMHSCSLEEKIRMTLEAQVVEKTVEVASADRKKSSAKGGGNKDAKRKRSPTAFFLFMDDFRKEFKATHPDNKSVATVAKEGGERWKSMTDEEKKPYIEKAAELKAEAENGEGSGENNVATKKAKTDDQEVDQPAKKLRKCKALHEDEDDDGDQEDEDEKNELDDDM

SEQ ID NO: 21032 - protein, 212 aa, Zea mays subsp. mays
  misc_feature (1)..(212): Ceres Seq. ID no. 12400391
MAGGKSTGNAARSRKRVEATVLKRSRDGSAFTRCEACNKDVPVVLIDMHSCSLEEKIRMTLEAQVVEKTVEVASADRKKSSAKGGGNKDAKRKRSPTAFFLFMDDFRKEFKATHPDNKSVATVAKEGGERWKSMTDEEKKPYIEKAAELKAEAENGEGSGENNVATKKAKTDDQEVDQPAKKLRKCKALHEDEDDDGDQEDEDEKNELDDDM

SEQ ID NO: 21033 - protein, 165 aa, Zea mays subsp. mays
  misc_feature (1)..(165): Ceres Seq. ID no. 12400392
MHSCSLEEKIRMTLEAQVVEKTVEVASADRKKSSAKGGGNKDAKRKRSPTAFFLFMDDFRKEFKATHPDNKSVATVAKEGGERWKSMTDEEKKPYIEKAAELKAEAENGEGSGENNVATKKAKTDDQEVDQPAKKLRKCKALHEDEDDDGDQEDEDEKNELDDDM

SEQ ID NO: 21034 - DNA, 857 bp, Zea mays subsp. mays
  misc_feature (1)..(857): Ceres Seq. ID no. 12400410
aaactcatcccaaaccagagcgaagaagaatcgccatcacagcaagctacgcgcactgaaatcctccaatccacaggacacagctctacttccacagttcgcagactcgcacgcaccgagcggctagcgatcaacgagaaatgtcgctggtgaggcgcagcagcgtgttcgacccattctctgtggacctcttcgaccccttcgacagcatgttccgctccatcgtgccgccgtcgttgtcgtcgtcggcggcctccgagaccgccgccttcgccagcgcccgcatcgactggaaggagacgcccgaggcgcacgtgttcaaggccgacctccccggcgtgaagaaggaggaggtcaaggtggaggtggaggacggcaacgtgctgctcatcagcgggcagcgcagcagggagaaggaggacaagggcgacaagtggcaccgcgtggagcgcagcagcggccagttcgtgcggcgcttccgcctgccggagaacgccaagacggaggaggtgaggggccgcgctggagaacggcgtgctcacggtcaccgtgcccaaggccgaggtcaagaagcccgaggttaagagcatccagatctccgtctgaagaagacatggacgcgaggtgaatggtcgcgtcgcgttcgcgtcgcggcgtcgggtcttgggtttcagcgacgcgactcgtgtgtgtggtactgtggttgctctgctttggtatgtctggtgtgtacgtgtgctgttcagtgtttcgtggtcatcgtctgtacattgtgctgttcggtgagctccccgactcagtgtgttgtgttctgcgagtgaataaataaaaacaaaccagctgtcgtctcgtgtcgt

SEQ ID NO: 21035 - protein, 147 aa, Zea mays subsp. mays
  misc_feature (1)..(147): Ceres Seq. ID no. 12400411
MSLVRRSSVFDPFSVDLFDPFDSMFRSIVPPSLSSSAASETAAFASARIDWKETPEAHVFKADLPGVKKEEVKVEVEDGNVLLISGQRSREKEDKGDKWHRVERSSGQFVRRFRLPENAKTEEVRGRAGERRAHGHRAQGRGQEARG

SEQ ID NO: 21036 - protein, 124 aa, Zea mays subsp. mays
  misc_feature (1)..(124): Ceres Seq. ID no. 12400412
MFRSIVPPSLSSSAASETAAFASARIDWKETPEAHVFKADLPGVKKEEVKVEVEDGNVLLISGQRSREKEDKGDKWHRVERSSGQFVRRFRLPENAKTEEVRGRAGERRAHGHRAQGRGQEARG

SEQ ID NO: 21037 - DNA, 454 bp, Zea mays subsp. mays
  misc_feature (1)..(454): Ceres Seq. ID no. 12400420
agtccatcaggcatccaagaagctcaaagcaagcagatctaagctccaggcagcgtcgcgacagagtgagtgagtagcacgacaacaacaatggcttccctgaaggccgcgaagcccagcggagttgcggcgcaggacaaggagccggcgcccaagctcagcgagacggcgacgaagccgtcagccgcgaagagcggcggcgttaagaaggctgagcagaagccccgggaaaccaaaaggaaggtgaagagcagcaaacaggcggcggcggccaaaaagtgacgtacagtacgtgtggagtgtaatggagcttccatgcatgagtgaatccatgccatgttatgaatctagtccttcctttcttgtatcttccatgtgacgcggcgtgtgcgtcccctcatgtgtgatgatgccagatgaatactacaaataagacgttgttgtgactgtgtgc

SEQ ID NO: 21038 - protein, 63 aa, Zea mays subsp. mays
  misc_feature (1)..(63): Ceres Seq. ID no. 12400421
MASLKAAKPSGVAAQDKEPAPKLSETATKPSAAKSGGVKKAEQKPRETKRKVKSSKQAAAAKK

SEQ ID NO: 21039 - DNA, 844 bp, Zea mays subsp. mays
  misc_feature (1)..(844): Ceres Seq. ID no. 12400449
atccgttccaagtatctcccctcttgcgcctcctctcgactcttccgtttagtgcccaccgaaatctttctaccacccacgttccggcatccatggctcgtctgttcgcggcgcgagcccttacgctggcccgcccctcggcggcgccatccgccctccgcttctgcccctcccgcgcgctgtcggacaaggtggacttcatcgagatcgacctctccgaggagtccccttcctcttcatccggaggaggaggcgcgggcgaccccgccacggttcaggcgcagatggggtcgcggcgcctggaggacgccatccatggggtgctcgtgcggcgggcggcgcctgaatggctccccttcgtgccgggggcatcctactgggtcccgccgtttccgcgggcgctcggggtggcggagcttctcagctcggctatgcacatcacgaggggcgccgaggcgatgacggaggaggaggcattgagcttcactaccgtgcgggggtggccatccgcggcgtactttgtggcaggctcctactgaagaggcagctggggacagtgaaggtcttctgatgggttgtagttataacttatagtaatagacagctagggagcccctgcaacaatggatcccctcaagctgtcaagcatcttcggatggtgtgctcacagctggtaaaatgacactggttcaatcttatgtatttgcagaacccggtgcgctagcacctggacatggtgggtgtatggtccacggaacccagccgtggcgcataatgtaatagagtttgtagtttgtactttgtaccatattttccctcttgaataaaggcatgtgttacgctg

SEQ ID NO: 21040 - protein, 178 aa, Zea mays subsp. mays
  misc_feature (1)..(178): Ceres Seq. ID no. 12400450
PFQVSPLLRLLSTLPFSAHRNLSTTHVPASMARLFAARALTLARPSAAPSALRFCPSRALSDKVDFIEIDLSEESPSSSSGGGGAGDPATVQAQMGSRRLEDAIHGVLVRRAAPEWLPFVPGASYWVPPFPRALGVAELLSSAMHITRGAEAMTEEEALSFTTVRGWPSAAYFVAGSY

SEQ ID NO: 21041 - protein, 153 aa, Zea mays subsp. mays
  misc_feature (1)..(153): Ceres Seq. ID no. 12400451
IRSKYLPSCASSRLFRLVPTEIFLPPTFRHPWLVCSRREPLRWPAPRRRHPPSASAPPARCRTRWTSSRSTSPRSPLPLHPEEEARATPPRFRRRWGRGAWRTPSMGCSCGGRRLNGSPSCRGHPTGSRRFRGRSGWRSFSARLCTSRGAPRR

SEQ ID NO: 21042 - protein, 148 aa, Zea mays subsp. mays
  misc_feature (1)..(148): Ceres Seq. ID no. 12400452
MARLFAARALTLARPSAAPSALRFCPSRALSDKVDFIEIDLSEESPSSSSGGGGAGDPATVQAQMGSRRLEDAIHGVLVRRAAPEWLPFVPGASYWVPPFPRALGVAELLSSAMHITRGAEAMTEEEALSFTTVRGWPSAAYFVAGSY

SEQ ID NO: 21043 - DNA, 638 bp, Zea mays subsp. mays
  misc_feature (1)..(638): Ceres Seq. ID no. 12400466
atgtgtggttgtgttcttataacagatgagagtgtggttgctcttgccaacggatgtccgcacctgcgctcgctgggcctctacttctgccagaacatcacggaccgcgccatgtactccctcgcaaacagccgcgtgaagagcaagcgtgggaggtgggatgcagtgaaagacgggctcgcgaacctcaacatcagccagtgcaccgccctgacgcccccggcggtgcaggccgtctgcgactccttcccggcgctgcacacctgccccgagaggcactccctcatcatcagtggctgcctcagcctcacgtcagtccactgcgcctgcgccctccacccacaccgtgccgggagagccctgatggccaaccatgcgtactaataagcatgttgggtggctttgcgctgatagttctcgtgaatggggacgcatgcctgggggtgatggcgtcgtccaggtgtagaggaagctccctgtgtacataaactcgaaacttggcggtgtgataagacactgctgtggtaggactttgtgtgataatcatggagtggcgaatttctggagagtggcatgtactccagtgctacctggacattgaccagaaaaaaaatgtggtatctagtggccttctgtgt

SEQ ID NO: 21044 - protein, 144 aa, Zea mays subsp. mays
  misc_feature (1)..(144): Ceres Seq. ID no. 12400467
MSAPALAGPLLLPEHHGPRHVLPRKQPREEQAWEVGCSERRAREPQHQPVHRPDAPGGAGRLRLLPGAAHLPREALPHHQWLPQPHVSPLRLRPPPTPCRESPDGQPCVLISMLGGFALIVLVNGDACLGVMASSRCRGSSLCT

SEQ ID NO: 21045 - protein, 127 aa, Zea mays subsp. mays
  misc_feature (1)..(127): Ceres Seq. ID no. 12400468
MCGCVLITDESVVALANGCPHLRSLGLYFCQNITDRAMYSLANSRVKSKRGRWDAVKDGLANLNISQCTALTPPAVQAVCDSFPALHTCPERHSLIISGCLSLTSVHCACALHPHRAGRALMANHAY

SEQ ID NO: 21046 - protein, 90 aa, Zea mays subsp. mays
  misc_feature (1)..(90): Ceres Seq. ID no. 12400469
MYSLANSRVKSKRGRWDAVKDGLANLNISQCTALTPPAVQAVCDSFPALHTCPERHSLIISGCLSLTSVHCACALHPHRAGRALMANHAY

SEQ ID NO: 21047 - DNA, 724 bp, Zea mays subsp. mays
  misc_feature (1)..(724): Ceres Seq. ID no. 12400535
aacataccgcctgtccacctgcgctcttcccgttccccaactgcaagtctgcaacatcctctctctctctctacctgccccgttcctcaccaaacttgtcgccctcgtcgacttgtgagtctcttccgccggcgtcgacgagagctgcgctaggtgatctcgactgcttcctcgccccccatggcgacggcgctcaaatcgttcctgaacagccccgtcggccccaagaccacccacttctggggccctgtcgccaactggggcttcgtcatcgcgggtttggttgacatgaacaagcctcctgaaatgatatctggcaatatgacagcagccatgtgtgtgtattctggactctttatgaggtttgcatggatggtacagccccgaaattatttgcttctagcatgccatgcttccaatgaaagcgtccagctctatcagttatctcgctgggctaggtctcaggggtacctggataagaaagagccagaggccaaacagtaaagagggtatccaacactggagtcatttgttcaataaagaaaatatgctgtggaaaacattcattctgttgccaatgcagttttttttgtatgtttgcaaaatatgctgaggaaatttcatgatacctagcgcagttacaagcgtctgcttacttttatgtgcatttgtcaagacacatttgttttttacattgctgccttcctactatttggcactattt

SEQ ID NO: 21048 - protein, 107 aa, Zea mays subsp. mays
  misc_feature (1)..(107): Ceres Seq. ID no. 12400536
MATALKSFLNSPVGPKTTHFWGPVANWGFVIAGLVDMNKPPEMISGNMTAAMCVYSGLFMRFAWMVQPRNYLLLACHASNESVQLYQLSRWARSQGYLDKKEPEAKQ

SEQ ID NO: 21049 - protein, 94 aa, Zea mays subsp. mays
  misc_feature (1)..(94): Ceres Seq. ID no. 12400537
HTACPPALFPFPNCKSATSSLSLYLPRSSPNLSPSSTCESLPPASTRAALGDLDCFLAPHGDGAQIVPEQPRRPQDHPLLGPCRQLGLRHRGFG

SEQ ID NO: 21050 - protein, 71 aa, Zea mays subsp. mays
  misc_feature (1)..(71): Ceres Seq. ID no. 12400538
MNKPPEMISGNMTAAMCVYSGLFMRFAWMVQPRNYLLLACHASNESVQLYQLSRWARSQGYLDKKEPEAKQ

SEQ ID NO: 21051 - DNA, 662 bp, Zea mays subsp. mays
  misc_feature (1)..(662): Ceres Seq. ID no. 12400556
aattctctctcgaccgcggcatggccgccggcctctcattcccccgcgccggggccccgttcatcctcctccgcacctcctgtttctctccgtgggcagctctggtgccccgccgtcgacttctctctgggcctcccactgccggtgatcccccgcccccggcgctcccgccaacttcgaagctcgccgccccgccggttgtgggaacgccggagcccccgctgccgtttagggccgtggaggcggagatccttcgcgatattgaccccgtcgtcctgctcatcaaggatatcctccactccgatagatacggggatggcgaatgtctctgcccaagggacgaaaatgtcgtcgtggagaagctcctctcctaccatccacgcgcgcaggacaaaattgggtgtggacttgacgctataatggttgataggcaccctgagttcagaaagtcaagatgcctcttcgttgttcgaacagacggtgtttggattgatttctcataccagaagtgcctccgtgcatacatccgggaaaagtacccgtctcatgccgacagatttatacgagaacatttcaagcgaacatgaagcaaacccaaaagtaatttgaatacattgtatttttatgagttttggcatagtttatgtacatcattgaccctc

SEQ ID NO: 21052 - protein, 194 aa, Zea mays subsp. mays
  misc_feature (1)..(194): Ceres Seq. ID no. 12400557
FSLDRGMAAGLSFPRAGAPFILLRTSCFSPWAALVPRRRLLSGPPTAGDPPPPALPPTSKLAAPPVVGTPEPPLPFRAVEAEILRDIDPVVLLIKDILHSDRYGDGECLCPRDENVVVEKLLSYHPRAQDKIGCGLDAIMVDRHPEFRKSRCLFVVRTDGVWIDFSYQKCLRAYIREKYPSHADRFIREHFKRT

SEQ ID NO: 21053 - protein, 188 aa, Zea mays subsp. mays
  misc_feature (1)..(188): Ceres Seq. ID no. 12400558
MAAGLSFPRAGAPFILLRTSCFSPWAALVPRRRLLSGPPTAGDPPPPALPPTSKLAAPPVVGTPEPPLPFRAVEAEILRDIDPVVLLIKDILHSDRYGDGECLCPRDENVVVEKLLSYHPRAQDKIGCGLDAIMVDRHPEFRKSRCLFVVRTDGVWIDFSYQKCLRAYIREKYPSHADRFIREHFKRT

SEQ ID NO: 21054 - protein, 139 aa, Zea mays subsp. mays
  misc_feature (1)..(139): Ceres Seq. ID no. 12400559
NSLSTAAWPPASHSPAPGPRSSSSAPPVSLRGQLWCPAVDFSLGLPLPVIPRPRRSRQLRSSPPRRLWERRSPRCRLGPWRRRSFAILTPSSCSSRISSTPIDTGMANVSAQGTKMSSWRSSSPTIHARRTKLGVDLTL

SEQ ID NO: 21055 - DNA, 656 bp, Zea mays subsp. mays
  misc_feature (1)..(656): Ceres Seq. ID no. 12400597
gcagattggcggcagcaaagcaacacgcgcctcgatcctcctcgcccctccggcctctcctcccctccctgcacccgcacctgcggagagcgccgcaagctagctgcagaggagcgagacagtagcaggaggaggacgagaggaagaagagatggcgggctgtgatggagccaagtcgtcggcgtccatggaggaagaggcatgcgcggagaagaagtacggagggatcgcacccaagaagcccttgatatccaaggaccacgagcgcgcctacttcgattctgcggactgggtgctgggcaagcaagccgcgaacagcagcagcagcacgaggaccgcagccgcggtcgagtctctgaagcccaagctgaagagaacgccgcaccaccagctgccgcctcgtaagcccacctgcgcttccagttgagacgcatggccacgcgtcgcagctgctggaggaggagctcggtcagagtcaaggactgaggatgccgacgagctcgagctcggataaatgttttagctggtccggaatcgtagggacgacgacgagccagaaagatccgaatccgagatgccgtctggcttcttggcgagcagcgcctgttattgtgtgccataaagaacggatcaattaattatcaattgtctggccg

SEQ ID NO: 21056 - protein, 91 aa, Zea mays subsp. mays
  misc_feature (1)..(91): Ceres Seq. ID no. 12400598
MAGCDGAKSSASMEEEACAEKKYGGIAPKKPLISKDHERAYFDSADWVLGKQAANSSSSTRTAAAVESLKPKLKRTPHHQLPPRKPTCASS

SEQ ID NO: 21057 - protein, 79 aa, Zea mays subsp. mays
  misc_feature (1)..(79): Ceres Seq. ID no. 12400599
MEEEACAEKKYGGIAPKKPLISKDHERAYFDSADWVLGKQAANSSSSTRTAAAVESLKPKLKRTPHHQLPPRKPTCASS

SEQ ID NO: 21058 - protein, 67 aa, Zea mays subsp. mays
  misc_feature (1)..(67): Ceres Seq. ID no. 12400600
MRGEEVRRDRTQEALDIQGPRARLLRFCGLGAGQASREQQQQHEDRSRGRVSEAQAEENAAPPAAAS

SEQ ID NO: 21059 - DNA, 1095 bp, Zea mays subsp. mays
  misc_feature (1)..(1095): Ceres Seq. ID no. 12400739
ccaacacgagcggttagaaaccctagtcaaaaccctcgccctcccaaaaactactcacgtctcgccgccccgccgtatcaccctttctcggcggccggcctcttctcttcacggactcgcaggtcatcgagatgtcgtcggcggaggcgaaggccgcggcgaaggcggtcccggagtctgtgctgcgcaagcgcaagcgggaggagcagtgggcagcggacaagaaggagaaggccctcgcagacaggaaggaggcgcttgacagccgcaagatcatatttgctcgcgccaagcagtacgcccaggagtacgacgcccaggagaaggagcttgtgcagctcaagcgtgaggctcggttgaagggtgggttctatgtgagccccagaggccaagcttctgtttgtggtccgcatccgtggtatcaatgccatgcaccccaagacccgcaagatcttgcagctcctgcgtttgaggcagatcttcaatggtgtctttctcaaggttaacaaggcaactattaacatgctacggagggtggagccatatgttgcgtatggatacccgaacctgaagagtgttagggaattgatctacaaaagaggttatgggaagctgaacaagcagaggattccgcttagcaacaacaatgtcatcgaggagggccttgggaagcataatatcatctgcatcgaggaccttgttcatgagatcatgacggttggcccacacttcaaagaggccaacaacttcctctggccattcaagctgaaagcgccccttggtggcctcaagaagaagaggaaccactatgtggagggtggcgacgctggcaaccgtgagaactacatcaacgagctcatcaagaggatgaactaggctctcttgtatcctgtgagaatgcattcgatgtcggcatggatatgcaattttgttccatggctgtcatacgtcacgacttcaactaggaaatgggtcctgtttatgtttgcagttgcctctgtaggttttaatacatcaagacataaaccaacacgtgccccaagtgtcactcgctagggctaccaagattgttgcaaaaaagatagcactttttcc

SEQ ID NO: 21060 - protein, 148 aa, Zea mays subsp. mays
  misc_feature (1)..(148): Ceres Seq. ID no. 12400740
MHPKTRKILQLLRLRQIFNGVFLKVNKATINMLRRVEPYVAYGYPNLKSVRELIYKRGYGKLNKQRIPLSNNNVIEEGLGKHNIICIEDLVHEIMTVGPHFKEANNFLWPFKLKAPLGGLKKKRNHYVEGGDAGNRENYINELIKRMN

SEQ ID NO: 21061 - protein, 124 aa, Zea mays subsp. mays
  misc_feature (1)..(124): Ceres Seq. ID no. 12400741
MSSAEAKAAAKAVPESVLRKRKREEQWAADKKEKALADRKEALDSRKIIFARAKQYAQEYDAQEKELVQLKREARLKGGFYVSPRGQASVCGPHPWYQCHAPQDPQDLAAPAFEADLQWCLSQG

SEQ ID NO: 21062 - protein, 119 aa, Zea mays subsp. mays
  misc_feature (1)..(119): Ceres Seq. ID no. 12400742
PTRAVRNPSQNPRPPKNYSRLAAPPYHPFSAAGLFSSRTRRSSRCRRRRRRPRRRRSRSLCCASASGRSSGQRTRRRRPSQTGRRRLTAARSYLLAPSSTPRSTTPRRRSLCSSSVRLG

SEQ ID NO: 21063 - DNA, 1199 bp, Zea mays subsp. mays
  misc_feature (1)..(1199): Ceres Seq. ID no. 12400837
gataaggagacggtactagtaaactgactaactgctgcccactcgccggagaaccatggccacggcggcggcgtgtgtgcgggtggcgtctccgttcacgggcccacctatctggcatcccagacacgtcatctcaacgaggcggggacccaggagggccgggctggccgtcacggcggcggctgccgccggtggatcgccgcgcactgtgctcgtcaccggcgcgggcggccgaacaggccaaattgtgtacaagaagttgaaggagagggaaggacagtttgtgggacgtggcctagtcaggacgggagagagcaaaggcaaaattggaggcggtgacgacgtgtttgtcggcgacatcagagaccccgagagcattgctcctgcgatcgagggcattgacgcgctcatcatcctcaccagcgcggtcccaaagatgaaaccggggtttgatcctagcaaaggggggcgccctgagttttactttgaagaagggagttatcctgagcaggtggattggattggccaaaagaatcaaattgatgctgctaagagcatcggtgcaaagcacatagttttggtgggatccatgggaggaacagacatcaatcacccgctaaacaagttaggaaatgcaaatatactggtgtggaagcgcaaggcagaacagtacctagcagactccggtcttccatatacaattataagagctggcggtttacaagataaagatggtggcttgcgagagttgattgttgggaaggatgatgagatcctgaaaacagaaacaagaactatagccagggccgatgttgcagaagtttgcatacaggcattgctattcgaagagtcaaagtttaaggcatttgatctggcatcaaaaccagaaggtgaagggacgccaactacagactttagggcactttttgcacaagttaatagtcgcttctaaagacataagattgttcttgccaagaagttgagggcattctttcgtaaagcgatatgaaatgtgtgtttagtaaggttagtttcctgtttactaagttcctaatatattacagttgttccatgtagcatccttttttatctcttgctctctagctacttttggctttatttcctgtctagacagcggattctgcataatgctaatgaactttcatatcaaataagattgctcagttatccataatgtt

SEQ ID NO: 21064 - protein, 298 aa, Zea mays subsp. mays
  misc_feature (1)..(298): Ceres Seq. ID no. 12400838
MATAAACVRVASPFTGPPIWHPRHVISTRRGPRRAGLAVTAAAAAGGSPRTVLVTGAGGRTGQIVYKKLKEREGQFVGRGLVRTGESKGKIGGGDDVFVGDIRDPESIAPAIEGIDALIILTSAVPKMKPGFDPSKGGRPEFYFEEGSYPEQVDWIGQKNQIDAAKSIGAKHIVLVGSMGGTDINHPLNKLGNANILVWKRKAEQYLADSGLPYTIIRAGGLQDKDGGLRELIVGKDDEILKTETRTIARADVAEVCIQALLFEESKFKAFDLASKPEGEGTPTTDFRALFAQVNSRF

SEQ ID NO: 21065 - protein, 171 aa, Zea mays subsp. mays
  misc_feature (1)..(171): Ceres Seq. ID no. 12400839
MKPGFDPSKGGRPEFYFEEGSYPEQVDWIGQKNQIDAAKSIGAKHIVLVGSMGGTDINHPLNKLGNANILVWKRKAEQYLADSGLPYTIIRAGGLQDKDGGLRELIVGKDDEILKTETRTIARADVAEVCIQALLFEESKFKAFDLASKPEGEGTPTTDFRALFAQVNSRF

SEQ ID NO: 21066 - DNA, 1159 bp, Zea mays subsp. mays
  misc_feature (1)..(1159): Ceres Seq. ID no. 12400840
atccaggggtcggcatcagcctctctccctcgctctctctgactcgtcgcggcataaacaaacaaaccaaacaaagcaaagcaaaggcaaaaccccacctccaccacacctcgtcgtttgcttttcctcggtgcgggcggtgcggcacaagcccccagaccggttgcctccattactgagctgtgcgtgcgtggtggctgtctgccttgtggcggcgccggtcatggtgatggtggagatggacggtggcgtgggaggaggaggaggaggagggcagacgccggcgccacggcggtggcgcctggcggacgagcggtgtgacctgcgcgccatggagacggactacgtgcggcggtttcaccggcacgagccccgcgaacaccagtgctcctccgccgtcgccaagcacatcaaggcgcccgtccacctcgtctggtctctagtgaggcggtttgatcaaccacagcttttcaagccctttgtgagccggtgtgaaatgaagggcaacattgagattggcagtgtcagggaggttaatgtaaagtctgggctgccagccacaagaagcacggagaggctggaactgttagatgacaatgagcacatactcagcgtcagatttgttggaggtgatcacaggctgcagaactactcgtccatcctcaccgtccaccccgaggtcatcgacggcccgaccggggacgctcgtgatcgagtccttcgtggtggacgtccccgacggcaacaccaaggacgagacctgctacttcgtggaggccctgctcaagtgcaacctcaagtcgctcgcggaggtgtccgagcgacaggtcgtcaaggatcaaacggagccccttgaccggtgatgggggagatacatacatacatgtccgaacgatatgttcggatcactgcattgcattgcttacgatgtgcagagctaatcttcaacggagcccctaggttcctggagaaaagagctttgagggactgctactgctactgctatgccgcgtcgttcaaagttaagtttcctccttgcgattgtgtttgctgtccttttctccggcgttgtacgtcgcacaaggagaaggacaggcagaatatgatgtgctattgtagtattgaaaaatgaaaggaaaaaaagaactgtgaggctctg

SEQ ID NO: 21067 - protein, 284 aa, Zea mays subsp. mays
  misc_feature (1)..(284): Ceres Seq. ID no. 12400841
SRGRHQPLSLALSDSSRHKQTNQTKQSKGKTPPPPHLVVCFSSVRAVRHKPPDRLPPLLSCACVVAVCLVAAPVMVMVEMDGGVGGGGGGGQTPAPRRWRLADERCDLRAMETDYVRRFHRHEPREHQCSSAVAKHIKAPVHLVWSLVRRFDQPQLFKPFVSRCEMKGNIEIGSVREVNVKSGLPATRSTERLELLDDNEHILSVRFVGGDHRLQNYSSILTVHPEVIDGPTGDARDRVLRGGRPRRQHQGRDLLLRGGPAQVQPQVARGGVRATGRQGSNGAP

SEQ ID NO: 21068 - protein, 210 aa, Zea mays subsp. mays
  misc_feature (1)..(210): Ceres Seq. ID no. 12400842
MVMVEMDGGVGGGGGGGQTPAPRRWRLADERCDLRAMETDYVRRFHRHEPREHQCSSAVAKHIKAPVHLVWSLVRRFDQPQLFKPFVSRCEMKGNIEIGSVREVNVKSGLPATRSTERLELLDDNEHILSVRFVGGDHRLQNYSSILTVHPEVIDGPTGDARDRVLRGGRPRRQHQGRDLLLRGGPAQVQPQVARGGVRATGRQGSNGAP

SEQ ID NO: 21069 - protein, 208 aa, Zea mays subsp. mays
  misc_feature (1)..(208): Ceres Seq. ID no. 12400843
MVEMDGGVGGGGGGGQTPAPRRWRLADERCDLRAMETDYVRRFHRHEPREHQCSSAVAKHIKAPVHLVWSLVRRFDQPQLFKPFVSRCEMKGNIEIGSVREVNVKSGLPATRSTERLELLDDNEHILSVRFVGGDHRLQNYSSILTVHPEVIDGPTGDARDRVLRGGRPRRQHQGRDLLLRGGPAQVQPQVARGGVRATGRQGSNGAP

SEQ ID NO: 21070 - DNA, 1124 bp, Zea mays subsp. mays
  misc_feature (1)..(1124): Ceres Seq. ID no. 12400892
aaaaaaacaaattagatagagctcgccgagcaagcaagcaagccaactcggccgtccgaacgaaagcgaagcgcggccaaactcactcgctaaacgctcccgttctcctccgcctgcccccaccggctccccttgtacacgagcgccggagacgccatggcggcggcgcagccgaagccggccaagaggctgggcggcatggcggaggcgctcgccatcgccgccgacctcggattccccgcctctaccacgcaggaagatcagactagctccgacaaaagcgatgatttggtgaaggttttgagggaactgactgtcgtgcagaggaacattgccaacttgcaagtggagctacagggaagaaaggatgataaaaacattgctcatttgactcatgtgagtgagatggaaaagaagtgcgagtctttggccagaatgactgcaattttgaaagatgtaattcagaacaaggatcgtattattgctcggctgcaacagccttattcccttgactgcataccagttgaagctgaataccagaaacaattctcggagctacttctgaaagcagcaagtgactatggggcattgacagcatcagtcggcgatttccagtggagccaaaactttagggaatcaccagctgtctggggggaaatgctgcgaccgattcctgctgcacttgcttcctgcacccggttcttcgaggcaatgtctgcgatgagggaatccttttctactcttcagaaactacgcgttggccattcctctctgtcaataaccccaagtgactccagcgacgattcaaagttcttgacgccacctcagtggagagacggctcgatactcgatagctggaagcaaatggatgacatcaacctggagagcagtggaattgacgccatgaatcagaggaggttgtcttggccctccatcaagagggacccgtaggtcgcaggtcacccattggatttaggttcccatgttacataaataggattccaccttgtgtagttggcattgattctctgtatttttaatccgatcacctgcacccatttggcatgttcgacttgtgagagatggtctataagttccttaaatcaatgtcgtggcaaaatttg

SEQ ID NO: 21071 - protein, 264 aa, Zea mays subsp. mays
  misc_feature (1)..(264): Ceres Seq. ID no. 12400893
MAAAQPKPAKRLGGMAEALAIAADLGFPASTTQEDQTSSDKSDDLVKVLRELTVVQRNIANLQVELQGRKDDKNIAHLTHVSEMEKKCESLARMTAILKDVIQNKDRIIARLQQPYSLDCIPVEAEYQKQFSELLLKAASDYGALTASVGDFQWSQNFRESPAVWGEMLRPIPAALASCTRFFEAMSAMRESFSTLQKLRVGHSSLSITPSDSSDDSKFLTPPQWRDGSILDSWKQMDDINLESSGIDAMNQRRLSWPSIKRDP

SEQ ID NO: 21072 - protein, 250 aa, Zea mays subsp. mays
  misc_feature (1)..(250): Ceres Seq. ID no. 12400894
MAEALAIAADLGFPASTTQEDQTSSDKSDDLVKVLRELTVVQRNIANLQVELQGRKDDKNIAHLTHVSEMEKKCESLARMTAILKDVIQNKDRIIARLQQPYSLDCIPVEAEYQKQFSELLLKAASDYGALTASVGDFQWSQNFRESPAVWGEMLRPIPAALASCTRFFEAMSAMRESFSTLQKLRVGHSSLSITPSDSSDDSKFLTPPQWRDGSILDSWKQMDDINLESSGIDAMNQRRLSWPSIKRDP

SEQ ID NO: 21073 - protein, 181 aa, Zea mays subsp. mays
  misc_feature (1)..(181): Ceres Seq. ID no. 12400895
MEKKCESLARMTAILKDVIQNKDRIIARLQQPYSLDCIPVEAEYQKQFSELLLKAASDYGALTASVGDFQWSQNFRESPAVWGEMLRPIPAALASCTRFFEAMSAMRESFSTLQKLRVGHSSLSITPSDSSDDSKFLTPPQWRDGSILDSWKQMDDINLESSGIDAMNQRRLSWPSIKRDP

SEQ ID NO: 21074 - DNA, 1316 bp, Zea mays subsp. mays
  misc_feature (1)..(1316): Ceres Seq. ID no. 12400906
tctgctctgctcagccagctagccatatatacggcggcattcttcttctcttcttcttccccaataacatatcgagctgcaagctgctctgcttcttttctagcatgggcatgagggtcttgttggtggtcgtgctcatctcgttcgccccccttattaccactaatgtagcagcaggtgtcaacgccacgagatctgctggtaggcagcagaagcagaagcagaagccgctggcgcctgccctcatcgtgttcggcgactccatcgtggaccccggcaacaacaacgacatccacaccatcatcaaggccgacttcccgccctacggcacctacttccagaaccacagagccacgggaaggttctgcaacggcaggataccaaccgacttcatcgcctcccgcctcggcatcaaggagcttctgccgccctacctcacctccgagccgctcgacaagcacgacctcgtcaccggcgtcagcttcgcgtccggcggcacgggcttcgacccgctcacgccgcagctcgcctccgtgatctcgctcccggaccagctcaccatgttccacgactacctgggcaaggtgcgcgacgccgccggggacgccagggtgtcggatatcctgtcccggggcgtcttcgccatctgcgccggcagcgacgacgtggccaacacctacttcaccctgcgagcgcgcagcagctacgaccacgcctcctacgcgcgcctcctggtgcagcacgccaccgccttcgtcgaggacctcatccgcgccggcgcgcgccgcgtcgccttcatcggcatcccgcccatcggctgcgtcccgtcgcagcgcaccatgtccggcggtctcgaccggggctgctcgcagggccacaacgagatcgccgtcgcatacaacgccgggatggtgcagcagctggcggcgctgcgggccaagtaccccgacacgctgctcgtcttcatggacatctacggcttcctctacgacatgatgatgcacccgcgcagctacggcttcacgcagtccaccagaggatgctgcggcacgggcctcctcgaggtctccgtcctctgcaacggcgtcacctccgccgtctgccaagacgtcggcgactacctcttctgggacagctaccacccaacggagaaggcgtacaagatcctcgccgacttcgtcttcgacaactacgtcaagctcatcctcgtctagcttaccattattttcatttcatgagatggatttgatctgctggattatgcattaattgtttgctgctgtatttacatttgcttgtctgattaattgtttgct

SEQ ID NO: 21075 - protein, 403 aa, Zea mays subsp. mays
  misc_feature (1)..(403): Ceres Seq. ID no. 12400907
CSAQPASHIYGGILLLFFFPNNISSCKLLCFFSSMGMRVLLVVVLISFAPLITTNVAAGVNATRSAGRQQKQKQKPLAPALIVFGDSIVDPGNNNDIHTIIKADFPPYGTYFQNHRATGRFCNGRIPTDFIASRLGIKELLPPYLTSEPLDKHDLVTGVSFASGGTGFDPLTPQLASVISLPDQLTMFHDYLGKVRDAAGDARVSDILSRGVFAICAGSDDVANTYFTLRARSSYDHASYARLLVQHATAFVEDLIRAGARRVAFIGIPPIGCVPSQRTMSGGLDRGCSQGHNEIAVAYNAGMVQQLAALRAKYPDTLLVFMDIYGFLYDMMMHPRSYGFTQSTRGCCGTGLLEVSVLCNGVTSAVCQDVGDYLFWDSYHPTEKAYKILADFVFDNYVKLILV

SEQ ID NO: 21076 - protein, 369 aa, Zea mays subsp. mays
  misc_feature (1)..(369): Ceres Seq. ID no. 12400908
MGMRVLLVVVLISFAPLITTNVAAGVNATRSAGRQQKQKQKPLAPALIVFGDSIVDPGNNNDIHTIIKADFPPYGTYFQNHRATGRFCNGRIPTDFIASRLGIKELLPPYLTSEPLDKHDLVTGVSFASGGTGFDPLTPQLASVISLPDQLTMFHDYLGKVRDAAGDARVSDILSRGVFAICAGSDDVANTYFTLRARSSYDHASYARLLVQHATAFVEDLIRAGARRVAFIGIPPIGCVPSQRTMSGGLDRGCSQGHNEIAVAYNAGMVQQLAALRAKYPDTLLVFMDIYGFLYDMMMHPRSYGFTQSTRGCCGTGLLEVSVLCNGVTSAVCQDVGDYLFWDSYHPTEKAYKILADFVFDNYVKLILV

SEQ ID NO: 21077 - protein, 367 aa, Zea mays subsp. mays
  misc_feature (1)..(367): Ceres Seq. ID no. 12400909
MRVLLVVVLISFAPLITTNVAAGVNATRSAGRQQKQKQKPLAPALIVFGDSIVDPGNNNDIHTIIKADFPPYGTYFQNHRATGRFCNGRIPTDFIASRLGIKELLPPYLTSEPLDKHDLVTGVSFASGGTGFDPLTPQLASVISLPDQLTMFHDYLGKVRDAAGDARVSDILSRGVFAICAGSDDVANTYFTLRARSSYDHASYARLLVQHATAFVEDLIRAGARRVAFIGIPPIGCVPSQRTMSGGLDRGCSQGHNEIAVAYNAGMVQQLAALRAKYPDTLLVFMDIYGFLYDMMMHPRSYGFTQSTRGCCGTGLLEVSVLCNGVTSAVCQDVGDYLFWDSYHPTEKAYKILADFVFDNYVKLILV

SEQ ID NO: 21078 - DNA, 1336 bp, Zea mays subsp. mays
  misc_feature (1)..(1336): Ceres Seq. ID no. 12400914
atatcctataacaatttccccaacccacatggccaacgccgacgctggcgacggcgacgaggtcatcctcgacgctcccggcttcatacgagtgtacaggagcggccgcgtcgagcgctttctgccggtcgacttcgccccgccctccactgacgccgccaccggcgtttcttcaaaggacgtcgccatcctcccagacgcctgcctattggttcgcatttacctcccagcgcccccctcttccggaagttacagcggcaagctccccgtcctggtgttcttccacggcggcgggttctgcctcggttcggcgtttgatgcggcggtgcactcccacgccaaccggttagccgcggctgccggcgcaatcatcgtgtcggtggaataccgcctcgcgccagagcatccggtccccgctctctaccgggacgcgtggacggcgctccagtgggtggccgcgcactccgtgggccgggggcaggaaccctggctgactgcccacgcggacctcgggcgcgtccacgtcggtggagagagcgcgggcgcgaacattgcccaccacgccgcgatgcgcgctggcagagaggagctgggccacggcgtgaagctcagctcgctcgtgatgatccatccctacttcctgggaggcgagagctccgagacagacgacatgggcgtagcgttgctccgcgagctcgtccggctgtggccggtggtatgcccgggcacgagcgggtgcgatgacgacccgttgatcaatccgatggcagagggtgcccccaatctcgctagcttggggtgccgacgcgtagtggtgtgcgtcgggggaaaggacccgatgagaggcagaggaaggctgtattgtgagaagctgaagagaagtgggtggcgcggggaggtggatgactgggaggcggacggccagggacacggtttccatctctcgtgccccatgagcgcagaggcggaggcgcaagtccgggtcatcgctgagtttctgacctacggatgacatatctgttttcccactccttcacgcggccatggtgcattgttctcgaatctgatatacattttttgtttcgagttttggttgaggacttgcatgtttatattttatatttttatctactatttcataagcttaataaatgtttggctatgggttccagattctcaattttcatcagaagaaggggttactgagctgtattagacttacctttgggttaatatctattggtgcaagacccagattggctatacctttgtaatcgtatttgctttgcctggctaaagtttatgacaaaattgtcgcattgctgacattctctct

SEQ ID NO: 21079 - protein, 336 aa, Zea mays subsp. mays
  misc_feature (1)..(336): Ceres Seq. ID no. 12400915
YPITISPTHMANADAGDGDEVILDAPGFIRVYRSGRVERFLPVDFAPPSTDAATGVSSKDVAILPDACLLVRIYLPAPPSSGSYSGKLPVLVFFHGGGFCLGSAFDAAVHSHANRLAAAAGAIIVSVEYRLAPEHPVPALYRDAWTALQWVAAHSVGRGQEPWLTAHADLGRVHVGGESAGANIAHHAAMRAGREELGHGVKLSSLVMIHPYFLGGESSETDDMGVALLRELVRLWPVVCPGTSGCDDDPLINPMAEGAPNLASLGCRRVVVCVGGKDPMRGRGRLYCEKLKRSGWRGEVDDWEADGQGHGFHLSCPMSAEAEAQVRVIAEFLTYG

SEQ ID NO: 21080 - protein, 327 aa, Zea mays subsp. mays
  misc_feature (1)..(327): Ceres Seq. ID no. 12400916
MANADAGDGDEVILDAPGFIRVYRSGRVERFLPVDFAPPSTDAATGVSSKDVAILPDACLLVRIYLPAPPSSGSYSGKLPVLVFFHGGGFCLGSAFDAAVHSHANRLAAAAGAIIVSVEYRLAPEHPVPALYRDAWTALQWVAAHSVGRGQEPWLTAHADLGRVHVGGESAGANIAHHAAMRAGREELGHGVKLSSLVMIHPYFLGGESSETDDMGVALLRELVRLWPVVCPGTSGCDDDPLINPMAEGAPNLASLGCRRVVVCVGGKDPMRGRGRLYCEKLKRSGWRGEVDDWEADGQGHGFHLSCPMSAEAEAQVRVIAEFLTYG

SEQ ID NO: 21081 - DNA, 1097 bp, Zea mays subsp. mays
  misc_feature (1)..(1097): Ceres Seq. ID no. 12400951
aatttcccattccatcctagggctcgcgagtcgcgtcccccaaagtgaatacagaaacctccagccccaggccaattcctcgaccgcatcgccacccaccccatctccatggctacctccgccctcgctgctctgtccgccaccgcggccgccgccggtaagcgcatcctcctgtcgcgccccgcctcctcctcctccctctccttcgcctcccgccgcctggccgccggggcacccctccgggggttccttggcgagccaatccgggccgtggcgtcgtcggcgtcggcggcccccgcggcggcggccaagaccatcgcggtcggggaccggctccctgacgcgacgctctcctacttcgacacgtcctcccccgacggcgagctgaagacggtgacggtccgcgacctcaccgcggggaagaaggtggtgctcttcgccgtgcccggcgcgttcacgcccacctgcacccagaagcacctcccggggttcgtggccaaggccggggagctccgcgccaagggcgtcgacaccgtggcctgcgtctccgtcaacgacgccttcgtgatgcgcgcgtggaaggagagtctggggatcggggacgaggtgctgctcctgtcggacggcaacggcgagctggcgcgcgccatgggcgtcgagctcgacctctccgacaagcccgtggggctcggcgtccggtcccgccgctacgcgctgctcgcggaggacggcgtggtcaaggtgatcaacctcgaggagggcggcgcgttcaccaacagcagcgccgaggacatgctcaacgcgctctgaactcgcgacgccatggttggttcgtctcttccggcaagagttggtttcttttccctgaaaataatcgtgacggcaacggtggcttgtgttactgccgccactgttgtgaccggcgctgttactagtgcactgcagagatgcaagtttcttgcgaacatggctttataggtctagcttcatgcaattgttgacgccctctgtttcatgacttgtcatggtatgcaactcttgtctgagaattgatcatctgcatagtaccactactatcacaggcgttctctattatt

SEQ ID NO: 21082 - protein, 233 aa, Zea mays subsp. mays
  misc_feature (1)..(233): Ceres Seq. ID no. 12400952
MATSALAALSATAAAAGKRILLSRPASSSSLSFASRRLAAGAPLRGFLGEPIRAVASSASAAPAAAAKTIAVGDRLPDATLSYFDTSSPDGELKTVTVRDLTAGKKVVLFAVPGAFTPTCTQKHLPGFVAKAGELRAKGVDTVACVSVNDAFVMRAWKESLGIGDEVLLLSDGNGELARAMGVELDLSDKPVGLGVRSRRYALLAEDGVVKVINLEEGGAFTNSSAEDMLNAL

SEQ ID NO: 21083 - protein, 128 aa, Zea mays subsp. mays
  misc_feature (1)..(128): Ceres Seq. ID no. 12400953
ISHSILGLASRVPQSEYRNLQPQANSSTASPPTPSPWLPPPSLLCPPPRPPPVSASSCRAPPPPPPSPSPPAAWPPGHPSGGSLASQSGPWRRRRRRPPRRRPRPSRSGTGSLTRRSPTSTRPPPTAS

SEQ ID NO: 21084 - DNA, 1087 bp, Zea mays subsp. mays
  misc_feature (1)..(1087): Ceres Seq. ID no. 12400968
gcgtcgattgcttgcccagctcgcttcgtcttcgtcttccttctcccccttctcctcgcctccggttaaccgccacagcctggattcgccatctcccgcggcggcgcggcggccgctgctgctgcgtcggcgcgtgagatggatgattgcggcggcggcggcggcaagaggccgttccagctggcgcggtcgctgacgtaccaccagccacccggggcaccggccggcggctgcgtccaggtggcggcggcagcaccagcagcatcagctcgcggacgagccgcgcgcgccccggcgcaggcggtggtgctgtacacgacgtcgctgcgcggggtgcggcgcacgttcgcggactgcgccgcggtgcgcgccatcctgcgcggcttccgcgtggccgttgacgagcgggacgtgtccatggacgcggcgctccggcgggaggtccaggcgctgctggccgccgcgcggccgcgnnttcgcgctcccgcagctgctcatcgtgcgnccgcctcgtcggcggcgcggacgaggtgcggcagctgaacgagaccggccagctccggcgcctcctnnacggcgcggccgggcaggacccggccttcgtntgcgacgcctgtggcggcgtccggttcgtcccgtgcgccggatgcggcggcggccgcaaggtgttcgtcgaggaggagggccgcgtcgttcgctgcgtcgagtgcaacgagaacgggctggtacgctgccttaactgctgctcttgatcgccgacggcggcggcggtcgnnngccgttccattcgtgctgctaatccaancggtagaggttgtggtagatatcaacaaaaggaagaagaanaagagggggctttcggtttcccggcgtggggttcgtgtgtgtccgatccgatcattttgaggatcggatttgctgctagtcggtggacaagaacagattgttcttggctccttgctgcaaaattgccatatggtgatggcgattggagaataagaactgggcttgtttgtatatgcatctgatgtatcaaagattgatactgctgctagttcaactaatgtaaatacttcagtttggtgtc

SEQ ID NO: 21085 - protein, 134 aa, Zea mays subsp. mays
  misc_feature (1)..(134): Ceres Seq. ID no. 12400969
  misc_feature (112)..(112): Xaa is any aa, unknown or other
  misc_feature (113)..(113): Xaa is any aa, unknown or other
  misc_feature (123)..(123): Xaa is any aa, unknown or other
MDDCGGGGGKRPFQLARSLTYHQPPGAPAGGCVQVAAAAPAASARGRAARAPAQAVVLYTTSLRGVRRTFADCAAVRAILRGFRVAVDERDVSMDAALRREVQALLAAARPXXRAPAAAHRAXASSAARTRCGS

SEQ ID NO: 21086 - DNA, 1138 bp, Zea mays subsp. mays
  misc_feature (1)..(1138): Ceres Seq. ID no. 12401000
gcacagcttcaccagctagctgaaactactagccccaacagcccccgcctctactcctcgcttccggcacgtgtcccgtcgcttctgcttgcgagttgcagacggctcgacgacccatcgatcgatcgaccgtgtcttcttcttgccggcggcggagacgagcgagctgctgtcaggtcggctgctagcctgctagctgctgcaggcggcagccatggcgcacgggatcatcgggagccactaccactccatgttggcgtcgcgcgtgggcatggtcgcgcacgtgctgttcctgaccaccgccgtgctcatgctcgtctggctgctgcactaccgcggcggcatcaacatacagtccgaggaccccgagcagattttcaatgttcatccatttgtgatgtcctgggggttcattcttctgattggagaagcaatcctggcatactcgacgatccctgcgcacatagaccaccggacgcagaagatggcgcacatgctgatccacctggtggggctcatcctggccatcttcggcgtgtacgcggcgttcaagttccacgacgcggccgtggcgccggacctgacgagcctccactcgtggctcggcatcgccgccgtcgcgctcttcggcctgcagtggctgttcggattcgtcaccttctggctgcccgccgcgcacgccgacacccgcgccgccgcggcccccgcgcacgtcatggccggcctggccatcttcatgctcgccgtgtgcgccgcgcagaccggcctcgtggagaagagcgccgcggccgcctccgccgccgagctgaagctcatcaacgtcacggggatcttcatcctcctctacgggctcactgtggcgtccgccgtcgcgctgcgcaaggccttcttgtaggcggctgtttgctcggtcggcgctccgcatctcgctggcgcgcgttccgccgttgacgtgacacggttggtgtttccctcgtacacgcgggagatggtttgtgggtggttcgctcgtgtaatgttgtgcatattgcgtgagttttctgcgggctgcggctagtcggctaccacctgttgtatctctattctttccatgtcttcatcttttcttcttaaaaaacacgcacttgagtttgtcttt

SEQ ID NO: 21087 - protein, 316 aa, Zea mays subsp. mays
  misc_feature (1)..(316): Ceres Seq. ID no. 12401001
AQLHQLAETTSPNSPRLYSSLPARVPSLLLASCRRLDDPSIDRPCLLLAGGGDERAAVRSAASLLAAAGGSHGARDHREPLPLHVGVARGHGRARAVPDHRRAHARLAAALPRRHQHTVRGPRADFQCSSICDVLGVHSSDWRSNPGILDDPCAHRPPDAEDGAHADPPGGAHPGHLRRVRGVQVPRRGRGAGPDEPPLVARHRRRRALRPAVAVRIRHLLAARRARRHPRRRGPRARHGRPGHLHARRVRRADRPRGEERRGRLRRRAEAHQRHGDLHPPLRAHCGVRRRAAQGLLVGGCLLGRRSASRWRAFRR

SEQ ID NO: 21088 - protein, 226 aa, Zea mays subsp. mays
  misc_feature (1)..(226): Ceres Seq. ID no. 12401002
MAHGIIGSHYHSMLASRVGMVAHVLFLTTAVLMLVWLLHYRGGINIQSEDPEQIFNVHPFVMSWGFILLIGEAILAYSTIPAHIDHRTQKMAHMLIHLVGLILAIFGVYAAFKFHDAAVAPDLTSLHSWLGIAAVALFGLQWLFGFVTFWLPAAHADTRAAAAPAHVMAGLAIFMLAVCAAQTGLVEKSAAAASAAELKLINVTGIFILLYGLTVASAVALRKAFL

SEQ ID NO: 21089 - protein, 214 aa, Zea mays subsp. mays
  misc_feature (1)..(214): Ceres Seq. ID no. 12401003
MLASRVGMVAHVLFLTTAVLMLVWLLHYRGGINIQSEDPEQIFNVHPFVMSWGFILLIGEAILAYSTIPAHIDHRTQKMAHMLIHLVGLILAIFGVYAAFKFHDAAVAPDLTSLHSWLGIAAVALFGLQWLFGFVTFWLPAAHADTRAAAAPAHVMAGLAIFMLAVCAAQTGLVEKSAAAASAAELKLINVTGIFILLYGLTVASAVALRKAFL

SEQ ID NO: 21090 - DNA, 984 bp, Zea mays subsp. mays
  misc_feature (1)..(984): Ceres Seq. ID no. 12401112
catttgctccaagtcccaaatactagcaggcggcaggcggccaagaccggtgtccctcgacgacctgccgagtgccgaggcaagcaagacgcgaggaggctgtaagcctgccatcagcagcggcgatggcgggcgccgaggtgggagaagacaagtaccgctccttcatccacggcgagggcgagagggacaccgtgtggaggtacggcgccccgcccaactacgacgtggtcaacaagctcttcgaggaggagaggactcaggtgtggcccgagggctcgctggaggagaaggtgcagcggttgctcaagagctgggagatggagctggtgcacaaggtgcggcccgaggaccagaagaccgtcaactcggagaaatactctgccagcaccaacgggatgagcgctctgacccgggccgaggtgatggccatcggcggctacaacaacttcctgcgcaccaagctgcccccggagcaccgcatctacgacccggacagcgagaccgtggagtccgccatggccaccttcaccacggccttcccgcggggcttcgccatcgaggtgctcgacgtctacagcggcccgcccaggatcgccttcaagttccgccactggggctacatggaggggcccttcaagggccacccgccgcacggccagcgggtcgagctcttcggcgtctgcatcttccatgttgacgaagacatgaaggtggacaagtcagagtacttctacgagcgcggcaacttcctcgccggcttcttgagtgcccctgcccctgatggctcaggcggttgccccgtgatgcgcgggaactgaatgggcctgcaatgggacattggaagactaggcattggaacattgggattattagcattagcgatcccgaatccgcttttattacggtttaataattccatcatgtaacatgacacttgcatttgtgtttgaataaacatgtcgttgcttcgacatattagcg

SEQ ID NO: 21091 - protein, 232 aa, Zea mays subsp. mays
  misc_feature (1)..(232): Ceres Seq. ID no. 12401113
ICSKSQILAGGRRPRPVSLDDLPSAEASKTRGGCKPAISSGDGGRRGGRRQVPLLHPRRGREGHRVEVRRPAQLRRGQQALRGGEDSGVARGLAGGEGAAVAQELGDGAGAQGAARGPEDRQLGEILCQHQRDERSDPGRGDGHRRLQQLPAHQAAPGAPHLRPGQRDRGVRHGHLHHGLPAGLRHRGARRLQRPAQDRLQVPPLGLHGGALQGPPAARPAGRALRRLHLPC

SEQ ID NO: 21092 - protein, 231 aa, Zea mays subsp. mays
  misc_feature (1)..(231): Ceres Seq. ID no. 12401114
MAGAEVGEDKYRSFIHGEGERDTVWRYGAPPNYDVVNKLFEEERTQVWPEGSLEEKVQRLLKSWEMELVHKVRPEDQKTVNSEKYSASTNGMSALTRAEVMAIGGYNNFLRTKLPPEHRIYDPDSETVESAMATFTTAFPRGFAIEVLDVYSGPPRIAFKFRHWGYMEGPFKGHPPHGQRVELFGVCIFHVDEDMKVDKSEYFYERGNFLAGFLSAPAPDGSGGCPVMRGN

SEQ ID NO: 21093 - protein, 166 aa, Zea mays subsp. mays
  misc_feature (1)..(166): Ceres Seq. ID no. 12401115
MELVHKVRPEDQKTVNSEKYSASTNGMSALTRAEVMAIGGYNNFLRTKLPPEHRIYDPDSETVESAMATFTTAFPRGFAIEVLDVYSGPPRIAFKFRHWGYMEGPFKGHPPHGQRVELFGVCIFHVDEDMKVDKSEYFYERGNFLAGFLSAPAPDGSGGCPVMRGN

SEQ ID NO: 21094 - DNA, 1086 bp, Zea mays subsp. mays
  misc_feature (1)..(1086): Ceres Seq. ID no. 12401172
atttattttcttcccccactccatcttggagaagaagaacaaggaggagaaggcaaaagaaggccgacgcgctcgccgctgctaccgaaatcggccagacattccccaaaccctacgctcgctcgctcgccggagccctcgttgaaccgagcaggcgggcgaaggaggctcgacgatgttccgcaaccagtacgacaccgacgtgaccacgtggagcccccaggggcggctcttccaggtggagtacgccatggaggccgtcaagcagggctccgcctgcgtggggctccggtcccgcacccacgccgtcctcgccgccgtcaacaagcctgcctccgagctctcctcctaccagcggaaggtgttccgcgtcgccgaccacgccggggtcgcgctcgccggcctcaccgccgacggccgcgtcctctcgcgcttcctccgcaacgagtgcatcaaccactccttcgtctacgaggcgccgctccccgtctccaggctcgcgctcaggctcgccgacaaggcgcaggtttgcacacagcggtcatggaagaggccctacggcgtgggcctcctcgttgccggactggacgagtcaggagcccacctgtactacaactgccccagcgggaactacttcgagtaccaggcgttcgccatcggctcccgctcccaagccgctaagacgttcctggagcgcaggttccagggctacgacgactacaccccggagcagctcgtcagggacgctctctccgccgtgaaggagacgctgcagggcgagaagctgtccggatccaactgcaccgtggccatcgtcggcaggaaggacgacggcaccgtcgagccgttcgaggtgatcggcacggcgagggtccaggaacttatcgactccatggagatggaggtcgccgagcaggcaccgcctccggaggctgctgctgctagctcctccatgcaggaggagggggagaggggctcggatgacgctgctgcacccatggacatctagagggctgggatagggggagactcatatgaaacccgtacactgcattccgagttccaaaagactaagaccacttcttt

SEQ ID NO: 21095 - protein, 277 aa, Zea mays subsp. mays
  misc_feature (1)..(277): Ceres Seq. ID no. 12401173
MFRNQYDTDVTTWSPQGRLFQVEYAMEAVKQGSACVGLRSRTHAVLAAVNKPASELSSYQRKVFRVADHAGVALAGLTADGRVLSRFLRNECINHSFVYEAPLPVSRLALRLADKAQVCTQRSWKRPYGVGLLVAGLDESGAHLYYNCPSGNYFEYQAFAIGSRSQAAKTFLERRFQGYDDYTPEQLVRDALSAVKETLQGEKLSGSNCTVAIVGRKDDGTVEPFEVIGTARVQELIDSMEMEVAEQAPPPEAAAASSSMQEEGERGSDDAAAPMDI

SEQ ID NO: 21096 - protein, 252 aa, Zea mays subsp. mays
  misc_feature (1)..(252): Ceres Seq. ID no. 12401174
MEAVKQGSACVGLRSRTHAVLAAVNKPASELSSYQRKVFRVADHAGVALAGLTADGRVLSRFLRNECINHSFVYEAPLPVSRLALRLADKAQVCTQRSWKRPYGVGLLVAGLDESGAHLYYNCPSGNYFEYQAFAIGSRSQAAKTFLERRFQGYDDYTPEQLVRDALSAVKETLQGEKLSGSNCTVAIVGRKDDGTVEPFEVIGTARVQELIDSMEMEVAEQAPPPEAAAASSSMQEEGERGSDDAAAPMDI

SEQ ID NO: 21097 - protein, 226 aa, Zea mays subsp. mays
  misc_feature (1)..(226): Ceres Seq. ID no. 12401175
IYFLPPLHLGEEEQGGEGKRRPTRSPLLPKSARHSPNPTLARSPEPSLNRAGGRRRLDDVPQPVRHRRDHVEPPGAALPGGVRHGGRQAGLRLRGAPVPHPRRPRRRQQACLRALLLPAEGVPRRRPRRGRARRPHRRRPRPLALPPQRVHQPLLRLRGAAPRLQARAQARRQGAGLHTAVMEEALRRGPPRCRTGRVRSPPVLQLPQRELLRVPGVRHRLPLPSR

SEQ ID NO: 21098 - DNA, 906 bp, Zea mays subsp. mays
  misc_feature (1)..(906): Ceres Seq. ID no. 12401209
aatgatattcagcttagtattcgtatgcccagtggaaatagactggagatcaaactaacaaaacaagatgttttaaggaaagtgaagaatttcgtggatgaaaaccaaggcaatgggcttggctcatatgacctttctctggtttatcctaaaagagttttctctgaacaagatatggaagcaacactatccgagctgggtattcaaaaccgtcatgcaatgattgttgttccacatcggcagtctggtcaggtatcaaggcgtcactcctcggcatcttatgatatgggtgtcaattcaggtgcggatgatgttggtggcaattcaggtgcggggggatactttggttacctgagaaccgtcctgtcttatgtgaatccactctcctacctgaggggaaataccaactcatcaaatacagagctacagtcaaatgaaggcctgcggcagcttagacatggatctggtccatggagtgagccacggcctcttggcaataggggccatgaagtgactgatgcagactctgcaaacacgctgcgaaggcggcctagaccatttggtgccaatatccacactctggggagcgaggatcatggtccgtctgatgaaagaaatgttttctggaacgggaactcgacagagtttggaggcgacgacagaaaataggttgtggcgtggctggcagggcctgggacgacactatcagacagaatcaaagttgggaatagacagctgaaacaaatgcctcgacaggcttattgaggaataagtattgagattatagtgctgaaataatcgctgaattgtgatgtttacatttgtggaaacatacggtcgctggatccgtatactcgttgtatagtacatagccacagatatattaaatccgaactgcttggttcc

SEQ ID NO: 21099 - protein, 222 aa, Zea mays subsp. mays
  misc_feature (1)..(222): Ceres Seq. ID no. 12401210
NDIQLSIRMPSGNRLEIKLTKQDVLRKVKNFVDENQGNGLGSYDLSLVYPKRVFSEQDMEATLSELGIQNRHAMIVVPHRQSGQVSRRHSSASYDMGVNSGADDVGGNSGAGGYFGYLRTVLSYVNPLSYLRGNTNSSNTELQSNEGLRQLRHGSGPWSEPRPLGNRGHEVTDADSANTLRRRPRPFGANIHTLGSEDHGPSDERNVFWNGNSTEFGGDDRK

SEQ ID NO: 21100 - protein, 214 aa, Zea mays subsp. mays
  misc_feature (1)..(214): Ceres Seq. ID no. 12401211
MPSGNRLEIKLTKQDVLRKVKNFVDENQGNGLGSYDLSLVYPKRVFSEQDMEATLSELGIQNRHAMIVVPHRQSGQVSRRHSSASYDMGVNSGADDVGGNSGAGGYFGYLRTVLSYVNPLSYLRGNTNSSNTELQSNEGLRQLRHGSGPWSEPRPLGNRGHEVTDADSANTLRRRPRPFGANIHTLGSEDHGPSDERNVFWNGNSTEFGGDDRK

SEQ ID NO: 21101 - protein, 164 aa, Zea mays subsp. mays
  misc_feature (1)..(164): Ceres Seq. ID no. 12401212
MEATLSELGIQNRHAMIVVPHRQSGQVSRRHSSASYDMGVNSGADDVGGNSGAGGYFGYLRTVLSYVNPLSYLRGNTNSSNTELQSNEGLRQLRHGSGPWSEPRPLGNRGHEVTDADSANTLRRRPRPFGANIHTLGSEDHGPSDERNVFWNGNSTEFGGDDRK

SEQ ID NO: 21102 - DNA, 1033 bp, Zea mays subsp. mays
  misc_feature (1)..(1033): Ceres Seq. ID no. 12401239
gaatgaaggtctgaaaaaaatcacagaactcactcgaacgacggtgccgccgcttgcctcgcctgaccatggccgctgtgccgtcgaggttcctcctcgtcactggcccgccgggcgtggggaagacgacgctggtcatgcgggtgtttgaaaccctcagaggctcccacccgaacctcaacattcgcggattctatacccgagaggtgagagagggcggagaaaggataggattcgaggttgtcacgctagacggtagaactggaccactttcctcatgcaaggtttccagcccggagtctgttagatggcctaccgtcgggaaatacaaagtagacgtagcatccttggaatcattagcagtacctgagctgcaggttaaggaagaaacagatctcttcatcattgacgaagtgggtaaaatggagctgttcagttcagcatttttccctgcggtaatgagagttattgaatccaatataccagtgttggccaccataccgattcctaggcagggccgggacattccaggagttgcgaggttgcggaatcatcctggagcagctgttttcaccttagacactggtaacagagatacgatgagagatactatctgcagtcagttaaggagtttgttgcagaagaggtgatctgctagcctcccttcgtctctgcggccgctgctttgtctgacataacacacatacgataaagagtagaagttttctctcagcatgatctcatattctgcaacagaacatgcggtcgagtcttctggtgcagtacctgaaatacctgttttaaagcttaccgagcagtgaatggcaggcagattactatgttgctgtgctcagatggttagctctggatgaacaataagcatgtcgtccagtttgttctgagttacgtatgtgtggctattcagtcatgtatttgcattcggtgggggcaaggttttattgccacaataactctcgcttgtatggatgcggttagcatgtagtgactctacaacaggtatcacatgatttgc

SEQ ID NO: 21103 - protein, 193 aa, Zea mays subsp. mays
  misc_feature (1)..(193): Ceres Seq. ID no. 12401240
MAAVPSRFLLVTGPPGVGKTTLVMRVFETLRGSHPNLNIRGFYTREVREGGERIGFEVVTLDGRTGPLSSCKVSSPESVRWPTVGKYKVDVASLESLAVPELQVKEETDLFIIDEVGKMELFSSAFFPAVMRVIESNIPVLATIPIPRQGRDIPGVARLRNHPGAAVFTLDTGNRDTMRDTICSQLRSLLQKR

SEQ ID NO: 21104 - protein, 170 aa, Zea mays subsp. mays
  misc_feature (1)..(170): Ceres Seq. ID no. 12401241
MRVFETLRGSHPNLNIRGFYTREVREGGERIGFEVVTLDGRTGPLSSCKVSSPESVRWPTVGKYKVDVASLESLAVPELQVKEETDLFIIDEVGKMELFSSAFFPAVMRVIESNIPVLATIPIPRQGRDIPGVARLRNHPGAAVFTLDTGNRDTMRDTICSQLRSLLQKR

SEQ ID NO: 21105 - DNA, 653 bp, Zea mays subsp. mays
  misc_feature (1)..(653): Ceres Seq. ID no. 12401344
ttatgctgatacagttggagacttgggatatgcatcagagcttggaaactatgcagagtatagtggtgctcctaatgaggaggaggttctgaattattctagagttgttcttgattgtgcaactgctgatcctgatggccgcaagagagcccttctcattggaggtggcatagctaacttcactgatgttgctaccacattcaatggcatcatccgagccttaagggagaaggaatccaagttgaaggcttcaagaatgcacatttatgtccgccgaggtggtccaaattaccaatctggactggctaaaatgcgtaagcttggtgcagaactcggcgttccaattgaggtgtatgggccagaagcgactatgactggaatctgcaaacaagcaattgaatgcatcatggctgcagcgtaatcagagcgtagctctgggtagtttgggatctgcaaacacgcaattgaatgtgtcatggactcagcataaatgagagatggatagtagttgcattatatagttcacacatggtgtttctgttttttgtttcagatatgttgtagcgtgttgtttgaacgaaaccttcacagatcattactgcaaagaaattgctgtgtgttaaaataaattcaaagtctagttttgtgccttt

SEQ ID NO: 21106 - protein, 139 aa, Zea mays subsp. mays
  misc_feature (1)..(139): Ceres Seq. ID no. 12401345
YADTVGDLGYASELGNYAEYSGAPNEEEVLNYSRVVLDCATADPDGRKRALLIGGGIANFTDVATTFNGIIRALREKESKLKASRMHIYVRRGGPNYQSGLAKMRKLGAELGVPIEVYGPEATMTGICKQAIECIMAAA

SEQ ID NO: 21107 - DNA, 1005 bp, Zea mays subsp. mays
  misc_feature (1)..(1005): Ceres Seq. ID no. 12401368
actcactcactcgcatcactgactgactggactgctgctcactccttccttcccctggcagagaatctgcagtgcttgccggccggccctgcagagcgcggggatctgcaggcatcatggtgcaatcaaagaagaagttccgcggcgtcaggcagcgccactggggctcctgggtctccgagatcaggcacccgctgcttaagaggagggtgtggctggctcaccttcgagacggcagaggaggcggcgcgggcgtacgacgaggccgccgtcctcatgagcggccgcaacgccaagaccaacttccccgtgccaaggagcggcaccggggagctgctggcccctgcagtgccggccgcacggggaggcgcgtggtggcggtggcggcggcaccagcctgtcgcagatcctcagcgccaagctccgcaggtgctgcaagacgccgtcgccgtcgctcacctgcctccgcctcgacccggagaagtcccacattggcgtctggcagaagcgcgccggcgcgcgcgccgactccagctgggtcatgaccgtcgagctcaacaaggacgcgccgccgccaccgtcctccggcgaggagccggcgcccagctacggcggcgcggccaccacgtccacgtccacgcccacgtcgtccactatcacggccggctcgcctccacctgagatgatggacgacgaggagagtgttgcgctgcagatgatcgaggagctgctgggatcacatgggatgatgctccaggtccagggtgcagcaggcagcctcgtcatctgaaggaaaccgcatggttcaacaagctattatgatatgatcaggacatcatcatcaggtcactgtcccagatcagaccaagcagttaagattgcatcatatatataatataggtacacctctattactacatcaagcttaggaaaaaaccatatagtaagatgaatcactactgtgtgaagctctgtaattatatatattaaaggcttttacttgtg

SEQ ID NO: 21108 - protein, 226 aa, Zea mays subsp. mays
  misc_feature (1)..(226): Ceres Seq. ID no. 12401369
THSLASLTDWTAAHSFLPLAENLQCLPAGPAERGDLQASWCNQRRSSAASGSATGAPGSPRSGTRCLRGGCGWLTFETAEEAARAYDEAAVLMSGRNAKTNFPVPRSGTGELLAPAVPAARGGAWWRWRRHQPVADPQRQAPQVLQDAVAVAHLPPPRPGEVPHWRLAEARRRARRLQLGHDRRAQQGRAAATVLRRGAGAQLRRRGHHVHVHAHVVHYHGRLAST

SEQ ID NO: 21109 - protein, 142 aa, Zea mays subsp. mays
  misc_feature (1)..(142): Ceres Seq. ID no. 12401370
MVQSKKKFRGVRQRHWGSWVSEIRHPLLKRRVWLAHLRDGRGGGAGVRRGRRPHERPQRQDQLPRAKERHRGAAGPCSAGRTGRRVVAVAAAPACRRSSAPSSAGAARRRRRRSPASASTRRSPTLASGRSAPARAPTPAGS

SEQ ID NO: 21110 - protein, 134 aa, Zea mays subsp. mays
  misc_feature (1)..(134): Ceres Seq. ID no. 12401371
MSGRNAKTNFPVPRSGTGELLAPAVPAARGGAWWRWRRHQPVADPQRQAPQVLQDAVAVAHLPPPRPGEVPHWRLAEARRRARRLQLGHDRRAQQGRAAATVLRRGAGAQLRRRGHHVHVHAHVVHYHGRLAST

SEQ ID NO: 21111 - DNA, 1347 bp, Zea mays subsp. mays
  misc_feature (1)..(1347): Ceres Seq. ID no. 12401406
gggacacagcacaagaacactcctagctgaagatctcgagtgcaacgcaacgttggcgcttggcggccagtagtagcagctaatttagcgtcgctccttcctactagacgagagatcgagaaaccatggccaagctccaagtcactcctggcgccgcgttcaccgagtgcaatgaactcaacttccagggcctgtacatgtaccacacgcccctgggtcccaaggccaaccaagctgcgatcctagagagcaaggccaagatcggcatcggtgccaccgtggttaacaactgggcagtgtatgacgggccagggccaggcgctaagctggtcggccgtgcgcagggcttgcacatcctagccggaaactgggtcaactcattcaccctggtgttcgaggatgaaaggttcagtgggtccacgcttgaagtgaggggcataacggtcgaaactggcgagtgggctgttgttgggggcaccggccagtttgctatggcgaacggcatcatctccaagaagttccacgagcagagaagcgacgggaacgtcatagagcttagtgtccatgctttctgcccactgctcaaagggaaaaggggcggtgctgtgacaaaggttgggccatggggcggaagcggagggtctccaatggagctgacagagacggagacgcccatgcgtctggagagcatcaccgtccgcagcggcgtggccgtcaactccatctcattctcctacgtcgactctgccggccacaagcgctctgctggtccctggggtggttccggtggacagcctgatcaggtccagctcgccgagtctgaggtggtcacacaagtgtccggaacatacggcaccatcgacgacgacgaccgcaccgtgataacctccattaagttcgtcacgaaccttgacaagacctacgggcctttcggagcgtacggggacggcgacgacacctcctttaccgtccccgtgcagccggggagtggcgccatcgtgggcttcttcgcgcgcgttggcggggccggggactacctggacgccattggcgtctacgtgcgccccctctaaaaagctttgttttgtgatgtgaatgaagcagctgcatgcatgctgctctactccacacagagtcgagtccatcaccaccagctgcttgaatgcgtgcgtgcggccggcttccagttgctttatttcgtacctgagtgttgtgttgtggtgtgtttgctcatgtacttcggtacgttgcttggtaaactctggtcagtgttgtgtgtgtttgcctttgtcatgaatttcgacggaataataaagacctcgtgtagaagaggtcagggttttatcg

SEQ ID NO: 21112 - protein, 315 aa, Zea mays subsp. mays
  misc_feature (1)..(315): Ceres Seq. ID no. 12401407
MAKLQVTPGAAFTECNELNFQGLYMYHTPLGPKANQAAILESKAKIGIGATVVNNWAVYDGPGPGAKLVGRAQGLHILAGNWVNSFTLVFEDERFSGSTLEVRGITVETGEWAVVGGTGQFAMANGIISKKFHEQRSDGNVIELSVHAFCPLLKGKRGGAVTKVGPWGGSGGSPMELTETETPMRLESITVRSGVAVNSISFSYVDSAGHKRSAGPWGGSGGQPDQVQLAESEVVTQVSGTYGTIDDDDRTVITSIKFVTNLDKTYGPFGAYGDGDDTSFTVPVQPGSGAIVGFFARVGGAGDYLDAIGVYVRPL

SEQ ID NO: 21113 - protein, 291 aa, Zea mays subsp. mays
  misc_feature (1)..(291): Ceres Seq. ID no. 12401408
MYHTPLGPKANQAAILESKAKIGIGATVVNNWAVYDGPGPGAKLVGRAQGLHILAGNWVNSFTLVFEDERFSGSTLEVRGITVETGEWAVVGGTGQFAMANGIISKKFHEQRSDGNVIELSVHAFCPLLKGKRGGAVTKVGPWGGSGGSPMELTETETPMRLESITVRSGVAVNSISFSYVDSAGHKRSAGPWGGSGGQPDQVQLAESEVVTQVSGTYGTIDDDDRTVITSIKFVTNLDKTYGPFGAYGDGDDTSFTVPVQPGSGAIVGFFARVGGAGDYLDAIGVYVRPL
